United States Patent Application Publication US 2014/0057251 A1 - sequence listing, part 62

SEQ ID NO: 92265 - DNA, 5441 bp, Cannabis sativa
  modified_base (5387)..(5393): a, c, t, g, unknown or other
gtataaattttttttttatatattatttgaaggctgttgtttattcaattgttaatgtgcataactgtagaaatgcaatattttactacatcttcagtatagttttctaataatagtcacatggaaaatttatgaattatccattcaagttatcttgcacgctatgttagatctacgagttctcatatcttctttcttctggtgtttgtaggatgcaatgtcacatatatggaagtcactagtggaagattcaaagaagacaatcgatgaacatttggatgttattattgatgatttgttgattcaatgtggttttagattatggcgttcacgtgaggcgtcctgtattcaaaatgttcatatagatttagttgtattcaaaatgttcatatagatttagttgtattcaaaatgttttctaagtgtctactgtgtttataattgatttgtacataaaaaaaatatattttttctttggtaaaataatttgtttatgctattgagattaataaaattcatctgttcttgtcgttttttataaattttaatttagtagaattagtttctatttgtaatttttagaaagaataaattcttttaaatatgtaatttatataatataatatatttggctcatttattaattttttttttctaataaaaacatgatatagtgacatgctttgagtgttgctataatcaagaaaataattaaaaaataaataaaaacatgatatagtgacacgctatgagtgttgctataatcaagaaaataattaaaaaaaaataaataaatggatacagtgacgcacatgaagtgtcactgattattgtctttccagtcacccccattagtgacgcgcagtgaagtatcactaaaatgttttagagtctcttaacaagtgtcactgaaacccatttttgtagtagtgatatatgtatataacaaataaattattttagtttttgtagagttgagtgggaatggttgaagatcagatttttatccataactaattattatgcaattattgttggatatttccatatattctttttgttggatatgactctttttgtaaagatataatatattataataagattcattttcctaaaactaagaaaaaaaatacattggcatcttaaataaagccctaaaacaatgttgcttcacattgcttatgctacaattacagcataattctttttaatttccttatcataaaaccaaataccaagttatacttaattaatgaattcatgacctaaaatgtggtttccgaaataaaatctataccacgtgatctctcttttatgaataaattttcgatgtgtatttttttaaaattattgtaatttttaacaaattaatcatctaactataaaatataataattaaatctgagtatgtttataataagtattttttttctttcatataattgctaaaataaataaataaataaaataaagcttacatggtattgccaatatgacgatataataatgtgaaaaaccttagctagcattaaacaaataaactattattattatttaagagacaaatatataatgataaaaaaatgaatgaaagacatgttactcaaagtatttttaatattaataatgaataaaaattaattatggtgggtctgtaaagttctggttccttccaaaacacattcattcaaatctaataaattataaaactatcaataaatggtgaaattatccccataattgttgtttcttttaaaatttattttacatatactaaattttaaatattaaataaatcatttaaaaaatattaaataaattcaaattaaacaaataattatatataaaatatatccaccaatataacaaatctaatagatattaattcaataaaaggagagaaattaattaaatcgaaattaaataaccttaaaaacatatggacatacaaatataataatagtaccctaacttttttttaaaaaaaatataacctcgacccataaataaaacaccataaaaattggatcaccaaccattcacatggccacacatatagatttattaatctaaatattttcaaccctttgaattgaaaacatttattatatggacgactttctgtttatttatttatttattattattattaaatacgtgtaataaatttacatgcatagcatagtcacttaaatgcaccataataatttgatctcgacgattggacgtagttgttttgtagtaatagtactacaaaactcgcacgtgcgaatccataaaaacaacaaaaaagtggcacgtgggatagaagctatcaatcgccaccgtatacggataagcacgaggcttaatcgtaaccgtcgctgactgtactaatataaaaaccaccactttttcactttattttatttaattattatttcttcatagtaaactaccgacacatacttctaagttatttaattatctaaattattaatatttttaaataataataattatagggtaatttttatgggaacatttctattatgcttctcataataatatttagtgatataaatataaaatttaactttcaattataaataaatatttaaatttaaattatatttctaaaattttatcattataaaaaaataaaaatttcaatattattactattaaaaatttaattaaatatttatttataagtaaaataaataaaatatctatatctcaaactctctaataataataataaaaatataatcttttctttttttatatttttttaggctaattaaaaattttcacctttaaactttaccatataccaaattatatcctgaatttttctaactattaaaactttttcaaaaactatttaaattattaaattaaaagacttttatctaatttcattcaattttattatttcaatggttgattatgtactaaatcatcaaactttaatatctatcaaatcatacccctcaaattttaacatgtactaaattaaagtacattttaatgaccttaacatgcaatattttagttctaatttattattactttttgtatgtaacattaactatttattctacaaataaaatagtcacggattcaacaaattatttggacccaaatatctacaaaaatatataattacatgtgcaatttagaatttcttataacaattttagggtgttaaaataattcagggaaataatttattatattttaagaatgattaagacaactaatattagctataccattaattaataggactaaataactaaataaattcataatttttgaatgattaatcttttcatttcataatttgggtgaaaaataatcttgattaagccaaaatgatattaattagtacaaaatcagaaaaaaaaatagagacaaaaatatatataattaataataataataataacagcagaatcaatacatctactaaaacacaagtaatttttttttttttgctaaattacaataatatcaataataataacaaataagtccctaaagagtagcgaaatttgcagttttacctagtttcaaacttttctttgcattaatgcccagctcctcttccgatcatctccttgtacctaacaatggagtcaagcctctgcaacttgagctgttgcttaaacctgttaatgaaatcatcagccttagcatcaacctcaccttcttcttcctcatccttctcaaccaccttagcttttccttctctcacagtcgccggccggcgactctcaacgatatcatcttccttaaaatgagaaaaagccgatttagcactggccgatttcttcatcttcttcgaaagcttcggtggagcctcgccgttagagggtttcgtgtcggagttcgaacggacgacgtgagctccgccgttgttcttcagcttgctgtaaacatcgtccatcgattggtcgaactggtctagggtttcggtatcttcttcgtcgaaattagttagggtttttgaatgttcttcgaaatgggtctgttcttggtttggattttggtactgaggtggagataagtaggagtagagattgattgatttgagtttttgaagaacggaaggagatctgaacaaatgggtttgggtttgggtgtgttcttcgtcggaatctgatgggtttttctggaaatgggttgtgggttcttgagatctgtaagtgtaaaagtttatggatttgagtctttgaagcacagagggagatctgacgagttgaggatgaagacgatggtgttgttgctgttggttagggttagggtttggttttggggtgtttaagcttgaggtgatgaaaatggtggcaatcattaagttgaggaacaggaagagaatagtgggtgtgaaccagctgttgattgaagcccagattgtgggtatggaagaaacagagtcttcaaacatggctactactgttgaatggagaagaagaagagttagagagagaaggggaaaagagggttttgacgaagaagaagggaaatcaagaaaatgggttacttcattttcatggagaaagatgaacgaagaagaagaaagagaaagaattggtttggtttgatggactaatggatatttggatgttttatgagaatataatttttatatatatatatatataaaagttttataatattgatacactactatttctttagctattatttaagaaattaaaaaaaaaaaaaaattgtttaaactatattttccgcatgctctttcaaaattttacaaggtattttaaacgcagatgattataaaaaaaattagagtaaaattttttcttagatatcgaaataaattaaagtctatcggttgattattttaagaggtggattgtaaaaatacttatatatttataaataaaaattaaatttaatttagtttataaatattgaagagaaaaattagtaggagcatcatttttagttgaatattgttatttggtattatcggtacttaacaccacttatagctgacgcgattaactatattttgtaaaatttatgtcaattgtctaagcaaccgtttaatcattttatttgtcaagtgtgataaaatttgatagaataaccattttacaacaatataaatagctcggaaactattttacagcaataacaagtatgttataatttaggggtaaaaattataaatagcctaaattatatgggattcgatatgtaaatgtaccaatagtaatataacatgttggaggatattatgttagaattttttatcactcataaccgtgtagtccaatctgttaaataccactaataacttttagcatttctcattatagtcatattagatattctggttgttttttagagggtaaataccattttgnnnnnnntgttttgcaaaagttacaaattggaccctgtgttttgttaaatgacaa

SEQ ID NO: 92266 - DNA, 710 bp, Cannabis sativa
gaaccagactcgggacacacaactagggctaggacctagaatcgcacccggtctcaatcccgaacccaaacttggacctagaactcaggacaagaaccagacttagacctgtgacagggatcaagaccttgactcggaatccagtaaatggggcttggaacaaacccgtagtcggtgtttgaatctgggactcagactaggacccaaacccagactatgacccaaacccgaacccagacctagacccagaacccgaaactagcacttaaacaagaactgccagaccaataccgtgtaacaagactaggaccctgaccaggacccagacccagacctagaaccgaactcggaccaagcccaagaccccaactgagaccaaaactcgggcttagacatggtcgtgtacccagattggaatcgagcattggattagacctaaatctaggacccaatcccaaacacagactcagacctagatagggatcaaggtacgaacctggactcagacccagaccctgaccaagatcgaaacctgggacctagatcaggacctagatccagacccaaacccaaacctagacccgcgccagggacctgaactaagacctagactgaacccagacctagatcgggatccacacctggacccagacctggacctagacttgaacaaggactcaaaccctgaccaagacccagacccaaaccca

SEQ ID NO: 92267 - DNA, 737 bp, Cannabis sativa
taaaaagagtggaacaagcatcgatttttaccttagaagtggaacatggagctttccagtaattcaattaaaacacttttgtcaattcaagcgtacgtttagaggaagaataacaagttttaaaataaattgcatgacattagattagaacctgttactgagatgtaacaaccatgattgtcttttctaccagctcttactatcatagttcgattcctactctaataattttatgatcattgtttaggagtttatgcaagttttttatatagatttttaagaatgtctctaatctgtgttaccttcataaattagttgtacatattcttgtgatggataactcacttgttgtagtatttgtttgaagagcatgtatgacattatatgaataatatattagttatatccacttagaatctaaacccactattagcggaaaatactaatttaaatttgagaataaaattaaatttagattgaaactaatgaaaagaaatttaaatcaacagaaatataaaataaaatgttaaaaccacaaataaagaaataaaagaatttaacagattaagaaagcaatttaaaactataaccttaataaaaataataactgaattaccaaaataatttttattagttatgaaattacaaaataatataattctcacttaaaagtagatatatatatatataaaaatatattcaatacttttatcatattaattttcaatatatatagt

SEQ ID NO: 92268 - DNA, 524 bp, Cannabis sativa
aaaaaaaaaaaactaattaaaatgcaattcttagggtttttttttttttaacggggtaatgtttgaagattggatttttttgtgaaaaaacaaagagataatgaaaatgttgggaaaaaattgtgcaaaaaaaatcattttttttgtatttggtatgaaaatttttgttgattaattaattttttttctcataatttttctattcttaccaaacatgagtaattatctttacttttttcttttcctaccaaattccaagtttcaaagatagagatttattagaactatatataggctttcaaataaatagtcttcatggtactagcttcttctatataaacatttattatgatcttaattgtttatggacttttttcaatattaaactttttattcaaaatattttaaataatttaatttacaataacaaacttgatttttttttctacggaaacttaagaaattttatgatacattacaaacattaacaatatatataatatatgaaaatttaacgatccacc

SEQ ID NO: 92269 - DNA, 3924 bp, Cannabis sativa
  modified_base (1967)..(1971): a, c, t, g, unknown or other
cattagacacagaaatattacaaccagataagtaccgtgacattctagctacaacatgtgctagacggtttgctgatcgtttaacaaaacagatttttattgaaggcatagaaaacaaaagggaacgacagtcttgagctagattttcgaaaatggaacaaagaggcaaagagctacgaatagcttgaatagagactaggttgtcagattccagaaccacatgttgccaaccgtttcgtttgatccaacttagagcctctttgatacccatgatctcaacaacttctggagtgaaggcaccattagagcagtgagctgtagcgtcaataagggaccctgagttgtttctggcaaccattccataaccatattggttttcactagcaaatatcgcagcatcaacattgaccttgattgtattagtttctggtttagaccatagctcagctccatcatcagaactaccaaaatagatatgagagagagaggtgttatcctgagctttacgccagtgatcaagagcaatgcgggctgaagacataacatttgcaacagtaagaaccttgtctttccacacaattgagtttcttgccttccataaggaccacgcaaccataaccaacgagcagacccgatcagaatcaagagactgaaagaggctatctagccagctggcaaaggagagatcaagagagactccggcaggtaggcctatatggtgccaacaagaagaagcaaaaatgcaagaaagcaggatatgagaggttgtttcgggagcagcttggcagacagggcaaacaggtggaacatcaacatgcttggttctaagatttacacaggtcggcaagctccctgaagcagcacgccaaaggaaattacgaaccttcggtgggatttttagttgccaaaggtttttccaaaaacctgaattgttgctaccagttctgggatctttagaagcttggaggatgcgataagcacttttgacagagaaatgaccagagctttcattagaccaggaccagaagtcagaagaagcagagaagcttaaagggatgcttaaaattaaattcgcatccctttcattaaacatgtctcgaaccaaatcggtatcccatcttctttcatcaattgaaaacaatgagctaacagtatgaccaataagaccaatatgagaagaagtgatgtagggattaccagagtcagggagccacgggtgatgcaggatactagtagaagagccagtaccgatggttctagtaacccctttgcgaagaagatccatagaactccagatgcttcgccagacgaagctaggattacgccccaaccccgcagagagatagtcatcatgaggaaaatagcgggctttatagagtctggagacaagggaatccgggtagcacaacaatctccaaccttgtttagctaacatagccaagttaaaatcatggagaagacgaaagcctaagccaccttcatcttttggacgagaaagacggtcccaattcattcaaattctatcttttaagtttatgttatagttatactttattttatatccaactttacctattattagtttaaaatattagagtgacttcagacaacgtatgattaattttaatatcaagtgctattatattgtaggggtgtacgttggtcgatttattgtacattttattcaaccaaatctaaagatcgggttacaaaaatttaagtgcaacccgcccaattaagaaaaaagaaaaagtaacccgcctaatgaaattggccggttggtcgggttaacccgtccaaactgaccactaataactttttaattttttttatttttacattcaattattttattttagttgattgtaataatgaaacaactatatatagattgaattcaaagtaagaatcaactactagaaaaaaaaaacatattaatttgaactttatattttttaaatagtcannnnnattatatgatatataaatatataataaaaacatataaatatatagaaaaaaaaaaccctcttaatcgggttggtcgggttgattggatgggttgagattattttcaacccgcctaatataaaaattggacgggttatattttttgaaaaatgcacattttttgatcttaaaatttaaaataaatcaagtttatattaatattttcataaaattgatgagatatattttttgaaaatatttaatttgaatttaatttattgttattatgtaggaattaaagtgtgttgttgaaaaaaaatgaaagcaagtagtaaaattgtaaaaaaggaaagaagaagcccaaaaaggagcagcccaggcccaagcctctctctctagcagcccagttagtcgtgggccaccactgcctcgtcagcgccaaatggtgcctccacattcgtttccaaagcccagtcagcgcctacctggcgcactcactctctccaccatgcgtgccacatggcaagctgccattggtccgcctgcttcctccatttccttcagcctcgccttccttcccctgtcacaccgcgccaaggcagcccatgcttgtacaacatggagcaaactaaacaacaaagtataatgataatttaacttttcaaagccaatatcaaatcaatttatacaacataataataataaaaatatatataattttgataataataatattgatgtgaactatcaattgtcaattattattattattatttcttttgtaattcttaatttattttgttttttgcatttaagtccttgagactctataaattagagctcattttagtttgttgaagtataatttttggagtgtaatttttggagtagaaaaactatagcaaaatttcctctcattttttttctcatatttctttctagaatttttatgggaatgatgagcataatggcctaatcttccttggaaggttaggaatgattccatatgcaaaatgatattattttgtatatttgattcacatgtaatatttatttgagtaatgcaaatttttattctatttttatttttatgttcttctttcatctatactactattatatactaaatatatatagacttagtcatgctctttctatagtaatagtagtattgcacatttctatcttttatgttcatttttatttactttttgttaaatgatatataggtttagtcatgctttccctatgtgtttaaaaattaacaaaagtaatattaatattcatttccttcactatcaccaccatttccatctctatctttttgtcattatttttactaaaaatatgtacaaaagtgtttgcaaattcaagaaagagatccatgttcattactccttggtagaatctaggcatttaatcatcatcatttttcttgggccccatgcgcattaaagggtcctcatgtcataactctgtcactagttgggtttccctgcagcaaacatgctttctgtaagcgcgtatgccccacgggtttgtgggatacgcaacacacgagcacgaccaactgccccctcaaaggtttttagacctctcaaccgacatgtgctaaagagaagcttccgcattctcaaagtttacccatgtgtcccaaagtatgctgtaacaatcggaaaggagactgcaagcttccaccactcaagagtcctggaagttttgggagtaattgttatctatgttttcggatgaagggcacatggcaaaaaatagaaggaaacaatccaggtgattaccaattaagtgtcattaatcacggaaggtcctagaaagattatactggcctgggaatctaatctagaagagacacaaagatttaccacaaagaaaacaactagggttgttcatccaatccaatccgcagttttttggtcaaacaacatccaatccgtactaagtgcggattttattttt

SEQ ID NO: 92270 - DNA, 514 bp, Cannabis sativa
gggcataaaacccaacaatttccctccaaaacagtgtatcttccttcccagcaagtggtcggatgcgtaagatagcttcagcaacttccatcgaaaaacacctagtaatgaggttctcattccacctttgtgtcccaggtatgaaaaggtctgacatagacgaaaaagcatgagtgacattataggaaaaggcattgcgaaccttcaaaggattgatccccgtaacccaaggcctagaccaaatgtcaattttgccatttcccaccagaaatctagcattttccacacacaaatcacgggtactcagaatgccccgccaaactctcgaatccgattgttttccttgaacacaccagaagtcttgaatagagcagtactttgtagatagaatttgaacccatggtgtagtacttctctctccatccagcatctgccatgccaactttgccaataacgcgaagttcatgtctttaaatcttctgaagccaagacctccattcctcttaggttgaca

SEQ ID NO: 92271 - DNA, 767 bp, Cannabis sativa
tgtttgggagaatgattctgctcacgtgcaaggtagtttaacttatatttatttgtaccatggcatgctttacattatatttgcctttaattttcttgtcttgtttagattcagccatgtctgaaaaggtgctccaagctctgaagaaaaggaccagtgacagttcgcgcctgactcccccgaccaaacaatctagaggtgatgtggttccgtccaaggagaagggcctagttgaaatagtgatcgacctctccaaggaggtgatgcctgctggtctgaccaaggcctcctctaccgttgtggtgctgagctctgaagccaagaaaggcaaggaaatgctccaatactaccttgatcagtcactcccaaaagtgagcaatgagttgtccgaggcagacaatgagttgtccttggagctgatgatgggcgggtcttgaaggaagcagctcgcgtaagtattttcttatttatttttatcctgtctttttaccaatgcaagctttaacttttttttttccgtgcaggtcaatctaaagatggcctacgcctactcctgagccaaatccacggtcgcaaagaatcttaccatcaccaacaatctgtagagggaggtggatgccgccaacaagagggtcatggacgtgaaaaataagctgggagaggtgaacaagaaacttcttgctgccaacagtcgggtcgaggagctgaacaaagagatccaagagataccatcaaccgcccacctcgaggcagataatgacgcctta

SEQ ID NO: 92272 - DNA, 580 bp, Cannabis sativa
ggttctattggtcactgcgtcactgctaaagaacacatttcatctatcttcaatggtcttccctctgagtatgatacatttatcatctctgctaattcccacaatcacccgtatacagtagctaaaaatgaatctttccttctatctcaagaacattgcatgggtagttattatcactatcttgattcagctaatattgatatgaattgcaatcctcgcaatagatcaccctatccttcatcaaatgattctcgatcaggtatcaattcacaggctatgtcatttggttttggtacttagaatccttatgccattcctccacgaggtggttcaactccatctccatattctcccactgttggtcgaggaagcttttctggctctccctccaattctcccttgactgaatctggatctcatcccatgtgtcaactgtgttctaaacctggtcacttggcttcttgttgctatcaatgtttcaacatagaatttcctagggttggtgctacgaatctatatcatctcattgccaatatagcaacaacgaatacaattcttaactcctcttggtatcctgaat

SEQ ID NO: 92273 - DNA, 1031 bp, Cannabis sativa
tgttcttgtcccaaagccaaatggaacttggagaacttgtatcaacttctcagatcggaacaaggcgtgttcaaaggattgctttccactaccaaggatcgaccagttagtggacccaactacgggacacaagcttatgtcgttcatggatgcatattctggacataaccagactaaaatgcatgtccttgattaagaacatacaagtttcgtaaccaacatgggtctttattgttataaggtcatgccttttggtttaaaaaatgctggggcaacgtatcaacgactagtaaatgaaatgttcgcgagaccgataggaaggaacatggaggtttacgtcgacaatatgttggtgaagtcgataaaaaaacgagatcacacaaaggacctcgcagagtgctttgagattctaaaaaagtacaatatgaaacttaacccgaagaagtgttcctttgaagtttcctcaggaaaatttctaggatgtatagtcaaggcaaggggcattgaagcaaatcctgagaaaattaaggctttgatagaaatgccatcaccaacaaaattgaaggaagtcatagccttaacaggaagaatggcagctcttaacaaactcatctccaaataaactaataatgcctaccttttaatgtattgtgaggcaacaaaaaaatcgagtggacagattagtgtgaggaggcctttaatagcataaagaagcatttgtcaacacccctagttttcgcaaaacccataactggagaaactttactcctttacttggctatctcggaaagtgcgattagtgcagcattggtgcgagaagagggaaagcacgaacaacttgtttactatgttagtaaaaggttgctgggggcagaatcaagatacctaccgcttgaaaaacttccactatgtctattttatgcatcttgaaaactaaggccttacttccaggcacatccaattaaggtgttagctgatcaacccctgagataagttttgtcaaaaccagatgcttctgaaagattgataaa

SEQ ID NO: 92274 - DNA, 1381 bp, Cannabis sativa
tttcttttctcctcacgatttcaacttattcttcattgtattttctctctaaaaaatcgtgtgtgatcgagtgtgcttgagtttcagtttttgcaaaaaggaaaaatggtgaatacctaaagaggatcatcgtccaaggcccctggtgcatctaaagtccgaccaccataatcacctttggcttcaatttcgacctccctgccacgtgcgtcagctccgatcgcctctattagttgcaccaccaagaccaaggctcaaaaaaaagtatttcctctctccaatgagaattctatggtgtttccagacatcacctctaatattggagtcgatgcaccaccatctgaagtgatggttccatctcgagtcaaaaatgttgattcttttcctattaaaccctcgatggtggctagggcaaaggctaaatttggattcatcttcatcaaagattgctgggcttctcaaattacctatgaagccaagtcgatcaaagaaaaatgagttggcaccaaaaagaaaattaattttgaacacttcttcatctccattgtcttccccgtctgctggaaagaagaaattacaggctcatcctccatctccatcaccatcttcttttgaatttgagcctaaagaagaagaatctgagtccaaaactgatgagtcttatgaatcatttcctgatcatgttgaatctgcaccagaatctaaagaatcagagtttgaagatgttgttgcccctgttccagaagtagtgtctacccctgccccaatcacttaaccattgtcttcaaagggtaaaggcaagaaaccagtcactgaacctatatcttctccaaggatgaaatgtgtacactttaaaactcattctcctttattttgttacaacgataatgctcgtgacatggttatttatgcacaaagaaaatttcttgttgaaagaaattatattttgagtgatcaccatccatatggtgttctgaatatacttttaagaaagaaaatgggaaagttctttggctaatttttttggctatgtggataggattgttaaagcgttttatgctaatctcaataatgaaattgttgattctaactctaccatgttttgtaaagtgtttgtgagaggtcattggttttctttctctccacaagatgtagcaaagacctagcatcttccttctcttgctattctagatgaagaagagagtgaacctcttgacaaggatgaggttctttccgagattgtgggtcaaaagatggtgtggcctcaaaattctgttatctcggtcaccaatctcacttacatgtatgtcgcgcttcacaagtttgctataacaaattgaaaattgacttctcacactacaaccatctcctttgatatggc

SEQ ID NO: 92275 - DNA, 765 bp, Cannabis sativa
atatggctattaacgattaattatctccaaattaactatggccgaaatattagagatttttacataaaaaaatttctaaagtcaaaatatttactcaaatactcacacacgccattttgcttatagtacattcaatttgtactagtacggatttcatattttggattcaatccaatttgcataccaactcaaatccaattcaatccaattcacaaaagtacaggttgaatcagttattttaaatttgttactttttaatattaaattatttaacatttatttaaaaaatattttttttttcgcataactaataataaaataaaataaattattattgttttatgtctccaacaacaaattaaaataaataaaacaaaaaattaaaaaaattaaatcaagaaaaaaaattacatttataaagaaatgttgaattttgttttaaattatatttttcttgtaaataataataaaatagacatttgatttactatattttgaaatatatttctatcatatgtattaaattttaaattattattttttatattaaaatattaattgtatatataattcattttcaaatatatataatatgtgtatgtcaatcaacattcagtccgcacgagtatagattttagaatattcgcacttgtgcaaattagattggattggatcgtgcgaattggattggattagatcgtacggattagattatattagcaatactatcaactaagtcttcctccctagatctttaaatcagaa

SEQ ID NO: 92276 - DNA, 808 bp, Cannabis sativa
aaatttagagaataggcacttttgattttctatatataaattcaaaaactgtattaattttatgtgtttttatttgtactgaatgttcattaatttttattgtcaggcatattgatatgaattggttagttaaatacttcatggataattttaggctacaccctaacataaattataaaacttttgttgaaatgacaaaaggtaccaagtattctaaagttacttcatggtaattctatagagccagagaaaatgcaaggggagaccttgaagggtttatggcagaataatatgtcatattagaggattgctacaaacaaattttgaagacaaatcaagtaagtacaaccaagatttaaacaaagttaattaatgggaaaatgatttttgaaagatgttacatttttctgcaagcatgcaaagaaggcttttacaaagtatgcatgtcactaacaggctagatggttgcttcctaaaaggatactttaaaggtgtattatttgcaataattgttgtagatgaagggagtttcatatatcccattacttatgcagttgtagagaaggaaatatcaagggatacaagcacactctccatgatgagtgataggaaaaaaagatctttaaaatgttgttgagtctatattcaacagcactggtactagattcaatgctaggcacatgtatcgtaactttaagaaagacttctctggcctattactgaaacaactagtttgggcagctactagagccacaatacttgcccattttaactagaggatgcaagaaattaaggctatcaatgaagg

SEQ ID NO: 92277 - DNA, 962 bp, Cannabis sativa
gaagtataaaatttattatatatatttgttaaaaaaattattgttataaaaataaataaatagggtaatataaaacaaatattagagtatcctattttacttattgtcatcatcgtattttatcgaaatttcaaattttgatataacatatgtttgttatatcaactttattttttatatataatattttaataatattatgagattttttactcaaaaaattaatatatattgtaaaattttaattttataaggattttctaattatttttagttttaaaatatatatcatttgaataaattaatgtaaattttacaagtggttataatatattttttaaaacaatatatatttgtatgaaatctattaattatagtgagaaaataaatagaattgtgtttctaagcaaatttaatttcatatggtatgttatagatattttttaattaaattatttaatttttaagttttgtataatcatttaatctaataatgtaaatgttaataaacttacacatgtaactattgtgggaagtctatgtaacagtgaatcaattaataagcataagaaatgtaatttaaataaaacaaaaatcagtaaacaataaagaacaaggctttaatagcctattaccaacacgtgttttcattttttttgaacaataaacttttcattaaaaaaaaaaattgcagagagacccctaaaatgaagaaatgatatgtaagaatcaaacattgatatatttgaaaattctaaccaattagatgattcatttgatttggtattaatcactcccaaggtatacgcgaatactatattcctgttattaaaaaaaattaaattgatatatactaaaaaaattaaagagtagtccttaatcaatggagaaatgctcaacaaaggaaaatagggtctttacttgttcctacgggttcaagagtggacttagagcattgggtg

SEQ ID NO: 92278 - DNA, 1021 bp, Cannabis sativa
  modified_base (904)..(913): a, c, t, g, unknown or other
ggcctccacctacaaaggctaaccaacacttgccaaagctggtaggaacatgacctgcaagatcctagcaggagcatggccgaccagacctcaacctgcagacattgtatggccggctagcatgcatcgctagcctgcatcctacaggtgcatggtcaacaagcttttgcctagcaggcctttggtgcgcaaccttcattcgtggaaaacaagtcaagttgcgagttgggcctttacaacccacaaaaataaggaaaaatatcagtaacttccccatctacaaaggataatttagtcatttattatttattaattaattatgtaaataatagctttatcttacttatttctaaggggtattagggatgtaggctctactatgtaaagagcattagcctaactctaaaaccctaagtcattaagcctctaagctctcagtcctagctctaaaattttaagtctaaaactcacttctctcttctcttctctctcacacacccaagcatccttctcactagagaattgcctattgattcatacattgtaatcttaagagagctactgcagattccacaacacttgtgatttgagtagtattatctctagtattaatacaaccaaaaaggaaataagtcattacctactacctaaggggaccaaacatctattaaatcatatgtctcatttacttttctattcatattatgtaacatgtgacaagcatcagtattaaatacgactttactgtcggttggccaaatctaaggtcaacatctttaaaaattatagttttcatttttacacatattttcatatttattctataaaataaattatttttattctcatatatttatttagggataagattttgtcctgtgatatactttcacggaatgtattnnnnnnnnnnttagataggtctcggggtacattaaatgggtgtcagtgtacgtttctaccttttaaccctaattacccctagatcaatctcaaccgtcagatcaaataactccctcat

SEQ ID NO: 92279 - DNA, 760 bp, Cannabis sativa
taaaattcttgtgtctttatattgcttcattatatatcgattgctataaatcacttatcgcttactaaatcagactcgttgtcgttggctaaaagcgaggtcaacatcactattttttatccactaacagtgctcaatctcaggtgtctaagcagtctactttccaccctttatctgaaataattgactatagcaggttgtcaccaacatttcgagcaacagtgcttgctatttccagccaccatgaaccagaattttatcatcaagcttgaggtattccagtttgggacaatgctatggatgctgagattgaagcacttaaagccagtgacacatggattgttgtcagtttacctgatgatcaacatgctataagctgcaagtgggtttataaaatcaagctcaatgaagatggttcaattgaaaggtttaaggctcgacttgtagctaaaggatacaaccaacaagaagggattgattataatgaattatttgcacctgtttcaaagttggattttgtgaagctcattcttgccttggctgctatacaaggctggttcttacatcaattacatgttaataatgctttcctacatggggacttgcatgaagatgtgtttatgactctaccagcagggtatagtcctaagggggagctaccacctattgttgtttgcaaattaaagaaatctatatatggtcttaagcaagcatctaggaaatggtttgcaaaattttctacagccttgattgaagaagg

SEQ ID NO: 92280 - DNA, 612 bp, Cannabis sativa
agattatttacttttatttgaattattattgaatttttatatgtatatatgtatatatatatatttgacttttctaatcgttgcaaaacttcgtcgagctcctcttcctttttttactgtctattgaaagcgactccttattatcggtaatatatatttagtttatacatatttttatatataagttgatagtagttgtaaaatttaaaatttaatcaatattaatatttttattattttttaggtatcgagtttttggtgttgattgaagaacgcaaaagtagctagttttattggagaaatgtatcattactaaaactttaaaattatttatttagtggagtttgaatatctttgatattcattcgtagtgaagtaggttctacgatcaattgtactgcggtcgaatgggagtataatttttgtattgttaatgttattttgtttgttttgtgtacgttttatttcttatttttcacatgtttgaaatttttaggaacgtccaattatagttattatgatgtcaaaattttgatagaattatgataaatttgactaaaaatgtataaatattagacgaaaagtattagattagagtaaaaatacataaat

SEQ ID NO: 92281 - DNA, 981 bp, Cannabis sativa
ttttagattatgtgttttacaaaattatcgattggatttcctattttgttaaaaaataaaatagaccttatattttttaaaatggtaaaaaataagacttaattttcgacaattttttctttttaatttaaccaatttgaagataatttctaacacgaacagatacagaaaatacaattagttttgtcataacacttctagattagattattattaaattttattttgacaaaaaatcagctcatgatcatatttgtaccattttagaaaatataaaggtcattttgtcatttaacaaaatagagagtccaattggtaacttttacaaaacacaagatcaaaaatagtatttactcttttttaggggaatcacccatataccatttttaatttttatttttatgatttgggttgctccagtggttgctatgtggattgttatgtagatttgaatggtcattcaggttgggttgctctattgattattatgtggattgctatgtgaatttccataaaaatacgaaaaaaaaattactttaaaatgaaaaaaaaaaaaacgaacttttattattattattttaagattggttaaaaagttaaaacgattttttgacaagttggtttgggtggcttccaagaggttgtgcttctccggccccatatatggtgaggcagcgacttgttgttcggccttaaatattgcagcgaataaaagttgtatgtttgtgatcgtggttagtgattttactatggttatcgacattctgaatgggatgaggtctagttaggagattgataactacacttgtcattgtaaatgaatttcctcctctttcattgttgtatgttttctaaaattatttggacttgtaattttgtgatctataatatggtttggtaggcatatctatgaatatcctccatatctatgaatattttatgtaacgaccttaagtttaatttttgttattaatttaagaa

SEQ ID NO: 92282 - DNA, 537 bp, Cannabis sativa
aaagttttgaaagaagttgtaattaacacttctcacaaaatattatcaattggtcaagtacatgattaaaatttaaatataggaataatttgtagtaaaccttcttaaagaggtgttttagtagacctgtatctgttgcgtcattcaggagagctttttcatttaaaatcttttatgatcatatatgttgtagctattaaggactacctgttaatttttaaaaaattatgaattgtttgcccatgacaaaaataaagtataaataattatttaccacacgtataagaaaaaatagttacgagtgaaataaaatatttgaactgtattttcgattatatacattattcaagaaattttaaaaatttacaagtaactttaaataactataacgtacacgatcataaaaaatataaactaaaaacctcttctgaataccaaaatagataaagatttactgaaataccttttagaaaagtatactatagacttaccggttattatatatcaaaattataccactcttttatatattcacat

SEQ ID NO: 92283 - DNA, 1158 bp, Cannabis sativa
cagccccacaaaattccacaaatcataaaatcgcaacgaacacagagaaaaatagatggaataattaaagaaaaatttaacaaaggcaagtagttttttggtttttggtttttcaatctaaaaaagattttcgaaatactacacagtatatattggagagttttacattgtatcaatttgatacataatctctgtcaattgataatactacacatagaaaagaggctttgcacatacataaaataggcactttcttattatctgctcctatggagctagcacatatagtattaattgttttagatagaagccccataccagagtatttttttataaactccagcgttattattagatcaactacgagttttattgatgaaaaataacaatgcaataaacacaccttccactggtctaagttgcatacttaatattgcttaaacatacgttcctattatgtgctaattaatataatttcattctggtgcttttggactataaataaaatgtctaccagcttatagtgttgatattcaagtgtatactttctatgttttattgtatttagtatacgatgcccacatatatacacataacggaaataaatgaaccggggagaacaagtgactgagagagagagagagagagtttcagagtactaaccggaagtggggaggatggtgggcggtggacggagagagggcgacggacggtggctgcagcggctgggttttggggatgggtctattggtctgctagggtttcgaattgggggatgtgcgtgaaaatgaaagtagagattaacttttccaattgtaaaatttgagttttacaaatgcattaacttttttgcttcagtgcaaaaacgtggcaaatatattaacatcaacttttaaccgaagcaaaagagtttagcttcaattttccactaaagcaaaatgtaaaagataattttttaaattgccacattttacttcggttacactttttgcgtcggggtacaagcccacgctaattggtattttttagcttcaggcataaactgaagcaaaaactctccccttattttttgcctcggtcaacccttacggtgagacgagttaaccgacacaaaaagtgctttttgtagtagtgaactaaagagttgttcatcgagaa

SEQ ID NO: 92284 - DNA, 721 bp, Cannabis sativa
caagacacacgtcgatccatatccggatattgtgtctttcttggccaaacccttgtctcttggaaatcaaaaaaaaaacaagtcgtctctcggtcctcagctgaagccgagtatcatgccatggcaaatgcaacctccgaagtaacttggatcattgctctcctcaaggattttggaatctccctcaaccggcctgcttctctctattgtgacaacacaacagtcatacacattagtgaaaaaccagtctatcatgaacgcactaaacatgtcgagatcgactgtcacttcattcgggaaaaaatccagcaaagcactctcaagttacttcacgtttcatctcaacaaaatgtagctgacatcttcaccaagaccttacttccctcacactttaacaacattgtatccaagatgtgtgtgtctaatatttacactgggtggttagttatgttagttaagagattaatttggttgttatcattgtaactaattcttgattagttagacttactgttttacccttcttgctgagtatataaactcagctttacttgtattgagattgaacattacattttctcaaataacagagtttctttctctatttctctccaaaacctctaaaaggtttctcaatcctcatacgtttgaagtttgaactttgaatcaacgtcaaaatttgaacctgtatagtctatgaaatatgactttgaatattata

SEQ ID NO: 92285 - DNA, 599 bp, Cannabis sativa
taaatattaaaaaattaatttagatcttaaaaaaaatatattttgaatgattaataaaattaaaaaaaaaattaaaactaattaagcgattcaaaataaattaatttttattaagaaaatccatttagatataagaaaggtatattaaaaattcaaattttgtaaaaattgaattttatgggaacaagtttgggactattttttttcttcaaaaaatctagttttgtttaagtaaacttaataattttgtagtttaatttctatttttttttaaaataatttatatttatgttgaatttctaattatttttctttattttttaagatatgtatttgtaaatatagataagcttgattttttcttcacaagatcttagttttatttaaattatttattagatttttaataatttcggtttaattttttaagatatttatttattaataaaataaaatttgaaaatatttttttaagaataatttaagctaagtaaacttgatattttttaacgtaacttaatacttttatccagttttttaaggatttttttactttttcagaattaataaaaaattataattttaaaaattaacttttt

SEQ ID NO: 92286 - DNA, 709 bp, Cannabis sativa
ttttttaattaggtaataatttttaaaatttttaaaatggggtttgagattttgatttttaagaatttttttaatatggttaaaaatatttataagattttaagtattttaaatttaaatttaaatttctttatgtaaagtgtcaatatattttttattttttatttttaatgatacatagttgagtaacaattggtgtttataactgtttggttgggcaatataattgatcatattcatcaattttttttttatgtttaactatatatatatataataatattataaaattaataaaaaaattctcttaatagtatattcagttaaatttatataataaatattataaaagtaatagtatattcagttaaaattaatgtaaaaaactaaaaattatgttacatagacacattttatatagaatagatatatataataataagtgtattgttaaaaaaaatgaagatgactacaaatattaagtataattgatgatgaaaaaaaattacttgaggttcaagaagccaggtatgggagggtgtgtgaagagttctgggatcgaattttaagttgtatattgtaatatatatatatatatatatatatatatatatagtagaagaaagttacgtgcaaggcacatgtatttagttttatgtctctataatttaattgagaaagattcaataaataatcatataatttaaaa

SEQ ID NO: 92287 - DNA, 692 bp, Cannabis sativa
tttatttaggacacaaaatccaacaagctttggggttggcaaccttggattcttccttttctttccaggtcgcacaaaaaccaagacatgcctctttggtttcgttgaggtaatcaaagtttccatctgggttggccttccagaatttatagaagacttccaaggcggccgtctccaagttctccaccttcttctgaagggcttctcgctctacctactcagacttgacactctcttccaaatcggtcttctcttgagttaactgagaaagaagattttggagatgttccctctcgtccttcaaggcattgacttctttggtcagggcatcaacatccacttcaagttgggcataaagggcatgtcctaaatctcctttcgtagctcctcaactcggttgttggcaaccaaaagctacttgttgacctcacccaactttgcccttgtatcatcgacctccttctttgctgtatccacttccttctgcaggttgttggtggtggttatagtcctagaggccatggactttgcttgggaataagtgtaggtcatcttcaagttaaggtgcacggagaaaagttaaaatctacatgggtaaaagaatgaatttacaaaccaaaagagaattacttactcgggttgcctccatgaatagcctgcccaccagcaacttcacagacatggcgtcccct

SEQ ID NO: 92288 - DNA, 606 bp, Cannabis sativa
  modified_base (373)..(382): a, c, t, g, unknown or other
  modified_base (570)..(581): a, c, t, g, unknown or other
gaatttttttgtgtttcctgctctaaattgattgattggttcaaagggacctataggaaccggtcgactggtgggtcccaaagaaaccatgcagaaccaaaattttggtctgggaaccggtctaccggttggggcatttttgggaaccctaatttttcctatttttgcaatatttaggatattgccatgttattcattgatagggaaacttttagtttcaagtttaagtccctaaaaagtgatttagcgtgtcactcaccagttttacgaactatgtgatttagggtcctgtaattcatcgagcacctgttccactcaggttggctggcacacctgaatttggtaactaggtaagattagtataatgatatgnnnnnnnnnntacatgtttagtgtacatgtttattaagcctgttagattacatcgatagcggtatcagtataggttgaattatattggatattgatagatgtatgtttggctcatatactgatcgacgctatcacattagtacggctaaagtatgactagcgtactgagcgttggttgatattgttgggttttatgcnnnnnnnnnnnntccatttcaatgtaatccattttat

SEQ ID NO: 92289 - DNA, 696 bp, Cannabis sativa
cccgttactcgaatcccgcgtcaatatttcgatcactgtcacgggtctcggtctagttctggttcaggtctcaggtcccatttcaaagtttgggttcaggatcgagactggggtacaattttaggtccataccctagttctgtgtcccagtctcgttccacatttttgtctgacttcaggttcgggtcccgagttcaggtttgggtggggttccgtctccagctctgtattcgggtcaaggtctactttggagtctgggtcctggtctggttacgattctggatctaggtccaatttcagttatgattccaagtcccagtcctagttctagtcccggtcaacttccggtttttgttccaattttgggccaaagggtacgggttcgggtcaacttttgggtttgggacttggttcaggttagggtgtgggttcgagtccttgtcagggttcgggtccaaggctaggtcccaaatccaaacacttactacgggttttgtccaagccctgggtccatatccggatcccactttcgggacccagtcttgttccatttctggtgccgggtcctatgttcaagtttgagtctgggtcgggtactaggtcccgttcctagttctatttcccaagtatgtatcctgattctgggtccaggtcccggttatggggtgggtttgggtcacggtctaggttcgggtt

SEQ ID NO: 92290 - DNA, 1547 bp, Cannabis sativa
ggctttgtgtttcttctcccataattcctgattagatcttggcaaatcataatattgtgcgctatgaattttccctgtactaacaccccctgattctgtgccactaactcaggaagaacatgtttcaatctagaacagatcaatttagttgcaactttgtatatgacattgcaacaagcaataggtctgaagtcacttacagtatttgggcatttcacttttggaatgagggtaagcacagtggagttgatctccttcaatatctaccccgagtgcaataaattctggactgcagcacataaatcttcttgaatgagctcccaagaatcctgaaaaaattagcttgagtacccgtccggacctagagctttgattcctggtattgcaaaaacagcagccttgatttcttcacacgagtaatcctggcacaaccaattagcatgttgatcagatacaacagcccccgaatgcaccaattttgttaaaacggtcttctcccttgcattgtattgcccagtagccctttctaatatgccaaaaaagcttctgatatccttatttcttctgttaatctttccccctcctggttctgtattgaaagcactctattttgtcttctccttgctttaatacttgcatgaaataaagttgtgttttcatctccacttttgagccaagtcaccttagctttttgttgaagataagattgataattttttaatgaggcagtataatcttttcgggctgctaattcctcttgcaacaaattctgatttaacgggtcctgctgcactctattttgaatctgatttagcaggtctttagccttctcattagccctttgtatattagagaaagcttgcttattcaactcccttaatacccctttcaatcttttgagtttagtgaccacttggaacattttgtgcaccgtagtttgttgattcctggaggctgctactcctgtagtaaagtccggatgagtgttccacattttgaagtatcgaaatggtttcttgccactgggagccatatcatagaaagacataacaactggtgtgtgatccatcaactcttcattcataaaattcacctcagcattagggaacatgtccatccaactctgatttgccatggccctatcaattttcaaaaaaattctatcatctccttgctgcttattgctccaagtgtaaaagttgccacaagacttcacatcctccagaaggcaattggaaacatagtgaataaagtcctgggaaggacgatatttgactctattccctattctttcttccttggctagaatatcattaaaatctcccatgactaaccaggaatcattttgagcaacctgcatcagctctttccacagttcattccttccctcttcgtcattataagcatacacaacacttaagacaaacttatagttcccatcaattgtttcaaattccacatgcattagttgacttgaacactttaaaatacttacattatagctacttggattccatgcaataacaattctgccccctttgtgccat

SEQ ID NO: 92291 - DNA, 1500 bp, Cannabis sativa
agggagataggccgcataccactcatctgggtgggacttttcttcttcggtatcaagactatatgagtatcattaagaccatccggtatcaccccagtatcaaagaaagctcgaacaaattcaatcacgtcgtggcccacaatatcccaatgtttctggtagaaacccggtgtcattccatctggccctggagatttgtcgggatgcatttgaaacaaagcatgtctaacttcctcttccgaaataggcatcaacaagtcttcattttgttcttgcgtgacaacaggacgaactctactcagaattgtaccaatgtctatattagacgtttgaaacagatttcggaaataatctatgataaccatatccaatcccgagtcccaatcaacccaacgaccaccatcatctttgagttgagaaatactattattccgcttccttgaacttgccacagaatggaaatatttagtatttttgtctcccgagttgagccagtattgcttagatcgttgtttccaaaacgcttccctttgagctaaggcttcggtgagattgtctttcccttcttggtgttgttttagtgacatcggatctttgccccactttgagtttcgaatctgcctcttacaatgatcaattctcttccgaaagttaccagtaatctctctaccccactttcccaaaacctctccacatctgagaactttttcttgaatactagtcaaacccgatccctcccaacaaccttccaccaattgcttgcatagaggctcacggagccatgcattttcaaaacgaaaggaaataaaagaataagcaggggacacacctttaagaattaaaaggataggacaatggtcagaggtggagatctctaagttgtgaagaatcgcttgagggaacgttgatatccattcgtgagacaccaaggctttatcaagacgttcttcaatccagttagcgctattccgacctttctcccaagtaaaaggatatcccacaagaggtaaatcgatcaagttacaatctgccatagcttcaagaaagccttcaatgagacgatccggatatttccttcctcctcgtttttcagattgagagcccaagttattccaatcccccataaggcaccacggcaaggtactgtcgtttttaatggaacgaaggagatcccaagttctgaatcggaactcacggtttggttcaccgtaaatccccgtgaaacgccattgaacactaagttgagcttgaatagttgcatcaatatggttaaatgagtacccctgtataaccacattaaacgtttccttccaaaaaagagctaggccaccactatgccctcgagcctcgaccacaaaacaattatcaaagcccagttggactctaataaattccatactatttttattacacaaagtttcacaaagaaataacaaattgggcttcttttggaacacaaggtccgctaagaattgtttggcccgcgggttcccaagccca

SEQ ID NO: 92292 - DNA, 1146 bp, Cannabis sativa
gctaccaacaagaacagaatatgcaacaaagatggcaaaatatgtcattgaacaaactcaaaaatcaatggaggaaagctccgaaccaaattaaataatttcaaatcttcatgttgctgaaatacacgttgactaggtgtttgcaaacaaggatactctaaaacaagcaatcaacctacactcaataatatacaatcaacctttcaaagtaaagaaatcatcaaaacttgactataaactagtctgccttgataataactgcaactggacttttttagcatcaaagtaagactgagatgtttatcataagaaaaataaaacatactcatacatgttcattggacattacttttggagaccatcctcaagctacaagcaacctagttggaaatgtaataaaaacaagtttgtaaacccgaaaagaggttacacaccaactgaaaattgtggatgatatgacagacgactacaatgtctcaatatcttacgaaaaagcatgaagagctagagaaaaaacaattgtggatgctcgtcgctacctgcaagaattatatagtgagataccatcagttttatacatgatgcaaatattaaatttaggtaataagatacttcatctacatagagaaataaatcagaaaattaatatgaataaatatactaattggctacctatatattttaattagataataaattaattggctacttttgcaacatgaacaataactgacctagtgaataatcacgtcgctttcattgagtgtattcagaattaacagcaccagtaactaagaattggggaggaggaacacctgtaaacaagacaacaagacgtaatcaagatcatgtccaatcacaatgggcacaacttgagatttccacgcaagaaaattcgtgcaatccaatttgagagtgagagaagtagtaagaaaactagagaaaggagaccaattcgatgaaggagcaggcagagcaacggtgatcgaagcaagtggagtaggatcggtttggacactagaggtgtcaacaatggaggccatcgaagacgcttagtcaatgacttctgatataatgtaaaagctttagcaatggcagtagaggtacacaccagtaaaagtacaaaccagagagaaagaacataac

SEQ ID NO: 92293 - DNA, 824 bp, Cannabis sativa
atgcagtggcattaagcttatgcgtttaacgaggcatcaagcttttcttccatgtacttctagatgttgaaactcgatttaactgactagatcaaaatattgattgtcctcccaaataagcctaaaagagaattttctgtattcaagcatgttaggcgacgtattgataagaggactatcgtatctttaccaatgcgggaaaagcttaaggcagagtgatacatacggagcaattataataaagtggagaagtagtaagatatttttattattaaataaatataactagatatataataaacagattaaatattaaaatacgatagtttaggaatattaatattttaaaggtcctaagggtatcaaagtgggtactttttacaaacgtatgctaccaagatcattaattgttcaaaacaaaactcaccaagtgtgaattttaacaaaatacaagatattaaaaaagtggttaccgtattatgtaataattgtatatatctgatgactgtagcttgtttaattattttgttatataattttcttatatccctttcatggaataagtaagccatgttatatagcactagaaatttgatctaatcatacattatctcttaatttgatctaatttaattagtaattagatttgaaatataacactatctcatcattaataaaatgtgtacatctttctctttaaactcactagggtttcgctctagtagtttttaccatctgcttgattttttttttgcctgaccaaggctcgtaagccatttctcggtcctacgacgtggctctagtcgggtcttgttaactcccac

SEQ ID NO: 92294 - DNA, 540 bp, Cannabis sativa
  modified_base (55)..(69): a, c, t, g, unknown or other
  modified_base (210)..(212): a, c, t, g, unknown or other
  modified_base (370)..(383): a, c, t, g, unknown or other
atcttggcttgattgtgaagaaatagtgttttagagtttatttgttaattaagannnnnnnnnnnnnnnaattaataaatattataaatgacaattttatttccgaagttttagccccgattagaaaaggaccagaaaaactttctagtattaaatatatagtttatgcatttatagggttgaaagtgcaaaaagtggtatttgtgaaannnagataaaatagttgagaaaaatgacaaagcccaaactaatgcagggcccatcatatggctggccattaggtggctttttcactctatttttatcaattttttattcctaataattcaaccctaatcctattggagaatagtataaaaggaaggctatnnnnnnnnnnnnnnactaatgcctccaaagctaaaaatttagtttctctctaggttcatgagacctcttctatattcttcttcttctatttttgaaatactatagcctctcttcacaaacaatttcaagccttagtgattgagtgcatgctcacacatatcaagtaagtcc

SEQ ID NO: 92295 - DNA, 507 bp, Cannabis sativa
taaagttatggtcaccaattttttatcaccttaaacaaatatggtatattacgtgaaaaaaaatatgaaatatcactatattattttgagtaagtttatagtacactcttttaaaaaattgtttcgataaattttttatctgtttcgacgtttataagagttttttaatctattttttatttttttcatgatcatatattttgtagctatatagaattacttgtaatttttttttttaaaaaaatgaataatttacagtactaaaaataaagttataatattttgttatacgtacgataattttttcttataagcatggtaaagaactgtttgaaaataggtacaatatatccaattataaaaaagtttaacttaaaaaaaaatttaaatgccgaaacaactaattaaccagtaacttaaataatattttggtaatatattttgaagaactatatactatattttttgaaaaactgtttaatattattttattacatctttttttgc

SEQ ID NO: 92296 - DNA, 1664 bp, Cannabis sativa
cgtccaaagatgcaccagcaaccagcaagtgtcatcaattataaaccagtcaatagtcaaagaattgtaactcattgaagaatttgcagcaaacatcacaaatttgagaaggagcaagaccaagtagagcagcatgaaactctcaagtttctaaatacatatacatacatattgtataattataattataatcacatacaccacaaacattgtattcacaatttaaaagtattgtcacacacaggagagatgcacgccatccaagaaccacatgtctgtcaatacagaattctcaaccatttaacttaaaagtactctcaacatatgtagtgagtcccctaacaccaattctttcacccatattttcaagcctcttattcctggtatcatacgaataccaatcatctgacccagtgcaagaaatcaaaaggttcccattgctcaagagatcttttggaatacacctagaatgggaaccaaacctatttggaagaagactctgtaaattgactgaaaaatgtttgaaccaagagtccgagtcaccatatttcttcataacccaaatgtcaactacatggacttcattcaaagtgaaaaatgaaagccacccagaaaagttagctaacttcttgacattactcccttttacaatttgaggtgagtttatgagattaaatttctccatacttatatcaaaagcaactatccctgaagatgattggtcacaatcagttttattgccaaggccaatcatccaatgaatacactcattaacaacaatggagcaacccataagtggataaacaattatattagaagtagaagaagattcaaattttgaaaatatgttaggcattttcattgttttccatgaattgcttctcaaactataaatcccaatttggttaccctccttaaacttattacaagtgttaacaacaccactcccatcaagagatgagaactttaccactttgatatcattggtcaagggatcatagcctaacccgaattcagaacaattatgtcccaactgaggcagttgtctagactcattaatagttgggttccataaataaacaactttatccattaagtcataaaaacctaacacaccataatcgctacccataaaaaataacaacggtggttgatccatctcagaaaaaggaaatttgtgtaaagaaatctcaactaaagtcttcccattacaaatggataaatggtgatcgaatcttctaacctttttctggaggaaaactgcacaaggttgttgtcgcttgaaatggagattgatgaaatatggggtccgtagcagagagagccaccatttagagacacactcgcagcgtttaagagatttgacatcgagtcttgagagaatgtccccgacaaaatcacaagggataccgtcgaagggcaattgaactcctttttcaggattagccattggagactgagaaattgaaagagatttagttaagagagtcaaagagattaggtttttttttttttttgctaatgtgttgggagtaggggtgttcatcaaaccgcctaaattgttcaaaccgcccgcaccgcatcacatcgaaaaaaaatacagtttgaaattttttgcagtgcggtcgcggtttgaatttttcctaaaccgcgcggtgcggtgc

SEQ ID NO: 92297 - DNA, 2758 bp, Cannabis sativa
tttgaatgagctaacggaaggtttgcaggtagacataatatataataaagaaaaattatttgacatgaattttcatcttcttttatgcatctctaatcgttttctatgttatcacaaaattaaggagaaactccctcctacagattccagacttagaccggatcaacgacatgtagaaaatggagaatatgagaaggcaaatgctgagaaacaacgtttagagaaaaggcaaaggatggtatgtatgcatgcgacttatttgtttgatttgtttttgaaaaactaataagaaactttgggtattagtctatagttctacaccctctaaaagattattttggtagacttttatttgcttcggtatccaaaacagttatatattccaattgttttttttttcataaatatgtacgttgtacttatttaagatcacatgtaaatttttagaaaatttcaattagtttatagtagagaaaataaggttcaaatattgcgcgtgagtattgatttttcctatacacgtgtttagcaatcatttgaacttttatttttgcaactgtaaattatttagaattttctgaagatatacaaatgaacttaaataactgcaccatacaaaatcataaaaaactgtactgaaaacctctcttgattttacaaaatagaaaatagtaaattcccttttagatagtgtaccacacatacttgtagaaacttttcttcatctaattttgtaaaatatggcatggtaaaatagcatttttgagctactccacattcggtctagagactattttataaaaaagaattatcaaagatgacgtctcactacaaaaaaaagtatttttagtgacaatcttttagtcacaacataattttttttgtaactaaatgtaacttttagtcacaacgtacaaaaaagttacttgtgacttaaacatagtatttaaatataagtagtcattaattttattttagtcacaacaaatattatgtctaaaatacatttaatcacaacaaattatgatttttttgactaatatttttagccacgatttttttagtcacaacatataaatgatgatttataattagtcacaatctttttgctaatatagtcacaagttttgttatgactaacagtaagattttttgtagtgtcgacaattcttattctcattatttgttttctctattctactctctaatggtataatgggcaatgcatgcagtcaaggaaaatacaagaaagtggttggaaagcaagatggttcaaaagagaaggtgaagatggaccttttcactacatgggtggctattgggaggcacgtgagaaaggaaaatgggatgaatgtcccaacatatttggtgaaattcatgaacctacctcttcctcttcctcttcctctcacctttcattcgaaaaaacttaattccaacaagaagtcatgtaacgagatagttatgatcatgtcatttaggttaggaaaaaataataaaatttatataggtattttaattaattattgtatatacattttaaattacaacaagcaattaactaattatatttttttacggcgctaagtatactatcgacccccctcaacttaaattctggatatgtcatactttcaagtaatattttattcttctcttatctttattcaatactacgtatataacaaaacaattatatcaaatattagaggttcactggctttctatagattagtgttgcgtaaataatcttacatgcatatttcagttattttttcttttcgaaatcgatccttcagaatgtgaaattcgaatggattcaattaagacaaggaaaaatataaaggaaaaaaggaaaaattaacctcaaagtaggaatataaacaaggattatagttaataatcttcttcttctccactttatactctattggttgataaatgaaattttttatttatgattaccaagtgaatacaaacaatttgaataatgcataattatttgatcagaattgaatctgctctgttagaaaccaaacctgatagatcataaaaatattagaaaaacgaaaactcacacacaaaattttcgtacgtgatttcaacaatctttttgattttaccagttcatatggagcacattcaaagataagattaaccagtaaagtcacaagagtacaaaagcaattgacataaacaaatttaaactcctaataatttgtcgcaaccttcttgaactctattttgttgattcaatagtgatcatgaaacaccaacaacaagaactatcttctaatcttcatgagtgattgcttcctctagacttgtggaaatcttctctagaaaatagtatgttacatttaatgaccttttcaacttgataattacataccaataaaagacaatacaataacaaagtaatagttgaacaaaactatgttttacacaacaaaggactattgaaaatgtggaaaatatattagctcatggaagatgtaaaattatgttgttggtttatgtgctatttacaaggataaggactcttcaaaatagaattgctcgatcgagttcctactttcaaattccatctgaggtgttaaggttttgaagcttactcatttatattttgctgatgacctccttctttttttgtaaaggtgactacatcgctgccactttactcttacgggatttcaagctcttctccaattcatctgggctacaagacaatgtatgagcaaatcaacagtttatgggg

SEQ ID NO: 92298 - DNA, 648 bp, Cannabis sativa
gagagagagagagagagctttgtggtagtgatagtgggttccattgcatgtttgaagacgagagggagagaaagacaagagatagcgaaatctaaatgtttgaacaatgtgaaagttttttggattttaatatgtttaacatgctatccccgttgatttaaaaatgttgggtatactgttattgtcgacagtttaaaattgtcaagtatagtatacccaacgattttaaaccgccaaggttaccattttaacgtattttttaattttaaaattgtgaatattttgcatagtaagggattctaaatacttgtttaaatttgtctagaatagttgaatattcccaatagtttaaacattcacttaattagcgacagttctaaaaagattaattcaaaaactcacataaataaatcttttgtagtagtgtcaacaccctacgccctttatatagttgataagcactctttaccatgtataaacccgaaacctcttgacttcaatataataacaatcatccatacatagctttttcgctcaaaatggatattcactataagaaacatatccctaccaaaaataataataataataataataagaataagaagaagaagaaataaaaaattattgtttgggagaaaaattagc

SEQ ID NO: 92299 - DNA, 531 bp, Cannabis sativa
gtattaattaagaatggttgaaattgttctcttatttattttgtaaacgttttatgttttaattaaatttaattaatgttgtgacggtcctgtctgactgattatgtaatttaaatgatcattttgtcttttatataaagaagtgttataattcgaaataagaataatcactaactcttgcaaaagtggactaggcagacgaagttttgattgaactactataattctctatctccctttgcaatttacatatacgttgtttttgttttattattcgctattttactatgggtattcgctcttttaggtgaacactcgcagttttgtaagtgaatatttttatttatctcgaatatttatgattttttgtgttgtcaattttctttcaacaacatcatgtgtatacaatttataaaagcaatgtgattttgttcagctattctatgggaaaaaatgcttaatttttaaaattttatcttatttttttaagtagtatcaactaatgctttagagcatcttcaatggtaatat

SEQ ID NO: 92300 - DNA, 692 bp, Cannabis sativa
cattttccctatctggaatttactgttctgtttggagtcagttaagaaattgattatttttcaaagaattgatgaataaatggtaaattgaagaaagaaagatattagagaaaaaaggccttcgtagttgaatatcaggcccattatgggagcccataaaagtgattgggctaaattgtaaagtccatttcaaataatgatcgcatgagaggagttcaattcgatttaagaaagtttaatgtaaaatgatctggttttgattgcttacaattttaagttgtgaaatgttttttttttttcaatagataattaccatatttcacattacatataatttaaagtacaaataataatgattttactaacaagtctcaagaaccattgtaatttaaaagacaccatctttaatggttacaccattttgttgtacaatcaattttgtgaaaaatttacttttttttacattaacttcaataattcacatcaaatttgagatacaattttacaccatattaaattattttacttaaaaataacacattttgtaccatttccattaataatcaataataactaatttataatataattatgtatattatcacaaataacttttgattttttttggctaactagtaatttttctccttgaactttgacatgtactaaattgtgcccctgaactttttttg

SEQ ID NO: 92301 - DNA, 534 bp, Cannabis sativa
attatcaaaccccattttggtgaggatagcatgcagataaccccattccactctatcgtatgctttactcatatcaagtttaagggccataacaccatttctacctactgttttcctcttcatataatgcattatctcaaaagcaatcataatgttgtcggtaatcaatctattcggaatgaatgcactttgagtttcagaaataacctgatgtaaaaccgctttaattatgttggccagcactttagaaacaactttatataacacattacacaacgagatgggtctgatttcagtcatggaggagggctgcttctttttgggcacaaggacgatgttagtatctggcagatggttggggaagtcccctcttagaaagaagtctcgaactaactgaaccacatcatgtcgaactatgtcccagtatttttggtagaaacccgggctcataccgtcagggcccggtgatttatctgggtgcatctgaaacaaagctttcttgacttcactttcttcaacatgtgccaacatctc

SEQ ID NO: 92302 - DNA, 542 bp, Cannabis sativa
acgggattactgactgtcacatagccagtgtatgggcaacaccagtaacagactacaaaataacgttacaagtaccaccaccaacaacaactattaaagaattaacatccaaaagaataacattaaaagcaacatttaaatgagagttattcacccatccaacaacttctgttgaatcacaaagaatactgaagagattgtattcgtttcgatgtgcaattactaatttcatcctgatggcaattactaactattgaattacgatatattttctagttataattatatagaattgggttgtactgtgctgacccttaccttgtaattggaggtgtcagtcacaagcaaggttgatcctaaggtatatggcctaaagtaaaatcaaattttggggctcctatatatagttcaattattatcaaaatggtagttcttttttttttttttagggaaagatataagatttcattcaacaaagaaacaacagacaaagtccattacaaagctcaacgataaacaaaagcaaatcaacaccaacatgg

SEQ ID NO: 92303 - DNA, 638 bp, Cannabis sativa
tggtagtaaatctagatcctgataaaataatttccaacactatctgcccaaaataagttagccaatcgattgtcctcatccacttgataaaaaacaaagaaatttgggtccttctctgagagacaatcaagaaatctttgccccttctgattctatctctatcttttcttcttgtttggcactagcaaccctattgtacacttccaaattgacatggcattctcttgtaaccaccactttgtaaaagcagcatgagacattatgttggcaattttaattcctactgagctcatagatctaacttgagcgagcaagccatcaaacacaactcgataggatctcaagaattgtacctcgcttggtaaagccaactcgtaattgtgcatcgtgctgaacactttgcatttctaagtgttacatgatcttaagagtgaaattcgcaatgctgtctgacatccagttctagttagatcatgatcaggtcattttttctttctatgtctggtgatgtgattttttttcaaaccctaggaacaacaaaccaacgtatgcattacaatgaccccatgagcacgccaaatatcatctttttttgtgctgaaacctatccctttcacgtacatctcatagaaggataa

SEQ ID NO: 92304 - DNA, 615 bp, Cannabis sativa
tctgtagcagagtatcaccaagttttgagttcgattctccttcagttgattggattcttcatactcttacacactatgattgagtaccaacttgctatccgcgggcatgtactctatatctaaagcccaaattttgatggtgaagaacacgaagaattttgaaattagtagagagaaagaagaagaagaagtctcaaaactctagttgtttcatagaatgaaaaactaggtttagagctgtagaagcattagttggatagtgagacctttttcttcttttttttttggaataaaaaatgaaaaaataagagcaaaaataagacctagtggccgggccctatgtaggtccatcactagttagatttttgccacttttctcaatcatttatctatttttcacaaataccactttgtgcactttcagtcctataaatgtcgaaactatttatttaataattaaatttaattatcaaataaaattatcatttatattatttattaattagacttgataaagtttcttaattcaaaaaaataaaccctaaaattttatttcttcacaatcaagccatatcttagtgaaaattcaacaatgagacatagtctaattttaga

SEQ ID NO: 92305 - DNA, 519 bp, Cannabis sativa
cctgtgattttgatatggtaaaggcttaagtttagtttagaaaataatctgaaatcctaggcggggcactttttctatgggcctttgagacgggaagaccaccaagaactctggaacactatgccacaaaaggttggattattatggcgaaccttaacttggttctatcccaagatgaaaaggttggaggttgaccaatctcgatctcagaaggttaggggatgagatgattcatttttgattctggtttattgatattgaaggcacaggggttatgttcaccttgacaaaagagcaagattaaggttggacatggttcttggttctcctgagtgggtcactcaattccacaaggcggggattaaaactaatggtactctatttttggatccttcgattattattttggatacctttagggatcaggagtgtatttggaaacccttaaggtatttggatgcgtggacttgtgacccaaactatatcataattgtcgaagaatcctggagtagggatatc

SEQ ID NO: 92306 - DNA, 857 bp, Cannabis sativa
ttttcattacctccttttatttttacctttccttatatattatttaatttatacccactattataagtaaaacccaaattttacccttagctgtttatttgatttatatatattaagagagatagaatgcatttgaacaaatacttagaaggcatttcattttagatatacttttatatataaaattcaaacagtgatataaaagagaccccatgaaaaagtaatgattgattcaaaaaaaactcttacaaaatacaaaaaaaatgtccacaaacacacacaaagttatatatatggacgtaatcagtacaaagaataagaaaataaaattaaagggagaaaccagaccaaaaaatggaactaataaaaaaataagaaatattaaaagttctcactgttgagattgcaattgtgaggtctagtgttgatggtagtgatggaggaggtggaggcagacggactctaacagtggtggaggtggcggagacggaggtagaagcggacgattgctagcaatggcagaggagtcagggaaatgataaagaagttgaactctctcggtgggtgcgaaattgaggatttaataaaagattaaatcttaagggtattttaggcacattacacttaaaagcaagtatgtttcaattgaatttaatatgaagttatttttattagttattaaagaaaagaggtaatcctcaatttcataacattgtatttgaagtgaagtgggccaaatgaagaccaagcccaagtcaaatccaatttacttaaacaatatctctccagcttttcattttatgcatggagaccaccaaaacaaaagagacccacgatatgccccctaactcgcgcag

SEQ ID NO: 92307 - DNA, 2345 bp, Cannabis sativa
  modified_base (667)..(667): a, c, t, g, unknown or other
gcaaacctaacatcattatcagaagcaatgtcattattaatgtaatttaataccgaatttcagtaattttacttgaataacaattacaaaaaattattaactatttataaaacgttatttcgtacagtagtgctagacaatactggtgctcttatttgagagtttctcacataaatttttgaagatgagataggagaggttgtgaggagggttggtttggctctagtcccaatatatgtgaatcttgaaccccatagacccagccgacacactttcctaggcccccacctcttctttgccctttgccctagctttggccccacacccactctctactcttctcttctctattatatttattattccaatcttcaattcatcactaccttattaattctaattcccactttcttccatttgtctaatttcccataatgtatcattcttacttgtaatattttctatctcttttaaggggggccaatatcaatacctcaaacttggatacctaatcactataaattacacacatatatatatttttatattaaatgatatttatttaacgaaaattattagtctaattatttttattttttcgttaaaattaataattaaaaattgtaatactattaaataatcagttattattttttttaaaaaaaanaattttaaatatttaaatttatttattaaatataacttataaataattatttaaaaatattaataaaattaaataattatttttttttataaatcttaatttaaatttaaattagacgttaattcaattaattataataataatactttatgacaaatttattagttatattatttaaaatatataaatttatttatttattttaaactagattatatttaaatattaaaaaatataattaaattttattaaatttaattattattatttaaattaataattaagtaatatatagtaactctaatataattttaagcaaacatgtaatatatattttttttaaataaacaaacatgtaatatttaatatatataaatgagtttattagaacattcttgttaaatttatgacattgttaattgtagccaaaaagaattatgtacaacaaatattttcctaacatgacaaattttctaacatactttaataaattaactaggcaataaagcaaacttctaatttagtttatctactaattaaactatacattaattatacatgcattattactttctttatttatttcatttaaataaattatatctcaaaaatgaggaatagtgtttcataaattataccaagatcagtttcatgagatttagagaagatcagtgtacatgtagtggtctatatatatatgggtgcatatgtagtgatctatatacatatatatatattatatataggtaattatacataaaaagaaaactaaagcacttttattgagtgtcgttgtattttctcttcaaaggtacatatctttgttactaaaactaacaagtataatatatgcctttttgataggaacaacttttatacaaataattattttttatatatattcatactacttcaaactagctactactactcatctatagttctctaaaattagatctgaacatatatatattatatatataagaaaagagagaagaacagtcctactgtatataatctagaaactattcatgagtttgcacctgctcactttaacaacacgtttaattaatattaattagttgttcttatttattgctcagaattaaccttaatttaaattatatatatagtaaatattttatgaataatatttaactacttttggttaatttgactctcctttgtatgtatatgccctaattaattaattaatatatatcaacagaaaaaattgtgtaagtgtgattaattatatatgtcaacaccatgattatataacaatgaaattaattatgagaaatatatatagtgagagagttatatagaataattaacatatttcaaataccttaatcattacagaaatgaaataaaatgtcactgtaaaaaatcctcatgataaccttttaggttacaatatatatattatttgttattaaatttcaattttatttacaacgaaaaaattagttacatgctaattactagctaatttagttttagctaaagtaaatatttgtcaataattaaaaacaatttaattacaacaataaatataatatatatatatataacatgcatgatgattaatataattttatcccttcacgtacttttaattaatatatgtggaaaattatatttttttcaataaaaataaatacacacaaataaa

SEQ ID NO: 92308 - DNA, 600 bp, Cannabis sativa
cattgtactctcccaacaaaaatacattcaagatctcatctgcaaggctgagttacaaggggtcaaaactcaaagttcacctatgaatagtggtctaagattgtcaaattatggtagtgaaccggttcaagatgcaacaggctacaggtctctggttggtgctctacaatatgctacgattactcggcctgatatagcatttagtgtgaataaggtgtgccactttatgcaacagccattgcagtctcatttggtggctgtcaaaaggattctgaggtatctcgcaggcactttagactacggtcttcacctcaaaagcccttcatccatgcaccttgaagcctactgtgatgcggattgggctgctgatcctgatgatcgcagatcgaccacggggtactgcattttcctaggtgggaatttgatttgttggcaatctaagaaacaagcaaccatttctcgttcctccacagaggccgagtatcgaagcttggctgctgtagttgctgaactcagctggattcaatcattattaactgaactgcatctgccttcatctacttcaccactgattttgtgtgacaatctcagcaccgtgca

SEQ ID NO: 92309 - DNA, 871 bp, Cannabis sativa
attagtgagcatttggtcaatttcttgaaaggtaagtagctagctagctaccctaaaaatgtatgaaatcaatcttcacaattaaggattttgaattgtcaaaaaaggaagctatagaattaattaatgtatagtattataccatgatttaaattttattttgacacaaaattatctaaatcttcttgaaatcagtaaaatattctaaataataacaactacaaagtgtcattaaaaggagattataactgtctacatatcaaaaagaaaaaataggtgtgtgttgtatattgtatgtatgtataacatcacaacaaatacgttgtaccaaaacctcaacccctgttaaaaaagaaaaatgtgtttatgtatatatgaaatctaaataaatatcttagacttagtcacgagttacaacatataatgattagaataaggggacaaagacatagtttatgtcattttcagttgggctggcaaggtcccccatatgtactcacatacagtttgcacacatatacagccacttttgtaaacttcattttcttaggcgatatatggtaatgtgagcatgcacttgtacgcaccaattactccacagaaaattttatttttatagttttaaggtataaatttgtaaaaatattatttttgtttaaaaagattattttatggtaattttttttttaaaaaataaatacgtaaataaactttttttttttgataaaaataagcattgataaaaaaaaatacattatttttatttgagaaaaaaatataaactttataaggataaaataaaagtattccatatatatatatgggtatgttcttaatgggtattactcatgtatgggtattttattcttga

SEQ ID NO: 92310 - DNA, 538 bp, Cannabis sativa
  modified_base (332)..(336): a, c, t, g, unknown or other
tcgatattgattattgaggattaataattaggataaaagcagagagagatatataaatatatacctgaattatatatggaatggatgtgtttttgaatgtttaatctttgttgtttgattggatttggggtagaaaataatgaaatgtagatacatataattgggaattgggaaatctgtttcttcctctctctctctctttctttctctctcttctttctgtttctgttaacactgctctctctggtttcaaaaataacaggaaaaagataagcttatacagatgatatttgtcttctagaaattgtatatattaattattattattattnnnnntattattattattattaatgttggtacattgcagtcagtgcctcttgtccactatgaatacagtttggtttatttatttatttgaaaagtattttagtacaatctttgaaataattttttatggatatatataaatatattgactactgaactacctgcctaattattaatgactatatactttaggaaaattttataatat

SEQ ID NO: 92311 - DNA, 817 bp, Cannabis sativa
cggttaatgggagttgaaaaaatatttaaagaacaaaaagaagagggaaaatggagttgggatcgtggagagggaagtgtccagctatggagatcactattttattttaaaaaaaaaaaaactgaaaaagaaatggaaaataaaaggaaaaagaagagaaaaaggagaaaaatgatgtatagagtgatctgatgtgtcaaaaaggttgaattgtgtgtgcatgtgataaaaatgtaataaacttaaagaaaagtgtacaaatgttgaactaaccgtgtggtaatatatatgtaataaagttagtattttgtatttttggtgtaaaagttttaataataattttattttatttataattaagttaaaagagatataataattattattattttattttatttcactattctaaaatagtatataagatttttgtgctaaaccaaacactataatttaattatttaattagtaatcttattaaatattaccatgataaccaaacacaagtttacagataaatcttaaaaaatattataagcttcctcaatctcctgagaaaatccgctgcacattttaacaatactgatgattaatagagaaatgcacatctcttaaaaaaatactaatagaaaaaaaaaccagcattttttcctttataagatgcactataaattcaaccattgataagctccataatactgataatacatgaccaattgttcgaactcagtagagaacataaaagcaaaacttgctgagagcaaaatcagatgcattatatttgtcagtcaaggaaactatgaaactttattgataa

SEQ ID NO: 92312 - DNA, 1443 bp, Cannabis sativa
ctttactttctcctgtggtaatttcctttttcccttattagttctttttgtagttttgtcatttcacttactaataataaaattaatgtaaaaaatattagaaagaggcattctcaaaatttgtggagagtggcataaagcataagcttccattggagaagcatggaatggtacccaggaatagctttcatcagcaaattaatacttgtttagtggcaacagtgcctgaaaagttttatgatagagttgaagaagggagtattattttgaagaaagcatcaacatttggtttctgcaaagaaggtgttttggtagacggtgaaaccaacccaagaaacaccgatgtggtaatattggccactggatataagggtgaccaaaacctcaaacacatttttacatccccagcctttcagggctacattgttggtgaccctaatgcttcgttacccctatataggtaatacatacgtacacttaagttaattatgttttcgctaacattaaaatatttttcttagaataaagtgagtgtataaatattaggttaattaggaattttttccttctgaattttgacatgtataaaatcatgccttctgaatatttttggctgttaaaaatttcttttgaactattgagattgttatagatttaaggacttttgtctaagttcatttaattttactgtttcagtaattgtttatgtattaaactatactacccagattttgatatctactaaattatgtcctttaaactttgatatatactaaatcatgcctcctgaacttttatctatgttataatttttttaataaaattagacaaaaacccttaaatttaacaatctcaatagttcaggagaattttttaacgaccaaaaaacttcagggacatgtgtttgagaaaaaaatcttaattaacttaaatactatgttgctacacattaattcttaaacaatactcatttgggtctcatttaattaatccattcttatcagggaatgtgttcatccaaaaattccacagctggcggtgattggattctcagaaagtgtatcaaacttgtacacctcagagatgagatgtcgatgggtatcggagctcattgacggaacttttaagctacctagcatcaaagaaatggaagaagatgttggtaaatgggatgagtacaagagacgttactctggtcagtactacaggagatcatgcataggtgccattcatgtatggtacaatgaccagttgtgcaaggacatgggttggaaccccaaaagaaagaagggcttttttgctgaattatttgagccttatggaccaatggattatgtttcaccgtaattaaactcttgtcatttattttatgttgttccaacttcttttacagaatatcaccatgtttttcttttctttttactatatgaatttttcttttgt

SEQ ID NO: 92313 - DNA, 690 bp, Cannabis sativa
agagctaacaaaactgaaaaaatatcgaaacaccaaactaaaaagttatattagaatgacaatcttcaaaataaaaattaaaaaacaaacttagaaattaacacacaacctaaatcatcaacattacaataaaactaaaaaaaaaccaacaaaatttcaaagtataactagccaaatgtatattaacaccttaatttaaaacaactgaaaataaatattaaacaaattatatttaaaattaaacttatcggtaaattctttgtaggtgtaagtcctccacaaaacaacctacaaaataataaaaaaaaataaaactttattaccacacaatataatgaaaaaagataatgtgaaagaatgatagtaaaccaatccatcttaaatataaggacttaaaaaaatttgaaatacttatctgttaaaagtaaaaagtcgttgaagtagaaatcatgagcacaaaatagattatttctcttgcccattgatcataacacaaaattattctaaacaaataaaggcaagccataaaaaatgacacaaacaccataaaaagcatacaaactgtaaaagttatcaaaacaatcaaaaataatacaaaaacctgtatggtctcatataaattttaaagatatagaaatactatttaaataactaatacaaaattctattaattaataatactgattatat

SEQ ID NO: 92314 - DNA, 582 bp, Cannabis sativa
gggatcccagagtgcgtaaactttatattttatttgattagtaaagtttatgcttattgttaaagtttttgttaaacacaattttatattaaaccctttcattagcaaaggttgacacaataatttagaaaaaaaattagtatttttatttttacacttcaaagcaatatattttgtatttttacgaaaatctacataacaatccacatatcaaatgacggagcaatctaaatcgcaactaaatccacatagcaactcacatagaaactaccaaaacaatctaaactgcaaatttaaaagaaaaataaaaaataataatatataaaataattcatcttatatgaaaatgtttattttttatggggtttccttctggactcttccttcaaacctgtgctagggtttcttcgtacgctgcctccatgttcctatcgtcgtcattgtcggtgcccgacatttttgtccgtctggggtctgcaactcttggtgacggtagctctcaacctcgaaccacacgaagctccttggttcacgccgttaaaggcttcgtcaatccatagcaacacttagaagcaatcatca

SEQ ID NO: 92315 - DNA, 842 bp, Cannabis sativa
attatttttaatacattattaaataattttcaaatataaatatttaattttttcaaacaaaagatttgtaatctttaaaaataaaatatgttcaaaattttaaaatgaccataatcttaaatgaaactagcaatacgtggctcaacacatacattcacctagtaactataatatatatcatcctataaaaatattactatatacaatctgtaggtaggcctctctgctctctcaataattttaatgattaggtggtggcttttgtatgcaaaaatcatatggtcatttttgtcctaaagaaatatttggcagaacatgtttttttccttaactatatttggcagaacttgagcgtgtttgactgtgatgtgaccaaacaactattcttaatatataatagatgaataatgatgatcgtcacaaaatatacatcaaaattttagatgatgatgtcataaattttttgacatagagttcttttcacatgtgaatatagttgtaatgtatgagtaaaaatttgatggatattatattttaaaaaaaaaaacataaataaactagggcataattataccaaaaaaattatattatttattagtataatattttctttatattcataatatatcagctaataaaatattaatacaaaagtttaaaataaaattattgtagcacaacatcattttggtggtgtaatctcagcaccaaattgaaaattagcagttaaattggagtagctcttagttaatcgatatttaagaaaattaaagatataattaagtgaaaatgtgaacacataaagcctcataataatgtaaagcaatgaatataagacaaga

SEQ ID NO: 92316 - DNA, 674 bp, Cannabis sativa
attatttacaaaatcttataactcaagaattaattcccctcctacttttcatgtaagtatactttacattttctttttgttttgacaaattaaataacatattctatcatgggaatataattacaatttgaatttgaatataatagcaagcgcttgtttacacttctgatccaactaagaaatacaatggaggtggaacaaatgcaagtttttacaccttatataatgtcgctgactcacaatatactttcggacgaatgaaactacaaaatggacttgatatcattaaagttggttggggagtaagttctattttcttatcttttctactaattatttgttaaaaataactcaactcaagctttttagataaactgcaatgttttagaatatttattcacttattaatttgttataatgtctataatgtcatttattaggtaaatcctagtgtatatggggataatcgaactcgaatcttcatatattttcaggttaccctaattttatgttattatttaagatttcttcatattgtttgtgtagtacttatgtgtaatttatgaatcatgcaatatttttgtaggctggtgaattatcttgtttcaatacagtatgtccaggatttgttttggttaatcctaaacctatgatcgaaatgactctgagagaaa

SEQ ID NO: 92317 - DNA, 628 bp, Cannabis sativa
tgtatattattatgtcttgaacttcaaaacccattcaaatggtcactgaactattttcagtgttgtaaatttgtcattctgtcaaattttgttatacgcgacaaataaaatgatgacatggttgtttagtcagttgtcacgtcagtatcatgtcaacgtcaggtgtataattaattttaaaaaaaaataatttttttaatttagtttacgtaattttcttaatcactacttgaattttagtttaataatatttaataatgcctattaattttattttcttaatgttaaattatacatgtgacgcgcgctgatatgctaattagctaagcaactatgtcattagtatgtttgccgcatgtgacaaaatttaatagaaaaattaatttataatactatgcataattcatggactatttgtaacagacttaaaaattcagatccagaataatacatatatatatcatagttgagggcaaaaaatagccttttctaatttacatgactacgttcaattttcattctattatcttataaaattttgtcaaatttgtaacagtacgcttccctttttttatttttcaaactggacagattttttttttttcttttgttttactttttatatata

SEQ ID NO: 92318 - DNA, 817 bp, Cannabis sativa
ggcatgaaggatccaagaaattactgtactattacatcgatgccatagctcaaagtcatcatcgtcttcatcgagctctggaagtttgccattgacgaacttcagcttgttcctcgcgattaaggcaacagtcatgcccctccgccatgaactatagttttcacaaccagtaagaatcttgggaaccagactggctctgggatgatcactgttggatagaaaataaggatttctagcatcattggaaaaagatcggccaccaggatccaatgcagagaatcgattcgaatcttcagtcgagcttcgagtttgagctcctccacctcaagccatgaagaagaagaagaacagaaggaaacgagaatggattttacacagagtttggctccgataccattttaccaaacaagcaagaaaagagagaaaaagaattttgtgtattattgattcattgaaaaatgaacagagtacaatgaattggtttacatacagtgatgaaatgagagaagctaactaactgctaaccaactgaaaaataacagattctaactaacactaatagctgtcataacaaccttcctaaccaactaaagccacttaactaactctatcttgatagtctcattcaagataaaatatatattgttttggggacaaatttttttgtcttgtttgtttggatttgccacgagtatgctgatttgatgatctgactagttaatgccttgaagtttatttcttattagataattgctaaagtaagttatgagtaattgtaatggtaatattgtagtaccctagaattaaggaatggatt

SEQ ID NO: 92319 - DNA, 732 bp, Cannabis sativa
aacttgtagcaagttgtcacataaatatatatctttatatttttatatattaaaagtggctatctaacggcaattcttgatttaacgatttttttaatgccaagaacgatcctttttatttttttaacagctcttttccaacgtcgttaacctattattcttatgaaaaaaaatgttaaaaaaagtttaaacaaaccaattgactcttccatttcattcccactcctaatcccaatctcaatcgttttatttcttgggcttgaactttcattcggccggtaatgcttcacactctaaggtgagctttaggacggagatcggtgggcaaaacccttggagatccagcgacgagagcctcagacaagggacattagctacaaatccaagacagcttctcagataattagattgttacgatggagcacgattgctccgattggtgaggccatatcactagctctctcatttcccctaactattcttctacaaatgaccccttcagagatcccaactaatctaagacgcttactgcattctctttgttgctcgcctcaatcactagaccaccgaacataatctttgctaggttcatttttcctttattcaaaatttttcattttcttgttgcatatgtctatatttatttactttatggcgaattaattaacctttttcgtcgttggaatttcagggttatgatggtttagttgagcacctgatgagcaaatatgg

SEQ ID NO: 92320 - DNA, 556 bp, Cannabis sativa
  modified_base (347)..(352): a, c, t, g, unknown or other
ttcttttatggccacttgaactagcctcggttaaaaagagattttagttaaaatgacacatttttttactggcacatggattcctaaacatttttaaggattttaatttttttaattttaatttttacgaaatcccataaaaataacatagtatagatatttgagtaatttacggcatatatacctaagtttaatttctaattgcaaataaatacttaaagtttattttgtgacagtaataatacctaagttaaagttatatctctaaaactctataagtacttgactgttaaattttaagtcattatccacatgttattttcttattgatatatttaaactatttnnnnnnaaaaaaaaaaaaacaaaatttaatgaactagatcaattagggattgccatgtggcaatttacataatacttaacagtcaagtacctacagaagttttaaaattataacttatgtattattaccgtcaaaataatatttatttacaactataagttaaacttaagtaattatcaattatgccgcaaattactttaaatattttgt

SEQ ID NO: 92321 - DNA, 952 bp, Cannabis sativa
tgtgtaaaatggatttttcatgtaaaaatttcaaaaatttaatgattattttattaatttcttatatttggtccctcatcaaattagaaattgtgcttatggtatccacatattaaaatcatgacaattatgcacttatgtcataaactttattccaaaatagaccacataaatttgacttatttttatttgaagactcaacacatattttatatatacaattgtatcccaataaatttctaacacatatgaagtaattaagaacatcgaaagctcattatctcttttttttttttggcatagttttctttcttttgcactagtggattctaatattttagcacataaacttataaggtgttagataatgaggtggtatggaatatttgtattatattcactctcaatattatgtgattctgtgcttattgttctttaattaaaagttatatattttttttattaagaaaaaaaaaataaggaaaggaaagaaaagaaaatgtgagtgcgagtcaccaaatttgctatctatactgaaaatgtgatgaaagtacctaaacctaacgagcatatttcttgattacaaatgtattattaatattattttagaaattaatgttattattaatataatcctatgaacattatatatgaacattatgaactcgatgggtattagaggttaaatttcttgagataaaacataaatgattcagatttaagtttaccaaattgttattttaatctaaacacaataattcgaagggaaatttagtaaccacttaaatataaagcatggtctctaagtataccaccccttaaagaacatacgtgagaatgtttattttgttctaattatacttcttaaataatagggtaaatggcggcaaaactcccaatactttcgttttagtttcattaaacccccaaaacctaaatttctgcgggtaaa

SEQ ID NO: 92322 - DNA, 797 bp, Cannabis sativa
tcgcagccttgctgctgttgtaactgaaatcagctggctgcagtctcttctatctgaactgcaacaatctccaactactcccccggttatttggtgtgataaccttagtgctgtgcaactttcagccaatcctatccttcatgctcgcacaaagcacatagagattgacattcattatgttcgagacaaagtgctgaataaagagatacttgtgtaacatgttcctgctaaacatcagattgtcgattgcctcactaaacccatatcgagttctaggttctctcttcttcgtgacaagcttagtgtggcttgcttcaccaccctaagcttgaggggggctgttaagagtatctagttagttagctgttactggtgttagttaaaggtggttaggacagctgtattagttctaacaaactttctgttatgggtcttatgttcagtacctatataaagaatgtatctctgtaatcttggattcataatgaatgattctttcatctctttcgttctctctgttagattctctctgtttttgatctgtaacaagtgtaaactgcttaaacagtaccgcaccacatcatatttttgtggtgtgatttatgtagtttgaagatctcgtggtgcagttgtggtttgagaatttacaaaaattgcatatgcgacttggtttgaaaaaaagttacaacccgcaccacccgcaccacgaacacccctagttgccacctatgaggaaatagtatgatgaagtagactttatgtgatatctatcggtagcaaagtcatcatcactatat

SEQ ID NO: 92323 - DNA, 634 bp, Cannabis sativa
cacaactcccaggacaagccatctggttgctgctcaaacaattttgcagtacattaaatcctgtccaggccaaggcattttactttctgcaacttcagacatccagctgagagcttataccgatgcagattgggcagcctgcatcgacacaaggaggtccacaacaggcttttgcatattccttggagattccaatctcttggaaaagcaaaaaaaaaacaacatacagtgtcaagatcttcagctgaggctgaatatcgtgcaatggcaaacactactagcgagctaatttggttaatgtcattgctgaaagaattgaggatagaacacaatggacctgccttaatgtactgtgacaataaggccgctcaacacattgcagcaaaccctgtgtttcatgagagaacgaaacatatagaaattgattgccaccttattagagaaaaggttcaacagggactgatcaaaactgttcatgtcagcacctaggaacaattagcagacatcttaactaaagcactctttcctaaccaattcaaagcacttaaagacaagattggattggtagacatataccatccatcttgagggggagtatcaaggattgggctagttaggaattagttcatgtcag

SEQ ID NO: 92324 - DNA, 779 bp, Cannabis sativa
cttgccgctgcagcctctctttcgaactcagcgtttcatcagttagattcggctaaatgttgccagagttactaatggtacatacctagttggatcataagcatcctcactcctaggcacataccttgcaaaattattagtatcttcattccttctttttggattttgactatcaccaccatagtttctccttgaactaaatattcttacagtatggggtctttgagaacccattggctctttcccagggcgatgtgtagtttcctcagggtgatttttatcattttgattgttatcagccattgaatatggatagatttctgtttgtaaggagggatttttctgagttttatcactaaggctctcaatgaaagcaccaaactgttaacgcagattttcgttaaccaaaattaaatagccttttttttgaatgaaattaaatagccttttagtaatatattttctacagaaattaataaataataaaagatcaataactctagatatttttgcgtagttttgcagtttaaatctgcatactccatgagtccttcttattggggatatttattgagtacggaatacaacatcagaataatagtattttctctctcaattttttcgtccctttttctgtagaatctacccctatttataggagtagaggctagcagttattcttttgggatcaattcaaatatagctattcatgaaacgtggataatccccacgttttatttaatcacatgtgggacaatatttaataactacccaactac

SEQ ID NO: 92325 - DNA, 669 bp, Cannabis sativa
aacctttttaaactcatctttggggggcattctccctcttatgtgtttggcagagcattcactggggtaaatctcttctgaaagagggtctttgtaagaggattggaaacgggaccaccactaaaattttacaagacacttggatccctaactaccgttttcttcccactcacctcccaagtcaccttgtccatgtctctgatttgctccttccaaatggagactagaacatctcattgttgcgcagccacttcccccaggacattatcgatgacatactatctcttcccccaccagatattatccaaatggactcctatttttggcagcacacctcctcaggtcattattcagttaagaccggttaccatgtggcgaaaacgtccataaacttgacacaaccatcctcttcaaatactgctacccttaaacgctggtggaactccctatggagtcttcaaattcctcctaaaattaggcacttcatctatagactctctcagaaatctattcctactgcagaaaatctctacagcaggaattgtcttaactctcctatttgtcctcgttgtcacctttacaacgactctgtgcaacatgctttgtttgagtataaggatatgaaaaaggtctggtcaggtacgccttttatgtctacgttgaaggatt

SEQ ID NO: 92326 - DNA, 733 bp, Cannabis sativa
acaagcactcaagcttttgttcccccaatattgaagacctagatcatgtaatcttatccaaataggaaccgaatgaacaagatttaaagatttcagatcagcagaccagggtcgaattattaccggtttcctgtcaaattggatcactcccgcctccactgcttggtctcgagttgcctcgtcgttaaacctcaccatgataagtcccatgttcatctttgccacttgctggatgcccaaatggccccaaactcttttaatgaaaccttcaaaaactgttaccagtggattagcacccaaaactttacatacaattgctgatttccagttctcctcttgctcttgtacttcctccaaatccacttgagctatcttaatcccatctcttatttgaggttctgtaaatagcagtttttgatccctagtgatcttcttgtcccgagtgaaagattcccaattcttcttagctgaattccgatctgtctccaccaatcgttcctgctctgcttcgacttcctccccccaactcttgccttgtctcccagttgtgaaatcgtgtgtctctgcactgtcttcccctgtaacgattgtctcatgatctacaattaggttgtgcgccaccatatctgctatgagattcagaccttcatttgattctgacgcctgaacttcttcattttcctcgtcaacctccacttcctcaaccactggagccctaatgactggcttgcgc

SEQ ID NO: 92327 - DNA, 925 bp, Cannabis sativa
ttatccaagttcaatatcggttcattctgatgcatactctatacatccaacccaagtttacttcaaccaatgccctgtaaagagtatagcacttatccaaggtgcaagtaaactacattgtagattatcctatcagttaaatcctgtgtattgataaatcataggaatacgtttaatcacacaatcttgattacttttcactgtgttgacaacacaataaacaagaatatcaatgtgataaagatttgggtgaatttataaatcaaataaataaataaatgattacacgaaccaaaataacacattaaataagtaataaaaataaatctatttctttattgataaatgattacattgaaatagaattttatttaaggcacaaagcccaacatttatgctagccaatcctacaataatctcattaaatctatcaatattatcatctaaagaaatggaagaaatcattttaaagatgtataacctttatagcaaattgatcttgctagtaattaatggctttaagtatagttcttctaatttgttccaaactcctttcgacgtcttctctgcaatgagttttcttcgagcactgtttgatagatacacgatgatcatgtagtatgccatctcctccattttttatttttcctatggtttcttctcggctgaaagtttctcatctccaagaaccttggataccttttggtgcactaggatccctttcaaactttctctccatagtgcaaagtctcatgttccatcgaatttctccaattcaaaactcgacattgatgacattaaagttttttcaacaattacagcgaaaagaatcctaattctgcattcttgatcgattagaaagctcttatttgtggagaaaatacaactaaaggtgcagaatcaaatcaactaaactttaaacaat

SEQ ID NO: 92328 - DNA, 545 bp, Cannabis sativa
caacatagagcttaattaaatatacaacatgggctatttcagtcattactaattaattaattttaaaaataaatgtgatactatcttccaaattttttttttataaaaaattctcctcaaattataaaaataattacaaatttacccatttagttgcatttcatttatttttacaaatagtttcttaccgtacgatccaaggttaatctactgtaatttgagagtccaactaaaaataattgtatagataaatagtaatctgataaaatctgagaatctatattcgtaattttagagttaatgtttgaatatttaaggatattatactttccagctagtttaaattaattaaataagttctcatatgctgtaaatattatacgcattgtttatagttacgtgaattaattatctcaaaaattaagcaaaatgcaacgaaacaagaattttttttcgaattttacaataataataataatttagagaaaacaatcatagtcacaattaaaaagaataaaatcctatttgttctagttttaaaagag

SEQ ID NO: 92329 - DNA, 845 bp, Cannabis sativa
tcacgaggtgttgcttctgctggtctgaccaactctggctctaaccgattcacttgaaacaaccctgctgattccattgacgtactcttaatctgaaaataaacctacaatttttaattagaaatattttagctgaagtgtggtgagagactttttgtttagtactactggcttgtatttataaaacagtaaatttataaaagatattatgggtgtctagcactttttatctcatgtaacttaaatttttttttgaaaaaaaataacactaacaaatcgtaagacactaccgataaaaggtgttgggcactagtcctggtgctgaatagcaatactgacatttaatgcttagattggtatattcgtgggaactaaacaaatcctggtagtgaacctaaacaatacccgtgggaaaaattggaaaaccaaagtgctaatgctatataatcctttgaattcccacaacagttgttgcaatttatgactcgacactaatttatctgatcacatcaacaaactcatttattataatattgtgagaaaaagttaaactagttagatatggtcatacttttatatatttatttatttttattatatctaccaaatgttcgaaacatatatatcacattattggcgtgcgtgcatgccttatatttcttttcatcatctgtcttatttgtcgtacttgaggcgattgaaaaaccaaataagttgatatatgaaatccaaaacagttgaattggctctataaaaaggcatgacctcaaggtcagtaataagtataaataatattacatataaaatatggagagaaagatttacagttttgtgctcatcgttgc

SEQ ID NO: 92330 - DNA, 710 bp, Cannabis sativa
ctaaattttagttactgaagcatagttttttggctgttaaaagtgtacaacgaaatttagatgactaatatatcaaatttattgtgactaaatttaatatattttatgactaaattttagtcataaaaaataacactatttgtgacaaaatattttagtcactaaattttttccatgaccgactttcagtgactaaatggcgactaaaaataattagtcgtaaaaaattttaggtgactaattaatgagttttaatgactaaaaatttagtcattgaaaaagagttttcttgtagtaatgaagagagtagaatctgtacgagttgttcatacttgcaatattttggtatgaattcaccactagcctcataattgacattattttttttttcttcccatcgcccgttgcttttcaagagaactagtatagattccattacctgcaatattttgtcattatttcaacaattcaacattttaattcacaaacaacaatagtaaaaaaaccatctacatttgttcttttttgattcggttgtccagctgtcaattgagtgcctagttttatctatatcactaatttctaataaattgtaggtaattaaacaagatcaactttagaacaatgttaaatattttaaaattcaatgctgttataaaataatataaagtagatgagaggaaagaagaagaagatgaagagagaaagag

SEQ ID NO: 92331 - DNA, 884 bp, Cannabis sativa
  modified_base (27)..(28): a, c, t, g, unknown or other
actaatcagattgtaaagagttttatnnagggcataaaacccaacagagcttacaactaattgacccacatatgtacacatggagagaataactacattcatttatcttgccctatatacattgaagtaaccacctcgctaataccatcatgatcaaagagtactgcgaggagatttatatctatacttagcattttttctacaaagacaataaagaaagacaacttgtacttagcgaggaacaaccagcacagtcagcataaccgtttaaggataaagacaaaaaagttattgggtggttattaaatattatcccatgtgcataaaaatgaaatgtggggcatgtccacgtttcatgagcagttgtgaatgattagatcctaaagaaaataattgtcaccttatacacctataaatagagataggatccatggtaaaagggacgataaatttgagagaaaaagctatatattatattcattgagataattgtactctatatccagttatcatccctaataagacggactcgtggagtatgtagattttaactacaaaattacataaaatatttggtttcatttcaattaattctgtagtatatttattacgaaaaagtttatatatttagttaaggaaaatctgcattaacatacccctatctgttttggaagatgagaaatttttttatggtagtctatgttatagttatctgagacatccagtcaaattttgattcagaaaatttaacatgccaaaaatggtgttcaaatagtctgctgcactgcacgtatgatttatttattttatatgtgtgcgaaatagactgtttgaaccatgttaaatttttgggacttttttacttttacactttaaaatagttt

SEQ ID NO: 92332 - DNA, 1440 bp, Cannabis sativa
ttccttgacccacttcgttataatccacaattgtcaaaattaaaaaatatttatattattctacttacacttacttacatagagagtagagacagagacctaactatgttgttatgtgccagtattaagttttactgtgttgttattgtactagtattagatgtttttactgcttgttctttataaacaattagtttgtttagttgagttggttagtcttatagttataatcgttttctgttaattcggttaactttcctttcttaagttgtgtctatactgaggtctagctatttatgggctcacctcttctctcttcttaattaattcaaatttatttttctctcttcaagattatgattcttctatttctcaatatggtatcagagctggaaagataagctttcccgtctgatcctcccagctgtcgcgtgtcttcttctccagcgtagctgcgtctttctcgatcatcttctctgattgatattctcttctctctctgtacattgattccgtacaatggctacagatgacgattaaaccagagttcctgctgctgttgtcgatcttggcaatccttctattcaaactaatcaaagccttcaagttacttcaaccaagaatcgattggaagatcctacaagtccgcacttccttcatcatggagataaccctgggaatgcattggtgtctcaacctctcacaggacaagacaactactttcatggagcagggcaatgcaactcacgatctctgtgaagaataaaatcggatttctcaacggttctatccctaaaccccctgtttctgaacaaaatctttataatgcttggtatcataataataacaatgtgatttcttgcatcttaaattctgtttcaaaggaaatttcattaagtattctttatgatgaatgtgcctcgacaatttgaaatgatttaaagatctgttttcaccagaaaaatggtcctcatatatacaattcgaggaaagatcttacgaatcttaaaaaagaaaaccagaccataagcatgtattttattagacttaaaactatatgggaagagctaaccaattacaagccttcatgcacatgtaacggatgtacatgtggaggagtcaagaagctccaagatcatcatcacatatagtacattatatcattcttgatgggactctcggattcatactcacaagttagaggaagcattctgcttatagattctttaccagaagtaaatagggtgttttatcttgtgactcaagaagaacaccaaagaggtattgcccctaattctaataatatgctaactctgccatggctttcgccttccaatgtgataaaaatttaagcccacttcaactatgtagtctcatacatacacagtctcaggatcattgcatttaacctttcttaggcaatgtgggattgaatagctc

SEQ ID NO: 92333 - DNA, 876 bp, Cannabis sativa
aaataatattatgttacattgttgtttaagatacttttaaattattttttttaataacatttaaattactttcaaaagcaacataatcatcaccgaggaagagtaccgtaatataaaaaaaaaaattatattttagttccttttatattttataagagataaaacaaccaaactttaaattaaaacaaaatttatatattcaccaacttttggttacttaatcgttagtattattaaaattataatttcaatttaatgttaaagtatatatttttattgtttaatatacatttttgttactttttgtttattttaggtgacattatattgtcttgctgattaagatactaatatgttagttctacattataatttcaatttaatgctaaagtatgtatttttattgtttaacatatatttttgttactttttgtctattttaggtgatattatattgtcttgctgattaagatactaatatgttacctctacttgcagtaataaatttatagatatttttactaacttgtaaaattgattagtatattaaagtttgtttgagttttttttttataaatcacaccaaatatagtacttatccaattactaattaattttatttgaatttaaagtttttttttttctattaaatagaaaagaaattaaaaagttacattgagcatctttcttcttaagttatttttcaaaaaaaaaaaaaaaaaatctatcaaaatggtttgttaaaataacttttttaaaatactatataatttgtttaagaaaatctgaataataaaatatcttttagtaacctcttaaaatcgattgatgattctaaatttgttgatttttatttttggttgattaagtagaaaa

SEQ ID NO: 92334 - DNA, 1169 bp, Cannabis sativa
atccctaccgaggagtggccggcctaggccagcagcacaacacaggattgaccgacctccaccatacactctcccagagtatggttgtccagaccctagcgtattcaagcctgtagcccatccaaggatggccagttagtcaagtctctacagtaatgaatccttctgtggaagcacagttggatcaaataagggacatgatcaagggcctagctggtccaaaaccttcagaccttgagctagaccggtcaagaggaaaaccattctcagcatacataaatgccttgccctttctcaagttcaagatgctggtatggaagatgtataccgagcaagaggacccgcttgcacacatcaagtacttcgagatgcagttggatctccagaagattactggtgatgtgcgatgttgcatattcccagcaacttcgtcagatacaactcaacaatggtacttcaagctttccctaggaagattcaattcttggaatgagttttcacgagaattctactttcagttctcatcctcaaggcttataccatcgcaactagaagaccttgttgaagtcaaacaacgagaaggagaacctttgaaggattacattcagaggttcatggctgaggccaccaaggtcaaaggccttacagaagaaggatgatatacgaccatactgggggcattgtccattgagtgacttctggaaagatatccagaggatctcaactaaccacatgaaggagtttctcgacagagctaataactttatcaaactagaagaagctgtccgacaagcccaatcagggtaagtcgacaataggcagtcacagggcattttacagtccattgagtttccaagcgcacattcaggtaccagtaactctgcccaaacctctagtaccaaggacactaggagcaagcacaataacaactctggaagaaatagtagcaaaaaagggaagtttaacacttttcccacgccacaaaaccgaaaggacaaggaggagaagtatacatgcttcaccctcctgacagagaaacctgaggccatcttcatggccactctaagaacagtcccatacagaaagcctcttcccatcaaaagggagttgagcaagagggacatgtcaaagttctgttggcttcacaacgacttcggccatgacaccaa

SEQ ID NO: 92335 - DNA, 792 bp, Cannabis sativa
  modified_base (264)..(300): a, c, t, g, unknown or other
tttatttaattttttttttatcatgatgactaattattaaaaagtacgtacgatacatatatcacatgcatgaatttgtcccaacttattattcttcattaaaccacgttcgaatgttcctccatatattaattaattaattaattaactattttctattgttaatttctttgttttttctcctgaccttttgatcttctttatctctcacttcttttttaaaaaaattcactacaaaatttttatttttagttacaacaaaannnnnnnnnnnnnnnnnnnnnnnnnnnnnnnnnnnnnaattatcatttttatgttgtgactacaaagttcgtggctaaaagtattagtcacaaaaattataatttgttataactaaatgtatttttagttacaatacttgttgtgactaaaagtaaaaattagtaacaatttgtatctaaaaactatgtttaagtcataagtaattttttattgtgactaaaaattacatttacaaaaaatatatgttgtgattaaaagtttgtcactaaaagtaattattttttttttttgtaatgattattatatagaagattatatatatatatatggacctatgatctctatctcaacaagcaaaacaatattgtaaaccccaaaacatatacaaatagttctttccaaattatgaaattaattagtattcaaataaaattaatataataattacaaagcaactaaattgtaataatttatatacaatatcaatataatcgtaaatttttattttgttaggtatagagaaattat

SEQ ID NO: 92336 - DNA, 791 bp, Cannabis sativa
aaatcaatggagagtaccttgccataggaggtcatttagccaaatatctttatattacttgtgagttattacaaaagtttaaaaagatagttgtttctagaatgcctcgtgcttacaattctcatgcagatgctctggcctaattgacctcgacaagagaagcagagttactcgatgtaattcctgtagacgtattaactcatccaacaatcaatcgagatgaaatgatggaagttgataccgacaaaaaggtcacctagatgaccccattagtagactacttaaaaacaagagtgcttcctcaaaataaagtagaagctaaaaactgcgatatcgagccgctcgatatgttatttatgacgacaagctctatcgcagaagtttcagttagccattactcaagtgtatcgatgggaccgagtgcgattacatactccgtgaagtacatggcggcatctgcggcaaccatactgggggtaatttccttgctttaaaaataatgaggcaagggtactattggccaacattgcaagcagatgcatctggctttgttaaaagatgcgacaactgtcaaagaatagctacatatgtgaagagaccaccaagccaattaaattctatcacaagtccctggccctttgcaatttggggcgtagatctgattggggaattgccaaagggtaaaggaggagtaaaatacgctgtattcgctgtcaatttcttcacaaaatgggttgaagtaaagcctcttacgactataattgcttccaaattgcgcgagtttgtataca

SEQ ID NO: 92337 - DNA, 1138 bp, Cannabis sativa
gctcacacgtccatttacaataagaccttagaatatttcatctagattatggttaccgagtccaacctggttatgccttgaatgcataaccctaaatcttaatatacacatatatttatcatggcatagcatttacacattattaatcactagggtaataaccttaggccattaaaccgctcatgttagggtaataaccataatctcggtttctagttactcacatatatcattttcaatataagctccaccaggcataactctacatgcaattactatcttacctaatgtcctgcaaacgtggagattccaaatccccaagtgctcccgaccaactgtcggtaatcctagtcacaaattttaggatttacaagtatagggttaatccctaactccactttcacacaatataaacttggcattcaaatcaccgatattcacatagagctcgaaacgagctttccaacgatataaagaactccaaaaatggagtccagatcatcaagttatgaggattcgaatattacattcgaatttgcccagaaataaaagggcgggccgcgacactccccacataaggccacgacacctgggtttgaatcccaggccaacaaccagaggcgggccgcgacccctgggttccaaacccaaaaaacctcaaaaagtagcttcgaatttacatggtcaaacacaccaaaatcaccccaaaacctaatcaaactctcagaccataaattagagttgtcaataaatattcagagagttgaaatacaaatttcatgcatcaaatccaacaataaaaaccctcaaaaatcagatttaacaacatctaaactaagctccgaagcttgagctcaaatcaacacaactccaacatccaagacttgcacaatcaagccataacctccaatttcaagcaaacaaattcagagctagaaataacataataaacactaaatattacccaaagcaaagatcaaaagttttagacacaaacatgatcataacaccaagaacaacccaactaacacaaacatgcaattcaagatcattcaaagctcaaaacataatatccaacataaatttcagctactaatttattcagagttgaaacactacctcaagcctcaagcaagaa

SEQ ID NO: 92338 - DNA, 652 bp, Cannabis sativa
aaatagaaaaataagtggtgtcctttttttttttaatgagctaaataagtggtgttcttatgccctaacgttagcgtcttttgaaggaaaatccgacatttattttttttctttttcaatagttgtccaaaggatttagaaaattgcaaaaggacacagaagtatctaataccattctaaattcttttgttttttcttttacaaaaaaaatgtacaccatttcaaattgttatattgctatcggccaattactatctaactatactcacaatggattcgagcggagccagaacttaattactaggggaggccaactattaatttttttttttcatcccttcactaaaaaatctttttaatatatttcctatcaatttcgacaactaggaaagcttttcagtccaatattttttcatagtcgtgtacattacaatttcacagatcacttgtaactttttaaaaaaatttaaataatttataatgctaaaaataaattcacaaaattacttatcacgcgtataaaaaaaatagtcacacatacaataaaattttttaaccttatttttagcattataaacaaattagatatttctggcctctaaagcctcaccagtctttgaacttccttctggtatcgaggacgctgtgggaa

SEQ ID NO: 92339 - DNA, 997 bp, Cannabis sativa
tgcaagcttcaaaactagaagctaggaatatttatgtctcaaaacacaaaactttcctagcttttttacagcagaaggcaaagcttacttgggcgaaggatggagataaaaactctgctttattccacaacagtattcgtgaaagaaggcgtcataatcaggtactttcaattactaatactgatcggaaaagagtagatgaacccaaagatgttatagaagctttcattcactattatttggacttactgggtaccagtatgcgaaacaatattagtgtcaaacaagggattctaagagaggggaatgcattatcaaacagccaagctgattttctaatggctgattacaccagagaaggtgtcaaaaaagtgattatggcaatcccaggagtcaaagcccctggtccagacggattcgggagctacttctttcaaaaaaactggaaaattattggagatgagattgcagaagccattatttcttttctcaaaacagggtgtttattgaaagaaattaacaatactgtacttactcttgtgccgaagctgaaatgtccaaacacggtgaaggattaccgaccaataccctgctgcaatttattgtacaaagtggaaactaaactaatctcctcaaggctcaattgtctacttcctaatttggtatcccaaaaccaagggggatttgttaaagggcgattcattgcacacaatataatgatttgcctagatcttgtgcgtcattatggaaggaaaatgtcaaaagctagctgcataatcaagttggatctacagaaagcttatgatacggtagaatgggattttgttgaagagatgctacatggcctgaacttccccgattcattcataaagttgattatggaatgcattcgtttgcctaaattctcccttatgatcaatgggtctcttcatggctattttgctacaaagagaggattgaggcaaggtgattcaatgtctccattaatttttgtgct

SEQ ID NO: 92340 - DNA, 840 bp, Cannabis sativa
  modified_base (687)..(691): a, c, t, g, unknown or other
aaagttgttgtgcaattactaagtcgtataatgagtagtaagttagtaactatgtatttagatataagatggtaattatacataaattcttagtattttgtttgataataagagctaaaataattggcgactccaattgaaatctctcaactaattctaattatgtaggtacagctaatgtatggtgataaattgtataactaactctaattaaatttcaatataatttcattgtcactttttaatcttaccctaaatttatataacactaataaagaatatgttttacttttatatatataatactttttaatgagtattaaacattgattattaataaatttagctatagatattaatttgaaattattatataaaaaatataaattgatactttatttacagaaatacattcataaggtgtggacaacatttatagtttttatgtgattttaattaccaaaatacatcttacactatcacttatgtgattttaaaactgaaaaaagcccttaagtttaataccatatttatgtaaatttttcattttttcccataattttgaaaatagcccttaatattagggatttttataaaaatactagattttgagcaaaaatttacaattttactaccacacggaatgttttaccaaaatactgtcttttttataaaacaaccgtaaannnnnaaaacagaataattaaaaacaatattagaacgagtcttgtcttttgacatgtgtgtgagatgtgtgttctaagtttgtgagtgtatgatctttgctctaagttcctttggccttctgtttgtacaatctgatggcgtctagcagtaagc

SEQ ID NO: 92341 - DNA, 801 bp, Cannabis sativa
tttttttccttttagtttcgttttataaaaaccaatcatattgactttctctcgccttacttctaaggataggtcatagatagaaaaggttttctcgaggacaactataattatttttctgcatagatatatagttaatttttttaacgtggtaaatgtatcatactgacccatatttgtaatgaggaacttctttgatggatttataagcaatggaagagggcccctattggagactcatactccaatccaatgataatgatgcatatgtttataccactctttagtctcctcttaataattttgacagcactgaattgatatactaaaccacactgtcgaaaaaagttagtagggaagaatgagaaccacattattattatcactatagcacttctttttgaatcacatataattttattatgatttgtatcaattattttacctatattaattgcaactatgctacacttaacctcatatctctcattttcataataatttagtgtctattataatctaatgatgttaattacttttcaaaaagaaggaaaaaaagtgaaccattatagttatcattattttaaaggtaattatcataaattttctatcagaaaatgatgtccactgtgtttttttttttttcgttattttaagaaaccagacttcaaattagaaatagtagtttagaagaaaaaaaatagggtgctattttagattctatatttttacaaaagttaccgatgtcttttattttgttaaatagcaaaattaccatgtattttctacaatagtacaaat

SEQ ID NO: 92342 - DNA, 539 bp, Cannabis sativa
acaaggtaagaaatcggttatgaatgcacaataatcttaccataaaaggaaaaaatattttgccaactaacttgcaaaaaaagaactttacactcataaaataagtggagaaaatatataaataaaaactacatatataataaatataggtaagttggccatccaacaaaacaaaaaattaaacataacaaaaggatatgaaaggaaaaatattgtcttggctaatagaccattgttcaaaaagaaaactaaggaatttaaactaagcctcctcagttggagacttagaaaggatctcgctttcctcattttgtctttcctcaacgactgtttttggtccctcttcgtccccactctcgcctagttcatctagctccatctgcttgaaaagggtcaccattttcttggcacgatcaactaaaagctgagctccatgcccttattgttgctcatctataccttgtaaatggagcgttgagccactttattgactctcttttggctcttctcatactggagcttctgttcctctaactcat

SEQ ID NO: 92343 - DNA, 619 bp, Cannabis sativa
ttagacattgggaatgctgggaatagtcgagattttagaatttcccaaaatacacttaagtgaccttttatgacttttagtgtggaagggcaaaatggtctttctgtccatttggtgttttgtctttttgtgggtttatattatgttattaatttgatttcgattaatgttttaggctgatatttacaataaaacaaaaccatttttctttcattaaatcatttttaaaaaattagaaaaaagtaaggaaaaagatctctctttcaactatctctttctctctctcgaaacccctagactagctagggtttgctggtttttgttccttaattaggaattcagcagggttgtagtgaacctaaggcaaggtaaagtctttaagcaactccctctttagctttcttgagtttcaagtttggaattttgcatgaatttgtagtttttgctgctgttgttgctgtagctatttgttattgtttcctgaggtttaattatgttagattatgttgaattaaacatgatttagtggctgatagtaagtttagtcaacttttgagttttagaactcaaacttggagctttaatggtgtttttcaattttgagcttgggtagttattt

SEQ ID NO: 92344 - DNA, 1404 bp, Cannabis sativa
acttttaaatatgataaacctaaaattttaatctgcctaaaccctaaaaaattacccaaaaaattaaattaatatcactaaaaccaaatggagtgacaaagatgaaattaatagcatcataacctagaaaaatgaaaaagatcggaggaaagaagatgggtcacttaccgttgaaagttgaatttttgtacgacaaaaagctatcaaactgaggacgggatgaatggcgcgacaacctttttgaattcatgaggtcgaacagtatatccgaatggatgcgcaagaagtatatcaatgacaatgagggcatgcaaagcttcagaaatcagaatggttttttgcaagaaaaagctcaaaattttttgaaaaggcagaaatggtggaaaattggttccggtttagttttatactttgagatggattaccgtcaaattaaaataacagagatctaacagataggaacaagagagaattggaaaagatgggtcattaaatgctaatgatgtgcctcaaaatcatgaaccgccaaattcaaaagcatgcaatttttcaaattgaattaaatagacctttttattaaaaaaaaaaaaagaaatttttaaggggcaattattatacccaaaattcggctgtaattcagagagtgacacgtgtcaatcaagtggaatatgaacctacagatataataatgattatatcattaaattcaaaatagaataactcattaaatatagaattaatagagtatattcataactcgctgactgtatagtcttaggtgagacatggatacactgactatcaattcatgtattgacgagagaccatcttgcctcagaaggcataatcctgatggaactacaaacaatgcatagtgagacatctacctcgctacatgtaacaaagtattggcgaggaaaatcggctgttgaaacacttaaagtataatccacagtataataactaagtgtaacaacttggaaacatgcagaacatgatgattgtcctccagtctacgaggaggccttgtggtcaaagagcagttcttaagtttgctcagtacactggtgctcatgccattgcttgaaggcatatgaataaaccaagtcattattggtcatctatgtacaaagcaagatgcctctagcaagatgctcctatccacgtcagcgtcgaccgcctagaagataggagtgataacggttatgcagttttctagtgttatctacacgtgtttaaatggagcgtgatcgaagcccacattttgtaaaaatagttatgtaattcaaattcaaatgtaaataactaccaactgatatcctataaataggggcagaaaaaaagaacgaaaaatctttgagaggaaaagatcactgattgtaatagttgttgggttttatgccc

SEQ ID NO: 92345 - DNA, 757 bp, Cannabis sativa
tcaacctcgaagagagagataggggaaaagctccagcctcgagatatcaaggtcattggtactgagttcctgtcgagatgccccagaacgttatgatttaaaacgtgtttaatacacgattatcttgacccagtaaaagcgaattaaatcacagctgtgtgatatttaaatattaaccgtatttattttacgagatatgtaatcaaaccccacgatttcaggggatgattgttgtaaagattacaatcaactctataattaactgcctgactatgtacttataaatagaggcaagttagactgaaaacgggacgaaaaaattcataagagaaaaagcccaagaacagtatcagaaatttgataagattgactcatggactatgcagaattttaactgcaaaaccacgtaaaaaaaccttcgtgttaatcattttcttcttatctctttactgtttttatttttctatgcaagtttatcactattcaggctcaaatttagttaacgaaaatctgcgttaacagtttggtgctttcattgagagccttcgtgtaaaagctcagaaaaaaccctccttacatataaaaaaaacaatctccttcatggttaacatagagaacgttaacacaccacatgaagaaactcatcaccgtcctgaatacgagcccacatgctctagaaggccttccaactcatagtctaaatagaccacatgatttaagaccacgaggcagacctcgtggctcatgaaccaggaga

SEQ ID NO: 92346 - DNA, 624 bp, Cannabis sativa
ttgttgttgtagatttgagactaattatctcaaatttggatttttcctttttgttgtaactatagtgttcactattgaagagatttttcgcggactattttcaaccatcacttattttacctagttttgtaacggtcgatagttataaagcccgacatacattatatgattgtttaaaactatcagaaaattcattttttagcagtgaaggttgaataaagtaccatattattttgtgtattttctactttttattgactcctcaccacaccatttttttttaaatataaagtgattttattctataacgtttaatcattataatagattttaaggcagaggagcatcaagctcaccacaccattttttattaatcatttggatggaatttcttagattctactcggaaatttccattattattattattattattaacaaaaatatatattatattttttatttaaatttcagataaaattattatatagattttaacaaattttgacattagattttataatttttgttttcattttttttatgtgtgaacttgtgttaattatagattaaatataattcaagataatttatttaggttttttttttccaacaaaaaaaaat

SEQ ID NO: 92347 - DNA, 753 bp, Cannabis sativa
ttttcaagaaattctttgattagcaaagacaacactataattgacaaagcactgtaacatgccttagcattagggcgttacaaaagaacttatggcagaaataccattttacccccacttaagccaaaaagccataaaatcacttaggggtatttttgtcaactctaaaatctcgactattcccgacattaccaatgtctatctatattgcctcgctatgataaaaaaaatactaagatgtgattctaatagcctaaaactgcgttctaatgttgtcgggcacaaaacatgcaaaaatatgaaattccatatataacatataaaaggcattctgaattcaaataaatctatgtaaacagataattcataactactaaataattttcataattaagtcctatctatctgttaatttccaaattaaagctaagcggtctttataattacccctccccccccttaaaagtatttcgtcctcgaaatctaacctaaacaactcttgatattgagttctcatgtctgattttaacgcacaggtggcttcctcaaccttgctatttctccagagtactttgaccaaagctatggtcttgttccgaaggaccttatcttttttgtcaaggatttgaactggctgttcttcataagacatgagtagatctgaaacgtacttctataacacagaacttgaaatacattgtgaactgctgaaagagctggaggcaaagctaaacgatatgccacttgtccaac

SEQ ID NO: 92348 - DNA, 694 bp, Cannabis sativa
atacaattgagtatcttagatttaatggggtaaaatagctagacattaaaattgttgggattagacgggattgtgattttggaccattttagtcctaggttaattttacttcatggttaagaaatgggaaaattagtaattttcccataagttgcctttagtagggactttaatggtttagaataattcagaccctattttatttaattaattaaattaaaagaaactcatttatccaaaattagaaatcaaaagaaaaaaaaccaagtctctttctctctttcctcttggtttgaccttagcaaaccccaacaaccaagccccttttccttcattttagaccaaaaattaaaggggtattttgtagtaagctaagggttgtcatagctaagccaaggtaaaatttttatccattgttttctttagttaaagaataggtttttgcatgcaattgttgagtattagttattgttcgaattaagaatgtttgaaaatgttttatgatgttgtttcttggttaattgttctattttaagctggttttgttaggtttaacattgtgttgagctttcaagctcaagattgaccctttaatcatgattttttagggttgatgattaaaatttttgttggaatagattgtttaaggcttatatagttgttctggagcttgctccaaggtaagccctaacct

SEQ ID NO: 92349 - DNA, 570 bp, Cannabis sativa
ttcccccactgtcctagccaaaatattaccacaagttcctcacactggcacaattcatcaacttgtgttttgtcatgcgtgtcaacttggtaaaagccataaacaaccatttcctagcacagataccaaagccacacagcccattgaacttgtccatgctgatctatggggaccatctcacatcaaatccaaagatggatgtatttactacattcattttcttgatgactatagcagatacacatggatttaccttctcactcaaaaatctcaagctcttgacatgttcctaaagttcatagccattgttgaaaaataatttaacctacccatcaagaaagtgcaagctgattggggtggagaatgcaggccattttctagatatctaagtaggaatccactttcaacatccatgtcccaaaaccagtgagcaaaatgggagggccgaacgaaaacatagacacataactgaaatgtgaccttattattcttgctcaatcaggtcttgatttctcttactggtggcatacctttcacattgcagtctttctcattaatagactaccaaca

SEQ ID NO: 92350 - DNA, 565 bp, Cannabis sativa
tctttacaactaatattctaacacaaagaaaatatctccaatacccacaatcttcgatgcaccactgtttcccattctgacattgtcaaaatcaccagtagtgtaagaagtgaagaattcactacgagcagtaacatgtaatgaagtgcaaggatcaatcacccaactgcaatcttgggttgcaagactaacacacccatcatcacatacaatgacaacatcaccttcagtggaatctgtattagtctatttctcattttgcttcccttgattctgctctcttttcaatattctgcaatcctttattaagtgacatggcttgttacaatgataacacttgatatcttttcgagatttggatcttcttctagagccattttgattttttgtctgacttcgtccccgcttgtcatgcttttcagtaacaagaaccccaaaagaagaagattcaccttatgctttccttctggcctcttcattaagcaaactatctttgaccaaatccatagtcaaagtcccttccgacgtggaattagaaaccattatcaccaacgtttcccaactg

SEQ ID NO: 92351 - DNA, 678 bp, Cannabis sativa
attaattgattaataaaagtgttatttatcaacttaccccaagaataaaaacaaaacaaagcccatgaacgagagcaaattttcgaccaagaaccactagcctcctctctctccccgctgccacgtgtcaatgccgggaaacttctgcacccacgggccccacacgcaaagagcatgtccctcacttgtcttcttcactttcctcatgcccaactgagtgtcactctccactcccagcaatgtgtgtgtctcacacaccagcccgagcatggggttctctctccgcgtggaccacttgcaacaaaagaaatattttcgccccctaaactttgacatgtactaaatcatgcccattgaacttttaaggtcgttaaagatgtcccctgaactattgagattgttggatttaagaattttttttccaattttagtaaaaaagtctaacatggataaaaattcaagggccataatttagtacatgtcataattaatttgagggccatgatttggtacatatcaaattcaggggatcatggtttggccggtttgggctgcaacttgacgagtgttgggctctcatttggttttcccgacgtttttaaatagttgtttaaagtattcccatcggtttctataaccgtcgcctatacgactgtcgtaaaacgggcataataggcg

SEQ ID NO: 92352 - DNA, 969 bp, Cannabis sativa
ggtaaaagtaaaagtggtctgttttagtcgattaaagataggatttggaataaaatttttggctggaagtcaaagctcttctcctctggtgggcgtgaagtgttgcagaaatcggttattccggccattcctacttatgctatgagcttgtttcgtttaccagttggcattattaatgagattcaccgtatgtgtgccactttctggtggggtggggacgatgataagaaaaagatgtattagtgtacgtggcctcgtctctgttggcataaaaatgatggtggtatgggctttcgggacatgtttatgtttaaacagtctcttctagctaaacaggcttctcgattatataactcgcctaactccctggctgttagggtaatgaaagggttctactttggtaatggggtcatgatctctggaaggatggctgtcgttggcgtgttggctccggcgagtcaatcagaattcgtgaagatgtgtggatccctaaggatcatgtggggcagacgtactccttctcgggtgggtcgcacctacaaagggttagtgacctcaaaattgattctggaagatggaattctgatcttgtggatgagtgttttgacgcaggggaggctactgccattttatctatcctgtgctccttgtttgatagtcgggataggtttatttggcatttctctaataatggttctttctcggtaaagagtggatattggagcactgtgtccaggttggggtgggaccaagcttcaggcccctctggttcttctcagtggtggaaaattctttggaaactgaatctcccacttaagataaaaaaatttgtgtggaaggcatgtctgaatttcatcccgacttatgcccacttatctcgccatggtatgaaggttttgacaatatgtccaatttgctctcagaataatgagactactattcatactttgtggctctgcccttctctta

SEQ ID NO: 92353 - DNA, 2251 bp, Cannabis sativa
acaaaacatctccattattacctactaagtactttcttctctatttaacaaaaaaaaaaaagtactttcttctctcactctctctctctctaaaatcttataatagctagatcaatgggtgcactgaatgatgatgatctgaagtacaagctctatatatatattctttatataattattgtattattaaatataatggttgctcagatcagatgatcatcttcgaatttgctgagcagtcatttttatagtcggcaggttggccgataaaagcataacattaatttgtaattaactgaggaattaattcatcctcactagacgtcgtttatacttaataaatatatatcatgtataagctggcatgtgttttggccagaacacgagaaacttgtttcaatttctttccttgcgtatcacacaaaaatagtcccaatcatataaatatatatattatattgatccgtcaaacaaagcatggcacttttttaagctaagctaagctataattaagcactccaaagtgatcatatagttgattccagcgaatccagccctgatgtccttttctgcgaatgatactaaccgatttggtcaattggtcttaggcggtgagtgaccagctctctttggtgtttggtgcaactactaatataccaataacaaataggggtttttacaagtataaccatatgaattttagaaattttaaaaaaaatactataacaaggaaataaaaatatttatagtacctaatgtacaaaagtactatatttaaaattttatatcgctatcgagaaaaaaatctagaccatcataaatctaatgaggtaattgtaggtttggctaacataaatcacaaggttgataaagaaagctaggccatcatcctgttgagatcacttccaatcacatatcaagaagttaaggcagttatcaagtatgtcagaaatgtgattgcttaggaagatgttcttgtcgcacttaagttgaaagattttgaagtgcagttagagaaggaatccaagaaagaagaagtgtatttggaaagagaaagatcacccaagaatgtaagttagaagagtaaataccatcactctcaatcaagatcaaagtcaagagagaaggaaacaagaaagtgttgcttctgtagaaggtctggacacttgtaatggttttgcaagaagtacaaggagcaacaaggattcaaaaaatctcacaatggagacaggaaggacttctggcaccatcaccacgaaaaggattttgctgcaatcgcgaaagatagtgatgactgctccacggatggagagttgttctctatgttggagtcatctatgaacagggagtggattcttgactctggatgtacttatcacatgtgttcgagtcgagagtcattttttgattacaagttagttgatggaggtaaagttctatggagtaatgatcattcatgcagggttattggaaccggaaaggtggccatcaaacagtatgatggcagaatcaaggtgctgatgaatgtaagacacatccttgaccttagatgaaacctcatatccgaggtgcgcttgaagatgaaggatacgtatacaagtccatgcatggaaacctaaggatcaccaaaggttttttcgtagtaatgaaatgtgaaaagataaatggtttgtacgttctctaaggagaaactgtttcagcagaagaagcaagtatgatgaaagggatagaattgaatatgaagttgtggtatcacagacttggacatattagtgaacaaggtcttaaagaactgcaaaaacaatgtcattgaaaatttaaattcttgtgccttaccattttgtgaagcatgtgttttcaggaaacaacataagctaaaagtcactctaacaaggcacacaacaaaaaagatactcaaatatgtgtacactgatccttggggaccatacaaagtgcctactcactccagtaagcaatattttcattcaatagttgatgattatagtcgatgtgttaagacctacttattaaataccaaaaacgagtgcctggaacaatttagaatttggaaaactcaggtggaaaaccaaaccgatcttaaaattaagaaccttataactaataatgggttagagttttttaactctgaatttgacaagatgtgtcaacagatttggatcactaggcatagaaatgtagtgaagaccgcgataaataaatggttactgaaaggatgaaccaaaccttgttg

SEQ ID NO: 92354 - DNA, 508 bp, Cannabis sativa
agttcgagcctctctcaccccaaagttttttattattgtccctaatatactagtattatatttcacattttccaattattttagcttttgctcaaattttatgtaatggtaccacactttgattaatgtatgaatggttgtggaaagtaaataaataaaactttactactagaaaaagaagtcactaacaatattacaataccattcaaaaaaacaatattacaataaataagtattttgacctttaaattttggttaaaaaattaaatttacttcctaaattattattgatgttaatatttttgttaagagtatctccaaaagtagtatcttttaagaatgataataatttatacatcatctaaaaatataatattttattttatctatttttcacatcatttttagtacttacttctaaaaacactctaatgtataacactctttaaaaatgctataattgtgatctcacacattattatttaatataggggctttttcattttta

SEQ ID NO: 92355 - DNA, 619 bp, Cannabis sativa
actaattacctgattatcccaaaatatatattaaaccctaataattcaccattaagcttattgggatattacaaccattcccacctaatagaaatttcatccttaaaatttacctaaataattcgggatacagctcccacatctgcgactctatttcctaagtttattcctcaactttattgttcctccatagtactttaacgaaagggatattttactttggagtactttctcctttcggtctagaatctgaacaggctgttcctcctaagataagtctgtctggagctcaatatcatcataactaaaaatatgtgtcaaatctgacacatactttctcaacatagagatataaaagacattatgcaccccaaaccacgggggtggtaaagctaaccgataggtcacctggcctatttgctctagtatctcaaaatgaccgataaatctaggactcaacttccctttattcccaagtctatgcaaccctttcataggtgatactctgagtaacatcaagtctcccgcttgaattcaatgtccctacgctttagatcaacatagcttttctatccactttgtgaagcgagcatacgggaccaaatcttttcaatggctt

SEQ ID NO: 92356 - DNA, 771 bp, Cannabis sativa
actaaattgctgcattttgtaacgcctaaatctcagtcagttcaggcaaaaaaccaccaaacaagtgccaaactgtcgacgctaccacttctcctctgtcattacgagccaccatccctaagccacaaagaccagacttgaaataaagaattgcatcaacaaatatctttggttataccttaatgtggtggtaaccattccgagccacgccattcatcctaggaatcacctcacaaccagtgcgagaatcatcctgttgaaactcaaaaaaaaaaaaaaatcacgagcccatgtaactgttggaaaatcttttaccagtgtcttaatttactactcatgtatgttggattataactaatctaacaccctaatatagaaaatattaagaaatccttacattgggtacatcaaaatattatgtctcattccgttcagatctctaacccttgattcctgtttatagcagaatattatcaaaatttgaaaatggatcttctcctccttcgattgtgttcatcacaatcttccacgaaggcttgagtatcaacttgaatagtatgggttgatactcaaaacacatttggaacaaatatttagagaatttaatgactttcaaaaataataaagaagagatatagttgtctcacattgaaaacttaggttggatttttcttctcatcactttctttatataggcattcacatagggctaggtttacaatgagatgagttgaaatagaagacttgggctcaaatcaatcctctacccga

SEQ ID NO: 92357 - DNA, 901 bp, Cannabis sativa
tgaccaataatccactaagtgatattgacttagaaaagatacaacgatatgtatataatatctttttcactgtcagtattagtctagtctgatgtatagccaatacatctaatacaagcttatattactaatgctctgaaaaagacaatccacttttacaagtgtaagtaaacctcatcgctagttatcacgtcaatgtaaattcactgcactgacaaatcatgagattaaaatatttgaattatataatcatcatttccactgtgtagataacactataatcatgaataacaatataattgagatttaatagaagttatatatcaaacatatgatcctgaaagtagcatgtgaaccaagcaatatacaatatagtagaaaagtgatttctaaacaattattgattaataaaataagattatattgaagttagattttatttatggcgttaaatctcaacatttcatgtaagaaatattttaaaggttagaccattatggacaacccttttatcttctgcttgcgaacgacctcttagggccatttgtcttgggttcccaatattacttttatctttagtatttaattaaagttaaactatacatccaggaacttacccggacatgttatgcgaatctatgtccaattgaaagatgggccatcttgtttgtctacttgggcttgtggatgggcatggtagcttagtgagcgtcgaccgcgaggggccacgtgtaaccttttcaaaaacacgaataacaatccccattagttactacaaataccgctcttcaatcaatattcatttcaatttataaatgattaaaacaactccacaatgatgcttattatcaatttatataatcaaaacaacttataactcacatgggtgtacggacaacaa

SEQ ID NO: 92358 - DNA, 1171 bp, Cannabis sativa
cagattttatggttttttcctggtatttctatgattccggtgttgatgtatctgtcccaaccacgaaggagaggtttcgtttgtgttttgttactgtttacagtataaaagtaaatatattgggcctgggcagtataaaaaaataaaaatgggcttggacagtaaaaatatttggtaaaaaagcagtatttttgtaagtttccctttatcaattcctctatccttctcctactatctctcctcttctcccctctaccaaatatagtgttaatctctcaacaaataataatatataaataaccttatctcctttatgttaacaacatatttttttaaatctgtattaaacaatatcctcaaaatctcacttttataagttgtatttagttaagtttttagcatatttaaaaaaaaaaaaaaaaactattagagtatctccaatgattaaattatagagaatatttgtttatttaacaaaatacaagaatgttatgccattgaaataaataggtgctaccataaaatattatattgatgctatcacttctttaaaaaaaaaaaaaattaaaggtaaagaaaattaattcagtacatctataatagttaataaaaaaatgtgtatatatatattaaagcttccattttatttataaagatgtgcaccttttttttttaataacaatactatatatactcaattttcttttactggtggaagcttaaagttttttattattttttctccgtaaatactcaataataattatttatttctcatattaattgttcttctatatattttcacacattatttttctacaatttagtacaatttttttatttttatcaaaaaaattaaattttttgcatagttataatattcttgaaggtaataattttaaataataactatttctttatattaatatatgattttttttttttaaatttagtgtggtaatatttataattagaaaatggattcgaaaccctaattaaaatggactaattgtaattgagtaattatattattatataattaattatgtaagattaatcgagaattattacatttaagatcctattagttaggggtattttcataatttttacctaaaaaggataaaattataacttttgtaatatgttgtgctaatggactatattatta

SEQ ID NO: 92359 - DNA, 620 bp, Cannabis sativa
ttaaaaattattcttaatatttttaaacaaatatgttcataatatttgatgttaattttaacatttattttaaactttttttcagataatttttcattttaattattttgttataatatttaaaatatgaaaaaaaaaaatcataactcataatattgtcccactagcaaaacatattcaaaaaataagtagattaccatgtaatattaatgaatatattaaaatctcaaaattatctaatataagtgtcactattattttttattttattcatcagtctaataaaatacctacatgggagtcatacaaaaaaaagaggttttacacaacatattatttttaagttaattttaatattataccatcaaaataatttttccttacatttttacaaattactttttttattattattatttttataattttacaaagtttaataaaaacaacaacaaaataacaaattgctaaaaaaacaataacatgaaatcaagagtctctatttctattaaaaaaaacttaacatctataaaagtatttcaaaagggaaaattcatttttaatgtttaaaaaaataccctctaacaaaatttagactcctaattaatttatacaattaa

SEQ ID NO: 92360 - DNA, 510 bp, Cannabis sativa
tgacttggaatacaaaaccaatttgagatcttcttgtatccaaatctattgcatagtctgagtctacataccgtaacacttctaattttttagtcttagagcagtaaaccagtccaagttttgaggttcccttaaagtacctcatcatccatttgacagcctcccattgttcttttcctgctggctcatgtacatgctgatcacactcattccatggcacaaatatagtctagtgaaaatcataatgtacataatgctgcccaccacactgttgtatggaatacctctcatatactccatatcttttgctgttttgggtctttgagtgacatagagtttaaaattttgagcaattggagttgttattggtttggcattatcaaaaccaaacctgtataaaaccttagagatgtaatcactttgagaaaccaacattcttctatgttttttgtctctaactatctccattccaaaaatcttcttagatggactcaaattcttcatttcaaa

SEQ ID NO: 92361 - DNA, 595 bp, Cannabis sativa
cgtagcattcttgaggataatgttatggctgaccttcatgccatcttgtattccgaatgctagttttaatgaagttgatatttcattttttaaaaaaatgttactttttcaactccaaaaaagtatcacactttcaatacttgtgatttgacttgtttattcaacttgataattattttctctgcttgaattgttagggactaccaataagctagttgcagattatgattagtagttaaagatacacttttatttattttaaatgataaatttaattgagtttcaattaatatttttgtgaaattattataatatattttataaatgaaaatatttgattttaattcaatttatgattttcttgtagacattaacgtatatttttgttgaaataaagagaaagaagcaaaattaaaaagaaaagaaaaaaattacatttttgttgaagtccaaagcaacctaaccaaaaaaggtcaaacttagcccatcatcaattttttctcttccaaaacatatgataaaatgatgataagtctaggtcatcatcaactccatttctctcttttacactcaatcttcatccaaatattagaag

SEQ ID NO: 92362 - DNA, 757 bp, Cannabis sativa
tttggaaacgaggtaatattagcacagaatatatatgtatatgtgtatgtatgttgtatgcatgttcttatatgattcatatgctatcaacactagtacggaagcagtaatgagtgcatgtgttatagcctatgatattaaagagtacaatccggtgttatcagcactagtacagttgggtacgtagtacggttcaaaccctaccaacactagtacagtagcggtacgtagtgcatgtggtacagaggtcgtaccatagttaagaaagttcttaatcatctgttaagccttgtggataggtgtatgggtgcctaaatacaagtcagtaatatattgtatgttatatacttttcttattaagtttgtcgactcacagttattgctcgcatgtgtgggtaaaaggaaggctaaggctgagaagcaatagtccagagctcgaagatgattgtacatgtcaagatggtgtgacctagagagtttggtttcgggatgacttagtcttattttgtagttgatgtgcagcataattgtaatgtttattttgaacatgtaaacaatttcaaagtgggatcatgacttatttttatgattatataattatagttattaaagtttaatattactcaaaaagttttaatttatcacaatttttgagaaaaatattttgattagcaaaggaatgaatagtaatcaaaagatcactgtatcgtgtctaatcattagggcgttacactttttggtatcagagctgccaggt

SEQ ID NO: 92363 - DNA, 1039 bp, Cannabis sativa
gccaaattttagcccaccataaattctacattttgtaaattacatctttaccactttaaatcagatattaaaacaatataaataatataaattattttgtttattttaaatgaacattaatggtaatattaatttttatagttaatttgaatcttgtgcatttgagcacaaatataaaaaatagactaaatataactttatggtatattttagattaaatttaacctaaaatatacactatctattgaagattgtcttatgaaccatatgattatattatctagaaataaaaataaaagttacaacttattaagagatttgagaattgtttacattatctagaaaaaaaaattggtagaatgtgagttgtatatatggtaaaaagtatttcagtatttacccttttttgaaaattaataaccgaataaatttataatcttgtaaataagtttataagctcttaacccaaattaactaacacaatttcgataaatttatttataaatgaaatgttatgaaagtgatgtacatattattaggtaattttatagtagaattttcttaaaaagacattttagtacactctttatttatttcagcaattaaaaaaactttttctttttcttaactgtgtattatatgttgtagttattttctatttttcataaaattttaaatactttataataacaaaataatttttctattgaattttatttttaacattgtataatataccaaatattataaaatttcataaatatgtgtaaataacaatgatatatataattatatataaaaaaaaattactcaaaaatttacctaattatccaaacaaatagataattgatgtgatcaatgcatgatcaaacacctcgcaaacaacacaatacaaagaactcgattaagaacagaactatacaactgaaaattaaacaatacaactgtgaaataaaatcagtaaaccagttgcagaaaaaccagtaacaagaacttgaatttggcaataatggataatcaattttaacagtaaaagaat

SEQ ID NO: 92364 - DNA, 5771 bp, Cannabis sativa
  modified_base (45)..(69): a, c, t, g, unknown or other
aacataaaatgttatttctgatttttattaataagtaaatctgannnnnnnnnnnnnnnnnnnnnnnnnggcacaaaacccaacagtatcttgaagtgcgtgccaagaaaagaggctcataaggtatccacaagacactataaaaactagactcccaataacacttaaaagaatttttcaaggctgtgggtgcaagtgttaaacacagaaattaaaacttataatttccaaggttagatgaaaaataaatcaacaacgaaaattatcactcaaccaaggtccttgagaagtcactcagcgaaggtccttaagaagtcacttggctaaggtcctcgagaagtcactcagccacgatcctcgagaagtcactcggccacgatccttgagaagtcactcggctaaggccctggagatgtcactcagtcaaggtcctcaagaagtaactcggtcaaggccctcaagaattaacatggccaaggtccttgagaagtcacttggccatggtccttgggaagtcactcgaccaagctccttaagaagttactaagacaagatcattaagaagtcactcagccaagctcttatagaagtcattcagccaagactcttgagaagtcactcagtcatgatagtttagaactaggtgtaatcttcccaagtaaaagaagaatgaagcaacaagaatacgaacacgaggatagagtaagcatgtgaggatacaagttcttaattcaaggaggtacgaggagtggtagcactgcacctataagttctgaggacctgaccaagggtactctgtagccattatccctggagaccgagaccacttgacacaagacaagagtacgaggttcaacaccacctcctatgcttgtaggtttcagggtgaaagcaacactttctccttttgggaccaccatgtacctcaagcttttacagcctataaatacccctcctccatatttaaaagggggttagaaaatcatacttgtaacactacattagagcaatatagattttattattcttctctccatttcaagataataatttcaatttatatttccttcttctcttcatcttaattctgatcttagagtgtagtttgattttctagcaaacaagttagttgatgagttctcaccgtcaacatgttctgagattgataaatacaaatacaaaacctttccagtcattgctttcggtggagtagaaaaatgttcttttatcccctggaatgccctctcacattcctccgtccactcaaaccgctttttgcctcgtaatacattgaagaatggcaaacattatcagttgaatttgagatgaacttgtttaatgcatccattttttcagttaatgattgaaccgccatcggttatttaggagggaaaatatcaagaaaatcccttattttctctagattagcctcgatatcccttacatttactatgaaacaaagaaaatttctagagaaaactccaaaacaataattctttaggttcaatttaatgttatacttcctcaaaattgaaaaacattcttcaagttcaataacatgatccttaattttgattgatttgacaggcatattgtccacgtatacctccatgttttgacatatttgatgtcaaacatgtcatttatgaggcattaatacgtggcttttgcattttttaaaccaaaaggaatgaccttgtaacaatataatctcatatttgtcataaagcttgtatgatcttccttaactacaatcatctttatctggttctatcttgagtaagcatccataaaggacaagagttcatgcccagcagtggggtcaacatgctgatcaatcctaggtaatgggaaacaatccttttggcaagctttatttaggtcaaagaagtcaatacaagttctctaggtcccgtttggtttttgtaccaacactggatttgatatccaatttgtgtagaatgcttcttgtatgaagtcatgggttaacaatttatcaacctcttctttcagtgcatttttcctctcaaagctgagaatatgcctttttgttgctttggaggataatgagagtcgatgttgaggtgatgacttatgaaattagggtcaatcccagtcatgtctgaatggctccaagaaaattgatcctaattttccacgaggaagtgtattagttgctatttcaattcttctcctaaccctttgccaattttgataaattttgcagggttatttggatcgagcaatacttcttcaaattcctcaactgggccaatataagattgttcttaacctagtctcaggtctagatcctactcttttttcttaatttctttggttattgcaaccatcaattgaagagagttagcccttctttgtaaatctatattgtagcattctcgagctaataatcaggcaccgttgacagttcttacccattcaaggttgggaattttagtgacaagggttttattgagctaattgtcgttggtcttgtcagtgctgaccagtatctgattatacactgaggggaggtcaactactaagaactcttgcattaaagtcattgacaagggcaagtcttccattgttatggggagcttgaccattcccaaacttgcaacgctatctcctgtgaatttgcataaatttatcatgcatggttttagagttatcccctctaacgccattttttaaggtttctttatacagaatgtttactaagctcatgttatccactaagattctcttcactctcttcgttgcaagataaatactcattaccaatggatctatgttgggaactcttccttggatcgcgtcgtcatcagtgaaagttattgaggctccccagtcttagctctttttacctattttggaggaaaagctgaagtttgatttttaacttggtttatgtatcttttttgtgcaatgttacttgttcctccaaattaaggtcccctagaaattaccaaaattccctcaccttcaacgagtggcagttggacaatttgattttaattttggttatggctatgagcttgctctatacccctactcttcacttattgtctaaagtaacctctggagattaggctttcaatctcatatttcagttgtcgatactcctcagtggtgtgccctatatctttttgaaagcgacaatacttactctggttcttcttattccttgcattcctcataggttaaggttttcaaaatgcaaccatattctaatttgtgaggaatatattttcccgtgtttttatcatctcagtgtacacggtataaatcaggacatacttttcgaatttcttttgtttttcttgtcttttgacgagtctttagactcatatttcctttttccatgtagctcatggctcttgctcatgttagccatatttaccttggcattacttgagttgaaattgcctcccaaaaaatccttaaatatttttcaattaaatcggagcttttcttttctgacataaacgagagccctttcattgaactcgtttattaatttaactgagatcaatgcaaatcatcccaatgtttgccaccatctctagacaaaccagtggttatccaagcctagagtgttgtcaactgaatgctatcattaaagtatttgacctttgctactgttgtagtaaagtgacttagaaattcttttagagattctccaggctgttattttatgtttgtcaggatgaagcttctagtcccctatcccttgctacttgaaattgtttctttcattctttagacagttgttcccttgaggttatacaatggttacttaatttatcaagccaactactcactgctcctgtcagcaacgtgggaaacagtatacaacatatgttatttgagacattactttcttgcattattgtattaaagttattcaagtgagcaactaggttcgagggttctgtcatattaggggatatatggatttttatatccttttgggaattgtgaattcagaatattagggtgaaaaggtttttggtcttcattcttgtcgttatttctcatcaaataaataagggaaaagaatcctattgaaaatcttcctaacccatcaaccgcttccttcatagaacctgaaagttttccataatcacaatcctaatatttcttgaattaatcctccaattgaattatcccttgttgacttgttcatctactcgctgtgcatttttgttcaatatttcccttaaactgggagcttttctatttatctgctcgcacagaccagggcgtcatcgtttatatgatcgtgaaaatttggttgatctcgcatgttttagcattgataaggtctgtcgtcataattgctcacagaacaacttggggagatactttttgattggtaactttggaagttactcatattttcatgtttgcctcgatactcaaattaaggtgttctctctcgacatggtgggttttcccatttatcggaccttaaagattacccctgccctcgattctctgggttgtattagcctaggatccttgtggtaattcttgagtggccttcgcctttcaaataaattggttaactttcctctacacatatacatgtacatagtgtctcttccttctaacctgtttccgtgtggtgtacgtgaagggcaactagacaggccatgtggttgatcattttcattttcatcatttttttggaacacttattgtcccctcgtccgcatttattgcgaggttctagcaccctgattttgggggcctcgcccatcaatagaatgtcccttgtgtcccttggttattgttcctgggggtgagtgggattatttgatctatattcttcagtgttaggttattgtgcccttctagtttgtgaattacagggcctccctcccagacgacgtgaaggttgttcctcctgtaaagggggagcatcattttgagtcactctagccgcagcaattgcttgttcaaactattgattcctttggttggattctacgagcctttgacaaagttgttgattctctaactcactaatagggatgtattttgtggggtcatatgcatttgactccctccttttggaaatttcttcctcagggttgtttctctcaaaattccttttagtaggacctcttcccgtgttggtttgagtctgtgccccttgggctcttttcttggtcaccttgttgtttcctcttccatagcaggctcatcataatgagttttcttcgtaatgtggtgaaaccataaaaagggagatgtgtttcaagttttatttttactaaggctctcaagtaccaaattgttacttcgtaatttcattaacaataaatgaggccatgaaaactaaagaattaatattaatactaatatttaataaatgtaaatacaactttcttcaacacaaaagaattttacatggttttgtagttaaatctgcatactcaatgagtcattcttatttttgaatctttttgggaaaatgctttgattacagaggaattgaatgttcactcagtctcacaagatctctccttccaaataatgtttgatccctttatccttaggttatgcccctatttatagtaggtttagcaatgatagttattcccttttgatcttatctaagtaaccgttcatgaaatgtggacaatccccatgtttcatatttacaacatgtggataaaatgaattaaccataggtaactatcttttgttcttatcttgatgcagttttcctttactaagatgatacattgttggatttt

SEQ ID NO: 92365 - DNA, 1328 bp, Cannabis sativa
aggttttcccggttcctgctcttgtagctgatacagctaatgccatggctaaaacaagatccatgaatcttggaaaacctaaatctgcaacgaaactctcaaagaaagcaggaaggaaggaggtaactgaggcggtacaggctggatcgatggaaagaattgctgaaattgaagccttggagctttctgatgaggatacagcgagagatgatgaccctgctccaaacgatgtattccaacctctttcaccaaaatcgtctctggatgcgattaagaggcaggaagatgttcgtaatgactttgcacacttcatttaagcaaacaaccaatgcaaccgtgatattgcagctggtaagaaatcgatacctcctattttgaggtctaattctgtagttcggaaccttgagaattcttttaagcatgttaatcagaatgtgaacaaagtgaggattactatggattacattgaagatgaaattcatttttggaaaccatccatagtatgctatgtgttaggagtgaatcccccactccatgtttaggatggatttgtgcacaagatttggcaggggaaagtagatcgagtgaaaatgctgtcttatggcatttttatcattcgatttcactctcttgaggacagggatcaggtattaaatggtgggtacatattttttaatagaaggccggtgattatgaaaccttgggacccaaatgaaaactataagaaagaagatgtgcgaaaggtaccagtttgggtgctgctggaagaactggaattgaagtattggggtcagaaatcactcttcaagattgtagctcaagttggaaacccaattatggtggatagtgtaacaagagaaagagagagactgagttaccctagaattttagttaaggttcaaatggatcaaaagctgccagatctgctggagtttgagaatgagtttggcatgaacacttcggtagggattaaatacgaatggaagcctatctcttgtacacattgttcaggggttgggcatgctgcagagtgtaaaaagaacagcaatgggaagcagaagtggattgttaagagtgacaaaagacaacaacctcaagcagatgaggaaggttttactaaagttcaaagcaagaagagtagtgttaattgagataatacagggaataaagttgctggtgctggttaaactattaacactgaagtgggaaacatgttccaggtgcttgaggaagaggaattggttgctggtgctaatgaccttgagcaggctgatactttgtgcaagacaggagggggggggggagatccctccctgtctaatggataa

SEQ ID NO: 92366 - DNA, 646 bp, Cannabis sativa
tactctccacagcaacatgtagaggcgtttgattgttcttgtctaataactcgaacatcttgtacctatatgatcctgatccttcttttagtgactctaatgcttcgacagatacattcttggccgcaatgtgaagaggagacatgccttcgttgtcttgaatgcaacaaattaaggagtgtttagacaaaaacttattcaccaaaccaaactcattcaagtgtgctgcataatgaagaggagtccatccatgctcatcttgcccttctaaaatatcattgccatatacttctaacaccttctcaatcattgaatcacctatatatgtacagttttttgtatttattagggaattaatttacactaataatataatttggggtgaatactattttagaaaagttacagattgaaccatctattttgttaaatgactaaatgaaacttatattttcttaaataaaacttaataataatttgatctataagtattatgataaaattggttatattctctgctctgtttgtgctggctaggaattgttttcacaagttggttatattaaaaaaatggtcaaaaattaagctcagaatcttatttgtaccatttttgaaaatacaaaattcattttgtcatttaacaaaa

SEQ ID NO: 92367 - DNA, 746 bp, Cannabis sativa
  modified_base (376)..(397): a, c, t, g, unknown or other
ccgaagtagctgctagtattaaaaaagtcgttagaattggcagttaccggaaaaatcaccaagaaagtagtttcttcattaaagaaaccagtttcttggtgatttttttagtgatttttctagtgacaatgccaattccgacaaatttttcgacatcggcagcaactccaatgactttttcgacgccaatagctactgcggtgattttttcggcaccggcagcaaacttcggcgacttttccgacatcagtgacaaataaaactacctaaacaaataaaaacattaaatatgggatttaaaaacctaatttacacatatacatatagcatatcaaatactataaaagtacctaaaaaaaataccatataaattggnnnnnnnnnnnnnnnnnnnnnntatcataagaacttttaaaatctcatagtaaatgtattccttaatagataaacgtggatagtaaggaacaagggagtttaatatcggtacacgtttcaaaacaatctaccccatttttaggaataaaatttgcaacgataattatgcaaataatttaataataattttatcgagagtaatttctcttaatctcttataacagaatgtgtttttttgtcataacaaaaaattaattgtgactaaaatataatatttagatacaaactgttactaatttaattttagagacaataagtattgtgcttaaaaatacatttagtcacaataaattgtgatttttgtaattaat

SEQ ID NO: 92368 - DNA, 937 bp, Cannabis sativa
  modified_base (197)..(198): a, c, t, g, unknown or other
aaaaaaattccgtgtgacagtatttttataaaagttaacccaaattccagtatttttgtaaatttcccaattattaggggataacttgaaaaatacattgtttccattaatcaaaaatactttcatattatattttttttgaaatatacccatttttttgagtgggttgcccaatataccctcactctctacttaanntagcatataatttacattaacctacggggtttaatgaggatatcatctttaaaagtggatatatcttaaagaatatgaaaatggaggtaaaaatgaaaataaataaagtatagtgggtataccatgtaatattctcaattattaggcacttttttttttaaattgattgtataccaattttattttatttattttaatttttacttttatttttattatccacttttataaatgatgttcccattatattcctaagattaatgtaaatcatgtgctacatttaaatggagggcaaggatatattagacaactcacttacaaaagtgcatagattttaatgaaatataatatgagagtatttttaattaatggatacaaaaaagaagtaatcatcaacttatcctccttttattcatcagatttacaattttgacgttgttctttttttattattgtattttgatttccccaaattttataacatttttggtttgggcctatttccagcggcccatttcatctatcatgcatttgatggagagtgatgtgtagtttttttctttttctgaaagagcgcgtgatgtgtagttgacacgtacgggattactaaactatgctacacattttctatttccattcattctcaaattttattttctttaatattttttcgaaggaaataaattgtaattcgcctgaggttgtattttgtttaataacaattaaattatagaattat

SEQ ID NO: 92369 - DNA, 513 bp, Cannabis sativa
ttttactccaatctgaaaataacaagaataatatattataaattacagaaattaataaaaaaaatttacaaaataataaaatacaatatagataatttcaaaaactatatacaaaatctatattatatatacacattaccagatactatatagtttatatatacagtatatatattttataaaataatacaatacaatatatataatatttatattatatatacatattaatatatatatatacgcacataaaaaaatatatacacacagattaatatgtatatatacacacataaaaacaaataaaaaattcaaaactcatatacccaattttagatacacacagatatatatatacagatttttatatataaatatctaaatttataaaccctaaaattatctatatatatttatacacaaaattatttaaaacctaaaatatatagatttatatttatatacacattgtatataccaatttaaaacctaaaactatataatatcaaatgt

SEQ ID NO: 92370 - DNA, 2612 bp, Cannabis sativa
cgaagaccaccctctcgaaaggtaaaaaccgcttgataactcaaggcaggattaactccaaaccattagtcgcagaactgaagattctctcgcgtagttcagattaaatttaaggttatatatttatagtttttggcaatgtcttggctagttcatgacacgaacgatgatctcagtagctctcgtgttaggaagatgcttcatgagaactatttatattgaggtgcgagaaaatttttgtttaaagattcatattttagcaatgtataatccctgaaaattttcttgcgcaagggatattttttatgaattagaagtgacttgcattttaccccccaaacattaggagatagttaaataaatctttaattcaatttggttagccatggttgaagatttgtgcaattactgaatattaatggtctcaaaacgttggtttgttcttatcatctttattagtattttttgcttaaatattatgtaaagtaggaggcagggaaggaaagatacctctttactaaaaagaatgtgttcatgtactatgtcgttagtagaagatgaatacaagagcatcacttaactataaggtttatatcatgataggctcttaaattgaactaaaaattacaatatatacaatcatttaaaaattttgaactaaaaaattattctgcccaaataaaaatataccaaaacaattttttgagtgtgctatataattttcgaatatttttttatggaacattctttcaactttaaatttattaattaaaaataaaacaaatataaaaataaaaaataaatatcccaagtcagtaaaaatcttatcattttcaaagaggattaaaaataaataagaaatcaatattattattttttttgaataaagcatgaaattttattaaataatagtttggaattcaatcggaacatacacgagcaggattagaattaaaaaaacgcaggggcagagctagaattgaattgtaggggggccaatatagcgctagcaatgtacacgataacaaggcttcatatatagtgattttaatgatcgatattttttactggatggtgctaactatttatgagtgatctaatatatctcacttaaattaatttaaaattttatattgcaataaaataaaatacatgaatcaaataatctgataattaatacgattataagagtaattaattatgaaactgtattgattagaaaatattttatatcattttaatatctaaaacaaatgattaaattaatggtagagcatatttaaaatagtccgtggttgattatagtaaaactaacaatataaatagtattaaaaaaaataaaagaaaataatgtgtaatagttgaactaaaatatagctacaacgtatgcgtcatgaaaaaaaaaattgaaccaaaacatatttttatagttgacaaaatagataaaaaatctaccaaaataatttacaaaatctcctacaaaaatttaaataatatttactataaaaattaattaacatcaacatcaactcacattttattaaaaacaaaaaaaaaaaacttatttttattatttattttaaaatactatatattcacatatacattccatttatttagttgttttaattacattgacgtaaaattaaggggggccaaggccaccttaaatttattaatacctccgcccctgaaaaaacgaaccaaataatcattcgtctaattcccacactgtttcacaaataaataattgcaacatgacaattaatcttaaaaacacttatattctatttcatctactgttcagaagacacgacaataaaaattacagtaagtttaacctcgtagcttgagcattcaactactctgtaaggtatgtaactgcactattaacaatcccttcagtcgtaaaaaacttgttatctccaaccactaacaataattaaatggcgagccattgaagaagaaagaagaaccaacaacgaaacaaaacaaaacaaaactatgtcacatagacaagactaacacactcaaaaccatgacataaaaacaagactaaaatactcaaaaatatgtcacagagacaagaataattgcagtaacaaaaatcgaatgacaatagtaaaacgaccatgccacacctaagctcagtgaagaccaatggacctaaccagaaaaaaaaaaaaacaacaactatagagacataaaaacaagactaaaatactcaaaaacatgtcacagagacaagaataatcgcagtaacaaaaatcgaatgacaatagtaaaacggtcatgccacacctaagctcagtgaagaccaatggacctaaccagaaaaaaaaaaaaacaataactatagagacataaaaacaagactaaaatactcaaaaatatgttacagaaacaagaataatcgcagttacaaaaatcgaatgataatagtaaaacaagcaaaccgtacctaagctcagtgaagaccaatggacctaaccagaggaagaaaaaaaaaaaaaactatagatagctataaattataagaaccaaaacccctaatttttctttaagaattgagaaaaaaatatacatataaaaaatcaatattaaaaaaaaaa

SEQ ID NO: 92371 - DNA, 784 bp, Cannabis sativa
tttatcccacaacatcttttttttgaaaataagcgttcactgataaataaaattagacctcacggtcattacaaaataaatcttgcggaatagaagagattcctaagttaccaaattgtttgtgggtaaaggtccacttggctacattgtgagcgacaaagttacaagatctgggtatacaagtaaacacgcggccatcaaaacatctagagagtttccaacaaaaagaagaatagttctcaatctcccaaaccgaggacacttgattaagagcatcaatcaccactcttgagtcactctccacgatgataaacatgtgccccttgagctttgctgtttaaatagccaactgcctcgccgcaacaagcatcagagaaatccaaccttgttgtattagcccaaacctcctcaccataacagtttttagccaccaccgcaatgcaagagctttccgatctcactctaacatcacaattaagttttagccaatcctgaggaggaggccaccaaacctctctctggataaaggaaacagcaggaaggagagcaccttgtaaatcagcataagaatagcagataacatcaatacattagttcacattattatgataattattgtgcacattttcatttttgacgcgccaaatagtatccaccacaaccaaagcatataaaaagacttcatctgcattgatgcccttaatctttaagccccagattttgacccaatcccaaacacggatactagagtcagatactagaaaaataccccacggagaagagc

SEQ ID NO: 92372 - DNA, 679 bp, Cannabis sativa
agcttcttgactccaccacatgtgtatccattacaagtgcatgatggcttgtaatttgttagctcttcccatgtagttttaagccttgtaaaatacatgctaatgacctgattttcttgcttaagattcataagatccttccttagattgaatatatgtgggccatttttctggtgaaaacgaacttttaaatcattccatatggcagaagcacactcatcatagagaatgcttgaggaaatttcctttgatacagagtttagaatccatgaaataacaatgttattgtttctataccaagcattgtaaagattttgatcagaaatagagggtttaggaattgaaccgtcaagaaatccgatcttgtttttcacggatatcgcgagttgcatagcacggcaccaggagacataattgtcttgccctgtgagcggttgagacactaaggaatttcctggattatcgccatggtgaaggtagtatgggctagctggatcttcaagcggattcttgactggggctgctaagaacacgatcatactgtccaggattaccaacatctgtaatggtggtttgggcttcggtttgatccccatctgtagccatcgcaagaagacagagaacaggaggaacaacagagaaaagaaatcgaagaggagagatgaagacacagcttcgc

SEQ ID NO: 92373 - DNA, 569 bp, Cannabis sativa
aaaatatttatataaatttttagtaatttaaaaataatatataattttattgtcatattatttctcttaaactcaatttaagtaactattgtttaattgataatatatattttaaaatttgaaaatttatgtataataatttaaaattatacatttttactcattttaatgaataaattttttataaaataaatataaacaaatgtgtgataattctttcatttaaatttttattaaatttaaaatatattaacaaaatcaaatttaaaaaaacgataaaaaaaatttcacttgcatggaattatttatcccatatggataaataatcacagccaaatgagattagctgaattagttatctagacttcgaacatgcccaaatactgaattagataaattaatttgtttaatccaatccagtcatgcattccaaacgagccataaacttaaatatagtgttgaggggtgaaggttttttttggagagtgtaaccatggttactaacttatgtttttttttttaatcaatcaattagtgcatgttttaattttaataattttacaagtaat

SEQ ID NO: 92374 - DNA, 1311 bp, Cannabis sativa
ttgattcttaatttctatttgtgtttatatatatatgtatgaaaggaagatgttatgttattttattattattttgtttgattctaagatggtactcacgctttttatttgtgtgtgtatatagatatatgtgtataaatggatatttgtgttttgggttatatatacatttacatgcattttttttttttggcttctcacaattacgttttttaataaatacttggttttatttttggattttgactgttactgtgtatttatataatggctcatgtgacttttgagttgtagggatatatatatactgggttgtaataaaaataatactatttattagtatatagcttaagttatatgggtcatatatatgctaattgtagttggacgattatgtttatagatatactacttattgttatgaataggttagtgtgattagattaaatgatgatttttgttaagtgtaggggatttaaggaggatcagctaggtgtactttgtgcatatttgtggtgtttgatggttgagttaaagaaaattaatagcatttactgaataaagtaaaattctagcatttgtatatgtaccttattagtatatatatcagtatagatgagtttagttttctattatatatcatgtatttatataatatgaataaagatatatttaatttaaaactgtatgtaattatttaacatgatatttaatggttttagacaatataataaatgagtatgacacaaggatatcttaagggtgcatgtggtagtaggatcatttttttggtgccttaattatgtgcctttataattttgtcataggaatacggctttactccaaaggtggtgattcattggcagggagagtctaaggtaagaagagtggacatctgtgcacagggtgtagattatgcttgttttcttgtgtttaatcatgtatttatttttattttgcgacatgatttgttacgctagattgattagtgtgaagacaatgctagcgatttaagtagtagacatgcttagacaatagagtaggcgtgctactagattatagttgcaggaattatcttgggtgtgcataactcgttgtaataggatgccaccacggaactgctgagtgagtacagcgcaggcagggcaacgatgtctcgtgggaatggccgagtgtgagtacagcgcaggctatactagatgccacggtgggaatgccgagtgtgagtacagcacaggcagggcaatttacatttcatgtccgatcaacatgacttgttagtagtagtgtgtatgtgtatgacacgtatca

SEQ ID NO: 92375 - DNA, 507 bp, Cannabis sativa
agggtagcaagaaaaattctgcaacatacgtcacctcgtaccccctgcagatccatttgcatctcgaaatacttgaggtgggaaagaggatcttcagttccagtgtacatcttccaggttggcattttaacttgtgggctaacgtcaggagattgatttcgggagagaagggggttccacgtgctcggtccaactcgagatcattgtttctctgtgtggccgtgccttggaacatattctttagtttgtctagttgtccctgcacagctggactaacctgttcagcattttggtcaatctgagtcacgtaagcatctttttgagcaagaatttgagcacgggttctgggccgcatgatcggcgtgccaaggtaattgtctactcctttccttctattcagttcgtttcagagatcgtgagtcgtccccaacctttcgaatacaaatacgcctgactgtcttagtgattgattggtttggttaacgtgctgactggcaccgttaacct

SEQ ID NO: 92376 - DNA, 1239 bp, Cannabis sativa
tatgagaacttgtagcaacattttacgtactgagtcactttatcatttctttagattgtggggtattgacttgtaataagagagcataattcctcaaaatattttactcttcttctgtactgagtactaatttattgccttgattatatagtctttgtttgtggtattggaaaatttccaagttagtctattcaagatgaactgatattgcaaagtctaaatgttaaattcggaagagactgatttaaaaaattatagtgaatttatcaagtttcaaaattaaaatgatatttttaactactagagcccatagattttaccagtttagcatttgacgccacatggcagtggaaaggtggctgaagattttaagtgtcaaatttatttttttaaatttgtaagagagagatgatgtgaacacatgaaaggcgctgttatgaacacatgaatttccaatatctatactgcaacattaaaagaataaagagtgagttttaaaatggttgaaacttgaagctagtcaatttttttcacccggtcttcttcttcttcttcttcctctttttgtaatatgtagcacttgattcttttcaattcttatttatcttcctgttttataaatttgtaaaatgaataaagtatttgtgacatttgatgaggttttgtttcccctgatattgaagttgcttaactgatgtcaagttctttaggtattgatatcttatcctggtttagttttatgttctgttgtgatcttacttttgcgttcattctttttccagaaggaagtggaagtgagtcgatgatgataattaattgtctacatcattacttttctattgtaggtaccaaacttaagtactacttttctgttgtacgcaccaaacttaagtaccatcatataatagaggagtggcaagtgttgtgcaggattatgaagttaatcattccagtgttcatggagtctaatccgttaattggatagttttccaaaataagtctcttactataatactcaaagctactattaagcttagttggattggatttttttttattgttttactctttactctctttagttatttttcccctgttgaattatgtgttttgcatgaataatttggtgttttgcatgatatttattctgttaaatttgtattatatatggttaattttggattagaactttggtctctctctcaaatactttttagccaagcattggtttgaactttg

SEQ ID NO: 92377 - DNA, 745 bp, Cannabis sativa
ttttaaagaaatgttgctttttttctgtttatacaaaattttttatatttttaggttcaaaggtttttttatatatatatttttacacttttatgattttctataaaaataatatgaaaacaacaaaaaaaattacataaaaaaataacatccaaacagcaacgaaaaataatatacacataacaaaaaaataaaaattaacaagtgtacaatataaaaaaatatatcaaaatatcgtattttctgttaataaaaccataaaaatcgtaaaaatatttaaaattctgtacaactatatttttgtaattttttaactgattttgtgtatttgtaaaataatctcttttttctcatgcaaaattctaagggcctcatgtatttcatcatacacatcacctttttttaaaaaaaaaaaattaaaagataaaaataaaaaatatttattttcacttcttcattttaaatagaaattttggtcaaatcgatattggttggactaaaaaataaaccatgttttaaggcaatcaatttaagatgtgagaagtatatatttttttataggcatatatgaccaaaaattaaaagcaacatttcaattttttataatttattagcaaatgtgagcaaatttaaaatttaaacaaaatttaagatatatcaactaatttcatgagttactaaaaaaatattttatttttttatattaaaatttagagtaatttgcggcataaatacttaagtttta

SEQ ID NO: 92378 - DNA, 1316 bp, Cannabis sativa
ttttcacgaaggttctcaatgaaagcaccaaactgttaacgcagatttttgttacccaaatttgtgcctaaatgataaacttgcacagaaaaaacaaaaatagtaaaggaaagtaaatgaacacaaaggttttttacgtggttttggagttaaaattctgcatagtccacgagtcaatcttattaaatttttcattgttttccaggaccttttttcatcctttttttactctaacttgcctctatttataatcacatagtaggtagttaattatagagttgactgtaatctttacaacaattatctcctaaaaacgggggattcgattacatctcacgtaatatgaatgcggttaatatttgaaaatcacatagctgtgagtagcctgcttttactgggtcaaggtaaacgtatattttatatgttgcagatcgtatcatctgggtcgtctcgctaggaacatggcaacaaccaccctgatagcgagctgaagcttttcccatgtcttcccgaggctgatataatcctcctcttctaatgtgtagcgagattgatgcctcgccttgtacacttgaagttgcatggtttctcgttaatacacacattaacagtttgtatatttttatctcgcttaagaccatctagtcaaccgagttataaatatactctgtcaattttgcttttaacgagttattccatttcaaatatgattactattacgtgtgttgatccgtattctccccagtctaacacgtgtccttctctgatgtgctagccaaatttcaggtataacagcgtctttggagactttcaacattaatttttcgacgatttccttcttctactttattttttatgtccttaattaattgttattaattgttcacaatgattatgtgtagctaaacaatttattagggtattgatggatattattgacatcaatttatggtttaatgtgatttaactttctcccaattctttatgtattctatttcattcgtacttatttcttttaattgtctggccatcaattaattatttatgattttgatacgaaatctgataagtgagtgtcaattatgctatagtgaaataggaacaaatttcgatataggacgagagtacctatgtggtttggatagcttatagggtttatgtatttaataccttttgcaagtttaatttatcacgagagtggaaaattttcatgtaactgagatttatatatttgagtagactataaattacttgagtaaacatgctattacatagaatttcataataggaatttgaatcatgttagaccataatag

SEQ ID NO: 92379 - DNA, 1278 bp, Cannabis sativa
ttttatcactattatactttatgtaatataatcatcaatatgtataataacaatgaaaaatgtaaaacttcccaccacgataatttcaaactttaaatttttatagtataggaattgttccctatattattatttttttaaaaaatcaaattattaatttaaaagttaaaataaaataaataaaataaaataaatcatgtccttataagagtagtaattcgatcgtttagtacatttaaatcacctcataattatttaaatttgtcaaatactatcaaatttagatgagactattcaaatttttttagtgcaatttttttcatccatttattatgtattttttttttgacaaaatttattattcaattttatataatcataaattctcatttttttttattactgtatgtattattttattgttcactattataatatgtgtaataaaatcgttaatatatatgggataaatactattttggaccatgtgttttgcaaaaattaccaattggactctctgttttataaatgacaaaatagagcctatatttttcaaaattgtcaaaataagaccctgaactcaattttcaataattttattttttaatgtaaccaactttaagaaaatttctaacaagaacaaatacaaaaaatgtaaccaaatttatcataatatctctagatcgaattgttattaagttttattttgataaaaaatcaatttagggtcctatttgtacaatttttaaaaaacagggtccattttgtcatttaataaaatagaaggtctaattgataagttttgtaaaacacagtgtctaaaatggtatttacccatatatattaacaaaaaaaaaaaaaagttgaagatttttcaccacaataattacaaactttaaattattatagtataagaactgtttcatactaataatgaaaaaatattgaagaaatttaaattattgtttggaaaaaaaatcaaattattaaattaatttaaaaacttaaattaaaaataataaaaaacatgtctatactgattgaacttatgacattgtagttgatgtaagaaaattttaccacttacactatgattatattattgattgtattgattattttaggattaaataacttgaatatttcacctcaaaaaaaaaaataacttgaatatgttgtactcttttagctataattattgttgagtagaaaataaaattaatatataaattaaaaattaaaaaataattaattaaaattataaaaagttataaggta

SEQ ID NO: 92380 - DNA, 887 bp, Cannabis sativa
aacgaaaatttgcgttaacaataatatagtccataagcacgtattaaattaaattcacagtattacccttctcgggtcaaattactaaaatgcccctggctcaccaacaaggtcttaacatgtcatatttcataataattcgcatataatagattatataataatataattacacaatttactagttagggattgctaatccatttcataatcttagggtattacaaatagggtagttgtaatatcccaaaaaatataattatgtttaataagacatattttattaaatgtggaataatatgtgtgtttagagcataatgagtgagattataatcttaccaagctaattatgtaataattaaagattttaacggcaatgaatgaataagcgtaatttattaattacgaagattttatttgactatgtgggtaaaataaatgagattcatgaagtaaaatatttttaggtccgtcaacagtggaaacctgattggttgaccaaaaatttcacgacggtattagagggcattttagatgtaccaagagattatatgttatgatatgaaattaaggggttagtcgggttatttattaactagtaaataggcccgcgcgttgtgcggcctaaaaataataataaactattaacatttaattattatgttgatcaaaaaaataagtccaacctaattacaaagtatttttttttatatataaatatatgaatttattaatacataaataacagtaataatatgagtttccctttatgttattataaattattatttatataaaaattatattattaagattgatttataaatatatttaatctattaattataattttaaaaaaaatgtaaacactaaataatattttttaa

SEQ ID NO: 92381 - DNA, 514 bp, Cannabis sativa
gaaataagaaaaatttataaaatacattcacagttattactatactataattgatcatatttggaacgttaaagtttcacttttgttgtgtaaataaagggaaaaaataaaaagcacacataatcaaataagagatactgaataaaaagaattaagccattaaatatgggagaggagagatcaatttttaaaaaattacggaaaaaaacaattaatgtgtattaaaaaataatggacggtacaaatgaatagaataaatatttaaacacataaaaatccattaaaactaattaatgagtttgagtaatgccaactaaaacacaaaaatagaataaaaatttaactaaaacagaaaacttaggagaagagatattaagaaaaaaatgctaattaagttgctacatcacttcttttggacattcctttatatatattgattgatgattgattgatgattgattgattgattttttccgttacttgtttaattaaaaactacacataagtgcagaac

SEQ ID NO: 92382 - DNA, 622 bp, Cannabis sativa
tattatccacaaaccctttaaattggtaatggaaatttcggccaatttggatgaatcggtaatttcatattaacaaccccttcttgtatataattctttctaagtatggaatccctctaattaatttcagtgatgttaatttgtttattaggaagatgagtttgactcccaatgcaatgttttgttgtgataataataaatctgataatgttttgctattggtttattataaatacacaagtatgcatgttttcaaatagaatagagtatggtggagttttggtagtgtagtacttgccacttggttagttctttcatctttattctacctaattaatatgtacaatttcatataataatacattttacttttatatttgcctttatatgctcttatatattctttcttcaatattcatataggatgatgatgatgatgacgacgaagatgaagacgacagggacgatgacgacgcgacgatgatgatgatgattatgatcaacagtagtgcgaacgaagggaatatatgagaaagaaagcagagtgaggcacataaatgtattgtattgtcttaagtaataataataacaatatgattaagtgttgggtgcatcacatatt

SEQ ID NO: 92383 - DNA, 2019 bp, Cannabis sativa
tgagtgtagcgtaatgatatttttgcaatcaactaatggcttgtatcttaaaggtcttgggttcaaactcatgacctctcccttttcccttctctccctcaccactaagctaatcttagtggcttagcgttaaataagttattaattatatattaatcgtaattttttttatataaatataatggttttttttttatatatttttatactttaaaataattttgttttttacatttttacgaaaatctaattagaaactcacatagcaacttaaatcgcaatcaaaattcatataacaactcacataaaaattactggagcaacccaaacagcaaatttaaaaaaaaaattaaaaatagtatatggggtgttttcatttttacacttcaaaacaaactttttatatatattttacagaaattcatatatagcaacatagaaaccgataggaacaacttaaatcacaatcaaaatctataagctacataaaaactatagaaacaactaccaaatacaaccaaaactgtttataaattaaaaaaatattatataaaataattacaatataatttttatttatatatatatattgttgttttgggaaggtttgattctatatatgtctacctaggttaggtatattcaatttttgtttggagagttctataagtagagatcttctctaaatatatattccttacaaatatggaaggtcaatgtataatatgatgattatatatatatatatatgataaacatattacgtacggtatataatcacttactcttatcatgaagaaagaagcttttatttaattattagatgaaaactaaaatagtaaataacgcacaaacacttaccttaatttcaagtcaccacacaaaccgtcctagctaattaatcagactatattatatatatatacttaattatatatataattaattattataaataattatatttgcttcattctaaagactgaatgattgagatactgtgcaaatctatataccaattttttatgtacacctttttcaaatagtgtagtaccgacccccttctaaataattattattattttttttttattttatatataaattatataaatattctttaaagtatatcatatatatgtaaatatatgtaaaatgatttaaaatgattgtgttttttgtgtttttttttttattattattattaattatgtgtgaccttaattattaaaataattatttcatttatatattcgatctgtttcgaatctaaaaacaaaacaaaccagatttcaaccatgttgctttttttatttgttgatttcaattcatttatatatatttatatatgaattttgctaataattttttttttagtctcatacattcatagcctggagtcatagttcaagtctaacatgacaaattagctccataaatatataaatatttgaaaagtattaattatatatttagagaagaatgtacatatatatatttaataattatagtgaatatattaatatttaataattaatgaataagaattgtgtattatagtgctagacagatcaatataactatatcaaaagagaaaaagaaaaagaaaaaaaaaactaaagtataacagttattaattagtagtattatgcatataaaaaaatgattaaaaatgtaattaagatcaacttgtgagtgtgattaattagctacctatggttaattaattttattcttttaatcatatatatcaactgggcgccaatttagattttattataataaaagttattaattaaagtaaaaaatgccattaattttcacctttaaataaataatattcgatagatgaatctttaggggttaaatatacaaatataggtcaacaagcctagaattttagtcttcaatttcaatattttagtgtacaataatattcttgaaaggtcaatagtgctaaagaatctcttataaatttagttattagatttacccttattataatttctatatataaat

SEQ ID NO: 92384 - DNA, 630 bp, Cannabis sativa
ttctcatgaaagtcgtatagaacatcatgtaaccatgagtgatctttctgtcaagatgcaggcaaatatggttattggtcagggtcgatctgcaggtgttcgatccttttcccaaaccaataatcaattgcctttctcaaatggacgtggcagaggtgtctacaggttttccaaccagaaagtggtgtgccaagtgtgcatgaagactggccacacggctgccatttgccattatagattcgataagaaccggtctactcccaaaccaggtaacaatgtcaatcgtgcttttctaactgaacttgactgtgactatgatccccaggcctatgcaacaactatgattcaagactttggtgaagataactcatggtatgttgactctggagccaccacacatgtcacttttgatcccaccaatcttgatgattcaaagcctttctctggaaatgaaactcttgctattggtgatggtaagaaattattaatttctcatgttggatctgtttcaattccctctgtctctaaatcttgtcccctccatatgcaatctgttataacagtcccatctattactaagaaccttgttagtgtgtctaaactcactgaagataatgacatttttgttga

SEQ ID NO: 92385 - DNA, 625 bp, Cannabis sativa
acattttcttcatgtagaagaagtctcgatagtctttcagaatagatcaagaacaaatatggagaaagggggcagccttgtcttaagtctcttgatgaaattaaacggcccgtaacttctccattgatgagaaatgagaaactatttgttgtaatacaagtcatttgatatatatatattaagaaaaaaaaagtattgtttagtttcatttaaaataatttagtttgaatatttttttggactaataaaaatatagaattatatatataatcttaaaataaaattaactcataataaattgtatattattatatattacatcaaatataaaaaaacttgtaaaataaatatttattaaataattatttataaaaatataaataatgaaatgtatataaagtgaaacataaaaaattataagacattaaaaataaaataataaaaactcataaggtaagaaattaatcaatcacccataaataaaaatatttttggatgaattaatatggcataaaaagaataatatttataacctacatagatgatgcctacataatttgtaaacaatgtgggacatttagttccatgtatttttgtagttcttttctaaacaaaatagaaaaaa

SEQ ID NO: 92386 - DNA, 593 bp, Cannabis sativa
  modified_base (85)..(105): a, c, t, g, unknown or other
gcacccaatgtaaggtttcttaacctttatatgtgtttaatttatcgttttagaaagttcttatttaggatgttaatcaacatannnnnnnnnnnnnnnnnnnnnctggtaaaataaatttctaacaaaagcctccaagtagttacacacttagtgctcaagaacggtttgaatttgtagattttataaagtttgtctgattttcagacagatttgctgtaaacttagacaaaaatgtgaacttggataccgacaagatttctgggctcaaatcccatgactgtcatgttttgttacagcgtttaatgccaacagttatccgtaagtactttaaaaaagaaatccgagacacaatcattgagttatgtgtgtatttcaaacaattatattcaagaacacttaatgtttctaatttggaaaatatgcaaacaaatgttctaactattttgtgcaagttagaaactattttcccaccagctttctttgaaataatgattcatatagttatgcatctccctaatgaagtcatactaggtggaccagtgcagtactgttaggttataattagcctatgtctcgggtctttaaagtta

SEQ ID NO: 92387 - DNA, 1323 bp, Cannabis sativa
ggccattttactcctagactctaaagttactttatggggaagaaaaatagatatcttgaaaattttgccttaagcttgattttaatcttttgtttattggagataagcttatctttactaagttgaaatatgtggagaataaaacaaataaataataaatataatacttaaatacaacaaaagaaaattaaaatccttttcttcacctctttctctctctcaatttagaaatctcaagaaagaacctataatttaagactagaacctcatcctttacagtaggaattcaacaagttttggaaggggggtcaattaggaagatcaagagccctagtcctttttgtcctttaaattttaatgttaagcttgatttttaagcttgcttttagtgttttgtttttgttaaggtttgagttgtttagtactgttatctcaatttttatcctcttgacgtggcatgcttacatggaaaaaattagtgccacatggcagtacatctcaccaatagaaagaccaagtcagcacctaaacaaacggagacctcggcattcaaataggcattcagtgacagaccagctccctctcaggagttggccggccagccttgggactacaccatggccggccagcctggcctccacaggggcctagccggccaggagatgctctgtagggtttcctatgcactctacacatggacaacaagtcatgggctgtgaattggacttcaaaagtccaacagaatgactgaataatatctagattcaagggtactttagtcttttgtaattatctaacaaactatgcaaatatctatgaatctaaactgtaatataaggttttaagcctcctatataaaggccttaaccttagcctaaaaatctaagcctgaaacctgtctccaagctctaagtctaagtctgaaaaattctctcttcctcacttcctctctcacacgcctacactagcatcatctcaacacttgagtttttccattattgattcataccttgtattcctaaggatgttatagcagatcccaccgatctagatagcattaaccctcggtattaatacaactaaaagggaagtaggtcattacctgctaacacaagggggtcgaacctctataacaaatctgttgtttattgttgttcattcttatttgtgtaaatacgtggcaagcattagatctatacgaccccgctatcggttgatcactttttgaggtcaacagtttggtgctctcattgagagcttgaatatcataatctgatcaagacccacaaattgcaccattttcatcttcaggtctcccccaag

SEQ ID NO: 92388 - DNA, 559 bp, Cannabis sativa
attgatcgcttttactactttattaatcaacacattataaaaataattaaataaaaaataaaaaaaatatttattttattagataattttgttgtaaaaaataaagtgacaccacaccaatattagctcgctagctcaactcaacacggtcggatggcgacgggggcgtgcgcgtgtgatgatttagtttgtgaatcctcaaccatgcacacaaaattgggtgacccttagagtccaaaacccaaatctcatactagcacctttatatacacttatgaataagtactgtttccaatatcactgtgaagactcggtttgacaaagtcaaatcttatatatataataataaataaataaatataaagatatatatatatgtatattaaaaaaaatcacatttaaacctccccatttcgtcctcttcctcacacactctctctttttctctctctttaaaacacaaaaggaaatccacaaaccaccatcaccaccactctccggcgacccatctccgtccaccgtccagtcccacacaccggacaaaacgaaacccctggtg

SEQ ID NO: 92389 - DNA, 674 bp, Cannabis sativa
tcaaagataaacgtgatataatcacaattcgggtaccccgaggattcatggcacctcatacccagatcacgttatctagagagatttgcaacgggtggtgttgtgtgacttcatcgacaactaggaaatattgtttggaatgatgtatactcttctttaatctagttaaccttatctatcaaattctagtaaaattattataaaacactaatatttaacaatttaatgcataaataatttgagaagaattttcaaattttacgacccatagcttctcccagtgaatggtatcaatgatgaagagaagaatgggttttaagtatgggtcaaatcgattggctgtttggctataatcgatgaataacagccaccaaatattctttattccctagaatatcaggtaaatactatttaattttttagtgctaattgtttatttctatattataatttgaaattatttttatactatgttacatgcatcctaatataatttttgagtgcgcattggatgctagaggtcgttgcgctaaggaaaattattcatttagaccctatacgtggccacaaagtttccttataaattactgcaattttgaaaggtaataatttaattactctttatgtaacaaattttttaattaactaatgaattgaaatgttaattttcaaac

SEQ ID NO: 92390 - DNA, 864 bp, Cannabis sativa
ttttaacgtacttaactacaatccctgtgggatcgacctcattcttggtgagtttactacttgtaacgatacgtacacttgggtgtgcaaaattatcacaacagcttcttgggaaaacttcccaggaggtcacccatcctaaaattacccaaggtcaagcatccttaaccgtggagttctttcgtgatgggctaccaaaaaacaagatgcaccttggtaccaatcaatccatttaagctcgcttcaactgtgtagtcctaaacctataaagtgtcaaaatcatcccacttgaccttccccaggcggtgtgggattacacagcttacccagtattttcccttacggatcacgggactactgactatcacaatcaaagatttgatgatttgaaacatcccccgcttcaagcctccattaggccttcccccatggattcatggctcccttacatgggtacaccactctagctgcttcctggactgaagactgaccctacaaaccaacgcgagtgttttcaacgtactttttcctcactcgcacgcttcttgggaaaacttctcaagaggtcacccatccaaaaattaccccgaatcaaacacgcttaattgtgcttgcatacgtatatcaacatataatgtcacacattattctcacatacaatataacatcatatcacattataaactgaatgcatgctatacttacacacataacacacagtatcttattgcacattgtcctcacatcatacaataataatttactcccactcatgttgatcagacatgaagtgtaacctgccccaccttctacttttctcacactcggcatccaatagggcaatcccttatcacaagttgtact

SEQ ID NO: 92391 - DNA, 660 bp, Cannabis sativa
ctatggtactacttgctaggcgggcaagtgcatctactatggaattctattctttttgaaatagggcttagttctttgaagaactcagtaggtaccaagttttccttacttttcaaggcgcagtcgactagttgagcgagtgtgtcggctgttgtgctatctttggggcttgccttctaggatagcctttgagctgtcttaacagctttggtaggccatcatcttcttgtattgagctgtatattcacctgagacataacctacgactatctaagagttgtggtgtatgtctaggtggttagctggtgcttcatgtgctagcctgggggttagcatttgcagcttcatgtcaagcctccttgttagatgctttgaaattaaccttgttacctcgtgcatcagttgcccccaggtgccttgggggctaggtctgcatcgggcaagtggtcaatgcacgttttggattcttgctctctcttcttctctggctcttgattttctcctaaactctgagagatttgaggagatatgcttctatgattagccatgaagctgatcagagcctcgcctttggtggccatgtctggttgtgaggttcttttatgttggtcgagtcttaatggttcacatgggtacttgacctgatgctccatgtttctg

SEQ ID NO: 92392 - DNA, 610 bp, Cannabis sativa
aaaaaaagaataatcaaataacatacattaatactaataattgtgtatctagtattattatataaaaaattaatataatttttttattaattaactacaataaatcatgttcctatcttaatagatatatgattatgaactaaataaaaactttagttatttagctaataatattgtttattttaaataaataaaaaaaaaaccccgcgatcaacggtgtggaatgagggtgatgaaattgcgtacagcccatccactcctttttcactcgtttgctttaaaattttaatttaaacacagcttacccatgtgacaaccgacatggccagctgcatgcacgcaatcaaaccccctttttcgataccctacacttgttctcattacattttatgtacaaccgctaacgtgttcacaacttatgggctcttttcaccgccatggaatgtaattttaccaaaacagcccctgtgaagaagagtacaactagaccctatcacatagtaccataaccttcacgcgctttcaattactttaatccacttctcaacgctttccctccccattttaactcactgtcttctccttcttcttcttcaaactctctctctct

SEQ ID NO: 92393 - DNA, 840 bp, Cannabis sativa
cacctcctcttgtagaacaccattaagaaaggtgctcttaacatccatctgatgtagcttgatttttaagtagcaagccaccgtgagaagtatgcgaatggattccaatctggccactggtgcaaaagtttcttcaaaatcaattccttcaacctgagtgtagccctgagcaactagtcgagccttgttgcgaacaacagtaccaaactcatcggtcttgttcttgaaaagacatttagtaccgatgatattgacaccatctggtctgggaaccatgatccaaactctgtttctcctaaactgacccatttgatctcgcattgcattgttctagaactcatcgagaagtgcctcagtcacatttttgggttcaactacggacacataacaagcaaatgcaatagcatttaagatttttctcctggtgaccatggttgcatttggatcaccaataacgattgtgggaggatgtgccttctgtatccaggatgggggtccctttttgtacaacctcgaatgagatgaactggcaagggtaccactagtcacttctgtgtctgtagctatttctggagagattccaaatgactcagatgcatcaggtgaagcttctgacgctgagttaattgagctctcagatacaccaggagggaggttgactagaacagccatggggagtgtgggatcaagaagctcttcctcagtagcagctccctcagatatttctaaatcatcaaagcgaacattgatggattccataaccgtcccacttctcttgttgaatacacggtaggctctgctattggtcgagtatcctaggagtattccttcatcactcct

SEQ ID NO: 92394 - DNA, 522 bp, Cannabis sativa
ttcattttatttttttttttttttctttatgttgcatttttgaaagtgttttttatgttgtgttgttgttttctttttttatatattttttttgatttagtttttttctgtatgttgcattcatcctggtttgttactggtttgttgtgtttgatgatacatataaaaatgtcctgagttttaacaatttatttacaattgatgatacaaagttgaattctaatcagctttgctagttgagtaaaggacttattgtgtaatatgaaacatagtggttggttctgggaggggaagggatcaaatcgtggaaaaaatagatattaaggagaaaacttatatgtttcgaatgagctttaaaatgatgattgaggaatttatatgtttcgtttgtagtttgtgaatcacgcgcgtgattcctggttttaggattaacagttgtgtttatgtttgcaggtaatcgtggaggagatgatgacgtgtcacgtcattttgtgtgtgatacattattaacgttatttttgt

SEQ ID NO: 92395 - DNA, 750 bp, Cannabis sativa
tcgtgtctgaagcctagggtcatgcccagcattcagataaagcttgtccccttcacgcgcgtgcaagagcaccttgtccgagtgctcctgtgcgtgcgattgaagcatgtgcatccggattttcaaaacaccataactttgtcaatttttattagaatcaacttccctaaaaatcaaaattgcgtaattttttttacaaggaatccaaataaaatattttcagaacgaaaataaaattatattcatggaaaaaattcgtaattcacataaaattatcaaataacacataaaccaacatgaacacatctaaatcaacaaaacattattttgaatccatattagatgaaagtaaatcattaccatgactatgagactagttgttgggattattttaccaggatctagatttactaacaagtatgttacactaacatcctaaatatgaattttctaatacgatttaaaacataagagtttagaagcacaatgaaggaggataaaaatcactatagaaggtgtctcccatctactagttgtctgacagagttagaaactagatttggtaggttgaaagtgttggatgagatgagagcatcatgtcccttttatagtatttcagctagggtttaggtttgaattatatggactaaaaaagaacaaaataataggcaaaaaatcactagagtggccggccacttaagggccctttactagttacaattttgccactttattcaaccatgtattctt

SEQ ID NO: 92396 - DNA, 1053 bp, Cannabis sativa
tgaaccctcaaagtccatgacacatgctcgtaataaatcttccagtatctgaatagttctctctgatttcccatcactccgagggttaaaagctgtactatatacttgagcttggtacccatagccctctaaagattcacccaaaattttgatgtaaactttagatccgtatctgtaacaatggatttaggagctccatggagaccaactatctcctttacatacagttcagcctactgatccaccgtgtaggtaattttcactggcagaaaatgagctgactttgtgaattgatccactatgacccataatgaatcatacattcccgtggttctaggaaaaccaaccacgaaatccattgcaatgccctcccacttccactcaggaagggctattggttgcaatgcccgacctttgatgttcaactttgatttgctggcaggttaagcacttggacacataatctaccacatctcttttcatctcataccaccaaaagtagggttttaaatactaatacattttggtggttcccagatgcaatgaataaggtgtggtgtgggcttcatcgaggatatcttttttgtgctcatcaatattagggacacaaacccgagccttatacagtaacatttcattattcaagattgaaaagcccttaggccgaccagccatcaccccatctcgaatcttgattaactcaggatcttccaactatgcctttctgattctatcaagcaaatcagattggagtgtcaagctattcaactttccaactacaaactcaatccctgcattaaccatctctgaggccaattaaggagctatcataacagtggtgaaaacctacccgggacttcttctactcagtgcatcagccacaacattggctttcgcggggtaatacagaatctcgcagtcgcaatccttaaccagttccagccacgttctctgcctcatatttagatctttcagggtgaaaaagtacttgagactcttatgatcagtgtagatcttgcatttttcactataaagatagtgtcgccatatttt

SEQ ID NO: 92397 - DNA, 577 bp, Cannabis sativa
ctgaaataatttttattttttaaagaaaacattgatcataaaattagacctcacagtcattacataggatagtgttaggtatagcagagggttctacaatacccaagatattctgagcataaacccatctagcgacattatgagccacaaagttacaacttctaagaacaaaataaaaattacaagataaaaacttcttagagagttgattacaagcagacaaatagttaacaatcttccaattagaatggacacctttaatagcatttataactacttctgaatcactctcaacaaggataaaatcatacttcttggcagtagcagtttccaaagtaagctgacacaccgccacatcgccgatcaaaggatctgtgaagttgaggaagttggtcgcaccccacaaaaccgtccccacataatctctagccaaagcaactatgcacatggactcaccaccaaccttcacatcacaattaattttgatccagtcttcaggaggggtcgaccagctatgaggaagcacctctactgtcggagaaagtaagcaagtagcataatttgtaaaacaattaga

SEQ ID NO: 92398 - DNA, 727 bp, Cannabis sativa
tcaaagcttgctcatcccacaaactagctatcaaaacctgctcaattcaccatatataaccataatataacaccagaaaacaaacagaaaacaaacccaaacacaaacaacaaccacagcagctaaatcatcatattaccataaaaatccaaagttttgagtttaaagctttacacatggttaaatccaactaacttacaacaaaactagcttgaattcactcaattaaacatatttaagcttcagaaacaacaactactaaacacaccaatcataacaagtaaaatctcaaagcatgcaaaaatccattttcttaaaactcaaggaaatcaaaaacaaattgcaagaagcttaccaagagcttaagatcactagaatcttgataaaatcacttgagaaaaacacaaagaatccccaaccctagcttctctaggccgaaagagaggaagagagagtttgaaagtgaaaatgagatttttcttccttttccaatttttttttaatagtatgaaatataaaattgattttccttatttgattcagccaaaccaagttaaaaaaaattagattatcataattaaacgtccataaaagacaaattacaaatgggcaaaatgacctttttgccctcacacactaagttggcataaaaaattgttctaatggtattttgggaaattctaaattcccgatcattcccaaaattcccaatgtctaaataaaccgt

SEQ ID NO: 92399 - DNA, 622 bp, Cannabis sativa
acgatttagagggcccgcaacaacaaggtacataataaatcaatgggtaacataaacactatattgactctattttatcttgttacacagactatagctcctgccttctttcccctccacagtctgttgggactcaggcttagtctttgcctccggaaaattggattaaaatcaattgcgatgtcaaagtcggatgtgagattatgtgttgtggcgattgcgagagaccataatgaatcagttttgtgggtggtggcaaaaagattacactttactgacccactcactagaaaagctgcagcctgtcttttagccatggagacggcggtctcattacatcatcattttgttttagtggagagtgattcagagattattatcaagaacctaaaaggggatgactctatttgagggattgagaactatgtgtgtcattgcaagctcctctctacttttatgactaattataatttttcttgtataactataaactgtaactacacggcccataatgtggccaaatgggcatctgccaacaatattacgagcatggtagagatatctactatacctgttaataatatcttttgtaatgaccatgagatctaacttcaattttatt

SEQ ID NO: 92400 - DNA, 593 bp, Cannabis sativa
atcccaagtataatgtcaaactccattaattccagttcgataaggtcagcactcaacttcctatcctcgatcctaactggcatagacctaatgcgccaattggagagaactaactccccgctaggcatagggttccaaaccctctttcaagtatatcacaaggccttcccaaaagatcaattatctgtgtaactacatatgagcgtgtagctcctgaatcaaataatacagtgtacaaggagttgttgacaagaagctaacctgtcaccacagaatgattggctgcagcatcagctttggtaatggcaaacacctgagtaggtacaggtttggcctttgacttctgctcttctttcttcgcttgagggcaatctttcttgaaatgccccaccatgccgcactgaaaacatgtcttctggttgcacttacccggatgatgttacttacaacgtgggcactcaaggtaagagtaaccctggcgtccacctctgcctcggttcccacggaaccgcttgctctgccccaagccaccaaatgccagggtaactttcctcttctgatcagtggtggaatcaccaccatccctaccataa

SEQ ID NO: 92401 - DNA, 1194 bp, Cannabis sativa
aaatcaatcaatctaaagataatcaacttggtaatttggatcattaaaatctacaagttgcactttcagtctaggtcctggaccatgttctggtctgggtttgggtccgggttcaggtcttgagtttggttctaggttcgagtcttgattccggtctcgatatttggatttcaggtctgagttagtgtttgggtccttgtttggaaaaagttctaggttcgggtcttggtacaattgcaagatctagacaccgactacgggttaggtccatgccctaggccgtaggtcaagatccagatccaaatcttgggtccctgtctcgttttgattctgatcttgggtgtcggtccgtgtccgtgtttgggtgtgggtctaagacccagactggggtcgggtcttgggacccagtcctagtcatgtttcccgattctggttctaaggttgagtttgggtctccaatctaggtttgggtcctaggtccaaatcctagtctccagtcccggtctgggtcctgtgcctgggtctgggtccaagtccgtgtttgggttcagattcgtgtcccgagtcttgatccaacttttgattcgggtctgcatcctggtccgggtctgggtctaggtcctaattagattctagttcccggactcaaacccaaacttggacttagacccaggtctgggtataggtatttgtctaggtcagggtttgggtcttagtttgggtctgggtttgtgtccgggtatgggtcccaattccaaacactgactacgggtcaggtccaagcccctgggtcaagagttggatcacggtctcgggtcctagtctagtttaactttggttcccaggtcccagtctgggtcctatgtcagggcctaggtccggggtcaggtcctgggtctcggtcccagttctgatgcccgtgtcctgggtccaggaccctcatccaagtccgagtcctaagtcgtgatccaagtctaggacccggtcaaggttcaagtcttggttcgagtttgggttcgggttccgatctccgtctgcgtctagatcagggtttgagtctaggtccaggttctggtccgagtcctaagttccaatctggatctgggatctgaggcccacgtctaggttccccatccaggtctagggccttggtcccggtctgggtcaatgttcgggtttaggtcctagtcctag

SEQ ID NO: 92402 - DNA, 1091 bp, Cannabis sativa
tagaatgtggttgttgttataatgaaggcgtgtttatagggtgttgtggagaagttgctgagagtttttgattaaaattattagttgagactttgcagagaaagaagaaagaaagaatatgaattgggatgggcttctaggcgttgttgtacggtcatggatgggggaaataaataaatactttactgctgccacacgcagaaactttcaatttatatgattcgacccaacaacacgactcataaaaataaaaatattgacttttgaatggacataataataatagtcaattaattaattggtcgaacaataatagtaggcgcaagtgggttagagtagaaattacaatacaagatgaagataatgcaaccaaactctttacaaggacaaaaattacagcatcttttaactaaatgacccataaatcactaattgaaaagcatcaaataatacaaagaatatcagatttctatcttaataaatatgtaacaaatcatacctatcaataataatcatttaaggatcttttaataaaaattagtagacacccctatttattaaaattatataagagaaaaatatgacaaactatactccaaatttttatattaaatatcgacgaatcatgaaatatagtgttagaaagctacaagaccaatcccgaatccacttgtcatatccaaagccaaagtaattggtgttgaaggaatttttacaatactaaaaataaataatattattaataataataagtagggaatatacgcgagtactcaatccagaatggcgagtattcgaatcagaaacacaaaatacttagcaaaaactggaaaaaataatgaacacaggagagtatagtggttcagtcagatcactgtctgcttagtctactattgcaaggatttctgtccccttttcatttcacggcggatcactcctttatatacaaagcaagtgtcctatcatttacacaaggattgaattcattatcaattcgttcatacattgaattacaataattaaactaaaaaacgtaaacacaataaatgaagaacaatttccaacttaattcactaattatagcaacatat

SEQ ID NO: 92403 - DNA, 744 bp, Cannabis sativa
catcttaatttcacatgtttatttattttttatatagctagtatagtttctcaatcacttatatatgtatatatatatatatatatatattagattctatcggaaactataaaaaaatcaatagtgataattcatttagtttacgatatatatttttttatgattaaatgtgatttttagtgataataaaaaattaaattacgtgtgactaattaaaatatagtatttaagtacaaattctcactaatttaattttagttacaacaagtgttatggttaaaaacacatttggtcataataaattgtgatttttgggaataatacttttagctatggactttttagtcacaacataggaatagtaatttataattaggcacaatctttttacttttaattacaaattttgttgtaactaaaagtaaaaaaatttatagttgtatttgagtatacattctacttatttttgtaaccgttaaattaattatttgattagttgaataatttaaaatattaaaagttaaatacatattatactaagcatacaatgcaataaactactcgaggttagctgaaggtacgtgtaagtgcgtgtgtggaatcctctgacctaattaattatataaaagactcacctataaaaaataataataaaaagaataagcatatctatatatttatatatttatataaaagaaagcaaaaacaatataataagtgatattttatatgatttttttttta

SEQ ID NO: 92404 - DNA, 832 bp, Cannabis sativa
gttgcatccaattgatcattagtggcattataattcatttgttgttgctgaactttagtctattgttgatcttaaggtgcaatgaaatattactaggacatgataaaggtaaaaaaaacaaaaagtcataaaaaacaataaaaatgattatatatatactaggttaatgttacgtgcaatgtacgtatacataattttttttaattaggtttaattaagtgatgttaagtgtaatacatgtatgttaaatttttttaattaggtaatgtatttttatattttaatttttgaaatagagtttgagattttgatctttcacaatttttttagctattttgactacattggtgtactctttggatgtcattatatatatatatatacatattttatatatgcaataaaagaatgaatttcattattatacgtattttatatttatttctctatgtataagaattatattagaatatattttgacaaaatttaaatttgattagaaaattaattattttcaaaatacatattatatattatgtctaaacgtatatttttttttaaaaaaataatggtggtgatagatacaatatttttaatttgtagttaggagagtgtgattataataaagtgtacaaattattgtcgtgaaattaaggtttaaatatagatataatttttattttaaatatatataattaaattttttcacataaaatatctaaacaatttttataaatacatacaataatattataaaattaataaaaaatattatgttaactgattgggatattcacgaaaagttaatgtagaaactaaaaaaccccgttaa

SEQ ID NO: 92405 - DNA, 590 bp, Cannabis sativa
  modified_base (545)..(549): a, c, t, g, unknown or other
ttttttttggcacttttaccggcgcaattgtgcgccggtaaaagtgaacaagtgccataataaatgaaatgaaaggcggcaaacttctcgcgtctgttggcgcttcattaggtcacttttaccggcgcatattcattattgcgccggcaaaacgttttaataccggtgcagtaatgcgccagcaaaagtgaagcctaaatgcaagtggaatttcagattttcttgtatctcgacaacctttaccggcgcatttgacgaactgcgccggtaaaaatgccttttcttgtagtgataattagtttcaaaacatattaaattacaaaaaaaaaaaaaatatatattgatataacaagtaacgcattacactacactacttcttaagattaatgctaaataagtttgtcatccaattgatattttatcttatgtgaaatatttgtggaggtaattattttattaaagtctctaattacaaatgtaattttaaaataataaggtttctttattcttttaagtgaatattttgcatttgataattatataannnnnatatatactaataatcataccatataataaatgaatttatt

SEQ ID NO: 92406 - DNA, 819 bp, Cannabis sativa
  modified_base (121)..(128): a, c, t, g, unknown or other
  modified_base (460)..(469): a, c, t, g, unknown or other
tatatatatatatcgatttaaagtttaaaccaatcaattaaaagttgtttccctagtgataaacacaaattaaaaacacaccagcttgctataaaccgatcatataataataataataatnnnnnnnntaataataataataataaatagattattttagactatgtgatgtataaaagttatagattggactctctattttattaaatgatagaatagatatttttttaaaaaaaaaaaaattaatacaaataggaccctcagctcaattttcgacaatttttttaatataattaatttaaagataattcttagataatttaattagttttatcgtaatactattaagttagattattattaaataacaaaaaattaatttaaaattctatttatactattttaaaaaatataaatctaaagtaatattgacccaactcataataataataataataannnnnnnnnnaataataataataatataaaggtaggattttggcccatatagtaagatatcaaataaggctactatattgttatatcatacatatacatactattatttgagttatatgtagatatatttttgttcacaattaatggtgtggtgcacaatactcctagatgataataatcatcatgtaggagctcaataattttgagactttttctaaaaaaaatcagaagagacaagtagggaccatattgtaccaccaaagaaaaaagaaaaacagttcctattcttatatatgcatacacacaatatcaaaaaaagcactattttgttttatttgttgtaattttatgcttttcttt

SEQ ID NO: 92407 - DNA, 573 bp, Cannabis sativa
caagctttgtttagcgcttgagagtgtcgtcaggtctatgagctgcaattgattaataacaagcttttattgataatatcgtcatcagatattatcaaagcttagctgaaagaaaaagtagtagttgcaaattttaatttttcatcaaagcttagctgtagtgatcccactacactaatgccttgttcgactaatagtgtaggggccataccttagtgagggacctcctaaccaaaagatgacttcgtcgcatcttgtcggttcaagaggtgatcgactcacttacacaagataaagtgaatctcactgtaaagtgaactatctaagaaacagttacttcattgataatatcctctcaaatggtccctgttccagaatcttggtactagcactggatttaagtggtagtcatagctaactccaacatgtttgtttcgcatttgaacacttctatgatgctataagatccctccctctctcattgggagtcttcaatgtcgctttcttggtcaatatctttagaaggctcatatgactcattttcactattgctcccctattcttgatcattgt

SEQ ID NO: 92408 - DNA, 532 bp, Cannabis sativa
tcccctgctaataaagttcttttaaacctaatatacaaaacagctattacaaaatcaagattacatttccaaatataaaaaaaaactcaatcctgcttccaagaagccaagacaccatggctgatatgtacactgctggatgacctcctgctcatggctgaatacatttattattcttcttacatataccacaaaacactcatgagtcacagtgactcagcaagaaaagctattacataaagaaaaatcatggaaagtgataacaggtttcattacagcagattatatttaccaatgggtcataccctttcaacgtacatatacatctcaacatctatacgaacaaaattattacaaaagtaaaagtgtttgtatccatatataatcaacaacctctgtgttcataaaacaccctaatcaacaaccttagcgtttcatcaaacaccctaatcaacaacctttgtaatacccagaattaagaaatggattagcaaaaccctaactaaataattatgtataattgaggaattat

SEQ ID NO: 92409 - DNA, 544 bp, Cannabis sativa
tttacgttttattaaacgatcaacaaatcgagttgctcacgcaattgttaggcattctcgctttctttctggttgtagcatttttgaacataatgtttggcatgacttaaaggctctcttgtattcataatgcatttaattcaatgaagttgatatttcattaaaaaaaaagaagataagaatcctccaaaatccaataagaggctttaaaagaataataccactgtccagtagcattagtccctcaaaatcaagtttaatacgattccatttgtctcattccaatttcaactatccctcacactctttgtccatttggaattcaaacactgatacttgaaatcaacaaagtaagcttatatatcaaccccaaagctaaaataaacacatacaccatcaattctaaacaaagagacataccaaattcttgattcttcgcaaaactcatatagtttacaaacctaacatacgtgtaaccttaaaacaccctaattcacaagaaatgaaacctaaactgcaaaattcataaactgaaaagcaggag

SEQ ID NO: 92410 - DNA, 893 bp, Cannabis sativa
ggccaacccaaaaaccagggggaatcattaagcttcatccttttttctggaatatcagtaggggtttaagtgttcttgaagccaaaggcatccatccaacacaagactttccgttcaggtcggccaactgacttgaatctagaaaaaaggtaaagaaaagacgaaagctgaataggagtgagcactaagctgggatgaggttgtacatgttaggcggcgtgacctgaaatgtttggtctcgggacatctggagttgttattttgtagtcgctgtgcgacctgacatctgtatttcggaatatgttgtaaaaagtttaaaaacaggatcccgactttgtatatatttatgtaaagattataaagtttaatatttaatataaaagttttaatttaacatgattttcaagtaaattctttggttagcaaagatagcactgtaattgcaaaattactgcagcgtgccttagcataagggcgttacaattttagtatcagagccaccaggtttgtctaccaaagcttgccaaaacatgtacaatcttcatcagagaaagctcagctcacggttcagtaagcccatactatatgtgtttgttaaagcatgttaggaagcatatttgattatgattatttattttagatgcatcgcctttaaatccatagagcggtattaattttttttatcgctatctaacctgcctggcatatgggttcgcaggctaagtcctattaaatggacgcccaacgaaatacaagaagtcagggtaatagggttgagattggagacggttacggaattcaaattccccagaatccccgtggtcgcggccgaggccgtggcagtattcaaggtggtcatcttgtgaatccaccccaagctctttggattggga

SEQ ID NO: 92411 - DNA, 545 bp, Cannabis sativa
aaaaaacagaagcttgttagagatttcctagtatccctatttgatgtataatctgcatcaacaaaaccttcaagttccaccttgaaaccagacttcttaaatgtcagaccataattagaagtagttttttgatatctcagcagccattttactcttttccaatgttcttcaccagggttagacatatacctgctgagtgtgctaacagcatatgctatatcgggtctagtgctaatcatagcatgcatgacactcccaattgcttcagcatatggtacatcggccatcagtttcatctctttgtcatctttaggtgattgactagtagagaacacaaaatgtccagcaagagggacttttgtttctttagcatcactcactttgaattttctcagaacagattcaatgtattttctttgagttagagacattttgttgttctttctgtctctttgtatttcgatacccagaattttcttggccatacctaagtccttcatctcgaattcacagttgagaatatacttaagcttgttgatttgatt

SEQ ID NO: 92412 - DNA, 634 bp, Cannabis sativa
attaaataaactgaaaaaaaaatataatcaatagatatttgctgtcggttgttatgggtgtatatggcgtcagttattggctaggaactaacgtcatacgtacccgtatggcgtcggttcctagccaataactgacgccatatgtacccctatggagtcgattattttagaccctacaacgtcacctagatcagcgtcagtaacaaattttgccaaaactgacgctgaaaggctttaaaaatcgcctctaaagggtgtttttgtagtagtggatggtcaagacagaattagattctgatcagtagaacccaccgcactaggccacacgtcaacctgggcattgggcgcttcccggatgactttgcgcgactcattttaatacttctaagttaatcgagattgcggtgaaaggtttcattcccgttttttaccaaaataagaagaatgcgtggattagaatttatgtttgagtagtgaaaacatgcaaaccacgttacacgccaacctaagcacagggcgttgaagccctgtttggctcccaaaggatcttgtttgctccctgacatcactcgtatatcttcgttattttgaacaagaaaaagatgcccataaactttttgggaaaaatgactag

SEQ ID NO: 92413 - DNA, 612 bp, Cannabis sativa
gcagcatctgcttaattctactcttcctttttcatccgagggcaatctttcttgaaatggtgaccatgccacaatgaaagcatgtcttctgagtacattctccatgatgatgttttttgcatcgtggacacttaggatagaaataaccctgacgtccacctctaccttggttcccacagaacctcttgctctgttccaaaccacttgaggttggaacattcttcctcttttgatcaacgttggtattagcaccatccttagtgtaactcgaagtaaaaagggtggtggttccaccaattttttgagtccttcggggcttctaaagtaattcaaatgcaccctcagtttagagagccttttgaaccatctcaacgtaactagttctatcatttgttgtaatcaccaaatcctgcctaatcttggcaatcctaccaagtatgtttctttgttactgaagtctgtcggaacgattcctgaagccaacatagcaagtcgatcaaacatcattgtatattcagttaccaacatggtctctcactaaataagtttaataaactctttccacttagcattgcgaactgcctcgttataatatttggcattcaatatatc

SEQ ID NO: 92414 - DNA, 705 bp, Cannabis sativa
tgattatttggggtttaaatttgtctctgtactgattgtatattttacaaaaaggtatatattgtaaaggaaaatttttatctctgtagtggtttgttgctttgttagttttagagtattttttatttaatttttacttttacatttagtctcggttattgtaggaaaattgggataaataatcacttttaatcccaattttcaaagaaaattgggatttaaaatggcctttatcccgatttttctataattatcgggattaatggtaattttttattctagtttttataagagtttttatcccactggcatgtatattctggtttttattttatcaaaaatcgggataaaatgccctttaaaactgagataaaaagccatgttttgtagtagtgacctctgctccatgggcttctcccccggcctgctcaacacaaagttacatggcattcacttggatgacatgtgaaaaagattctatggcctggacaggaagaccctcttatgagatgtcttccaagataatttatcacaagtatatattgaatctgcggatggagctaagaatatccaggcaaagtatgctacactatctgaccagcacccaattcgtctgaccaaataatgcacaggcaaagtatgctacactagcgagctgacgttggccattttttagcgtcaataaaaacaatacaaaaataattt

SEQ ID NO: 92415 - DNA, 650 bp, Cannabis sativa
acaatgatcctattttcactgcacacacatatgtctgacaagtgtgttcaattttgtaagtctcctctactaaaattaaaaatcctggtttacaattgttagcaatatgcattttttcacaacatcaattaagtatgatttgttcttgagatactaattagttattctcttttgaaagcataacatgtatttttgtcatttgtaatgatttttgattaaattacttggtttagaatttcttatatttattgtacatatttttttttattattttcggttctttaaaaatataaaaaagtaaaagagggaggcgttgatgacttgattcatgggctaaggaaatttgtgcttaattggtaagtatcaatatttattctttcttgatttattttgatatgttaccatttaaagtttgttctcttatatggaaatgtgttttaaatcttgaaagtttgtattaaatgggatatttttggaaataatattggtttttctagtttccttttttattttttttttttaaaagaagggaaaagagaaaatctttttgttgccagagtgggcgatttccttttgtgatcgtgggctggtggtcactcaaaattttgaaattggtttcctttttgctcaactctcccatgtttatttaa

SEQ ID NO: 92416 - DNA, 803 bp, Cannabis sativa
gtcagagaaaacactcactcgcattgttggatgtgactcagctgcacaaatttgggagactctcagtacctactacacggctttgaacagagcaaatgttggtaaatacaaaacacaactcagaaatttcaaaatgaagggctcactcaatgatttcttgctgaaaatcaagagcactgttgatcttcttgcctctattggacatccaatgtctgctcaagatcacatataagcgatctttaatggtctttctagtgagtataacgtgtttgttacctctgtcaatactagactggacacctatacagttgctgaaattgaggcattactcatggctcaagaagttagattggataaagattcaaaggatcttgatatcaataaaccagaagccaatttggctctcacaaaaccttttacaggtggtagatgtacattctcttctccttattatccttcctctaattcttcatctcaatctggtgtgttcaggggtgcatcgggttcttactcggccaatcatcctccacctggttttggttctcatctgcaagttccaacttgaggaaccatggctggccgtggacagatgcattccaacaggggtggacaaatgcaaggccgtggccaatacacagcatggggtcagaaaatgcaatgtcaattgtgtggcaagttaggccatactgtacacaagtgtttttacaggtttgataagtcattcacaggtccagaatctttccaaggattctcgggtagtgcaaatcttgctaaatgttctcatctctatgcctctcctgaag

SEQ ID NO: 92417 - DNA, 786 bp, Cannabis sativa
cattcaacaacgaagatgctgtcacaatcagatttccacacaatgacctgttggtcgtggaggtctagataaccaatatgatggtagccagaactatgatagataatggagcctcttccaacgtcttattcaagaccacataggaaaagatggggctcctgctcaaagatctaatcccatgtcttctgcccgtatatagtttctcaagccaaggagtggcacctctagggaaaatttgcctacccctcactgttgggcaagctccgacgagcataactataatggcacaattcctggtattagacgttccatcagcctttaacgtcatgataggctgactagtcttatatgacttaaaaattgttatgtcgatattccattcatgcctaaagtttccatcaaagtatggggtagggtgtctaagagggaaccagtagattgctcgagaatgttataaccttgtactggctaaggctaaaaaggaagtatcctctagccagagcacagacaagggaaaaaacattcctaagtagggatgttcccaaggcggggatgaagatgtggattctcaacttggagacccaagcagcaatgttggacctgtggaagaactggaagagatcgagatcgatgaagaatctcggctgggaagctaaaaattggaaaaggtttgttgctcaaagtaaaatcagcgttcataaaatttctgtgagcaaatctggaagtttttgcctggtagcatgaggatattgtcggaattgatccttctataatttcacatgtcct

SEQ ID NO: 92418 - DNA, 872 bp, Cannabis sativa
gggcctctatcttcattggttaccgtcatggcatgaaagtctatactctattggatattgaaaccaaacaaatttatatttcacgagatgtttccttccatgaaaccattttccccttggtttcctcaacatctccatctaaaataaaccaatttttttgcttatattgtgcttccagcattcaaacctatacaacaacaggcacctacaactaaacctacacaagagtcatcttatccatctggtttcacaccagtaactgagtgctcaaactcatctggcttcaaaccagtaaccgagtgctcaaactcatctggtgtcacaccagatcacattgatcacaagctacaatctcaaccactccaatgtggctctgacaatctggttttcacaccagaaaatcaccaagggaacatttcagctactggtagcatcaaagcaccagtacctatcatcattgacccaactaaacacacaacttctcctactgaagccattcccaaacatccctcacaaactgatagcactccagcttccatatcccaaaccagaactactggttctcacaaacaagctgccatcacagcagctccaacacctccaaaaactaccaaaactggcagaattttgcctaaacctaaacatctcaatgactatgtttgtcatgcttcatctacatcacatccaattgagcctttcttatcatatatcaagttacatcctcaatttcgagcagctgtacttgcagcctattctgaaattgaacctaaaagctatgctgaagcagctcaattttgacattggcttcttgccatggataaagaaacaaccgcccttgaaaaaaaaaattgggtcattaccaagctaccacc

SEQ ID NO: 92419 - DNA, 4208 bp, Cannabis sativa
gcgtttcattggcttctatgggagtctggactcgggaggaagaacggaaagctgaaagttattacagcggctaaagacaatgtccaatagtgcttggatatgtggtggagactttaatgagattaaaagtcacaaagaaaaaaagggaggagggaaaaaaccagcttaccttatgagaaactttagaaaggttatctcggattgtcgattccgggaaataactacagctggggattccttcacttggtgcaatgggagagcctcaaatatggcttttgagaagcttgatagagttctgtgtaactcggaatggttgggaaaatttaagacaaataagatcactcttcttaaatggtggaattcggaccataggccggttttactggaagctgagcaaggtaataaggggagttcttttcgaaggaaatgggattctagatttcattatgaacatgcttgggccgacaatgacgaatgtctcaggatcatcaatgaagtttgggaggctaaagagaggggcaggcctttagataatcttacacaattactgtccaattgtgggaggaggctccaagagtggaatatcaaacaaaaaaaaatgatctctttactagatccaaggagttaaaagggaaaatagattggctctcaaagtcgtccaatttgacatattggctagctcgtcaaaaacttgaaaaggatcttaattgcgtggaagagaaaagggagttgtattggaaacaaagaagccgtgcactttggttaaaacatggagatcgaaataccaattttttccacttcaaagcaaccaatagaaggaaaaagaataccatcatggggttgtatgatgatcagcttcactggagaacttcagaaaaggatattgctgccatagccattagttatttttagaatttgttttcaaaatctaatgggggaattgatgttaaagaagctcttaggggttgtatcccttgccgtattagtactgaagaaaaccgttgtttactagagcctttcacaagagaagaaattaagtctactttgttccaaattcatcctttaaaggccccgggaaaggatgggctgccgggtcttttttttcacaaaaattgggacttgattgggaccgaagtgactgctgcttgtctcgaaattctaaatcagaatttggactgtagtaaaataaatgagaccctcatctgcctcatttcgaaggttaagcaacctactaaaatgtcagaatttcgacctattagcctttgtaatgtggtttataaagtagtgtcaaaatgccttgccaaccgcatgaaaacgagtatgaattcaacaattctagctaaccagagtgcttttattggtggtcgaattatacaagataatgtcattcttggatttgaaagtctccattgcacgaggaaagggcgttttggaaatgggagcaaaatggctttaaaactagatatgtcaaaggcgtatgatcgagttgaatgggatttcatagatgctataacagattgcttggggtatgagggtgaatggatcaaaaaggttatgaattgtgttcgatcggtttctttctcaattctcataaatggttcgaatggatctcttcatggtttttttaaggctaaaaggggtttaaggcaaggggaccccctttcacccttcctctttctcctttgttctgaaggtctctcatgccttattcaagaagcggaaaggtctgggaaaattcatggttacgatttggaagtttggatcaaaggctatctcatttgtttttttttttttgcagatgatagccttgtatttcttgatgcaaacttggctgaatgtatggcgattaaagaagttttggagaggtatgagaaactttctggtcaatgtatcaattttgataaaactgagatgtgtgtggacaacaagataggtacaagtatggcagaatgtctggctgtaaacttgggtgtttcattggttaaaaatcacactaagtacctgggaatgccctcctttgtgggaagaaataaaaagcaagtgtttggcaaaattagggataaggtggaagctaaattacgaggttggaagatgggtctcttctctcaagccggaaaggaaatcttgattaaagctgtgatacaagctataccttgctatataatgagttgtttttgggttacaaaagggatccttaaggatattgaaagcatgattgctcatttttggtggggttctacttccaataaacacaagcttcattggggaaattggaagaaactttgtagacttaaagagcaaggaggaatttgttttcgtgacttagatgactttaaccaagcccttttggctaagcaaggttggaagttggttacaatgcccgattgtttaattgctaaagtgttaaaagccctctattacccccacgacaactttattgaagctagtcttgttcattttggttctacagtgtggcaaagtattctttggggtagggagcttttaattaaaggctctcgttggtgtgtgggagatgactgtactattcgaatcaatgaagacccttggtccctagaggtattcctttcaatctccgttcaaaagctatgctcccggaaggagttactttaaacaagttactaaatgaggaggggaattggaaaataaatgaagtgtatagctggtttcataaggatgacattccgtgggtgcttggtatcctccccataacttctagaccagattggatcacgtggagtttgaatccaaacgggcagtatacggttgcaagtggttacaaattaaggtttaaaaacccgaatcttgttgaatgtttggataagtctactttgaaagcttggtggaagtttatttgggggtctaagctcattccaaaaatgaagaatttcatttggcgtgtgtttaatcaatggatgactacgaaagtggagcttacaaaacgaggtatgtcatttgatactacttgtgattggtgcaaggtggaagaagagaacctttgtcatgccctttagttgtgtacgaaggttcaacagatttggaagcattttggtttcgataggctgctaaataaggggttacatacagctccaaatttgttgtttttcttatggggaaaattatctaaagatgaaatgatgtactttattggagtctcttggcttatttggtaacgcaggaacaaactactatttcaaaacaaagctcaagaagaccatgtttgggtgatgtgggctcaggaggttttggaagttcatctaggagaggcttttaggcctcggaaggacattccaatccaggttagaaaggtgtggcaacctcctcttcctggttttgtgactcttaacactgatgcttccattattcatgataaaatgggatgtggtttaagtgttgtgataagagaccacgatagaaatttgattgtcgctgaaactaagtttctgccgggctatttttctgtctatttggcggaggttgctgctattcggttgggggttaatcttgcgtgccgttggtctttgcagagggtgtgtgttgcaatcgattgcttgggagttgttgctgctttgaagacgaattctcctcctcattcaaactggggtatggtggttcgggaggttattttgctgaagcaaaattttatttttctgcaattttttttcattaacagagagtgtaatgctgtggcaaatgccttagcaatttggagtcgcatgactcattcttcagacctgtggactggttctttgccttgttgtgttgttgctaaaatgttagcagataagcctggtttggctgtttaacataaagtctccttctattaaaaaaaaaaaagaattataaagctaataatataccaccaattttggatggtcgtgctttctaaattttgtcaaatatcataatggtttacaaattgacagagaataaaatatgaaacattgcatcattttatttccttacaatttagtttagaatttccatgaaaagaaaatcaatttactttagaatatgtcataattcattttcaaaaagaaaaaaagaaaaaaaaaagatatatgtcataattaaacatatctttttaacgttacaaaagtgtacataacaacgtgggaacataaatttgttagtacgtagagtagcacgtcccttaaccaaagttatcactaactttataatattacaaa

SEQ ID NO: 92420 - DNA, 547 bp, Cannabis sativa
atcctgctggtaaaatatacccaacaaatgttgtaggaactagactacaaccctaaaacaactcaaatacaactgaaggaatgttgtcaaccactctaaatcaaggatgacaaaagttttctattttacataaagttattaacgaagaaaattgatttcacacgatatccattgtgtgtgaatacattcaactacacagtaacaacagaataacaacccttatagaagccacccaagcaatggtgtgcaacaatatgagtggaagtgaaaataactcatgacactcaactgtgaagcaacttgacaacaactaaacaacttttatctactgcaaggaggggatcagtttcaaaagatgttatttttgttgatactgacactttgaaaacataatcaaccacaaaacaataagaaaaaaaaccaaaagtaaacactcgaagaagttgaatattcaagaatatacaattatttgttcatcaattgtttttatgtttttatatcgttgttaaatagttgttaacagttaaaaaacctattaacaactatt

SEQ ID NO: 92421 - DNA, 3357 bp, Cannabis sativa
  modified_base (3330)..(3330): a, c, t, g, unknown or other
attatagttatattaagtattctaactatttaggaaattttgaataatttaaaatatctgatatataaactaagtaattagttatacgttattttgtacgtgtacaaatggctatattagacaacaaaaattattttttaaaaatagttttaaaaaatttgtgttttctatattctaattttttaaaaatagtttaaaaaatttgtgtcaaccatcggggtttaggttaaggttttgttcagagtgtaggatctgagtatgtaagcaaaaatgtaaaatatattatattagacaacaaaaattgttttttaaaattgaaaaataacattttaatgttttctatattctaattttttaaaactcaattttttaagaaactatttataaaaattttaccaaacaacctttattagtttttaaaaactgtcttcagttttaaaaaacagaaaataatttttaaattatgaacaacctcataattaatttctctagaataaggaaacagaaaacgtttctacagtaaaatcaagtgtgatatccatctaaaaagaagcttactatatattttgtaatgtaagggaatgagtcagtataattagtgatgaaactataaatacatctatgcatgagaatgagatagaaagatatatgtaggtaattcgtggccgacatatagaaagtgaccagaaaatttctcaagtgtctttatcgattacaacctcaccaccagttataaatgtcgttcttcaccggcaacatattactcctttgtgacactccatttatttgtttatttatttgctaattagaattttttctctcaaattttgagatgtattaaatcgtatccctgaattattgagattgttgaatttaaggacttttgttaaattttagttaaaaaattctaacatggatgaaagatcaaaaagcatgatttaatatatataaaaattcgagatgcgtgatttggtagatttcaaagtctaaagagcatagtttagtacataaacaaccattaaaatagtaaaattaaatgaaattagacaaaagtactaaaatcttacaatcccaataattcatgagaaatttttaaccttatttatttatttattgtactactctatcactatcttctcctaatatacaccacatatttcaaactcctcataagaggaagttacattaatatccacccctatatatatacagctacacaataatatctatacatgtatattcgtttttgggaccagatgtgacacattgtagttgatcatgatcatgataatatcatagaaacactattttaagagtttgatttaaacgtatatagctaaagtctaaagattatttatggacccctctctcttaatatggtttatagatttatctatacagggactgaaactatgttttttttttatttttctttaattttttttttttgttttccattttttaggggttggccggctccatttatgtaaattgcttttcggtattatattatccttaaactaaacacctgaaagaagggtccatttataaagagacatgttatcttagaaaataaatactcttaaattttgttaaaccactcataattaacataaaaagagaggataataataaaaacatgtctgcccatttgaggaaacatatcctactttaggatttttgacaaaatgtgaaaactttgtacattgttaaaagcttgctgttattgttaatttctagactcacattccctataattttcaaggaaattaattaattcacaacagcaaattaataggttttcttctattcttcttgtggttaggtttatatgaacctttgtcctagaatcctagccagtaataaaatatctggaagaagtttctttttcaaattctatgtgcctctagtttttttaatataaaggaaaggatttcaattagcatatgtcttgttagtagtataaattttttctctccacggaatgtggataaaaaggaaaatagttgaattattacatttttaagtgtccctttacaccaatggaattggtcagtttcaatacttttatcaagtgtcggcaagtgggaaaatctatatatgaggatcttatccaaaacatgattatagaactccaatggaaatacaccaacaaggcataaaaagacaaggaaacattgaagcagctatcttctatatctatgtatcttgtttcacatcaatgtataagctttattaattgtgttattaaataatgaaattctaatttcttttcaggatattacagtttttgtgccattgaattatgtattattatgctctctgaattttcccgggtttgttaaaagtgatttatcaactatttgcaatattataaattaattattattctgtcaaattttattacatgtaatgaagagaataataacgtagttgtctagataattaacatgtaagtatcatattagcgccacttgtgtagttaatgttaaaaaaaatatttgaaagttttaaaattatttttacttaatttttttaataacaaatttttaatttaatgatcttttaaaaatataactattttttttaattttaaattatacacgtggtgctaatatagtaattgtttaaattatcacattgtcgtaaaaaattaatttacaacactttgaatagtttgtggactatttttaatagactaaaaaattcagaaaacaatgcatagtacataatttgggagcgaaaatcttcaatagctttcttttaattaaaattacaataattatcattttttatcttctcaacttaggacactataagattgtgcctctaaaatatatggtttattcaaaaaaactcatgtatttttacgatttatagaaatatagttcttttgttaacctttttattatgttgttaattgttgattggaatgatatgtcacccattatggttcaaccaataatatttaaaaaattatcttaataaaaaaaaattaaaaatatttgtttctaactaatttgaaatattaaaaataatttgaaatatgtaaatacataaattgaatttttttatttttaataatataaaaaaaaaatattcaccttgtttttattattattatttttatttcttctctctcatacttactttctcattaaccaaacaacatttcaccaaaaatttactaaaaaaaatattctcatatgtcattaacatcctcaacaaaagttttgcccaaatattgaaagttgaagaaatcaaataatcatatacttaggtgcagtttggtaaaacttttatttttaaattttttaatcacaaaataanagtaaaatttttatttttaaaaaacaa

SEQ ID NO: 92422 - DNA, 779 bp, Cannabis sativa
ttttcattttaaagtttcattaaaatattatttattcttctaaatatattttattaattttttgtgttttaataattatttttgtatgaaaatataagtatatattaatattatatatttaaaatggaaaaaaatatattaaaatttagaaaaattaattttggtgatatattttaaaaaaactaaggtatggtatgataaaaaatgtgtttaaaaaggcgaaagtaaaattttggtggtggtataatttaaagatacagtagaaaagttattgagagtacttttaagaataattagcaatattttatataaaaaaaattattatataaaatttaaaatttaatcatactaataatatgatatatcaatatataattatttcttgataaaaaaaaaaataaaaataaagatatgattattaagaaaaagtgagatatttaggtatattctcgaagaaaaggaaaaggtttgtttagataaatgagtaccataagacactcaaatattttggataatgtcattggttcaaaataatagcaagtctcatatatttaatttaaatatatatgatagttttccaataattttaacatatatttggtagatttatatatagcacattgttttagggtccacaactactccactttgaatattgaatttcatggcctgctttttagtgcagctgcgtgagtgcctaactaggccaaatcataattatgtttcggggttttactttaaattatttaggttgcgttttgttagaaggaatgaaaata

SEQ ID NO: 92423 - DNA, 733 bp, Cannabis sativa
cttcggaattgacattttatgctttgttagaggcctctgaattctcaaagaaatggcttcctttctgtaacaagttcaaagtagaacccagatctcctgaggcttatttcaccaacaataaagcttctcagccactcgatgtcgatgaccatcgtgatcaatggacctccatcaaggtatattatatttatatgtgaagcaactcttctcttctacatggtggttgtctgggtttgcattatacttttctatgtagtgcaatttgcatggcttttaattatttttactgaaatttcaatttgttaatctttgtacaattttttttttcaagttctaaaaaatatatggctttttacattctcatgtatatgaatatgagagtcaagtcatagttctctcacatattataataaatctaatttgcatactaattaaaagagagacaccttttgtcataaaaacaaaataaaacatagatatctaatcaaaacagggagtagttatatttttatttgaaaattaattagatcatatgtgaaagagaatcaagtatttttttttcttttttatagaggctatatgaagacatgaagacaagaattgaaagtgctacaaaagttggtaaaatttcagaaatgttacgaagaacacacaaggggtttcttgactgggactctgtttcaagcaaacgagatcatcacaccattatccaggcattaccatttacctattc

SEQ ID NO: 92424 - DNA, 783 bp, Cannabis sativa
ctatttcaatttgtaaaaatttgtgaaagatagtataagatttcacaatccacctaaaacaatattaatatattaataataagaaaccaatgtagctaacttattcatcttctcttgttagcttttaggtttgactcttatgagaagagttgcttacatttgacaaagtcttcaattcagtattgttaaattacaatcttatctcaattcaactatttatactctgtactatatgaaataatgtcttgatgccattcaatatgcccttcttcttttattatgttatataatagaaaaatggggcacttcgaccttccctagtttctaatctagtaatatgttgtttagttttaatttatatatttctcttggtaaagtcttgtaaattgttaaaaaacactttattaattttattttgacatatttaatcgataatgtgttttattgtatatttatatattttggctgagttgttttatgatttatcatgtatatattttattaatttatttcattaaaagtgtattaagtgtcagttttttttttttaaaaaaaaaaaaaaattggaaaagttggatacaattggtaagttttaatggaaaacttaattccttcattttctttatttgtccacccgtgtttcttattgtactctgatcctatattagtttcctaattggtttaatcagatattgtgtgaagaaaattaaaataagatgttctttttttataaaaagaaagttgcacttacagaattgaaaattcttggattgattgaagatc

SEQ ID NO: 92425 - DNA, 505 bp, Cannabis sativa
ccaagctcctatccatgaagagtcaccggtactgcaaccttcgtcattcaagaggcgagatgggggaaacaactaaatttgtcaggcgtgacagaactaatacgagataccttctcatttttaataccacgacctcaaaaattgagccacgtaaggggcgattgatctaactttagatttaattaattcagccttgaaggtaacattagggttctgaggcatcttgaacttttgagctttaggagccatggtgtcaaaattatgatcacctggttgaaaagcaatagtgacttagggtaaaaatgatggtcttaacaaggggatttttactaactaggcaatttaggccaggctgcttgtcatataaaacaacgcctaccctcaataatttcttgactagctctaagggagtgcttcctaattttttttaccattttatctcaagtatggattgaggtttatgggtctggggtttaaaaacaacgacttcaaattcgagattatc

SEQ ID NO: 92426 - DNA, 1019 bp, Cannabis sativa
tagtaaaaatagtacaattacttaaaaaatatgaataattataaattccacttgaaacgtggttccgaaccaaaccaaaccgttcttaatggtttggtttgagaaattttttggtctggtttggtttctaatattcaaaaaactgttatactggtttggttcagaaattataaaaatccggaccaaaccaatccgtgaacacccctaccatttactgctacaaaattgagacaagtggtaactagttactgtattgaatttatcaacttttagtatagtagtaaacgattattaatgcagaactgaaaaaaaatggtatatatgttagtagggaaagaaaaaagtaacgaaaaacaaagtaggaaaaaaaatgaaaataataaattctcacacacttgatatggaaagaaacaaaaattttcatatcaacataaaaaaaataattttttttttcctacatttactttttttttttccttttcttattaaaatctaacatctaaacataccctaaagccactatttttgttttgtcatatttgttttgggatgtatttagtttggctctagatcaaatttgctttaatatggtaatcgacttagtttattgttgtaaaatttgtataccatttagtggtattgttttgcattggttaattaattagtaatattttataaaaattattatattgaattatataagacttgataggacaatattagtttgtagatagtttaaaaaacttaaccaaacaccttttgaatcttagatatattataacaccttacaatcatgaataataattaactcaaaagaagacaccatatcaataaaactaagtacaatagatcttgttggtgaaatggttacaatcttgtactttacaagtctttattgtacataggtttatttttcttggggcttatgttttggcctaatctaatctattgctggatatagatttttccttttaattggaggattatttaccttcaattatatctatttcatttgtttc

SEQ ID NO: 92427 - DNA, 762 bp, Cannabis sativa
tactcaataagtagtattagagtaaagtgcattctgtatggaacaaatgtaaaagtacaagcatttatatgggtataagtactcatcattattattaattgattttgaaatgaaatatcataattcttgttatagtatcatgggttatttctagcaagtatttaattttcacacgatggcagtcagatgacgaaataaggaggggtcaaataaaaatatattttcacctaattttttttaatataaagtattttataaattaatataagaagttaattagccttatacaatatatataaaataataagaaatgctaagagcaccataaaaatacatataaatatatatcatacaaatatactcttcaaaaataaattatattattcatttttttttcactttttactataaaatagataactaatttaaataggctactaggtttggacttcatttttaattttaacttcacagtttattattaggcttactaataagaaaattcatatttttctaataagtaaaatctaattattctaatttaatttatatcttatgcatactttttctttttctttttctaaaaaattaggagaggccatgaccactccataaatacatgtagttctgcactatctacacatacccaatagtgtacaagatgaagagtaaatcgcatgaaatcagcatagtataaagagacttgaaataaacaaacaaataaatgattgttaatggttcgatgatttaaaattagtgagt

SEQ ID NO: 92428 - DNA, 513 bp, Cannabis sativa
ttaaaaaaaaaacaaaaacgccccatattaaaatagtgtactaaaataattaattagagagagagggagaggataggacagcacaaaatgtacaatttccatttggtcaaagcattaaaacgccccatatcctattcccatttttccacactttttttcatgccattattaattttcttatttttattaagagaaatgctaaaggtaccagtggtgcttagtagtctcctatgtatcaatatcactactggtcaaactaagtatcgagtcctatataatttaatataataacttttaaaaagtatcgctagtcaatcacaacgcgacatgtcaagacagtgctaagaactactagtaccttataacaatactcttttattaatttgcatatccacaaaatctaatttaaacaatactcatattttatgcattttaaggtattccacaacacagccacactaattatttatattacttgttaaaattaaatatgtgaaatgtaaatattaaatt

SEQ ID NO: 92429 - DNA, 951 bp, Cannabis sativa
  modified_base (806)..(812): a, c, t, g, unknown or other
ttttcagcaaaaattaagattcaactatttttagggaccaaacggaacttccgaaaggctgaaactaggtgcttggcccagtgtcaggtgtcaacttgggcggtgggtcccaatttctcaaaaaagtgtcatgagcattttttcggtcataaaaaataatgaagatataagcaaactcggtgagaaaaccacaaactcgagaacctggaaactgagcccagcgcccaggttgacaatcaacctggtgcgctggtttcgatcattcaaatgccaattttgttctggacttctctctagaatggtcaaaagtggagtagaagacatcgtcctcaagttctggtgttgggcccatcacccaagttgacaatcaaccttggaagtatcaaaacgacatcccagaagctccaaaataagcacccaacgctaagggtgttcgcggtgcgggtagtgcgggttgtagcttttttttcaaatcaaactgcatatacaatttttgtaatttttcaaaccccgaaataaatgttaaggaattgaacctttacatagcaatgtgactaagatggtttaaatttttccattgttgatgaagagttttttaggcaacagtgcttatatcagtaagatcaacatatttttcttctcacatgcattagtccaaatctaatatgcctaaagtagttttcacatctcgtttccatgccttaaagttggacacatttaaaatttggatggaagcattattgttgttcataaaaatgagaccaaaaaacccaaaaaatttaaacttgatcaagctatatgagcannnnnnntagaaaatattgtagagtcaactgttcattagaaactcccctttaggatcaaaatataacacacgcatgcaaggccggccctaggcataggcgggctaggcccgcgcctagggcccaaataaaaaaatacattttaaaa

SEQ ID NO: 92430 - DNA, 632 bp, Cannabis sativa
atttctttgatacgattgagctttcaagcctaccctatttgttgaatcccttgttacccaattttagcttaaatgatgaaaatttattatttttctttttaaccttgtacaaccttttgagcaaaaaaaaaaaaattgttcttcatcatttttcacactgtagtatattgatgttttatgtttataaaagtgagagttttgttgaggggagaatattgatgatcgtataagctaagatgatgagaaaaaaaattactattcccttagaatgaatgctcgtaagttgtaagtattttattaaaaaaaatatagaaatataaaaaatatatatgtatgaatacttgcaacaatctaagtgtggaaaaatagtaagacttgtaaaaaaaaaagatataagacttaattgttgagggaattcattaagaaagacaaaaggaaattatttgtaataatgttgtatatgtatgctatactgggatttgagcctaaaataactttctcatctactttttcccctaaccttacactgtaagcttattaagtcctattaatttttagattgtgtgtaattatattagtggataatagtttgataatatggagtgaattttcattcaaatacacatttgttt

SEQ ID NO: 92431 - DNA, 664 bp, Cannabis sativa
gttctgtgtctgcccctttaggcgcttatgccttgaggtttttctgctatgaccctttatgggagagttttggctctagttctactcattttcatggtgggtacatgtcacgtgggaggagtgttagcctcttaagctctctcgacctcttcttggttactcattggatgtaagggagttttcagctgcttaggcagtgctcaccttttttaggatttaagattttattaaggaagcttatgccccttaggtagcgctcaactcctttcatgctataatatttaattaggggatcttgttgcttcttaagtgtcactcaaccccttctactacattcatggagcttagagcgcgtttgaatgctaaaatatttgtgctcctttaagagagtcatccctatcatagtcatacttttttcttcttcctatttttttcttttgcccttgtgtggtcattcagtatcactaggcactttttttttcattttgtcgcttcgttcactttgataattttgattgacaaatatagtgaacaaattgaatggacatgtggagagtaatgagtgccacacgtaaagtgaaaatttaatatcttattgataagtcaaatacataagcgccatggtgcatttactattttttgagatcaacttaagtgcactatt

SEQ ID NO: 92432 - DNA, 584 bp, Cannabis sativa
ttgaaggttgttccgggcctagcacccaggttgacatcccaatgcccaggttgacatccatcgcctagattcacatgtgatgtcaacttagacgctgggtgagtgggcaaacctatcgaggattttttttttttttttttttttatgcttaagtgatattttgacatcacttagtgtatttctgtgttttgacaaagctggtcaccagttctcggaacgagagactcaaaactactcagtttttcagtaattcaccttgttagaaaagtaaaaatatgaagttgtgaatttgacttcatagtgatgagtttgggatttcgggctcacgaagttggctcgtttcccctttttggggcgatgcgcgaggtacagggatctcaaggtgttggtgccttgatggcgatattttttgcctttgcagactattctcaccgtcaggtgtgacgaatgcagttactccatcttggtgtgtgtgttagattcttttcacgtaggtttccccctcctcttgtttgaggtacttggctgttttggccaacttcttcagccatgggtgttggtggctcttttctggaggtgatcca

SEQ ID NO: 92433 - DNA, 630 bp, Cannabis sativa
caccaccaccaccatcactaccaaaacacaaccaccacaccaccaccactatcactacgaccataacactgccaccaccatcactacccaaaaaaagtcacagagttcaaatccaaatacctaaacaaaataatcgtcaacccacttgaaaaattcaaatctttacacaatcttatcacaatactcgaatcagtaacttgaatccgataaacccaatccaaaaccaaaaccaaaattccaaactaggaagtaactgaaacagatgaaactttaaagggattatcaatttgaaacccactgaaaggagctgagcttttgggtcgacaaagagagagaagagagggtcccttggtcgatgatggtagacgacgaagagagaagaaagggtgcaaacccttggttgacaaagagagagaagagacaagagagagaaagagagggctcgaacccttggttggctcacgatggtggctcatcgcagtcgtactgagaatagcgaggaagacaggggagacaggtcaagaaatagaaggagagagagaatcggggtagggatttttgggtcttggggttttctaggtatggagggttcgtcaatctgggtattaggggatgggggtttgtcgatgg

SEQ ID NO: 92434 - DNA, 902 bp, Cannabis sativa
ccctaattggatccctaatatctcccacccaactattttacaaccaattgactcctccctggccactgtctccttttttgtcaaccctgatcgcacctggaatactgacaagcttcaccaatatcttcctacttatcaagctaatgctgtcctaaatatccctttggacattggtccatccgattctctcatctggggattccaccactctggcattcttactgtcaactcagcctatcatctagcccagtccactgtccttaattcttccccttccacttccaatcccaacccttttaaggattggtggaaacttctctagactttgaaaattccacctaaaattaagcatttcacttggaaggctttcaaccatcttctcccttgtgctctaaaccttttccttaagcatgccatcccatctgctagttgctcttattgtgggggaagtgcagagtcggtttctcatgctctccttcactgtaccagagttaaatccttttggcatcattctaactttaagcagttttttgttgactatcataggcttgatatcaaagatttttatctgcatagccttactataattcccagggatcatcttcccttattccttgatatcatttggcaaatttggaacattagaaatgcccacctttttcaaaaacctactctaacgaataatgttcaagatactgttgcaagttttttgcaggattaccaggaagctcaaacccattcttcagactcaacaccgactactaatcatcgccctgttgcattggatcatattttgactccctcaaccacgactctttttgttgatgctgcccttaataccaatgcccctgcaacggttattggaatggtttacatgcagggtctgtctcatattcagcaat

SEQ ID NO: 92435 - DNA, 670 bp, Cannabis sativa
atttgcatgacataaatatttatgaatataaatataacacaataacacaaattgttaattaatattaagatctaaattaatagagccataaattccacttctttattttaatttgatgaatgtgtgtctagtattattatttattatttatattttgagaagggatacgtacgtacgcgttgattacatatgaattagtttcttgagaattatataaatatatttatatatggaccatcatttatttttgaccatgtatattatgtcccattaattatttagaccatgtacgtaccaaaaaagagataaagtttgatatttgtggtacttatatataataatgttaataatttattgtactaaaaatatcttgtggccttatttcattacgtacacatgaattatatataattatattaaatgtagctctagcaaaatcatgagtattatgttggtcgacatcaaaaatttgatatatagggatataattttgtcctgtaattttactttcacggaatgcattccgtgatgtacggtagccgtcaaatgagagacttatttgatctgacggctgagatatctaggccggggtaattagagttaaaaagtagaaacgtaccctgacacacatttaatgtactctgagactcatctaatgtaccacggaata

SEQ ID NO: 92436 - DNA, 852 bp, Cannabis sativa
ggtagggctttctctagaattggttatggagtctaaaacttggatgtggcatgtctctcatatatttgagtgcaatggttaaggtgattgcacatggatgctgacttagaaccgaaaatgatgcaaattagggcctaggatgtcatcttgggcgtccattactgacctgggcacatgttgactactaagatatctaggtgatatcttaagtcttttgttttagcttcttaggttatgtgtgacataattgcttagactgttgaaggatgaagcttagaaacaactttgcaggatctaagtctctacttgggtgcctcttgtgtgcacgtaatattgtcctatcctaaaatgcaaggccagaattattttcttcgtaccacgtatcaaaaacactatccacgtcaaaaaaaaaaaattaaatatatgtagtttaaagcatatttgttttttaatatatatttacaattaaagaataatttttttctttttctttttttacataaagaataacatttttttttgagtaatttgagatatatatacttaagtttaatttttggttgcaaataaatacctaagtttaatttttagcagtaataatacataaattataattctagaattccgtgagtacttgacggttaaatttcaagtcattatccacatgtcattttcttattgatatatttaaactatttttttttagaaaaaataaaaaattaatgatctagaccaatcatggattcacacgttgcaatttactgaagctaggtaaaaagtaaacttatatatttatttataattaaaaattaaacttaagtatttatggcacaatttttttttttttttttg

SEQ ID NO: 92437 - DNA, 1027 bp, Cannabis sativa
attttgtcaacctgggctaattctgatgatgttttctgagaactcttctgagcatcttctctatttttagtaaagattaagaattaactattttaggggaccaaacggaacttctgaagggccataactaggaccgagcgcctagtttgacacctagcactaggcctaatgcccaagttgatatattgccaacttgggctatttttaatcaagttcatgaaaaaatgttttgggcatttttttcgtcatcagaaataatgaagattcaagcaaatttggggagaaaacaacaaactcgagcctctagaaaccgggcctgacgcctaagttgacctggtgctgcgcctagcacctaggtctacaatcaacctggtgcactacttttgactgctcaaatgccaaatctaattcaaccaatgaatccggaatggttaaaaatggggtatgagatcttgtcctcatgttcaagaatcttgaaagtattaaaacaagatctcgagagcttgggaatgagtacccaatcccaggttgacaaatggcctggtgtgctaggttttacttatctgattctgattccatttcgaacgtccgtctagtttttcaaaataaatgtgatccatgagttaaataagtcaaattcacaactttacatatttctcatttccaacatgagaaactcactcagaaatgaaaagtgtcgagtctctcatttcagcaaaacaacaacatcttcaagaactggtgaccagctttgccagaataaagaaacagactaaatgatgtcaaaatatcacttaggcatcataaagtataccccttggatgtttttacacttagacagtgcccaagttgacgtcatatgttaacctgggagctatgatatcaacctaggcactgagatatcaatctgggcgctggatgtcaacatgagcgctgggtcatgaaatgactttagtaaaacaatcataactcactcaatattagttcagttgacacgattcatcttgcatttagaagctatttcaat

SEQ ID NO: 92438 - DNA, 634 bp, Cannabis sativa
gaaaaatatttctgtggtttttgtaaaacgatcagctaatatagtgactcataactttgctagagctgctgtattataccctgattgtcgtttcagtttggagtctgttccaactgatttgctaccttgcttggtagcttaagttaatggttaataaagatgaattttccattcaaaaaacaaaatattcttacctttcctagttatgtaaacaaaataatataattctagttttctttctgaaaagtttaataaacatcataataaaatattatttccgattattttctattttaaattgattcatttctcccattgattattctgataccaattacagtttaataaacgtgctattagtatttttcagtacacggataacttacagtttcttgtagttactagttcactaatttatgctaatattaaataattaataaaggtatttttaatactatttaaatatatgaattataaaacatttttgtattggtagtattttagatagaaacatataattttagaaaattaaataagtaatgaaatatatatgtgtctaaatattaaataagaaaaatcctaatattttaaatatatatatatattgtagtttaagtgaataattattcttatt

SEQ ID NO: 92439 - DNA, 743 bp, Cannabis sativa
tgaaatattttcctacacgaacaaatatgtataaaactgttaatacataataataaatattatgaagagttattataaatactaaaattatttattttaaatctatatatatatcaattgttgtatggggcaataatccatttatctagattggtcatcctagtcatacgagtggctagtgcttgacaatggttacgattaatccttgcttaggtagcaattgtactaggatttaaaaattcatatactctgttcagcccgttgatgttcaataatctttctttcatgtacctgataaaaagtcataattaataatcgtcgttgtcaaaaaaacattatcaagtttattattaagagttagaaatcatacttgtacaacactccaatcggctgggctcctaagtattgcatggtgcacaattcatgaatatcatttttaaacaagccaaatagagctatcatcaaccccaagtagatcagaagcaacctggaattggattatggatgagttcggccaccttttgatggagttccaaaaggtaatgattgagatagtttgtcgtggttggacagaacgaccatagcctgttggcttactcagtctctcagggtgttttggaggatcgaatcaatctttagaggcttgtcttgctcctgaagtttcttggtgggtggttatgtgtttatgtatatgaaacaaaattaataaatttagcacagtcattaatcaataaacacaataa

SEQ ID NO: 92440 - DNA, 945 bp, Cannabis sativa
tcgccattgatagtcattacttacggaaaaaaacacccgtaaatgacgaaatttggccttattaaaacctatttttctcgtagtatcatacgatgggtgagatgacacttcgctaaataatatgggaaagacaggctcattaatcttcatgccaagtgatgtcatgccaatattttaaactccatgccaacatatgtggtgctatagcgttgtaatctccctgccaaaatatgtcagatcatatttccaaataacacatgttaccctttagaggtggttattttcaaataatcgtttttaaaggggtttcaagatatttatttttttccttttagctatggcaacgcttttgtttagtgattgaaaaaactatctttaaaaatcctttttgtagtagtgcttgcccatttgtgatgcactcctcactgaaggacccttccacttaagccttcaacacttaggaaaatttaaaagtgttaagaaagggtaacaagggacaaaagacttggcatgaccaacgaaaagtcaaaagtatggccacgcaactttctaggcttatacaagaattagctacccttgaagaacaacaagaataaataagatgccatgataagaaccttaagaaaatatatatatatatataggtataaggaggagtggaaatgaaaggaagacctgcaacacaacaccatctcaggacagtaacgatgcacatcctctaaaatccttttacatatcgtgaatgaaagcctagaatacaatcaagacttctagccaaaaaaaggttgcggcatgcatagaaaattacaaaaataatactattcttaaagagaaaggggcctccatcaaataaaagaaatgacaaagcccaatggataaaaattctctcaccaaaatagttacatcttgtaaaagaggttgagaaggctcaaataattaacactg

SEQ ID NO: 92441 - DNA, 566 bp, Cannabis sativa
aggaaggaaaatgatgatgatgataattatgtttagaaaaacccatcagagacacttgaatttaatgattttattcaaagattgggagtactgtcttatactattttttaaaaaaaggattcacgtgcgggtttgggtcaaacctgaaacccgattacctaaaaaatctaacctaaatccgtttgaaagttttatcgagttaaactcgacctgcccacattaatgaacatgttttttaaaaattttgggttaaccgggtcgagcccgggcgggttgaccggagttcgggtcaaactggtaaaaatgtgatcagtacttgaagcttattttttcaagtctcactcattatttttactataaagtgtatttgagagaaaggttataaatgctcaaaatactctttaaaagagaattttctatctttattctatttttatttattaacctaaacccatagaatacgtgtaaaacagtgtgagatgatgcctttatgtaagcactacaaaaaaaaatgctatttttagtgataattttttagtcacaacataatttcttttttttttttt

SEQ ID NO: 92442 - DNA, 547 bp, Cannabis sativa
aattgaccgtagatatcttttgcttatgggagagagaattgactgtagatgttttttgcttgtggaagtgagaattgaccgtagatgttttttgcttgtgggagtgggaattgaccgtagatgttttttgcttgtgggaacgagaattgaccgtagatatttttttactatcacttgtaaattgattgttggagtccatttatgttttttttttttttaattgagctatatccatgcatgatagttagccatggaggttgattggtctttatattttgttaatttgtttaggttggctggagcaaaatatgcccaagtttaagtattgagttgtcgctagtagtccatgtagagcttttctatgtagtggggttctcatgctacggaaaacacagatagtacaataaagaatagtaaaaggcctttgtcagattgtttgattgaggatcttgagagtgacaaaattcctgtggtagtcccacttgagcgagtaactcttgtgcaaaatcctgagtgtgacaaaataaatgtgggtgaaacagtcata

SEQ ID NO: 92443 - DNA, 2770 bp, Cannabis sativa
tctctctctctctctcttcttccagtcttcctctattggcttccctgctagcttagtgtcgttaatggtgagtctcccacaaccacgagacgaggatcatttctggcttcaacgaccatgaaaactcgaggaagaaccgaatctcccctcccttgagtttttcaactcatgtctctcctcgctcaccaacgaccaggtccggtcctcccagatctgatccagcaacaagtcgagggctgaggaggaggaagaagaagatgtgggtttgcattttttcgagctacaagcccaaattcgtttttctttttaattatagccattgttgattttttcggtttgattctttgaagctttgaaatttaagggatttagaaagggaaggaaagggatgttatattaggtgtggtagttgtactgaaattttcaatttttgttatagtggtgtaaggtttaactattgttgaaccatgaaatctttgggtgtctgaagctttaagggtattgaaaaataagaataagaaggaaagaaaaagaatatgtggatttttaaaaatttaccatgtgtacacataagctatccatcgtgacacttaaaagaggtttttggacggaagtgtaaagagcaaaacataatgtgagttcggtaggttttatcgtcaaaaatagatttatggggtacgtattacaaattataaagtttaggtggttatactgccaatatccttaatataaacaatagtatattttttttttaagaaaagagttcatatattagaaagaaaagcagttagacctcgcgttcgttacaaaaaaggagttcagggatagagggaatcggaatacaaccgaatctctagcgggtaaacgcccatttagtcacattatggacgacaaaattataaatcctactaatattagagaaaatacaactaacaaaataaggagatgatctaatacaaaatgagacatagttctcaagctcccactgagactcctccctattaagagcgttgataattaccctcgaatcactctctactacaataaacttaaaaccttgattcttcgcaacatccaacacattgcagcaagcagccgcttctccacataacgcatcagcaaactccaatttagaagtatgaacccaaatcaccctgtcaagatgatccattgcaacaatagcagtacacatattgtccaaccccactttaacaacacaattcagctttaaacagtcttgagggggagacaatcgccaaactcggaggcgagcaagggaacaaagaagtatggtgactgcaaaagaagaacgaatactgtcaatacacttaatcacatcaaccagacaattattatgtactttatcgtttcagatccgccagatggtgtcaacagttaacgaagcataaatgaacacctcatcaacattgatgcccttgtttttaagtctcagatgaatttgaccttgtcccacatccggatgccaatactacatataggaaaaataccccaaggagaggaccgccacaagtgaaaagccacatagaaacagatgttcaataaattcattctctgtcccacaaagagggcaattaacatcctcaatatgaaatcttttatagatcttagaacaaattgggattgccttggataggatacaccaccacagagtcttcagcctctctgagattttacaattccataactttttccatagcgaaggagtgacctcacaatgaggcgccctatctaaagcttgggcgagataagtcgatttactcgtgaaccgaccattactttccaaagtccaaattcatttatcattgccctggctagacagattgcccctttcaagattgttgaaataatctccttgtcaaaaagattgtttaacttgtggatatttcagccgccattagttaacagaagctcgacaactttgttcacctcattagtggaggagccattagaacgagggaagaaatctttcttatgagcgatccaagcgtcctcccaaatattagtatccttcccatccgccaccaacttgcaagctcattttcttaagatagagttggttctaaccacatttttctaaaaccgcgaacatgaatctttggatgtaaaattgaggaaaggctttcctttaaggtatttagcttccaagatccgatagtaaagggattggttgccaatcaagaggttccacccccatttcaccagaaaggcttgattcatttctctactttttcggaatctaagaccccctaaggacttagggaagcaaagcttatcccaagcttttaggtgtagaccatgattacccttttcggacccccacaaaaaatcacgaactatgacatcaatcttagcaacaaggcggcttaagaacttggtcgtttgcatagcatacatgggcaagaataagcccacgaactttatgagggtggcacgacctgctatagacagtgtcttagctttccagccctgaagttttgacgtgaagttttccagaataaaattgaagttgacatccttttgtttggaacgaaaaagaggtaaccctaagtatttgatgttaccttcaggggatcctattcctagcgctgacttgattcctcttttcatgccattggaagtattcttactagagaagatagaggttttgagtttattaacttgctggcttgaccaagcgcaaaacctccctaagtccttagaggcaaagcttatcccaagcttttaggtgtagaccatgattacccttttc

SEQ ID NO: 92444 - DNA, 1726 bp, Cannabis sativa
gtttttgatgtgtttggttgcttatagttgaagatgagaaaattttggaatttggagagttttttgagattgaaaatctacatttatgttggactgtgtgaaaacgtttttagacttaaagatctcgatcttatttgacgatttcgagcttttgttgttagttattttggataatttatctttcgtttatggaatttgtagcttcgatatgtgtgtgtggattggatccttcatcctctgtgttataatcggattgtgtaatcataatcggatcatgtatttggatctaatgcagataaatggatgtcatgtactcatgttaatgcggtcctgatttaacttaggttttactaacgcattaaagttaaacgagctggtcactggtgtgtccagatttcctttttgagttttatgaggttctggttcaagagaattgatgatagaatgaacatgttgtgaggaaaagtaacgatccatatttttggaagaaggagcccggcgctcatcttatatttattaatatattaatagagagagagcttggaaacttttttattttataattctaatgttatttattagtaaaactatttatttgtgtttttaatagccaaacgaaaggttttcatgatctgtaaaagtggtgctagatagttttgcattggaattcatcttgtttaataataaaattgttgctaatcaaattagtaatgattgaaaattatatcatttgaaactttcaaattggtgcttcgttatgtattctacgtatttaaaattgtgatgctaggattatttaatggcattagtcgagtttgacgatattttatgctgactgtctgttaaatatagttccaatcatgtggaggttcaaaccctttatgcaaaaggaggcagctgggcttgaaggccgttctatggatgtggggaatcttaaaatacatattcgaaatgtgattgctgaaggaggcttttcatgtgtctacttagctcgcgacactcttcacgtgtcgaagcagtatgctttaaagcacatcatatgcaatgatgacgagtcattagatttggtgatgaaagagatttcggttatgaagtcccttagaggacatcctaacatagttacactctatgctcataccatcttggatatgggacgaactaaagaagcgttccttgtcatggaattttgtgagaaatctctggtcagtgtgctggatagtagaggctcaggttattttgatgaaaaacaagtccttgcaatgttcagagacatgtgtaatgcaatttttgcaatgcattgccagtctccacctattgctcacaggtgtgttagatgttggattgatcttttattttccatttactgtaattacttatatatatatatatatatatataaatgtgtgggttaataatattgcttgcacacttactaattttacaaacctaaatatattatatagagagttttttaggtaggtgcataacttttagcatttcctatttttcatacattgagaaaatatatcccaatttttttatatgatgatttatattgtagttgtaaaagacacctgtatgttttcgagaaattttgaatattttaccttgtcaaaaaatatgaagttcaaaatattctgttgcacatgcataaaataaaacaggtacttgtgcaactgaatatttgagttgcattttcgctattgtaaattattaaaaaatttct

SEQ ID NO: 92445 - DNA, 538 bp, Cannabis sativa
gttttaaatttattaaaaaattgctaacatgaaaaatttataaaaacagtcacaatatgactcgtataaattttatgttgtatttgtaaaattttgtgttgtggttgtatagtgttaacttgttgtaagataaattattatttttagtattattgtattgcattggcactttataagctaaattatttttagtgttattatattcgtatttaagttgttgccacgtaatttattatacatggttgtaatatataaacgcttaaataaaaagaaaaaaaaaattgttgccacacaaataaagtttgtgcaaaatcatttcctatatagactccacaccaccattaggaattagttaatattatcctaggaattttttttatttttcgtgggacagaattcatatgatactttattatgaaatctagtagtggactagaatatattttgggaaaagaaaattattagttacattgtaaagagacagttaattgtgtatgtggtggtgggtgctaccgattgaggcaataaatatctagct

SEQ ID NO: 92446 - DNA, 665 bp, Cannabis sativa
  modified_base (588)..(600): a, c, t, g, unknown or other
cttagaaccaaggatagattgagaagaatgggaatggatattgattagcaatgtgaattatgctcaacacaggatgaaaatgcagatcatttatttttcaaatgcagtatctctacggcctgtttacaggggatcaaggattggctttcctggcatgttgcagctgatactatgcttactttaaccaggtggattgggagatcaaagataagcaagtttaggaaaaatgtccaagctgctgctcttgtttgtctggtatacacactgtggaaagctcgaaatctcagcttctgggaaaagaccaaaccgactgtagaaagactgattgaaggattaaaaaacagatgtacttcatagagttgttgtagtatggccgaaaaatgtatctttagaggataccaaccggtttcaaaagttgtaaatggagtcaaacgagtatagtctgtacaatttatatagaatataaaaattaaaaatataaatgtatagcattttcgcatcttaggcccttcggggtgctatttggttgtacaaagatagttattgatcaatacgattctcactgatgttgagttttgtgccctaaannnnnnnnnnnnnaatataatcaaatttactaataaaagatcagaaataacattttgtgttgcatggttcacatgatt

SEQ ID NO: 92447 - DNA, 750 bp, Cannabis sativa
tgcacgaggggcaagtttgtgggagatattgatgtgtgaagcataggtaagacagccatagtttctgagatggtcatagttaggtgtcttatgatgtggaggcatcgatcacaggatcttgatcttgatctgtgatggtagccgaagaagtagcacgagttctcaccatcttgaattttgtttgaatcttcaagttgaagcttgaagatgaaggttgttattcatctgataccatattagaacagagtatagaaaagaaagagatctgttttattgattgtgaaattgtatcttggttacaaagagtacatgcctttatacaggaagggtacacagaagttataacaaacacaattggcttaaactaacataactgactataactaacataactgacagaagggtagaataggaaatcctaatataaggcacactagtactatgagtcagatttataaaaaaacatcaaaataaatttgacactttccatcgatcctaatttctatacgatatgttaaggaccatcatattactatatacttaaccaattaaaagtttacattaaatgactcatagatggttttttttaatgcctcaccttaaagatttcctatatatttgtacatactatggggtgattctacaatgcaccccttaaaagagatctactgatgtaccttttatttgtttctgcatccataagaattttttagtctaattttcatattcatgtacgttatagttatttaa

SEQ ID NO: 92448 - DNA, 548 bp, Cannabis sativa
ggggggagtttcagctgccaaagttgcttccaaaaaccagagttggcagccatatcaatgttacctttgatttgttgttgaaggccataagcactcttgactgtgaataaaccatgatcctccttcatccaataccaagtgtcattgacatagtgttgtgagagaggaattttgaatactaaggcttgatcacgctcgattagcacatccaaaatcacctcatcatcccattcaagtgcatcggttttcataagggaatttacacagttaccaacaagagctggatgtcgagattctataaatggattcaaatcatcaactagccacgggtccatcaagatattggttgtagatccgtcaccaaccatcttcctaaccccagcccgaaccaatgcttgagcttcaaacacacttctccaaatgtagcttggattagtaccaagagtagccgtaagaaaagaccccgtagagaagtagcgagctttaaaaattttacccatcagagtatcaccacaagtgaggagtctccacccttgcttggccaaaag

SEQ ID NO: 92449 - DNA, 716 bp, Cannabis sativa
  modified_base (672)..(679): a, c, t, g, unknown or other
taaagtagtgtgaacctcaaacattaacatcttactttttgggttattaaatatctagttgaaaccttcaattgcccaagtcccttcatacagtacaaccacaaacaaagttgaatctgcaaaaaaaaatgacaaaaaagttaattcagataaataatgtgtcgcaaaatatcgcaaaaacattgcaaattatcgtggatattatcgacaactatatcgcgacacatctcttcttgtcgataaatgtcatttgggactggtccaaacactatgtctaaatatatcgacaaatatcgaaaacaatatcgacaaaattgaaaaaattgttaacatgccacaaaactgcagtatgtcgcaacatacatcgcgacacatcgctacaaatcacaaaacttcatccctaacctcacacccactcttttatcgctaaatgtcgccaataatatcgtaaaatatcgctaaaatcacaaaaaaaaccaggaaaacgcaaaatcgttgcatttcgtgtttccttgacaaaaatagtacataaaaacaaagatatgtgtggatatattcaaatcaatataagtacaactaaatcaaacaataattactaaagaaataacatacccattattttttttgaaagaatttctttcttagagctttgtgtgacagtcagtagtcccnnnnnnnntaaggggaaataccgggtaagctatacaatctcacac

SEQ ID NO: 92450 - DNA, 552 bp, Cannabis sativa
ctaacttccacatattataaaatccataggtataagatctaaaatatttacgtacttttgtgactcgctgattggtaagtgtgctgaaataagctgagagtataacctggaacacagaaaattcttaaagtataaaacaacatacaaaattaagttatcctcattaattataactttttcaagtcaaagcaaatatcaaaaacaaaataaaaacaaattattgctaaattttatttactgtcaataacctcattccataagatatcaaatagactatatgcttgaacatgattaaacacaaacaggcacatctaatatctaattacatactttttctttttggtgaaaatctaagcacatacttgatttttgaattttaagaaagttccctacttcgatagatttatgtactcaagagattttgttccagtgtaccaacacaattatactcaataaatttacatcaattaaatatctagttacaacctcaaaatattttcttttaaataccatgacacttctaaatgtacaaagattaattattttacctta

SEQ ID NO: 92451 - DNA, 563 bp, Cannabis sativa
ttttgaaacgaggcttaccatcttcagttgcttcagtcagaatttctacagttgagtccttgttggtgtgcttgatctcctcagcgtaatcccaaagggcattgtattgttcttaataagtcccttctatctcttttgttgcaaacatccgagctctatatgccttatctcttgagataacgagggtcttctctttgccaacagtttgttgaaaggccgagacaccccacttatcatgcatcttgaatcgatccaggtacttcactagctccaaccattttaatataaaaaataaagttcaacaaaaaaagaaaaaaaaaatcgtgtggaagtgattacatttgtaaaaatttatatatacatatataagaacacatatgccataggctttggttttgcacagctacactactaaaaaatatattttctcacagttgtgtaatttgtatttctataccataggctctaaccttattttcaagcaaacaattttttttctccagcttttactgctttcacaatatgtctcataatcaatctctaatgtatgtgcccatttgtga

SEQ ID NO: 92452 - DNA, 665 bp, Cannabis sativa
gcacactctagcatagagagtgaactttaagccttagcaaatgcagcatgagaacttaaatggcttgtgtccttactcggtgaactacgtttagctgagcctccaattttgtgggttgataaccaagggcctccagcagtagcaaccctctcttccatgcgctcgttgtaaacatatcgaaattcataaatgcagtttgtttgtgataaaattctggccacccatatgtatgttatgtgccttcaattaatcaagttgtcgatgtcctcacaaaggctctaccagttgaccgtttatttcaatatacttaaaagactaataaactcaatgtcgttgctactccctttcattcgaggggataataactaacctcttaattgtacagttagttaaatgtagttatgattagtctatttgtagttaaatttttagagtctttcttggttgtgatagcttagtgtttgtatcatctttcattataaataaaggcacttgacctctatgatttgatcaaacatttcattacaatccattatattgttgtttttctaaaagactcttcaaatctcaaatttctaaatgttattatacattatatatatatattaaattaaatgacttttttttttttttcatgattcgtattaaatcctttcatgaaagag

SEQ ID NO: 92453 - DNA, 769 bp, Cannabis sativa
aactccataacaaaataaataacacaaataataacacacaataactaaaaatataatatatatataaaaaaaccgattatatttatcaactagttaaataaccggttatattttattcttagttagatttctggttcagttatttccattctaaataaaacactaaagacttcataaatatgacaaacataaattacttcttttggatgtgaaaggttgcacaatatggtacatttacaacttctagaattgaataaccaatgaaatacacgtaaaagaaaaggctagatataaaactaagtaatggatcaatcgtaaactttacctgaaaagacagcatctccacaaattgttcccttctcaagtgtttctctagttcctccatctgtagtatacatggcaacactcgaattaggaaaaagttctaataatcaaggtgtttatctcaagccaaaactttgttggatcaagtatgattaacatatttatcaaataatggagaattctcttacaaaattacatcatctccaatgtgatattttgccatctgattaggtgatgaagataagccttgtcatttctatatgaaccatattcattttcaatctgtcaacataaattacttttggtaaaatttaccacccttgggttcaattcagtttattaaaaatctaaaagctcttcactattatttgcttactttctttatatgtcaaagacacagaagatagaacaaataagatttgcaaatccacttacctggaccatt

SEQ ID NO: 92454 - DNA, 568 bp, Cannabis sativa
gttcctattcttattcaaaatactttcaatagtgtttcgtctacttctaatagtagttgagataaagaaattttttgaccatttatcacatttctttagccacgagactcgcgatctttgcttccaatacaacacattccttgccaacacatcatttagagattgtctcaacttgcactccacgttccagtcctgagtatctgtaggtagagcctgagttttttggagactaatctcaaggttcttaatggtggagtccaacttgccaaattattctctattccacttgaggagagcaatccgagtcacgccaatttttctaaatattctactcagagtccacccatagtcaacagagctccacacatgattaactactatattactacgagtgtccttagtccaccaactctcaaatttaaattgtcgctaggaattcgacacaaccccacccgagtgaagacaaaggggcctatgatcacaacaacttgtagggagggagtaaataactactctaggaaataaacaaccaacttccatttaccaacaccttatccaaattcgactt

SEQ ID NO: 92455 - DNA, 679 bp, Cannabis sativa
gccacaggctgcccaggaatgggaaaatagggttgtagcaatgcaagccgaaatcaacgaacaagacgaggaaatcatatgcttgaggaagcagggtgcttctgcaatgcctgctccagacatgcaggtggctctttcccctgctgtgtaggcaggggcagattgctacagtgaaccggatggaaccattgtatgaaaggttccgcaagcaggcacctccagtatttctgggaggtcccgatgtgatgaaagctgaacggtggctgacggttattacaagaattttgaatttcaggggcgtcaccggtaatgacagagtggcctatgccacatttcagttccaggaggatactctggtttggtgggacatggtgtccctgactcgagatgttactactattatctgggaagagttccaggagttgttcaatgcaaagtactacaacaaggcggtcagaagtgcaaaaagaaaggaatttactcagcagactccgaaggagaatacgagtgttactgaatacacaactcagttcgatcgattggctaggttggcctcaggaattgtgccgactgatttcagcaagagagaaaagtacctaaatggattaaacttgaaaataaaacatgatcttatgattactactaacgacaacaccacctatgctgacatggtgggaaa

SEQ ID NO: 92456 - DNA, 766 bp, Cannabis sativa
tttttttttcattttgttttctaaaatgaaataattttatctttcttcaaaaatgctaactttatctatttaataattatagttcattattaaaccataaaatatatttatttactaaacccttcaatgtctcttaattaataaacaaatattaaatattcttttcttctcaaataagccattgcttagtaaaattcataaatagacatagtcattatttaattagaattctaattgattaaataaatcaattaattaagtctacaaaataatattatctcacatagtgtgggtaccatggatctatgtaaccaagatcctaataagtagttaattatagaatttatcaagtaaattctctatcttattagttcctcttaactccactatagattcagattgcactcttgattacatagatccctctattcatcaagaatggatacgctataaattatccattaattgtttcaatttaaacaatcaaagattctctatagatggtttacatcgagtagggacaaaattaccgttttacactttgatgtattttattcttaaaatacttgccatcttataaatgatattgcagtaaactagtgtaattacgaaataagagctccttcattcatgttgttaagacaagctctaaggaaaccatcagtctacttttaaatagttatagaagctataaattctatttctatgattagcgctcccactcaatgacactactgtgttctcaagatgtaagtatggactaatc

SEQ ID NO: 92457 - DNA, 1081 bp, Cannabis sativa
ccctcgggtagttttcttactgctaccttgggacaaaacccaagctttatttggaaaagcattttggaagcgcaaggtttggttcaagctggtgcaaggaagtcaattggcaatgggtctactgtaagcattctcttagatccttggcttcccgatccacttaatccctatgtcttgtttgatcatcctggattattaaatcacaatgtctctagcttgttctctgcacaatctaaaagttgggatattgatgttcttaatgatctgtttgccgatagggataagaacctcatattatccatccagttgagtgagcatcccattactgataagtggcattggagtgaagacaatagtggattttatactgtgaaaagtgcctactggttgttgcagcaggctactcgtgctgctgttgctgttaatgaccaagttttgtttaagtttttgtggcagctggacatacccccggaagcccaacattttctgtggcgtgttctagtgggatgcctccctaccaaaattcaacttggcactaaaaatgtaaatgtatatttatactgtcctttttgtaactcggcattggaaactattcgtcatgtgctgattgagtgccggtttgcaaggtcctgctggtgtgtttcaagtgttcctgctggtgttgataatgttgatttcaatacctggttctttgatctctctaagacaacgtctactgctgtggtgaaggaggcagcagtcattagttggagactttggtctgctcgaaatgaactgctatggaataaaaaaatttgttctgctatggatgtagtccgatcggctagagtgttgcttgaccaatatatttatgctcaatctatgaaaatgggtgcactattaattaacaatattactaatgtggacgagcagtggaggaaactagtatctcatatggtcaagatgaatgttgatggggctatttttcaaaattgaaacaagtttagctttgggtgtgtggcccgtgacacaaatggtctccatcttgaagctatttctgcatcacggcttggggtggttaagcctgttatagctgagacga

SEQ ID NO: 92458 - DNA, 513 bp, Cannabis sativa
ctcttggagactggccatactcttctccaagcaccaacggtttctttcaagtcagcaccaaatctttacagtatttacacattcctttgcaggtgaaagatttttagcaagctccaccaccctcttgtgttcattatccatagtgtaagcataaccaacacaagtttgaaaataagaagacaaagtcaggtgatgataaataaataaaaaaaaaaaactagttcaagagaagacaagaaaatttgttacctaaaagataccagtggcttaaagaatctttcagtaataatatgtgtaggtttagagctaaccaacttctgcaattgaatgttcacagcgttggatccaatcaaggcatcaccatttgcaagaagtcaggagctctacacacgcagctgctccactagctctaaaccagagtttggaataccattgtcaacttcatccagaagaatctcaatgagagatccctcatctgttgggttttgtgtcctaaataaaatccatttcaat

SEQ ID NO: 92459 - DNA, 646 bp, Cannabis sativa
atccttgtgaggagactctcggtcatgaaggataggagccacaacaccagtaattgatcttgcacctcccaatctgtgaagatctgattcactctgttatgtgcgcgatcatcctcggtaagaaattcagctggtggaggttccttgatgaatttcaaaagtcgatttcctctaatggcagcaagcacttgttgcttccaaaggagaaaattgtgatcgtttagacgaatagagatgctatgattaaagtacactggttctgcagaagaatgagatctggtttgagctccattgaagctcgatccattgttgttgacaccagcagctccaacagtggccatgttggcattgagcggaggaaaatgctctgataccatgttaaacctacgatccatagcagaacaaaaagaacagcaaggaagaacaacaagaacaaaaggccagagaaagagaaaagacagagagaaagaaaatggagaagaaaaaatctcattgattgaagagttgattacagcatatatacaatgagtcaagcacaataaccaactaacaactaaaggagaaacgactaacaacctggacagctggcaaggaaataacagaacaaacagttggaaaaataacagactaactaactcctttaaca

SEQ ID NO: 92460 - DNA, 548 bp, Cannabis sativa
  modified_base (202)..(205): a, c, t, g, unknown or other
actcaataacactcatgttttcttgttgagtcaattgggtgaactcttttctcttagcacttctgactgcttcattgtaatacttagcattgaacagttcctcgaacttttccgaggtcatagttgtcacatcatgaatcacggacaccatgtcccactagaccagagcgtcttcttgaaattgaaaagtggcacaggccannnnatcattaccagtgacgcccataaaattcaagattctagtaatcactgttagccattgttcggctttcatgacataaggaccccccaaaaaaattggaggtgcttgcttgcggaacctttaatacaagggttccatccagtttactgcaaccacaggttcggcctacgcaacaggggtaggtgccactggtatttctagagcaggcactgcaagagcaccctcctatctcaaccgtcaaatctcatcatcttgttcattaatcttggcttgcatcgctgcaaacctattttcccaattttgggcatcctgagcagcttgggcagcttggggagcctgtggcggg

SEQ ID NO: 92461 - DNA, 1208 bp, Cannabis sativa
ctaatcccaagacacgaaatcaaaccaccccaaaacctacagcaacttaaacacccaaaattcatgcaatacacatcttaaacttaattaaaacttaaaatagaataagtaagggttcataccttgattgaaagcacctcaaccctatcaaaatctagaaatttagcaaagaatacaccaccttccttcctggattgtttgttcgaaagaaagagaaagagaatcggaggatagtgagaagtttctaggttttctcttaatttctctctaactataaataaaagcttcttttctttttctttttttaaattataaaacttataaatcagccttaatttaattcaaataagtcaaaagaagtctttgccaaaagaccttcttgcccctcaagctaatcaaataattacaaactcccaagggtaaattggtcatttaccaaatcccgaaaattctaacacctctaatacctaacagtgataccccgataataatattctaaacatataaaatgtgactctctaaaggcccgacgtcgctttccacagcttccgaacaccatcacagaaatagggatatttacttaaatagcataatgaacatatatgaacttaaatatatttccacaatgtacattttatatatattaattaaatctcaagcataaatcctaattaattaataatccaaaatattaaccttaggcggtctttacattaggtctcctcaaaatcgatgcttgcctcttgaagatatcccttagctaccaaccgagatttgtatctgccaagtgacccgtgtttgttcattttgacatgatgaacccatttacagcctatgacattcattgagggatgatatggagccaatgtccatgtcttagctttgtgaagggctcccaatctgtactcatagcattgttccaatatggattacttaaggcatctttgagactttttggttcagatggtagcatggattcagtcaagggatgctttgttgccatataggatttcgatttagttatgccattttaagatctggtgtgcatgttatgagctctatggcctgcagcaccttgtggtatagatgaggattgggttatatttgttggttgaggtgttgtttgtggttcagtatggggttgtcccagtagaaggattgaagttactggtatggtttatagcggatgagacaggttctggtatagg

SEQ ID NO: 92462 - DNA, 684 bp, Cannabis sativa
tccattcccactaattattttggtcaattaaatattgtgttaagtgaaaggacaattttcttagcatacaaacacaactttcttattaccttttgaccattgtgagtcctctccaaaaatcaaggtcaacatgcatgttattcatgtcttctcatgcatgcatgattcatgttgaaggaaatataagaaaaaaaaagttgagtatttttacgtgagatttggttaagatgaatgaaaatataagaatagaaatagaatataataaaatttaaaatacataaaaaattaataaaaaaaatattaaaaagtttcttatgttatattagaatgattttttttttttcaattttaaaataaaatagacattctattaaaatggtgaaaaatacattctattattagaatgatattctattactttaaaatacaactaaataaagaaatataatgaaagttatttcattcctattttattttattatctccaattaaaaaccgcctaagtctaaaaggttatatctttttgataaaaacaaaaggacaaaactacactaatccaagtaagaaaaacaatcattttgtacatgttttgatcgaaaatatattaagaaaattcgagtaagagactcaatcactacatacactatactaatctaaacatttttttttctacaaaagaagaat

SEQ ID NO: 92463 - DNA, 1941 bp, Cannabis sativa
caaccccaatcgccccaacaccatctttagtagggaaattggcattgacccagattctcccaggtctaggctgcttccagcggacagcagggcgaggagcaccatcaaatgaatcccctctctcgctttccactagcttccactgaaagtgaaattcatcccagatcttcttcttcatatcacagaatctccatttggtattgttatgataattcgcattcctgatcgaccaaagagggtgatacatgaccgaggcaaagagagaaaactcttccctatcacacacctggatagaaccagggatggtagaaggatcaataatccattttacaacctcattccccgaacacagacaaagctcctcacaccgaataccccatttgctttcgcgccacaacccacaagttattggacaggtcgagaaaaagtgagcttcggaatcaccataggcctccccacacaaggaatagtcgcccactgtacacccaaaaatacgattatacctagatttaaaggggatgcaatccctataggctttccacaggaaaagcttcaaatgctcctggagccccagcttccaaatcttagtacaagtgttatcctggaacatggtagcagtgtgtaaacacctataggcagccttaattgaaaactcgccattaggactatttctccacaccagcctatcctcttcactgaaatcctcagtcctacaattcaagattacctcggcaatcgaaggcctgaacacccatttcacttcagtcgtgttccactctactccattctttgttaaaaatgcatgtataggtaaatccgtcaccacatgaggattgattgcactagcatcaataataacaccatcgccacaagaccagccattattccacacttggattttcgagtcatgtcccattaaccacaaacaattatcattgatgaattgcctggttttccaaatcccccttgccacatgcgaagcataacgagggagattgcaatgccaaaagcctgactcacgataatattttgccgtaaggatattaacccaaagagcgtttgtgtttttcaccatcagctaccccaatttggcaagaaaacacatattaatatcacaaaaactacgaatatcgagaccaccacagtttttaggtttacaaatagtgttctagtttacaagagcgaggtatcgtcccccatccaggtttaccctccaccaaaaatgtctaaccaaggcatccagagtgttagtgatactactcgggatcgagagcacaaccatattataggttggtaaagtagataccacacttttaaataatgttgttctcgcgacttgagaaagtaacttggctttccaaccttcaattcttctcctcaccttgtcaataatgaagttaaagtcattgcatatgttacctttcacaaataagggattacctaggaagagctcattaccatccataaactcaaagcccataatctcatccaactccacaccctgctccaaacagcaattcttagacagaagaattttttgtttacctctattgacttcctggccataccaatgacaatattttaaaagtacctcacagagattctccacattctgcatattggccttaataaagaacatagtgttgtctacatacattaaatgagacaccgacggaccattcctcgagaccctataaccttcaagcatcccctatctctccttctccatgatcaatcgagaaagaatctcaaaatataaaatgaataggacccccctgccttaaacctctgcgaggtacaaaagatctagtgagccccccattctgaagaacttgaaagctcaccgaagaaatgttggaatatgttttaccaggatctagatttataaccaagtatgtttcattaatatcgtaatatgaatttctaaaacaatgaaattaa

SEQ ID NO: 92464 - DNA, 564 bp, Cannabis sativa
aaaaaaaaaaaaaaaaaaatatgtcacttgaaaaattagatatattttaataaaaaatatgatattttttattattacataaaaaaaagtagttctcaaattatcttaaaaaatttcgagtttgcgtggtgggccttgggcgtgagcccactcttgaacaagccctgtttgtggcgaatgatacgattttcaataatccacgtggaatgtatgcttattttatttatttatttattttttttcatttctctaatatttgcagaataactcatattatcaaccaaatattaaataagattaatttataagaggtttttttttttttaatagaaattcacatgaaaattcacatagcatctaacataacagtttaaatggcaattaaaatttctataacaacccatgttaaaatttcaaaataaggaatagaacaactcaaatcgtaaattaaaaaaaaaaaaaaattaataaattaaataattccagtaacttgtatcctttttaaaaaaatttctaataattaatttttaaattcttgaaatatattaagtattaatttaatta

SEQ ID NO: 92465 - DNA, 694 bp, Cannabis sativa
  modified_base (283)..(283): a, c, t, g, unknown or other
acaagtgttgataatgatgatcaagtgttgaatcatgttgacccgaaggaggatgagcatgatgatgaggattggttcgatcatgaatcatctagcctatatgtggtagtatgaatacatgcaacgatcaagatttctagtgtagtaacactgtaattactattgaaacttattttacatcttatttagtatattaataagcaacttaaaatgtgtaactacattttatacagatttcgtttatttttagcagtataagtatccaatttttctaaaacagtanttttcttctagtttcgtcagtacagattctgttttgaatttattaaaaaaatatttggaagtaactgatactacatgtttctatctagacccaatgatttagaattcaggtcttatatatgccatatttaagataataacagagttagtactgacacaattagagaaaaattatagttttacaaacattagatacttataccgctaaacataaatatagagtttatgacgcttacaaactctaaacttttagttttatgccgctatttaccatatatattataaaatatatttgtgagataaatgtcttatattttcttatccatacacttatattatactaggcgaaagttacgtgcattgcacgtatgcttagtcatatatattcaattttatttagcaagtgataaaa

SEQ ID NO: 92466 - DNA, 1173 bp, Cannabis sativa
  modified_base (619)..(628): a, c, t, g, unknown or other
tttttacataaagaatgactttataatatagttgcatcaatgcttaaaattgtgatttaatatacaatacaaaagttgaaatttaatattagatagttttactaaaaatatgaaaaggtttataatgtaatgttatagttaagctaaatattaatattaataaaaaaattgatataaataaaaaataaaaaatagcatatttatggtaatttaaaatttgtattagttttttgttaaaaaaattgtattaatttttaagcacactattagaatataatagcttcacatcacttatgcacattttgagtgaagatgttataatttattgtgcatgaatccactcaatctaataagaatcgaccgatccaatgacaattgaccgtcaaatattagatattcaattttgatcggatcggattggatattattttcaaatatctaattggatcggatcggaagttggatgagttgtctaaaaatccaatacatccaatatctaatcaagctaattattattttttatttattttagagtaattgtattttgtattgttatacgtaaaatttatatgtatatatgaaattaatattaaaattttactcattttttcttggattnnnnnnnnnnagtccaatctaatacatattggacttaaaatatttgatgaatccgatccgaaaaatactaggtctaatatatttaatatattgggttattattattataattttatcttcattattcaaaagacaaagatataccgcatatattaaaaaaaaaaaaaagaaaaagaaaatggctctaaaacagagaaagaaaagacctcactcttaaaaaaaaaaaaaaacctcattcataatgctactttttaataattgaaaaatcaataattaattttatgtttccctcaaaataataataataatatgaaattaaaacttaggtacttcttcagtttagatactcaacttttgcttttcgtaatctaaagttaggtacccaatctaccctgtttttctgttgttgataagaactaaacttccttgtattattacatgtgggtgggtagggaactaaggttggaaatgtctttctaccattttcataaagtcatctgagaccaataccccaatttagaatagacgtgtctccacattggatccaaactcttg

SEQ ID NO: 92467 - DNA, 763 bp, Cannabis sativa
ttcttttttgttttttttttttcaatattttaataatcattttataattttatataattaaggaaacttatcaataataccatactttggaaatttccagtacagtctcgtttgggttccttcctttgatattcatttctttcctgagttattactttgcttgctatctcgttttgaagcattaatattagatttcattacttgttttcatcaacacattgttttaaatattggatttcattgcttatttatcacagatttctattagatagtctaaaaggaaatttaattttctttaaaagaaatcttcaaaataccattaatataaaataatgaaaactcaaaattatatgtcaacttcccatattaatattttattcacttaaaataacattaatatataattaaaaaatagatagtatcttataaaatattattaaaatactattaatatatttgaatatagcattggtctattttagttgttgccattttctttatacataaatgagtaattgtttcataatttctgaaagatattataattatttattggaaatatgttattactttttctataaataatatgtagtcttcattcattcacaaaaagatcattgtctcgagaacgtatcgtttatggttggatttttttttaaaaaaagttgaattgcttgcatgactgtacttccaatctcctggttagtattttcttcttcgtgttgtgttttttctataaaccataaactgttttgattaaatt

SEQ ID NO: 92468 - DNA, 627 bp, Cannabis sativa
ccccaaccacgtaaaaatcattctctcactttcttacagctcagtaattttataatattttatcggttgccgaaaaactcggtcaacaattatataagccaatgatccccacactagttgagataatattactttgtagtctcaattaattggttttaattaatcaatgtattataaataagactacgtgttatttatattattatttataaattttaccaaggaaatgcatatttgagaagaaaagagaaaatatagtttatttgttaattaagagaacttatagggtctaattaataaataagataaataataattttttaataattaattataattattaaatagataaatttagcatttaaacaattagaatagaaaattaatatttttgaagaaaagataagttttattaaggaagcaataaaatgacaaaattcaaacttgtgggcctccatattatatggttcgaccataggggtttagtaaagtcattttgttttcatattttttaatttattttaattctaaacctaactctagacctacactataaatataacattataattcttaacctgacaataaattttgactctctccttatcagacaagaagaaaattaag

SEQ ID NO: 92469 - DNA, 709 bp, Cannabis sativa
tatatatatataaatataaatataaatatatatcaaatatagacataagcagacttaaaaatatattaatatacaatttttattttcatatatacatagttgttaaatagaataattagttaagatgcttaaatttacataggagactatgataaggttgtcctttttttctatgtgtatctactttttatttattaaaaaaaaaacaaataaagtataaggttcaaacttatgaccactataaggtttaacctgggtgttgggcccagcaccaagtcaactcgggcactgggtgaagcccctgtaatttttgtactcttcgattttacttgtgtttttcttatttttgatgacgaaaaaaaattctagaacacttttttcgaaagactgattggaaacaactaggttgacaatatgtcaacctgggcgctaagtccagtttcaggcctcttggaagtttcgtttgttccccaaaaatatttgaatcttaatctttgatgagaatatgtctagaagaattttcaaaaaagatcctcggaattggcccaggttgacaaaatatcaacctgggcgctggtcctttattttggcccccacgttaatctgtttctttctcaaaaacacttattttcccatttttgatgaaggcaaaaaagatgcacaagtcagattttcagtttgatgattggaagtggcccaggttggcaaa

SEQ ID NO: 92470 - DNA, 517 bp, Cannabis sativa
ttcgtggaagcagccattatttgttgagcagctgtcaacaaagcgctgttattgcatctacctcaaggacccccgccacttttctacttgttggatgtcttgtgttggaccattggtagttgttacttgcaatggtctccaaaatctcaaatgcttccttgtaagacttcgaaaaaatagcaccattggtcgatgcatctaacaccattcgagaagctgcgttcaagccattgtaaaatgtctccatttgtatacaatgtggaatgccatgatgtggacactttcgcaaaaattccttaaacctctcccacgcatcacttgtggactcatcttcaagttgctgaaaagatattatctcacttctgaattttgcatttctagtaggaggaaagtatttccttagaaacttctcagtaagggcattccaattggtaatagaatcaggaggcaaagtgttgagccatgatctagctcggtctcgtagtgagaacgaaaatagcttcaaccttaacacctc

SEQ ID NO: 92471 - DNA, 720 bp, Cannabis sativa
tacaaaagtaatgaaattgggctggggcagtaaaaatgttgtttttgccgtgtcccagtataattgtaaagttttggtccaaaagcagtatttttgtaaaattccctatgactatatgaccctttgctctagcttcctacctctctttcgatagattaatgatattttttattcgcttaaaatatgtgtaaaaaaacatttattaccattttcttatatataattagaatttttgtttatttttttgataatatatatggtaataattaaacataaatatacttaccataattataaaattatttatgatacatattattatataagttttatttcatattttataattataatattataataattcatattgaaacggataataaatatttattttttaacacaaaatttaatatgtttatttttaaattttaatttagtttgtaaaattatttattttgggagggaaatgtaaaatacttaagaaatgatcaagcttctacgggagaaaagaaacaaaaccctcttccccaaatctcagaagaatttcagacgaaaatcaccatttccactcttttttcttcattgattgattgcttaagaaatgatttttactctccattatcaccacttctcccgcttctctctttcttttatttttattttattttctgctccacaaaaaagatccatggcacgaagcatcaaaggagaacaaga

SEQ ID NO: 92472 - DNA, 972 bp, Cannabis sativa
ttgtccaagatgagtgtcactaatctatacactccatcttgagggggagtcttagacacagctgatttgttagactgttagaatgttagttttgtttgtttctcttgtcagttacaggtagtttactaactgattatgttattcttctagtgagtcttgtaatacaagagtatgtatataaacctctcttatttcattaataaagatcaaaactgtttttactaatactatgtgatttatgtacaccatttgcataaaatttatgtataatgaatatagagcggacacgattttgtcctgataatgtatttaagggtatttattccgttaatgtaccctgaccgttagatggattagttatttaatctgagggctggggttaatatatgggtatttaggatgaaatatattggtaaccggttcactttttgtaataaaaaattaatacattttaaaaagtaaaaactgacatgaccaccatcagtcatatcaaccccaaccgtcctcctctcttcttcttccttcttcactcatcaccctcttcttcttcttcaaacttcttcttcttctttcttttacattagggcaaaactcttcattttccattttcatttcagattaggcaaaactcccattttctattttcttcacttgttttcgtgtacatattttgagggagcaagtgtgtgatgtacattatttgtgttctgccattgttgtggttgttacagtcgcgggtgtcgacggttggttctacaagtaagtttctctggttctacttttcatgcttttcgttcttcactatgggtaataaaaaataaaatcttttttgaagcccattttcgtgtactccattgatacaagtggtgcagttttaacaatctcattttctctcaagtatcgacgacattagggattcaagtgagttaccgtttctctgttgaggtatcctctctctctccctctctctct

SEQ ID NO: 92473 - DNA, 1555 bp, Cannabis sativa
tgggcctagatggaccattggttgtctttgggctttctttcctttggaatttattaagaaattatttcacaaatacacaaaaacaacaaaaaaaaattacaaaaatacggtttcacggaattttagataattttacgattttttttattttatttacagaaaatgtggtcttgctatgttgtactcttgttaattttttgttattattttgatgttatttagatgttatttttcaagttatttttatgtaattttcttgttatttttcgtgttgtttttatgaaaaatcgtaaaaatgcgaaaaatatatatatattctttaaacgtaaaatgtaatttttttacaaaatggtgtcttatgtaattatttcatttattaaattatttttttaagctcttttgttaaaaaaaagaaattatggtattttaacttaggatacttctacaatgttagggggttcgttgatgcacccttatttgtttcaacatctgaaaaaaaaaaaaaattagtccaatttttttcatggtcatttacgttgtagttatttaaaacattttgcaaaattttgagaggtttagaaaatataaaacagtcgaaaacatggctcaaacagtctattgcacgcgagacttttttattttatacaagtataaaatagacttcttaaactcttttttcggcatattaaattttttaaattcttttaaaattatacaatatgtcttaaataactataatgtaaacgactataaaaaaaattagtcaaaaaaattctcccaaatattaaaaagataaaagtgggtgcatcggtgaaccttaagcggatacatgtagaatttttctttaacttgtattattgctaaaatatagataatcttgtaaaaagtttgctctatggtgtaccaaaaatttatcaaaatttatcacattgtaaaagttgatacaatacatacaatcatacaatgctttatatttacttttataccaattttaatattagatgtttatataatacactccactaaaacctaaaacagattattatcgtcaaaaattaaacttaaatatttacaactataagttaaacttaagtatttatgatacgtattactctttttaaatttgttgtcatgatcaaaggattatttacctaaacacattacaataaagaaatttagatggtatactaatttttgtcatttttttacaaaaatactctcaagaggtattttttacttttttactgtatttttttataagttcatattgcaatattgcagtatactgtgttaagtttttactgttgttctaccggtgttttttagttgttttactttttgttttgggttattctgttttgtgttctactggtattttataaaaacacagtattttttaaaagatttctgtgtgatagtatttttgtaaaagttaaaccaaatttcagtatttttgtaagtttccttacaatatgatctttccaaaccaaactcaatcaacaccacatcccacaacatgaaaaagagccttttgcaaagagtttccaagagaatc

SEQ ID NO: 92474 - DNA, 2247 bp, Cannabis sativa
ccttctcttgtgggacgtaataagaagcaagtgtttgaggttattaagaatcgagtttggaataagctaaggggatggaagatgtctatgttttctattgtcggcaaagaggtactaattaaggccatcatccaagctatcccaacctataccatgagttgcttccggcttaccaagagtactattaacagtttacataggatggcagctagattttggtggggttcaactgaaaaacacaagaagacacattggtgtaagtggaaacaactatgcaaacccaaagaagagggagggctatgatttggggatcttgaaatgtttaatcaagctttgctcgctaagcaaatttggagatgtataaggcagcccacatcactttgcagcaaggttttgaaggcaagctattatccggagaagggagtgttggatgctaagtgtggggcacatgcttcttttgtgtggagaagcttggtgtggggaaggaaaataatattaatggatatggatggagcattggtaatggaaattcggttaagatattggaagatctttggttaccttgacctcgaagcttcaaggtgtacgaaaagcctagtgtccatgcacaacttagagttatagatctgaaactgcataatggagattgggatgaggagttcattcacaacatctttaaccgggaagatgcaaatatcatccttcaactctctgtggctaatcccagtttggaggataagattttgtggcattacaacaacaatggtgagtattcggttcggagcgagtatagaatggcacttgagcttcaaaaagaggtaggccaagcggatgatagtcacattcgagagtggtggaaaatgatgtggaagcttaaaattcccccaaaagtcatacattttgtttggaaaatggcacattcctggctgcccacaaatgcagctcttgcttatagagggacgaacattgaaccttactgtcagaggtgcaacagtaacgcaagggaatcagtctttcatgctatatggggctgtaaaaccaataagggggtctggaagctgagcgtgttcaagaacaaactgcagagagttggtaaagaagatgtcatgactttcttgatgagacttgctaaggcttggactaagatggactatgagatgttcccggtgttatgctggcagcagtggtttacaagaaacaacacaaaacatggagggaaggaggctcggccagctgatgtggtggagtggtgtgctaagttcttaagtgaatttcaaggccaagattagagggagaatagtactcaacagagagcaacaacacgttggtctcctccagtgcagggtatgatgaagatcaatgtagactgaggggtcaaaaagggagggcaaagcatgggtactgggtgtgtggtacgtgactgtgacgggcggggtgcagtttgctgttgcaacttctctgcagcaggaagtgtctccattacaagctgagttgttagcgatcaaggaaggtctccaattagaaattcagaggaaatatcgacaattttgtattgaatctgattgcctacatgctatccaattaatcaaaaaaaaaaaaaaagaggatgggtgtagggatgtggatgggatattagattgtattcgaaacttattgttgcatgattttgttatgggtatttcttttatatatagggaagcgaatggggtcgctcatggtttagccaattatgttttggtgaacaaagttagtgctatgtggattgggattaatccctcttgtgtaactctcgctattgagcgggacatgcctaatcctatgtaatttgtttctgagttcaaaaaaaaaaaaaaaaaaaaccattaaaatgttaaaggacactcatgttgtttagtattatttgtaaggtgtaatatcgatattagtgcaattcaatattggctcctacttgttttactttaataaatattataaaaaatcgctaacaaattataaggcgacactggtgctaagcaccatgggtgcctcatagcaatactcttttagtattattgctacaaatatcctaataaaatataagctaattagtatttttgtcctttaaatattaacatgtactaagttatatcccttgaacttttaaggctgttaaaaatctctattgaattattgagattattgaaaaacttttatccaattttagtaataaaaatctaacatggatgaaagtttatgaaatataatttg

SEQ ID NO: 92475 - DNA, 1115 bp, Cannabis sativa
  modified_base (44)..(53): a, c, t, g, unknown or other
aaaaattaaaaaaaaaaacttaatacaattaaagatataaattnnnnnnnnnntaaaaattattaaaatgggatgtctttaaaaaattttgttgtgaaaataaaatttccttaaattttttcttttaggatgtattacagatttacaaatttaccgtatataattttttttttttgaaatggaatttaccctatatttccaataaaataggacaaatttttattttagtttaaaatgtaaatagttttaagtaggaatagtttatatgtaaatgagataaggtatcattataaatgaaaaatctttaaatgcctacctaaaccaaacccataaatcaaaaaatgagagttgtatgaatatgaaagagagagagagagaggagtttcagttaagagtgtacttcttcttcatcttcttataattttcctaagagagaggaatctcgactgaaaaccacggcgacactccccatttggagggaggaaatcctcttccctggcctaaaatcgttcaaggtgagtctaaatccacccaactagctcatcaatattcgtcttcagaagagacggtttttcttgagtcttgtttctcaccgctgttaacgacgacgaatgatcatctcttagtcaggaactctaatggggatagcaacattacagtgaagtcaaagaagaaggctaggaataaggttccaaacagcgtcgttgatgcctcccctgtcatgaccgatggtccttggcctaccttacccaagccttcgcatacatcgaagtcatcaactgatccagaaaactcacattctaagcctgtcactggtggatcgatctccaattctcaagttttgcttttgttttttttttttttggaagaattttcgataaacaatgactttaatttagaaaggaaaaatttgtgctttttgattcgaagaacgatttagatttagaaatagaaatctgattagttattatgcatgttcctcttatgtatttgatgataggtaccgactaaatacagtctcaaacttcattcagaagacaggatagccccaatccaaatatgggtcaaacaccgtttcggcaaagatctgctaaatgcggcggtgctggcggggg

SEQ ID NO: 92476 - DNA, 1720 bp, Cannabis sativa
  modified_base (1666)..(1684): a, c, t, g, unknown or other
aattcacatccacatgcttggtaaacaataaatcaatactagttttgatgtcatacctcattgctgcaaaggcttattgatcaatcttagccgtgagcatgttctttacagccactatccttttccagtaccagctgcaatcaattggtggctggtactcccacaagtttttctacatcaagtatacctcattgatccatttgataaataaatagtattttttggtggcaattgccaaaacatatttccctattgttgtagtgttccaatcatgtatattccgaaagcctagccccctgcttttttttggtgaacatacctactaccatgctactaagccaggcctagaagtaattgtcatgcctttccaaagaaatgctctacaaatgctcttcacatccttcaacaatttctttggcaagattgtgatttgagcccaatgtgagtgagtagcaattaataccaagttaatgagtgttattcttcacatatatgacaagttcatcaaactccactctttaatatgagccaccatcttcttaagaatacttttgcagtcggctgaagatattttcttggaacagattgggatgccaaggtatctaaaagggaggcttgcccttatgtaccctgacatttgtagcaccctctttccctcatcctctttcatcccactataaaacacagttgttttaacttcatttggaactaaaccagatgtggaggagaaaagctttaaacgttgtagcattaacaatatggatatataatcaccatgacagaaaagtaataaatcatttgtaaagcataaatgatttagatatgatgaagacatctgtcatgatgcttaaatcgtggctgagtgctcacaactctcattattcatcgggtctccctgtctcaacccccttttggattcaaagaatccatgcaattcaccattaacaataaggataattttggagttttagcacataccatgataagatcaataatcttttgaggaaagtgaaaggcaacaagtatttcttcaaggaagttctaatcctcgatatcataagctttcctcaagtcgattttgatcatgcaacttggtttaaagttcttcctcccataatgccttattatgtcttgacatattagtatgttaggagaaatgtatctcccatgtagaaagccaccctggtttttagctattatcttaggaagcacctgtctcaatctcgagcaaataatctttgtagtagccttataaatcacgttgcagcatgaaattggtctgtaatccttcacactgtctgggcatttgcctttaggaactaatgtaatggttgttgcattaatttctttgagcattttcccagtgcttaggaagctaatgactgcatcttcaactttttttccaactaaatctagttgtcttgatagaatgcactaccatatccgtccgggccaggagccttcatactggggatagcaaaaattgtttctttgacacctcaaggctagtaaatggctaattcaatatttgattgtgctcctctataagtaatggcccagtctccattacagctctgctcaccctcttcctgttacaaatagtgctccccaatagcttcttatatattggagaaaagcatgttgaacttgttgggttttgtgcccnnnnnnnnnnnnnnnnnnntataatcagatttactaattaatgaagatcagaaat

SEQ ID NO: 92477 - DNA, 619 bp, Cannabis sativa
tcaccctttcgattacgatatttaggtctatcttctattggaactctcaccctaatataggttccatctaatgctcctaaacaattctatcaccaaaacaaacaaataatgtaattaaatttataatatatatgcaataacttatttttccataactaattaaaattttacataaaataccttaaaccatttccatctttcatctgtggagttctcaggaaccggctcgggttttactaataattctttgtgtaggcgtatgacagcatgtaaaacattatgaaaatatctactcactgtctctcccgatctcatgaatctaaatttaataactctatttttgcaatgatgagctataatgtgtaaaaacattgcaacttgttcatctattgccaaatatttagatggttgtaatccacctatattctcaagcatcatgcataaatttgtgaaagcgtgcctagtcattctaagttgttctagagaagtaacatcactttcatagaccaagcgatgaacaatttgcctatttataaaggcattcagtacatatatattttcttgtaaactatttgattcaactataccctttaagatacttgttactaactcaaaaaac

SEQ ID NO: 92478 - DNA, 510 bp, Cannabis sativa
tagttcttgatcatactctataactgaaatgatcaagggttacaaaaccaagcggaaagagaaattatgttctgctgcaaccaatgtgaggttttataacccttatgtgtttatttcagtgttttaggtttattcatatttaggttgttagattatagaactacaattaacgtatatatagtaaatattagatcctgataaaataagttccaacatgtatacctcgagctagctagaaactaattaacaccaaataaattggattcttgcaaattaacctcacaacctacaacataaagaaatactacaaaattaaaaatttaattacttaactacttactatttatataatttatgagtacctagctactaactagttatgttagtaattcattaaaaactagttactaatgagtagctagttagtaaaattattaactagttagtaacaaaaacacatgaatttgaatgaaaattagtaacttataactaatagtaactaactattag

SEQ ID NO: 92479 - DNA, 1934 bp, Cannabis sativa
tttcacttgtgtcttttttcttgtattattttattagtgttgcctattgctctcaatgttgtcacctgatattgtgggagagccaatggaagtagagcatttgtacgactctgtcaatattattctttcactacaggtgagaagatacaatagattgtgttaccaaaattacttatatataatatttgtttagttattatcactatttgatgtccattgtcgtatctaaaaaacagagtgaaaatggtggtgtatcagcttgggagaaggcaggagctccaaaaatattggaagtaattatcaaacgaaaacccttttatatcgaactactttttctcttaattgaaatactcatcatttcaaatctgaactcacacattacgaacagtcaccatgacattctttctaaccaatcaatatttatttatattagcctagaacctatatcctattataaaaatcagtgtcatatcttttcaaataatattttgatgcacactttttttttttctctatttcagtggctcaatccagtggaatgtatggaggatctagtcattgaatacgagtatgtaaaactacacataattttttcagattaactatttagatatagatattaaacaaccaaacgtacaaaaacatttacttatatatgttatataatacaggtatgtagagtgtacctcttcctcaatacaagcattaaatctatttaggaagttatatccaaaccataggagaaaggagattgacaatttcattgccaaggctgtgagataccttgaagagacccaaatggctgatggatcttggtatggatgttggggaatttgcttcatatatggtacatggtttgcgattaaaggtttggaggctgcaggaaaacactactataattgtcaagctattcgtcgagccattgattttttacttaacacacaaagagaagatggcggttggtcagaaagttacacttcttgcactaataaggtaaccgaaactactattaacttttccatgttaagtaaaattgaaaataatctagtgaattgagaattattcttttaagttagatcttatcttagtttcgttggtctaaataataataaataaataaacaaaacaaaacaacaatatgatttgtgttaaaagaaaaataaaaatttaatcttgatctcctcatgaacttattataatagtactctcttgcaggtatatactcctttggaaggagaaaactcacatttggtgcatacttcttttgcattgatggcattgattcatgctagacaggtttgtaattaagtagcgtttttaagaaaagaattcttttttcttcaaaaaaatataaatacattgatttattttattaatttacatatataggctgaaagagaccccactcctattcatcgtgctgccaaagtgttgatcaattcacaattagaggatggtgattttcctcaacaggtacgctataaaataattgttcttaatatttatataagtacattaatatgcaacaaaatgagggagagaataatcaagaataacaacaattgtactagctcattcgaaacttttctggactagtttttctatttttttattggttaattaggatttttgttccttaaatttttacatttactaaattatgttagatttttatacctttgaattttcatctatcttagacatttttattaaaattttattaaaattgaacataaaattgaacaaaaattgaacaaaaatctttaaatctaacaatctcaataatagttcaagagtatttttattattttaaatgcacgttaatatgtattcgatcaaactaaaattaattcaactaattattattttgtgcaaataattcgcttaataaaagccaaaggtatctgatcatatattagaacaaattcaaattt

SEQ ID NO: 92480 - DNA, 650 bp, Cannabis sativa
aaaaagaatttatattttcaatagttttaattattataaataattttatctgagatgcatctttatttttattgtattatgattaatatttatgctaatcacaagtataaaagaaattttacataaatatattatataatttatattattcataaaaaaaattttaaaaaatattaaacttgaaattttattcgttaaaaattatgaaaaccgcgcgaagcgcggatctatttcctaattatcttatagtttaatgcccatttatgattaggtattcaaaaagaatccttttataatctacattatcatttttttaaaaaaaataaattgtaatacctaaatttccaaaattcatttctcttaagtacggtggtaaactggtaatacttttgtgttgtttttgttttttcttttttttttttttcccttttttcaaaaaatgcctttcaaaacttttttgtttttaagttttaaaaataaaaaataaaaacatgtttagtaaattttatttttatttaagtgagcactgagaaattaagttgagggggcaaattgtgaacaaatatattttgggggagggggctaattaccaataactatatatttgagaaatctagtttaacatacttaaatgtaaaacttgatctttt

SEQ ID NO: 92481 - DNA, 1463 bp, Cannabis sativa
tgtgcttgttattattattattattagctcattgttatagtcaaatcaatctacttttctgactctatctatttagtactctttggtaaccagtaaccactgtggctactaccaattcatattaaaagaaaatcccaattgtggttttaccattttgagttcttttatattgatttttctatgattgtaatgatgatgataaagccatcaaagtaattttcttttagccatggtgaaaagtcattgaagagcctataaaacagtgtggccacctgaatagtccattgttgtgtttgttggttcagagttcaagaacctaaaatcatttatttttattttatgacaattgtcacatatgatatgactggaacaattcctttatcttttgctaaggctaattagttaggagtattgttataaggcatcagtagtacctagtactttcttgatatgtctcgttgtaattggctagtaatactctctaaaagctgttatattaaattatatgggactcaatacttagttggaccaataacgacaagttttgtcaattttaggatggtatttagctatcttgtcctttgtcttgagtcagttaagcatggccatccacataacaaaactatgcttcgggaagtttaagtcgaaagacattttatctaatgcacctaagtaagacctcttctctcaaacatcaagtttatctcctaatccttcaagacatttgtgtattgtaataacatgtgtgacactgatattcaggaatccttgatgcttctggattcatacggcatgaagttccttttaggtacttgggagtgccaatatgtgcgaagaaaatttcttcatcaaagtgctctctcttggtggagaaaatggaagccaaaattagaactttggagtactagacatctgacttttgcaggatgagtggttcttatcaactcagttttgatggctattcactcttactggagtcaaataatagtgctaccaaagaaagttatttcagaaatagaggctatttgcaggagctttttatggagtggcagccatcaacttaaggggattgctgctgttgcttggaggaatgtttgcaaggagaaatcaacaggggctttgggtctcaaacaggtaactgaatggaatattgctgctatgtttaaatatatttgggccattgcgaaaaaagaagataacatgtgggtgaaatgggtacattgtgtacatataaaagatcaatcttggtgggaatacaaagccaaaagtaatgatagttggtattggagaaagattgtgaaattaaaagagagagtgaaagatctctatgatttagaggaaaggaagagtatgtgtaacaagtatgtgattactcaaggttatctcaaactcattgcagctgaagataaagagcattggccgagcattgattggaatcagctaaacttcctgaagcatagttt

SEQ ID NO: 92482 - DNA, 581 bp, Cannabis sativa
  modified_base (53)..(58): a, c, t, g, unknown or other
aataaaatcaaaaataaaaataaaaatgaattttacagaacacacttttgttnnnnnnttttaaaattgaaaaacaaaaatgattacataatgcattttgtttttcaaaaataatttttttaaaaataaaagttttacttttattctgtgattaaaaaatttaaaaataaaagtattaccaaacagtagcaagtcacatggagtattgaatttcaaatttccttattgatagacttcgaaattaattaataatcatgctaatgctatacaaagtaataagaaaattgttaaaaaatactattgatagttggaagtatttttttattatattactaatagtataattaaatatagaatttagatatttaaaaaaataatttttaataaatatctgtaattacattcgcaaacacttcctatcaacacaaaaacaaagaagagaaaaagttaaaactcctcaatcagacttgttaaatcacgctgtaagttggcattaaatttgatagcaacttattacgtgatcaatatgaatttattatcacacatgattgatgttactttgtagattttttttttttttt

SEQ ID NO: 92483 - DNA, 723 bp, Cannabis sativa
tatttcaattataaccggtttgaactatttatttttattcattatgttatagaatcggttctatttttatttaaatctgagacatttacttctggtgatttttccaatgactttttttgcgacaatgactttttcggtaacttttccaacgatggtgactttttcaatgacttttcgatggcaataactttctggcacagtcaacttttctggcaaaacttaataagttttattaaattcattttttttttccatatttttaactttaattattttttaattttatattttttattatttatttatgccttataaaagtaaattctaccacattttctcttatgaaaaacctatatataatatgacctaatggcctaattattaattatagatagtttaataagaaaagatatatgtgttgccttctagaatataatgtatgcaaaacttgttatcaaatgtcaattttacatttaagaagtatattaaattttggacaatttacacaaactattggtaaaaactctatatttttacattcaaatatatatttttatttttatagtattttaaaaaaataatacgaaataatcacacaaaagtttgaggaaaacaacgtcaaaataatatacaaataattaaaaaaaaaaactaacaacaaataacaagagtatattataaaaatataaaaaaatttttttttatgtaaatgaaattttaaaa

SEQ ID NO: 92484 - DNA, 2753 bp, Cannabis sativa
aaacaaatctcaagtgcctaccaatatgcaaaaaaagggtactaaagcatgttcctatttatcaaacacaaattttcaaaatagaaaaaatgatacaaaaggtttaaatgggctaaatttggaactcgtgataagttttggcattatcttaagtatgattagtggtaaatgaacaattctctttaaccagacaatctacctgattgattttagagctagttatacgacgtcatataacacaatgatgctgaagtaaatgatcataatttttcacaaaccattcaacacaagacaaggtacatataacaaacaagaattatttaatttagacatatttacatcgaggtagagtcctccatcactccatccgtcaattttagaacgtccacctcttccagaagatattagtgctttcaggcctgcaatccagacctctgcttcaactttgtccttgcaaatctggatacagaaaattataatttaagtaactggcctagtaaaaataataaaagaaaaacatatacagaatataaaattttcattacttaccaaatctagagaccgcttcccgttattgtatatgagtgaaaaagacaaataatctttttcagggcggagatatcgttggaaaacagcctgattgcatattaagagatacagagttgagaaactcagctcatccaaacacagtattataagatggcatcataaagcaagtactatttggatgatgaataaaacaaaattgtagaaatctcacagttctttgtccaggtataattctcgacactgttgctaacttcaaaattctttcaccgttacttgaatgccagatcaaagaagattcatcctatttataaaaatgcaaatagtgcaaaaataaataacaattttctacaagaatctcttttcaaatttgaaattcgaccaaagcagtctcattcataagttgataactacaaatgtgaaacaggaaagaacactacgatccctttactgctgttttataccaagccacataagctacaacacctaaaaaatacacttcaaagaaactccgaaagaaaactcacattagacagtctaaatgggcaaaatttgggttttcctttgcgaccatatttgagtaattgagaacccttcttcaaagcaatcaatgcctgcacaagtgttataatgatcatttaaacgccaaaaatgtccaccattagcataccatatatgatgtatgtagaatacaaactaacgtgatacaacatgcttttaagaatactataaaagtttctagcggttaccaaaactgccataatatgaagaaaacaagtaaaaagctcgaagctctaacgaagagcataaaacaaatggaatgcaatcaaatgcaaaacagtttcctattaacattagaaaatcacaataaattatgacaaaagtcatctaaaaattccaactaccgaggataaacagtttcctattaacattagaaaaacacaataaattatgacaaaagtcatctaaaaattccaactaacgaggatactaccaatgaagaagacacatatggtgcggccccaacatcatagataatagaaatagttctaaatccatacacagttacatataagtcatcttttagtatttactagctccatgaaactaaggcatggaagtttcagaattatgaattcttgaactcttttcatactcaaccaacagttttactcctttaagatcaccattaacaatcagaaaggagaaaaagaaacaaattgaagggtagtgttaaaatttcatcaagactgtttttcttatattacggcaatgatacacttaatttaattttatgaatacacttcatgaaatataagatatttactgaaaaccgcatgttcttgaaatttctctaactttcaaaaaacaaatgtagctttaaattttctatttgtagaaaccgtacgaatcatcaaagtaccagtctagtcaacaacccatctcatatttctccaaattccaaatccttcatacaaatcttacaaaatgaaacacttttattttcataacaaccaagcaagcatacagtacaatacacttggagaaaccccccttttttttcttttataatccccaacaaaaactaaaaaaaattaaaaaataaaagtaaatcaggtgactgtggatgatctaccacaacagtttctctacagcactcagctaatttccaaagactccaaaacaaacagttccagggaacattgtttacaaatttcaaaatttgcttaaatcacctaatccaatttcaagaacatgcaaacatttattcaataaatacatacaaacacataattaaaactttttctttccagattttgagagagagaaacctgctcgatgtcacggtcggcattcccgtagctaacaagatctgccattccatgtgagagaatttaccgaaactccaccaccctctccgatcccgcgccggagctccggtcatcatctacgaccaccacaggctgccggaaaattaccatcaacggtcacatcagaatcccccccacaaaaacctcctcttgctaaaacactctctctctatttctctcaatctctttcttaatacacaaaccaactctctccctctctctctctctctttcttacgtgcctacaccgcaaccacttcagatctacctctcaccttgaaaaccctaactagaaggccaccgttctggaagctcctaccggaataaagcacggtcg

SEQ ID NO: 92485 - DNA, 575 bp, Cannabis sativa
aaagggttatatatggttcgacagtagtgtgatgcgcaccattttgaggagaaagtggttgcttgaaatttgtaagaccttatatttttcggttcggtaagaatatttttagtaaatttcgataagaatatacatatataagtatatttgttttatatgatatctataatattaattaggtatataattaaaaaattccctcgaattactattgcaaaaatagaaatttgagttaaagagtattttgttactctatatttataattggaccactttgtttttttagaaaatttagaaagtattatttttgttaaaatttttctattttttacgtttaactgatatacaaataactaaaaatcaagaacaacacaataacaagagtaaaacataagaaaaaacataaaaatataaaagtttatattttctggaaataaaatttcaaaaatcgtaaaaatatttaaaatttcgtaaaactatatttcagtaattttttttggtatttatgaaattagccctattttttttgggattattttacaaaaacataaaaacaacaaaaaattacaaaaata

SEQ ID NO: 92486 - DNA, 601 bp, Cannabis sativa
aactaataaaaccttagaaaaaaaataccacatctcaaaatggggattttttagcaaaaaatgaaaaagaacaactcacatggagatgatttcttgctaccaggcgtgagcatagtggtgcacttccttgttgttccagctggtgggcggctaaggaaaatggtagtggcaacgactaatgaaagcagtgatcgtggtggtgactatagaaggaggtggtcatagcggtgattgacgaagaaaataacgaggacttggtggtggtactaccgatgatagatgaggatagagggaggagtgcaattttttttacctgatagagagaaaagaacagtagagaaggtgaggagttagagcggctaggttaagggttaaagaaagtgagacatttagtttttatatctaggttttctcaatgtataaaaaaataaaaaatatatatatatatatgtgaaagaaggatcggcccgagttgggtttattaggccaaaatagaccaggccgattccgacccaatatagacggggtgacttatatttaacccatttcaacttcggcccattacagaaagggttgttcggcccaccgggttaaatgatca

SEQ ID NO: 92487 - DNA, 864 bp, Cannabis sativa
ttcaaggtgttttacagcaagttattagtgatctcaactcaaggtaagttcctagcatcatcctttttagttttcttaaattttaagtaagagatttttgcatgatttgagttttaaggtgttgtagttgttgttgatgtttgttgttgttttctggagttagattatggtttatcatgttgttttgagctggttttggtggatgctattaggtttgagcaagctttgagtttaagaactcaagcttgactccttaatggtgttttgtaattttgaccatgttaggttgttttattaccttggatatgttctttatggtctaagtaacaagtttggaaggtttggttagatttgggttgatttgagtgagctattaatttttgaagctttcttgcactgaaccgatcacctagttcagtgggacctgtaggaactggaattccggttggtcctcaggataccccacacaaccaaaatttcggttggggaaccagtctaccggttggagcagttttgggaaccctagttttttccgcttttgggatatttagggtattgccatgttatttatcgatcgggaaacatttagtttcaagtttaaagaaagtgatttagcatgtcactcatcagttttacgaataatgtgatttaggggcctgtaattcgtcgagcagctgttccattcaggttggccgatacacctgaattcggtaacgaggtaagattagtataattatatgcataagtatttatatgtttaatgtgcatgttagtaagcctactatattacattagaaatgtatgttggcttattattattcgacaatatcacatcgatacgcctagagtatgactagcgtaccg

SEQ ID NO: 92488 - DNA, 575 bp, Cannabis sativa
aaattgcaccccatacccacttttcattacctccttttatttttacctttccttatatattatttaatttatacccactattataagtaaaattctaattttacccttagttgtttattagattatatatctgaagagagatagaatgcatttgaacaaatacttagaagatattttattttagatatacttttatatatagaattcaaatagtgaaataaaagagaccccaattacatgaaaaagtaatgattgattcaaaaaaaactcatacaaaatacaaaaataatgtgatggtgaactctcggtggaggagaaattgaggatttaataagagattaaatcttgagagtattttaggcacattacacttaaaagcaggtatgtttcaattaaatttaatatggagttatttttgattagttattaaagaaaagaggtaatcctcaaattctccccggaaacaattaccaatatgatatcgattgggtttgggtcttaggttttgcatttcagattggttgtgctagtattttatattggtttgggcttctttttattgaatgttgggcctg

SEQ ID NO: 92489 - DNA, 629 bp, Cannabis sativa
aatatgaagattggtctggccaaagagtgaataaacagaagagtggagtggttttttctcctaatacctctcaaaggtgcaaggatgagttgaagaacaagatcggtatgaactgccttcgtagggacgagaagaacttgggtaatccttttttcttttctgctaacaagagaaaggatttcaattttcttaaagagaaaatcatgtctcggttagaaggttggagagcaaaaaatttgtctcaggcgggtagaacgaccttggttggctcggtccttcagagtatttcgaggtattttatgtccacagccttggtccctaaagctctttgtgaagagttggataggattgttgctcgtttttggtgggtggggaattcggttaaagaaagatatagagcttttaaaagttggcaggagattttccaaccaaagcgttgtggtggtttgggtttgagaagatttagtgacattaataaggctatgttggcaaagctgtgctggatggttttaacgggcatggataaggcttgggttaagttgatggaggctagatattgtcaggttgtaaatgcttggagagtggagaaaagagctggtgattcaagagcttggctgggaattttagag

SEQ ID NO: 92490 - DNA, 1014 bp, Cannabis sativa
agaactctagtggatggatggcctaaacgcctatgccatatatccttcttggaaagattaacactagtagttgagactacttttgacttagacacattagagacacctgaaaaacactttggctgtttttgtttgtgagaaaacttgttgctgaattggtagagaccatctctaagtactccttccagcagcaccctctttgtgtgtttgtccttcacaaaacaacagttaggatgaaattcaacaaatatttcattgtcagcaactaaacttgatacacttaacaggttttttgcaatatcaggaactaacaacatgttattcagcaacagagaattcgattcattgtttgtttgcaatttgccatagccaaaatgtgaaatgttaaggctattaccatcacctataatgagtttttccttaccaccatactcattcttctgaatcatgttgttttcatcagcagtaacatgattactagctccactgtccacaaaccaagcttcactgtcaatggcttctggtgcagcagtgtaggcagcagctccttggttgtttttctgactgttttggccccctgtttttggatctgaacccatgtaagcttcatcataccgattgtagcaaatagctgctgaatgaccataacgaccacaaacttggcaagtgggcttaggtccattcgatctacctccacgacctctgcctgagttgtttccaccaccacggttaaagttccctctgccatttccttgattctgataacccccacggcctctattgttgttgtttggtcgatttgcaaagttagcattaggtgacacaggaggatgggtaggtttagtgctactattaagactcaaaccttgaagtctctccatcttgttgtcaaatgcaagaagtattccctgcaattcctgccaggttgttgactgccgagcttcgatttgtagcactattggtagatattcaatgtccaagccagaggtaacattggatatgagctggttttct

SEQ ID NO: 92491 - DNA, 1628 bp, Cannabis sativa
ctttcttaatctgacaaatttgacaggcttatgttatcagtatggtgtcaggttaagaacctatcactatctatttatagtaatccttctaggtttaggtttgaattatacagaattaaaaaatgatgaataaatggctaaatttctctttaagtggtcggccataggatgtgagccctactagttagaattttgccattttgttcaacaatttatcttttctttcactaccgccatattttccaattccaaccctttaaatgtcaaatctatttatttaataattaaagttaattatcaaatctatttattaatttgtaaagaccgcctatgttgatatgttggattatcaaataattagagtttattcatgagatttaattattatttataatatacatattgtggagatttatttaagtttaacatatattaattatgctatatgtaaatttttcattttttgtgattgtgttcggtagcggtagaaagtgtcgttgggccattagagagtcacgttttgtgtgtgatatagaattttattaatagcggggcatcattgttaagtgtttgaaatatcaggaattgttgggggttagaatgaccaatttacccttgcttggttttaggcatttgatttatgttaagggcaaggaggtcatttgatggtttattcctttgtcttttgtgaccatttaatctgaatatatgatttaatttattaatgataaaaggaaatgaatcccttagaaacacttagaataagctagaagaaaggaaacattgatcttctctttctctctctctctctctctctcgatttgtgatgaagcaagctaaggcttgattcttactcagcttatttcagagggtgattacatgatttgggtgtgttagttcaaggtattaattcttagctttcccctctttgtttttcttgaagttgaagttaggttttgatgttgaatttaggttttatgtggttgtttgctttagaagtatttaaatttgtattctaatgttagatggaggttatctatgatgttttaagctatgttgggtggttattgttttgtttgaaccaaattggagtttgagaagtccaactttgagctctaattgtgttttcattttttgagttgtttgtggtgttatatttcttggattgagtttattggaacataagcatgtattctggagagttttacaaagtttgggtttgatttgagttgtgggtagcatttttggttcacagtactgaaccagtagaccggttaacggggaccgtagtaaccggtagaccggttggtccttaggaaaccggacttccggttgggatccggtctgccagttgggctatttttcaaaaccttagtttcacctatttttgtgtcatttgggatattaccatcccatttatcgataggatgattcctagttttgattttaagtccctgataagtgttttagcgtgtctctcattaaattttgaatattatagttagagtcctgtaaagcgtcgagctgcaattccactcaagctgagcagcacacttgagcacggaaacgaggtaagatagcataaataatatatatgtgaaggtatgcttgttattaattgtttacac

SEQ ID NO: 92492 - DNA, 597 bp, Cannabis sativa
tagtctctggggaggttaaaaatgtgaacccaaactttcacgtgatcaaaaactccaaacagatctttcctaggcgcccacactttcaggataaaggagtagcgacgtacagaccaaggaccatgctcaagggcccaagagcgattctcagtacttaaaaaacccaactcaaaacagttaaagttgttagcaccttcattcaatgcaaccacagtcacattaaacttccacacttttttcacaaagtcaataatagtggcctcattaactttcattggggccacaactttcccaaggagacaaaaggtggctaatgcctgttgagaagaggcacaaggactaattttgacagaagcttcctcataagaaatacattttccattagtggaggagttggtggcattaactagagccattgaaagcaagcaaacaaaagtgaccagctacaaaacacaaacaaaaaaacacaaaaaacaacccaaccttaccaaccacacaaaactccaaactaccaaccccacgagcaggatcagagaagtctaaacccaaagaaaaaagaacaaagaaacaaatccaaccccactctatcaagaagga

SEQ ID NO: 92493 - DNA, 890 bp, Cannabis sativa
aatctaacaatctcaatagttaagggggcatttttaacgaccttaaaagtttagggagcataatttggtacatgtcaaagttcagggggcacaatcctgatacatatatttttttttttttgaaaaagatactatgttattaaaataatttttctgtcactgtctagtaattaattatgttaattaatgatgcttatcatgtggtattaatgtggccttacatagaactaaggtgtcattgccacacattgatggtaattaaataagttcgtattactaaaattacatacataggtatgacattaaaaaaaatatatgaaaaattggaaaataaaaaaaaaaaaaaaagcattttttgctactaataacataataaaatagtcactctatctagttattataaaaaatgatagaattatttttttgagataaaatgatagaattatttatttattattttttttaaaaaaattaaaaaaatatgttttttttttctaaaaaaagcaaatatatattttgttaaccgattacttttttagggcagtaattactttaaacttagagagagtggtggcatccatgcacgagactagagagtagatttacactacgaggagtgctactgtcaatctcctgttacaacctcttaatcaatcttcacgctcaaaaatacatgtcagaatattttttttttcacgggggtgttcgttatgcttacaacatcatccttgtaaaattttgaaaattttcaaatagcttacagtgtcaaaaatacgttttgaagttttttgaacgcgcgtggtaaactggaatatcacaaactctgttttcagtactgtaaattattcaaaaaaatttaaaataagagtttgtaattagcattcctcttt

SEQ ID NO: 92494 - DNA, 692 bp, Cannabis sativa
  modified_base (561)..(563): a, c, t, g, unknown or other
tagaaagtcttgcataactatggcagataggggtacctctcccaaggtcaatgcgagctcgattatgccctgactggcgatactgtcgccagtgaagccgcaaagatttaccgtgcaaggccttaatttttcctttacaagccccatcttcttcagggtttccttataaaggacgttcactgagctcccgttatctataaacaccctctttatccttttattggcgagctgaatagtaatcaccaatggatcgacgtgaggatatctcacgttcttgtcatcttcatccgagaatatgattgcaggttctttggttttttaccttcttggaaggttctggagcaaataccgactgctcattttttaccactttgacatacctcttttgggcattgttgctctcccatgcaatatgtagccctcccaaaataaccaagatgtcctctcctttaaaaggaagaggttgttacccttggttatttggattcttgggcagactagctggttattgttgggcatgtgccctaaataaaacaaatttcaatataattagatttactnnntaataaagatcagaaatcgcttttatgttgcaccgttcacattgtttatttcatgattatacttaatgtataaattatgttaagtccagaacatatgtaaatatgtatatatttgtttatgattatagt

SEQ ID NO: 92495 - DNA, 524 bp, Cannabis sativa
tcatcatcagcatcatctataggtcattcttcagattttcatttttagacatgttttgaagttaatgtaagctacgcaatctatgaaatatgaatttactcattcaaaaatatatacatctatatgtgtgttgctgaattagttatataagaaacaaggaaatcttgtaatgtcagaactcattaaagagactgttattattaatgaatacaaactaatcccaatgtgaatttttacttttgcaatactaataagatctcaaatcttcaatcttataaaaaagaaaaaaaaagaaaccaaagatcgaatttttaaaaacaaagaaaagaaaccaaagatcgaattatagtaatttgttccaaccaaattgaacagaggagattctacaaaatccatagttactaatgaaatggttggtttgttattagaaagagagaaacaaaaaactaacataaatttgagaaaaaaaaagagagttttttataagaacggtgtaaaagaaaaggttggatttttgggagaaa

SEQ ID NO: 92496 - DNA, 532 bp, Cannabis sativa
tctttaggatttgtcccattaaaatgggcagaataatatgtctccttctgctcaaatctctaacccttgttcctttcagtcgtagagtaataacaagatttgggcttggatctccttctccccttcagtttgattaaccacagtcttccgtactatgattgagtacttgacttgatatgtgtggacatggtactctatcactaaaggcatgaatatgatgaagaataacaagaagggccaaaatcaatatgaaaggagtctctcatctactagttgtcttacagagttagaaaattaggttttatttggttgaagtgacttggatgagaattagagcatcatgttccttttttcgtattttaactagggtttagaatttaatgatatggattaaaaaagaataaaataatgggtaaaaatcccttttagtggctggccacttaatggacctcactagtttcaattttgtcactttatttgaaccatttatcctttctttcaagaatgtcatattttacaatttcaatcctat

SEQ ID NO: 92497 - DNA, 890 bp, Cannabis sativa
gtgatttaccactgactgtgagtcactgtagacttcaatgtattaggcatgtacctctcgagcaagctttagcctaactatgagcgcttcatattctgcttcattgttggaggctttgaatctaaatttaattgctccatgcagaggttacccccaggtgtgatgagagaaaatcttgcaccaaaacgctgaccagtggctgatccatctacatgtaacttccaaataagtttatcttcattttcttcttgtggggactcctcttctggtcttttgtctagctcggggtcatcttttggactgtctgcttctttgcccgtgcattcggccacaaagtctaccaaagcttgcccttttattgttgtgcagggttgaaaaattatttcgtccagaagcatcaggcttttgtagaacttgtcttaagggttggttggtatacacctaaacaggatgagcctggaagtagggccttaactttcttgtagctaagatcacatagtaagttagcttttcaattaaagggtagtgaccttctgcctcaactagtctcttgctgatatagtagactggatgttagacattgttctcttctcttatcagcacggtgcttatagcatatttagtgactaataggtatattcctaattcttctctgtccaaaggtttttgagagtacgaaaggctttgcagttgcttttttagttcttggaaagcattttaacattattttatccattcaaacttcttgttacctcggaggatattcaacaaaggaacacacttgtttgtcaattttgaaataaatttgttgagtgcgaccacccgaccagttaggctttgtacttcctttaattttttggtgatttcatatctaggagggcttgtatttt

SEQ ID NO: 92498 - DNA, 603 bp, Cannabis sativa
tcaagcacatcccctgatctaggagccgaacctccatgaagagcagagtttcaaatggaccacaaatgccaagacaccaacaaaaaataatcaaaaacatttgtggacaacttagcttgcatatgtcccaagaatgagacaacatccaaagttttatacactttcatatgctcccataacccactactcctccaaacatccctattaccccgacagccccataaagcatgaaaaatatcttcatcataattctcattacaccgaaaacatttcttaccaatttgcatacctcggcttgcaagcgccaccttcgttggaatccaagaatggctaatcttccatacaaaatgattgaccttcggcagaatctttcttttccacatacacttccaccattcggtcatcctcctattgttcgattgtgcctctatttccaaccttacacttgccaaaaaatacccactgcgcacagagtactcaccatttcggctataatgccacataattttatcgttaatgctcgcatcattagtaggaatacccaagatcagctctgcatcatcaccgttaaaaatcgctcgtataaatgccaaatcccaagtg

SEQ ID NO: 92499 - DNA, 844 bp, Cannabis sativa
  modified_base (113)..(114): a, c, t, g, unknown or other
tatattaaagtgtacatacaacaaaaaatgttactacactggtaaaagtaactttacttttaccagcgcatttcgcaaactcagttggtaaaaaggtcaaagttttaccagcnnacatttatagtggctaaaatctaacttttaccaacgcatttactccctggaaaaagtcatttttgccagcgcttttcattttgtgctgacaaaagttctaataccaatattgatttaccaaccccttttgccaacacatcaaaagtaaatttcattttaccagcgcaataccaaacttttgccagaatatttttgtgctggcaaaagtgatatttcttgtatacgtttgctcctgttgtgaaagtaagtgacatggtattctatcattttaatattgtcatttttctattttgcgggtgaatgttttaagatttatctaattttatttatacttttctcctttaaataattactaataattacttttactaatcactaattaaaaaatttctaatatctattgttatacccgaaatttagctacacttcaaaagctgacacgtgtcctacaagaggaatatgaatcaactttaatgatataataaagttatatcattaaatgtagattaaaataactcgttattataaaataaaggaatgatagataatattcaaaactcgttggttctataagtctcaactgagataagaataataactattgaactgatattgacgagacatatatctgcctcggaatacatagataaaaaagaggatattcatccattcaagtagaataaatgtacacatacaatagcctcgagttacacttgacaagataatcacc

SEQ ID NO: 92500 - DNA, 560 bp, Cannabis sativa
ttttttttagaaaattatatgaaaaataataaataaaaattattttgaacatttaaaaagaaaaaaatattaaattattagtattattttttaaaaaaaattaattattattgcaaaaaaaaaattgtcacattccattcctatgtaatcctcatattcctaggcatcatcataatattactgtacataaccaaaaggtttataattcccttcattactcgcctagcaatgttaaacctattcctatgaaatgaaacctgcataccaaacagtccctcaattgatttgaaaccaattgaaactcttgacaaacaagaatgcaagtgacaataaaagaatcaagaataattacaaaataagaagaaatggatgaacaacaataaacaaatggaagggtaagaactagttttgttttataaattaattttagcaatcaactgaatacactatcagtatgtcaagtaagttgcatgacaaaatgatgtttcttatgtattctgagattctttaaatgctaaacatgtagggcaattccaaaaatgaaccaaaaaagaaaaata

SEQ ID NO: 92501 - DNA, 1406 bp, Cannabis sativa
gaaaactggaggcctcaagaaactacattgttccactctgaacaattctgatatatatattacatggtacatgtatgacagctagacaaatatgaagattagaaaaagttagaaagttctatcaaatgttgctttgccaaaatgtaaaagtctcttaatagagaccactccctcagatagccaccaagaaacaattagtaagtggcagctaatttaattgtaaatatttctcaattagttatggcatgtggcaaccccatcatgaaacccactcatgatactgttgaaatttgcagtgctgctcaattctgtattgcatgagtaaaattgtatctagtcaatgtcgttttggaaccctgcaattatggaactgttttaaggatggtaagacgcggagacataaaaacaacagcaagaatttagactcagattttacctaacattaaattaacggaactcgtcatgatactcatagtcatcttcatcgtcgttgaaaatagcactgtagaaaacataagggttctcaatcatctctgtcaaagtcaggcgcccatctttatcagtatctgcctgcaaaacacacagaaaaaagaaaaattaatcttcatgctcactgtgaagttattgacaagtaataacatgcaaaaccaaaattggatacctgagttaacacgtaatctgcttgctgttttgcataataacgttctgatggatgtagcttcccaataacaggtagcaactctatgtctgacacatatctaagaagaagaaaaagccgaaagtaaataatagtgccaatggattcccaggattagaattattatcagtttcaaaagatatcagaatatgtacccatcaccatctttgtcaagttgagcaaacaatactttagctggggcctccattgaatcatcatcggaatgatgtgtaacgttatgactttcgtcgtcatagtttctcaccatatcaaagagcccgtggaaaaattctttgaagttaacctttccatctttatcagtatctctttctctgagcaagcaaagacagatttaacacagttagtcagggaaaagcgacaaataaagcacaatcgcaaactaattatcaccaaaaagaatcacaactctaaagtaattgtgaaaataacagtaagaacacaaaacttgagggaaaaatcactaccatatccaagtaagacagaattcctaaaatcccaataactaaccaatcattttgtgcataccataatctaattgacaactaaaatatgatttagagtcacaaagtagtcagtacagaaatttcaaagaaattgattaatactccattcacctacttgaaacgatatccctctaacacttgagcagacttgacattggatgcaacaatcaacatgaaaaagaaaa

SEQ ID NO: 92502 - DNA, 599 bp, Cannabis sativa
acttgagctttaggttcagaaatgggatggagaagaatatgaaagacaaagtcagattactaccttgaaatggagagaatagttgtagaaattcttatattgtttgaacctttgtaagtctagttgttgtgacctttgtttctctgttagagaaccatgttgctaatgctttagtcaattggactagagctccaaaggtcaaaaactctggtttattaggggaagtggcccctgttaggccttagggtataaataaagaggataattgggtaattgtaatgggagggattgatgctatatatatgagtgagtaaggagagtaatagggtagagaattattttgctaaagtgagcattagctcttgggagagagctgggtctctcgaatacccagcaacttgttttcttttcattccaatatcaatatatcagctctattttctctactttgctatcacaaacatcatttagaagagatatattgagttgtgaaaaaatcacatacaatattcttgatttcatttctgcaataaaatcaaatatgtatatagggaaagaagcctccttccagagtgtaaacaagctggtttgaaatataa

SEQ ID NO: 92503 - DNA, 826 bp, Cannabis sativa
tgaaaaactacacctaaacaacattactgaaggatcaactatgaaaccagatattatagtgacaaaagcattcatatgcagcagtgcacgatgtttgactccaaaatcaaaataaagcaactatgatctttgctactacatcaacaaatcaattctccagttctgattctaacaaacgatgccccatgtccccatttggattttgacagaaaaaatggttttagctataatgactttcaaactatactactgaacaattgccaacaaagaagacaaactatttgaaatccaaaaatgtaaattggacaattctataactggaggtgtaacggtaaatttaatccttgttaaaaccaccattccaaaattgtgcgacgacttttcttattggaaacatatctgaaaaattgaccaactttgtaggtgcaaaggaacatcttccttaacttgaatgcttctacggctctaccttaccattcatatttgcaacaaatttcattaaaaatgaaaccatcatgatcaacacattcatagattcccctagcaaatagaagaaccaaactagtaccaccatactattccctcagttgtatctcaaccacacaagtcccttttccagcaaaatttcaagtattactgtgaaaacttatcatccatgagctttatgtaatgaattcatgcttaatttttgaaaaacataaaacctatcgaaaacaaatccaattcatcaaaaagaattgaaaagagagaaaaaaaaaattgaagaaaagaaattccatttaaactcaggggcatcaaaaagctgtcgaaatacatcaaatttact

SEQ ID NO: 92504 - DNA, 750 bp, Cannabis sativa
aaagttaaggaaaatgtaagataaaaaaaaagtttagagaataaggaaaaaaaaaaaaatcaaattctcacgtttagtatggaaaattttgtatatacaatatttttatttctatatcaaatataagaatttatttatttatttattttatctttttcttttccaactaaaatccaacgggttagtaatatttttctttattcattttcccatatgaacaaaaaaatattagaagacagaattggttactaaaatttggatcttttctttttcctctactcctcataatggtattggtattataattattgttaattttatttacattttgtcatttgatatgaacaagtctgaattttattatgatagggccattttgagctactgtccttatctggatcatacacttctactgatgcaaccggacgtccgaccggtggcctgagtgtctcatttgccgattctaatggcaatgccatcggcggtgctcttgtcggtacactaacagctgctagtcctataaaggcgagtttttttaatttctctttactatttatcccgaacctaattaggttcgggatttgataggcttcccaactaatcatataaccctaaatagttcgaaaactattttagttaatataatttaatataatactatacaatataatacaagagaacaaaacatattctataaatgtttgtttcattttagtaaaaaataagtttttatattgatgatgtttattt

SEQ ID NO: 92505 - DNA, 682 bp, Cannabis sativa
gataattaaatgtataatcaaatgaagtattttaacataatatatatatatttaaaaaaaattgtggcaaaaatttcaaaaaattcacactgatttagattagttctcaattttcagaaataatggcaatagtcaccaaagtcatgttttttataagtatgttaatccttattttagttgaatagttaacttattcaaagctaccacatgttgaagtattattgatttaatttttttattttttaaaaaaataataaagaatttttttagaaatcataattttcttttctttttctttgttcttcttcattttcttcatctagcctcgtatccaccctaacccctactcccgattcacccccaaccggacatgcatggccgcacccctgatcttgtcaaccaaccaacaaaagcccaccactcaccctctcgatctctccctttaactgagatctcaccctctcaatccatcatctctcactctctcgatctctcctcagatctttctccctccctctctctctccccctctctctctcaaccaagtcgttggactcctctctcataatcgcggtccaactgcagtgagccctctccactatcgtagtccagtcgcagccagatgacgttatggcctcctcaaccagttcttcaaacaatgtgctgcattgtatatatatat

SEQ ID NO: 92506 - DNA, 850 bp, Cannabis sativa
taaataagtatttatttccgcccatcatatcacctttaaacacgtgtcctatattttttatattttgctgggtgagtctatcaccaactcttgttgagctacaaagggcagcacaaaactctagaattttcaacggaccacaaatttcagaggcgccgattgcgaaacttccctcgaaacttctctctttcagcgtgttgattctggtgatgaatatctctttcttttatctatattttaccatttttcgcctttgattgcttggtttagcacaatcatatagtttatacgaccttttcgcagtagattaagctgagaaatagggtttattttctgtatgttcttgtggtaatttttctcgtcgattggtggagggttattgcagatctgttagtttggtgagtcaatttgattatatatatagtttttatgcatgtattcgtcttatgtgctttaattttattattattttataatttacgtttggatctggtgcgttgtgttgtttctatggtttttgtttgtgaaattgttatgaagatggctctgtttgtagtttttgttactgggatagacataaataagaagtcgagagtttggggatcaagagattttttttttttttggacgaaaagggttagggtttggctgtatagatataattgacttcgtttggttgctgaaaaactggatagaggaactgagatggggcttctttcagaatgaaatttgagaaatttgccaagctaaccatttcaaatactaaaatttacaaaataacctcacttaattttctctatgctaggtcgcactgtgtagatctatataagggtcgtttatggtcgcacat

SEQ ID NO: 92507 - DNA, 565 bp, Cannabis sativa
gactccaatcctaacctggaccttgggacctggacacagccccattccaagactcagaccacgaccttggccccattcctagactcagaccacggccccaacttcaaacccggatttggacccgacttaaataaaataaaatgaaaatgaaagttatagagcacacttttattttttatttttaaaattattaaaataaaaataattacagaatatatttttgtttttcaaaaatagaattttaaaaagacaaattttactttcatttttataattaaaaaaaaaaactattaccaaacgttccctgtatgtatatattttattaagatatatttattttttatataaatgtatactttattaaatactatacctaaaaaatgtataattaattacattttacaaagataatagatgttatttttatttataattaatttaaattaggacttaattttttttaataaaaaatagaagttaattttaattaaaatattcttaaatagagattaattgttctaacattttctatatctcttttctttaaattttaaatgaattaata

SEQ ID NO: 92508 - DNA, 1760 bp, Cannabis sativa
ggtatcctgttcggactatatcttacgagcagatactcggagtcgattccatgtgtcaccatcatgtgatgccatgtcagagtgcaaaaattgggataacacctcagttgcctctgtcttcctcattctctctcacacgcctaccttaggttgtccaacgccctaggctgtttaacaattgagttatgtaaggcattgattcatacattgtaatcttaagggtactatagcaaatcccacctatagtgatttggatagtaattccctcggtataatacaactaaaaggggagtagttcattacccgttatcacaagggggtcaaacctctataaaaaaatcatattatctattgcttttcatttcttatttgtgcacacacgtggcaagcatcagatccacacgaccccgctgtcatttgatcactttttgacgtcaatagtttggtgctttcattgagagtgtgatatcatgatctgatcaaatgccatggtgaacacaagaagaattcttatcgcaccctctgcatctttgggtctcccttaagacccgcagatcgcatatccaggcactcaggttcaagtcacaactagaattcccatgaatactgtagatgtggtaaatcatgtcaccacagcaggtctggccaccacagctagccaacctgacacgagcaccctagtggatccaaatggaaagtccacgcctccaagtgtagacccaccattggcacctcccactgaaggaaggacctagaggcgacagccccctggaacaacaattggacctcatctctggttctacggtagagagacaggcccaggacttggcgagcctcacctggacctaggagaaaaccttgagttggctagactaagggaagttgtaggtcgtgtaggcctaactaaagaaccacgcactgctgattgcgatgttgtcgctgagcagagatgcaaatgcctgagatggatggatgagcaggagtacatcctttgatctcaccaagtagaattagattgctgaaatcgggagtccagcgatctaataagacgattcaattagagaaccaacagaagaggccaggatctccttagagatccacttcaatgaagactcccaccaggttccttaagaactaggacagatcttcccctactagagggaggacatacctttcctcaaaggtcaaataacgagaatagccagatctcgtcaactagggccttagggggccgaccagggatctttggctcaataacaacccccattgtgcagccactggccggctagccatcaactagagtacctatggctagcttgggtacatcacttcctctccaagggaaacgaggtgcataaagtcgatctttgacctacaaggaccgagagttggtggaaacacccaaaatggtgattcgagaagtgaaaccaatcacttcaagcatttagatccaccaaactccagtaattggtttgatctacccccaaccaacacacaaccaacactagtcgatcttggagtcatgggcggccagaccctgcccaacgtaggtctgacaggccaagaaagcatcacgggcggccaggcactgccctttgcaggtctggttggccatggaggagtattgggcggcgaaaccctacccaatgtaggtctagtcggccaagcacatcaaccgagtgtaaacttggctggtctaggccaactcccataattgggaatggctggccagggtttacagggcatggatgatcttcaca

SEQ ID NO: 92509 - DNA, 830 bp, Cannabis sativa
caagagctaaattattggcacatgtcttattttgtcgatagcattcaaccatggacatattatattttcttacagtttgaataataatgtgagtgtcctattttggacttcgaatgatctgctttgagattctccaaggccttccaaaaagagaagcagagttattgcatctcatgacctctgtcgttatggattcggttattgaactgtatagccacctcatcgagagctggtcactcacgatctaatgttcataatctgagttgatttgcacacggagaactgctcgatcttctcctacggtaatagtgttgagaatgaactctgtggggcagggtcgagtgcattgacaaagccatcaagtcaatggcctttaataatggtagagaccatggttttcctaagagtatagttgttcctgtcgagtttcaaaggaattggctagtttagtgtgttaaaaagttgtgtgtagttggtaacaaagctcgattgagccgagggaacattggtggtaattccaagattattggatgctggagctctattgttgttggctggagtctaatattgattagttgacattgacatgtttcagcgtatgctctgatactaaaaaagaaaagagtatacaagtttttaattataaatctcaactcaaagatgagtgaggtgaggcatttcattatatagaggtttgatacaagagagagtcattattgcattaatagatggcacaatacaattgagtatttcataacaaaaaatagtacatcaaaatgtatatcattaacacaaaatatcatgagatcgttgggaatatctgataaaaa

SEQ ID NO: 92510 - DNA, 648 bp, Cannabis sativa
actttcaataacatatgggaatattttttttttaattttttttttttttttgtaaatttttgaataatttaatcaaaaaatttatgatatttcagtttactttggatgttcaaaaaatctaatttcgactgttcaaaaaaatttaaaactttatagagatagtattgtaactatatcgaacaacgtcataaaaaaattgaaaaaaaatattctagaatgtatttcaaatacggaggttgactaagaaattgtaatagaaggctgacggtagcactactcacaaaaaagttttttttttctccactattgttggaaaaagtacataatttttttagcattataatcgaatagtgtttaataacatcaaggtgtagcatcttccgattgattaacgacattcgtacaaattattacattaagttatatgagacctgatacttattaattgcaccaaaattgatatgacatttggagggtgctaagcacctctgatggcttttaaatatttgcggtgtgagtatcgattattttttcgaacaaaactgcacaatcgcaaatgcagttttcataatttctttaactacgaccacattgtaagatctcaaagtcacactgtaaatttatagtgaggtatgagcaatttatact

SEQ ID NO: 92511 - DNA, 692 bp, Cannabis sativa
aagaattaaggataccctgataggtataaaaggtaattgaatttctttcagtagattagatgtaatctatattcgttatgttgagatacttaggcttatggttcatattagataaaacttattttatcaaaattttacttttgcttttataactctaatatggaccacaaaaattaacaagatttggactcttgccattggaagtaagcacatgtagacattcaggtgtcaaagcccaacaaagtctcttgtatttcttgccatgtgggtcctatctttgcttgagcttccagttgacacacaattgtaagatactctgcatcaaggtcattcaacacatttgaaactaaatgtacttctagatacagatctccagcaagggcaaaactgttaacctaagaatgcttttgtcgaagatattctgtcatgggagtacttcctttgcgaacggtctgaatcttggttcacacatcatttattttggctcgaaaatgtgtaccataaaggttttccaaggcagtatagagtgtgtttgcaaaggtacaacccataacctctgttgcaatggtctctgtcattgagccatataaccagcccatgagtaattgatcacagactacccactgctcatatactcagggtatagttgacatccaaaccttggtgtgttttctcctagctctctgagagct

SEQ ID NO: 92512 - DNA, 770 bp, Cannabis sativa
gaacttatacattaaaaagttgtgatttctatagtatacagtttgttaataatactttttgaaatataaattttacaagttattctatcacattttattaaattttatcttgaaataaataaagtggtggataataattaataaatgaatgcaaattaaatattcttcactctttttacattaatgaataatagaatataatacttttttctataataatttatatctttagttttagttttttaatcattaaaggaaaaaaagtgagaagtatttattttgtatctatttatcaactactattatttataatgcgactcattttaaaatagaaaatgataaaaagatcaaatatattttaatagtgtaaaaaatttaataagaatgaaaacataaaaaattaaaaacataggaataaaaacataagaatgagaatggaaataagaataggaataagaatggaataaaatttaaaatatatataaaaaaaatttataaaaaaattattatatttttttttattatgtattggaatagtctttctttccatttcaaaatgaaattgtcattccacgtagaaaaaccattccattaaaatgacattctaacactttaatatgtaaccaaacaaaaaaaaaatgaaataattttgtttttttcattttcattccattttattatttctaaccaaaggccaccattctaattactaaaaaaaaacatcatctttctaccaaaaaaatcaaatgaattattcagtgagtgggccc

SEQ ID NO: 92513 - DNA, 2511 bp, Cannabis sativa
ataaagcattggctattttcaatgacaaattcacaataatcatttgagtgaatgctcaactcttctctttaggctttagtacttgttactttgtggtaccaaaaccttcaccaagctgtgtgatagatctcatgtgatgaaactcacaaaataaatttgtggggtagtgaagaaaaattgtagtaagacaaacaacttaatcttttgcttggagaggttaagaaacagattgtttttcatttctttcatttaaatcatttgtaaaattgttgcagaaaattggctcaagcaaattggccagactgcccatataataaaatactctccctagcaaattgataaaactgcctatagtcatatctttttcacttgatctgcattgctctgtaactagcctccccacttttttattctgtctccagctaaagatgcctgcatttcattagtctcaagttatatctgcatgtttctattactatttttttacaattgaagtatctaaatcatccattattcattgtgagtaaagagccctctttaaacaatgaaaataactaacctctttgttccaattggttctatacacaatccagaatataacagcagtctgtagtacagtccctgccaacattccataccaaattccctgggaagttatacacgagatcaagaaaaatgagagcgttgatcagttcttctactcgagaaagataaaactaatataattataaggtatatgactttcaagtttcaagcaacattgagaaaaatataagttacttataccgtgatacccatgttgagtttgtagcctaatattaggcccaaagggattccaaacacataatagcaagcaatattcacataagccactgcagcttgccaaccagctccaatggcaacccctgagtttgcatgatcaaaatgaaaaaaagctaataaggggtgtatgttgatatacagttctcatctaaatgaacagtgacaaatgaaatatatgatggtaactagacaagcaacttaccagagagtgtgggttgaatgttgttgataacaatagaaaaagcaagcactggtgtgagatccttgactacattctgaacctcagtgtcaatggaaaatatggtggggtattgattccgtgagaccatgaggagaagtgctaagagaagaccacagataaatgaggttattactgccaccaccactgagaatttcgctgttcttgggtgagctgcccctaactcgtttgataccctcacactatagtataaaccattttaaagtacccaacatcacaatttataattaattaacaatttttcatattatttattaaatcaaaatatataagatttaatattaaaatacatcaataaatgtggtgcggtctagtatttggcacctttgaagtgcctcaagcatttctcatcactaatatgtagttttgttcaggaggaaagtaattatgtgattcttttttaatgcatgaaaatccaagtcactaatcatcctagttctgtataaatttacctaatggctgcattcacgcctacggataccatgattgtccagtccaatatgttcatgctgcaaattagccattaattagtttgaagaacataattttatgcaagaataatccatgaatattgtgaaaagaacaataaatatgaagataaagatacaacttacaagattgttacattttgtggtattattccttaaacccctcaacaatgattcggttagttagttattctttaactaacttaacagtcaattatgacagcttgcatattgggttctttggccaatataaagtgaactacccctctcattttaagagagagaatcacaaaagaagaaacacaagaataagggcaagaagtagagagacacaacacactagataaagaagttagagtgagaaatggagagagatatctgagagagagaaagctgggattggaaaattatattgagcaacattgatgattatgttggctcgagttagtgagttaatgagtgttgagggattacaccatgaatgacttgcggtgattattttcttgtagttcttgagattgatatttctaattctaattatcaataaagattggtagcaatgctttcaaactggaatatgaccaagtttacattgaatttatgatcggaactagtataaatctcttgtgttattgtgtctgacaactatttagattcatctgtgttatatttttctagtttaatgtgtttgctggttttttgttcttgatttatttgttttgatttaaactttatttatttaagtaagattttgaatttagaattacaaagattaatttctatgtatcacagttaaatttcttacaaaatggatatagagacttaatagtaaattgctagtagctaatgtctagtttagtataaatttatagtgtcattgatgattcatttgtgagaatgacactacaaatttatattaaatgtataggagatgtacccaaa

SEQ ID NO: 92514 - DNA, 832 bp, Cannabis sativa
taattaaaaaaatatacatttttactgatttacagtttttttatatttgtacaagattttaattttgttttcacaaaaatatagtgtttttctattgttttcacgttgttgctacgggagagtaacgtgaaaacaacgtttttttcttaaaaaaataaaaaaaactcataaaaaaacaaaatccataaattgtgaaaaaaaaacaaaaaacaaaagaatatgtagaaacgttaaaaaatctaatttttagtgtattgtgtaaatttttttaaattaaaattggacctatgaagaattttattttcacggttctttatgcagagtttacaaaaatataattttttttcgaaaaaaattatttgttgggaaaaatatggaaaagacagtgtaagatcaccaattacctcattaaggttactaggattcttatcctatttttctacatttttcaactcttttttttttttcttaattttactcaaaaaataatttgtttgaaaaagagaaaaaaaaaattatatttttagtttaacaacttttaaatatataattttcatttagctagcttatagtttatcacattattcttcatactagtgagagtactttttaatttttctttaaaaaataattattttgaaatgagacacattacttgttataatgattaaataaatattttttaaaaactaattatacacatttacagttagctatatacacattttaatatggagggcaccgattccataccgcttagtacaacaacggaacggcgcacactcataaatataatatgttatattagttgaattcaaaaaaaaaaaaaaaa

SEQ ID NO: 92515 - DNA, 502 bp, Cannabis sativa
aagagaagagaaagaaaataagaaatttaaaaaaagtaagaaatttaaggagagaagaaataatactatttagagagattttagagtgtcatgtcaccgttttatgtctctcatttatatataaatattgaatattaattttttgaattgtatagaaatattttttaagaaaaatatttataaacctaataaaaaaattttaaaaaatgaaaaaattaaggagagaataaataatgctatttagtcatattttagagtgtcatgttgccgcctcatatctctcatttatatatatcgatgattgattgatatataataatatttttttttttgagaaaaaactgttatcattaaaaatgagtcattaataacaacagagtagattggggagggtatttcccccaactaagaaatatcttcatccagtcgaagagcaaatttagttaaagcatgagccgctttattagcatctcatttaacatgagatacttttgctctagga

SEQ ID NO: 92516 - DNA, 1060 bp, Cannabis sativa
tatatcaattgtaaccagaagggatataacttccctcacaagcttaaagccctataaatagtgattcatattcactaggcaaagggtcgaaacatttgtctaagaattcatattcagaaatactattgtaagagctccaagaaaaggaaccattctccttattcttaagttaatacaaactacgaggattaggctattattgaactgttcagggctgaacctctataaaattcttgtgtctttattcgctttattatattacactcgtattatagtatttttcgcttacaaattagactcattgtcgttgactaaaaacgaggtcaacaaatataactaattgggtaaaattaaggtcatcaatcacccaaatattgatctatttaatggaaaattattcacccacaatagtttctaaaccaaaactgtatttaccctaaatatattgaaattagatattgatttacaaaaatacatagacaaatagattttacaatagtgtgtgatatttagactgaagtaaaagtaatgcaacctataatttctataaaattttgttattaaaaaataattattatgaaaagtaattttattttaaaattaataaaataaattattgtaatttttaattattttaaataagtaataatattatatatattcaactaaaattaatagtataaaataaaaaaatttaaatgtattttttattataattacaagttttaattattttatatacgtaataatattatatatctttaacataaattaatactttaaaataaaaatctaaaaattatattttttatttgttaaaatactttaaggattttttttaatataaaaattaatttgagaaagattaaaaagtacaaatatctgtgtaaataaataatatcatgcacccacatattttgatcactgattagagaagattatgtatatcaataatcaacatataaaataaataatactaattttgaataaacaatagtaaaatatatattcgataagtttaacattcacaatagtctcatatcactaaaagtatatatga

SEQ ID NO: 92517 - DNA, 522 bp, Cannabis sativa
  modified_base (42)..(52): a, c, t, g, unknown or other
actatgttttagtcacaattaatattttgttgtgactaaaannnnnnnnnnntcacaaaaaaattatgttgtgagtaaaaagttttcactaaaagtaacagttttttgtagtaaaagttgacactaattataaatcatcaattctatgaagtgactaaaatatctgtgactagctaaaagtatttgccacaaaaatcataatttattgtgattaaatgtgtttttagtcagaatatttattgtgactaaatgtgtttttagtcagaatatttattgtgattaaaattaaattagtaacaacttgtattcaaatactatattttaattataaataaattttgttgctactaaaaatcacatttagttacaaaaatattcaattatgattaaaatattttcactaaaaagtatagtttttattagcggaaaatctagcgtttaaaagtacgtaacttttataggttccttgtacagttttgtgatgcaatatatcaagaaactgatttacaaaaaaaaaaaaaa

SEQ ID NO: 92518 - DNA, 1652 bp, Cannabis sativa
caagcttcaaatctacttgctccagatttacactcctccgccattaacacaaggtattactaatatagatttactcatctgccatttttctttctctccctataaatgtgctaatattttatagggttagcatttagtttggattgtttgatttgggaaaatagtattgtttattaattttcgagaaaagatcaattaattaagcgagggaatcttacattgaatatggcaagtctgccaatagaaccgttcttgcaacacaaggattagacactgtttttcttcataagcatcacataagcaacattgtttgtccctctaacagaaaaaaataatagttttacatctaggattagacagcaaaagcttgatatcacagatgataggatcatagtcaaagcatcctctccaattgtcagtgaccaagtccaccacctgtttgcaatctgaatcaatagtatagcttctgaggtccatatttgaggccaactgcaacctgtgcttgatggccagaagctctgcgccaagagcttgtagtcttcactgctttaaatagttgagtagctgcagtagaacaaccctcttcatccactttagtacatgcgtcggtattgattttaatggtgtcttgtcgtggaggaggcagccgtttgaagtttcttctatcctgataatacttaagaaacccatggcactagtctataagagccgagggtgagggcgtggagacttcatgcttgattgagttcctcaagtacggaagttgccaagataacacagtaaaaaactcgaagtttctttcatccacctgcttgaaattagacataaactccactggatttgaaacagaacagctctttatgctgctccacaaaccagctattttccagtatttagtaacagcagggaacctccaaatagcatgtaagatgtcctcgtgtaaaccacttttgcacctgagcaactcctatcaagtttagtatccctgcaacacaaaacaatattagtggggagccaagaatggcaagatggtgaaccaccatgcctcagttttacccatgttcgaagcctcagtatcagtgttgtttttcatggcaactttgtaaccactccgcacattacattcaccataagtagaatagttccacattatcttgtcatttatcgtctgtctccacaagggattcgaagaattatatcagcatcctctttgttgaaaaatctgcaaataaacacctcatccgttgagcattttccagtttgagatcaataacatagagatcttgaggaaggtggggtttgtcatagattttgcaactgagtggccttgggagccaatggttttattcaagatcttgcatactgatatgttaattgataaatgttttattctcctcttatagaatactgcttctaaggttttaaatttgggtggggaggttttatgtcaatcatcttgaggtagacaagttaatttgtgaacaaagtttgagactttaataagaacttgtttctgatttacaaagtacagaacatttatctagttttgtccattgggactactttgatctagttaattgtctgtttagctgctggttttggtgttagttttcatctagttctgtttgattgttgttgttagttttctttga

SEQ ID NO: 92519 - DNA, 879 bp, Cannabis sativa
  modified_base (40)..(44): a, c, t, g, unknown or other
attgatgttgaataaaatagattacattgaaatggagttnnnnntagggcataaaacccaacatgaagctgtaccaaagatcgcaaaagaagtaatgcataaacatcctccaaggttatagtaaactctccccaatttacaataaaggtgtgggttgccttactccaatatgacactaattgatctaagcttgattttacacggtatatcttaaggtcagaagaagcaagcataggagataagatcttagctgaagataaaggagttgagaaacgtatagcgatagaagaaatccaccttttccagccttgtattacacccgaatgagaacgatattcaacggccaaattattttttgaataacgatggcacaacgggagatccctattaggaactatataatcgttcattgaatcttgataaagataaatcccatctgtttccaacatgcgagggaacaaatcacggcaaagaggtggagccatactatgctcgcatggaaatatattgttctttgactgaggaaggaattctgaattacaagaggttttctttcttttacccataggtcttaaaaaaaaaaaagaaattcatgagaagaatgacaaagcaggagataatactatgtgcatatgtgatacatcgttcaggacaactctttaacaaaaaatcatcgacaaaaaccatatgacgaggctatgaaacaaataaaggtacacaccatacgtaaatgcgataaatatttcataacatggttaatatgctttatttatttatatatatgtatataattaaacagagtctaattatgatttaaataaatataataaaattctaaactcattaatatatatgtatgtatatatgtgcgaaacaaaa

SEQ ID NO: 92520 - DNA, 1739 bp, Cannabis sativa
tttttttttttttttgagaatagagattgctgttataaattaagatgagaaatcatttacaaaaacaatatttataggcggagaaatacaatccgatcaaaagcaagcctcatccacccctaaagcaaatttagccaaactctgggcagtcatattagctgttcgtttgacgtgagttacatttacattagagaaaaagaaaagaagactagaaacatctgaaattaaatcttggaaagaagaaaatttagatggaagtttgcataaagcattagacacatgtagagcatccgttttcacatgagtaattggcaaattgagttgaagtgcccaatttcagctatgaaacattgattgccaaggcctccatttcgtgagctacgaaattgctaactactagttttgaaagggttgccttcacattgcctacattgtcacgaataacagctcatattcctattatttttttgttgaatcaactgcagcattcacatttagtttgaggttacctagtgctggaggtgtccatgggattggcgaagccgtgctggtgtgaggctatgctgaagtaccaatatcaagcctgaatttaggttttgctactccaaaattatgcagatagttttctgcaaaaaatgtaagattcttggcaggttttgcttggtgtccatgtatcacctgatttctttcagaccatattgactaaaggttgcaaaaaaattactccatttcagatcgtgtgaaaattgtagacaagtgaacaagataattatcaccatttcgcattgtggacgcgttagaccagccgagtaaacgattcgaatgtcgctaaactgcccttacatatttacaaccgaataaagcatggccaatgaaatctcaagcttgatggcagatggagcaagtagcattagtgatgattttccttttgaccaatgtactagccacatgtaatgtatcattataggcacgccaagcaaaaattgttattttctgtggcagttggagtgacaaaaagaacttccaccattggtttgctgaagaggagcatgagctgttgtctatatcttctagtgatgttgcataatgatatcccgtttgaacggagtatacaccagaggagtgatagtgccaaacaagtgtgtcgttgtgtctgaagaaccctaaaagaattgtcaagatgcggtccacatcaactggggaaaaccattgattaaggagtgacacatcccattgtctatcttcacttataaggtttgaaaccacaccatccattagacccgagtagagaattggctgaaaagtggagtgtccagggatccaaggatcaataccacacttagacaaccctcaccaattttccatcttaaacccgaagacaacaactctttaccccaatggatgcctttccatgttaaggaaggagagtgcccaagattagcctcgaggaaggagccatgggaaaaatattgaaattttagaagcttggcaagaagagaatcaggttgagtaagaattctcgaagcttgtttgcgagtatcgcccgattaaagtgttcaaaagagcgaaacccgatacctttgctatcctttctcttgcacaatagattccatgaatgccaatgtaattttgttctattctcattgaggccataccaaaagttagacatcattgactcaagttgattacaaaaataaattgacaagcgaaagcaactcatggcataggtgggaattgat

SEQ ID NO: 92521 - DNA, 771 bp, Cannabis sativa
cctcaaagagtgatactacaaatttttacagataagttttaaatcttgcttttaattatatttattaattttgagaaattttctttctattattttgtataattattttattattttgttagctaattgagtttgttattttttaacaaaataattaattttagttgagatttgatttattaaatttaattaatctctcaaatcttatgtatggtgcaggtttaattgactagtatttttctaccattggaaaactttgctctaatagttgggcataacaaagtagtttctatacaatggtgacatgctgagtgaaaaaagacttcaaagataagttttctcgtgaaaataacaaatgtgtatgatccttaatttaaaaatttacaatattatcgttgtatggtgtgctaatccacttttctatatctgtttattttgtaggtagttttggtctaattggttatttatatcgaatgcctcttgaaggtgttctcaagttgttttgtctaaatttctgagagaacttgatcttatataagttgctctgcttgtagtgactcatattctgactttgtatatctttggctagacaattagcttattgactggaagttcctccgcgtcgacaattatcatagtgtgattcaaatcactctctcaaaatatatatataccttaacaagcaaaaaaaaaaaataatatgacatataaacttaaagagaatcattcatcacatagcaatgtatgattgtcattttctaatgtttgaaa

SEQ ID NO: 92522 - DNA, 581 bp, Cannabis sativa
gcacttagtgcggattggatgttgtttgactaaaaaagtgcggattggatcggatgaacaaccctaattgtttctatgtaaatttatttgacttttttctttctttctcttctctctatttattttttttatcatttttcttttccaattctctctctccctctccctctccctctctctcatcacaatattttttttaatttttatatacatttttgaaaaaaaaatacagtattttttcaaaaaaattccatcctagagaatttttagagtagaaagtaaatgacattattaattaattatacatttgacaatatggctaacctctgattaaattttatcaaaaaaaaattgaatttaaggtaccaaataagtataattttaaaatacaggataccaaataagcattattaaaaatacaatgtatcaaacttgtagttagataaaacacaggttatcaaatgtgaagacatccataataaaattataaaattagaaagtaatctttttttttaattaataatatacaaggtggatggtagatgtagatgaaagttaacggaaatgttagtgcatgtttg

SEQ ID NO: 92523 - DNA, 805 bp, Cannabis sativa
taattattgggtttatttatttgttaacgtttaacgttaaccgtctgttaagttaaggataaataaaaaaaaaatcgttaaaaaaaatcgttaaaccaacaattgccgttaaataggtactttttatatataaagatatttcgagcttttcatgtttagtaaatatttttcatattttatcatattaatttgtagtattatgttgtatcatgcctaaacctatatatattttttcgtatcaattttatacagtatattaaaaaaaactcaattataacacttgttatttacatgcactaatcatttatatattatacgtatttgaaatatgagtaactcaattaacacttgtttgactttgctttaagtttaagtgtactttttgagttttgatagccacacatctatatatagattaataatatacaaactcttactattacctaacctttaagttattatattaataattcataaaatattttaattataactgtgatgtatgtataatttgtctctttgcttagttaattgtttaatggagccgtacataacagataaataaataaacaaatatattatgcattggattcggtggtccaaataatagaataaaaataaaatgttgtacataaatacaaaattttgttattaattacttaattagatctatgcatgttaattatttaatgttatgcatataaaataattaaagtatttatagattcataagacatggacttaacgacagcacatggaacaattgtttccaaatcatgactttacagaccataattaatattat

SEQ ID NO: 92524 - DNA, 792 bp, Cannabis sativa
attcactaaagaagatgttgtccatgttcgcttctcgcacaacaattccttggtcgtggaagtacagataacaaataaaatagtagcccggaccatgatagataatggagcctctacaaatattttgttcaagacaccatatgagaaaatgggactctaactcaaagatctgatcccctgtacccaatcggtgtatggtttcttcgactagattgttgcacctttggggaaaattggactaccgctcactgttggacaagctctaaagagcataactttgatggcacaatttttgataatttatgttccattagcttttaacgtcatgttaggtcgaccgactttatatgacttaaaagctgtcacatcaattttctattcatgcatcaagttcctaacaatgaatggggtagggtgcctaaaagggaatcaacaagttgcacgggagtgctataaccttgccatgactaaggccaaaaaggaaaattcctctagctagagttcagacaaggggaaaagtattgcccaataggaagtcgcccaaggcagggacgaggatgtggatccccgacttggggaactaaatcaaatgttgggccagtagaagaattggaagagatggaaatcaacccaaatatcccgaccaggaaactcaaaattggcaaaggtttgttgcttgaagtaaaattagctctaataaaaattttaagagcgaacctagacattttttccttgtcgcatgaggacatggtcggtatcgatccttctataatatctcacgccctaaacatt

SEQ ID NO: 92525 - DNA, 533 bp, Cannabis sativa
ataataaattgagagttttgtaatgagaactattatttgtgcttagatataaattgaatattatatttatattaaattaattttttgaaatggtgctatttattttttatttgtacaaataattaaaaaaaaaataacagcacatacttagtatttcacctcaaaaagaaattctccagagcttagaaatattttttaaaaaaatactaaagcaagagttagtggtacattttaaactttctcaataacatttcaaaaattcaaaatcaatgtaccatatataataaataaattacaatataaagaaaagaaacataacttactaataattatatgtgtgaagatttattaacaaaaatattatctaacatataactaataactaattttaaataataaaatgtaatgaattatatgacttattttcaataaaaaatttatggtattgtcaaattaaaattataggtcagttaaaagaaattattataggtttcaaaatttaataaaattatatactttgtatatacatagca

SEQ ID NO: 92526 - DNA, 602 bp, Cannabis sativa
  modified_base (528)..(560): a, c, t, g, unknown or other
tattcgggtccgggttcagtttcaattttttgaacccgaaacccgtgaacccgaaacccgccaacccgaaacccggtaaacccgcccgatgttcagccctatcgggcactacacaaggaaaggagtttcattggccaagttgtatttccaatatccatgtatcaaatacaagtgagaaaagtcacccaaggcttcataagtcccttatgcaaccactaccacttattttggcaaaaaaggtgttagtgctctcctaagcaattgaccaataactaatgtgaccaaagtagttttatatcatccatatggctgaaataagcaagaaacaccatccatggcttcccacaagccatggccgacgaccactgcaactttccagcttcaactagtggcaatgatctcccgttaggatttcagacgtcaaaataaggttttgggatcttaggacccccaaaatatgactcaccctcaaaaaacaagtcaaaacacacccctaggggtccgagaactgttgggttttgtgccctnnnnnnnnnnnnnnnnnnnnnnnnnnnnnnnnnttattaataaagatcagaaacaacattttatgttgcatggtt

SEQ ID NO: 92527 - DNA, 1482 bp, Cannabis sativa
aaataataaaaatatctcaaattaaatctaataaaattgataaaaaaaaataaaaaattcttaaaaaaatttaaaatcctaactctaacacaatttatcattatgatatatatgcttaatgatcatattctctcatatattttctctctaatgattataagctatatttctctttttattttttagataatcaagagtcaaaataaattaagtggtaagtatattttttattacaaacattgtatattgtgttttaaattaatttctaaattcgatattgtatagtaaattttctttagatttctcaatttttttttaagatttattacttttttttacaattgaataattgaacagattatgtataaaaatacgttgttaattgattacttaagtgagatacagtgataacaacaagtaagatttaattatgtgaacgattttgaatgatcgggatataaagatgatgcatcaccgaaaaaaatattcatttaaaataagcaatttcaatattatttatactagaataaatttttttaaattattatttattaagttaatatagaaaattatttttgtattattatactaaaaacatattataatagccgcgcaaaaagagcggcaatattacctagtttttaatatgtgggaagtataaattttcttactatcaccagtataaataaccgaaatctaaggtaattaactttcaatttcttttattttcaaaaaaaaaaaaacttttaatttcttttgatttaattaaccaaaaaataatttccatccaaaaaaaatcaaaattgaagttttaaaaaaattaaatataccaaacagtttcattagttgttaaaaaaaaaattttgatttaatatttaaaggtaaataaattgtaatcaacattagtttaccttttgaaataatattagtaaattttaatgtttcatatttcaaagttattagattgtagtttttttaagtatatgttgaagaacaattttaataagtttttaaaataaacatagggtactaagtagtatcttgtcaaaatattaaataattattattatactaattttgattacattactaaaatctataagcagtaacatactctattatgtgggggattaattgttattaattttttttttatgtttactttatttaatttatttatttttatggggtcttttttaattttttgtgctataattatcaaataaaaaaaatatttaatttttttaatgcaattttttttttactgggggctatagccctcacaagtctataagtgtgtccgtccgtgcctataagttagttggtgttgcttttgtttttcatattttgttatataaggttattccttatttgacgagttaagatattttaaactagggttgtacatcggtaggtttgggcggtttatcctatatattttctaacccaatctaaagttcgggttgctaaaatttaagtgca

SEQ ID NO: 92528 - DNA, 529 bp, Cannabis sativa
tcaatttactttgattctctaaccacataagtgatagttctatggtcctcaactcaagatctctgtgtaactttcttcctttgagctcttcttcactggattcttctttcctttgacccgaccctctttacccttggagtcagaattaagacacgctttggtttcttttcttttcattgtctttttttaacgggaatgtccttgtttggacattgcattctatcaaaatacaaaattagtatcatgtatttggtatcaaggatcgtattatattattatattaattattaccgctaaaagttttaatacagtgtaagttgtattatttaatacataacaaataattaatattagtttatattataatatttacaaagaatcctaaatcaaccctaatctccaacttgaatctaggacccgaacccaagatccagacctgaacgtagacccaggactcggacctggacctagacccaggactcgaacctggacctagacccgaacttggaattggacccggaccgaaccc

SEQ ID NO: 92529 - DNA, 624 bp, Cannabis sativa
  modified_base (30)..(39): a, c, t, g, unknown or other
accatgtaacataaaatgttatttctgatnnnnnnnnnnaagtaaatctgattatatgaaatgtgttttatttagggcataaaatccaacaattcattcttggtgtaacaaagtctttatcgaaacgctaatgacatacagcagcggtgtgacccaacttgtgacagacttgacacaagagtcgtggctgattgtacccagatcgtccatatggcctatttgggggtctgtagttagggaagttgttcgaaccacggccagagaacccagccggtcttgaagcaccattattgtacgatctttgattggacatagaaagatttacaaccattttggtggagagttccccaatattgtaatggcgttcaagacggctttcatgagtgagcagtaaggactgtatagattcgaaagaaagattgtcaacaaggctagtaacatgaacaactacaggatcaaattcgggacctagcccattcaacaaatgcataacaagatcactctcatctaagggatgatctgcagtagataaagaatcagcaagcaatttgaccttatcataatagtcagatatagaaagattgcctttggtgatggtggacaactgagatttgatctgaagaa

SEQ ID NO: 92530 - DNA, 1038 bp, Cannabis sativa
ggcatcaggagcccccgtattcgacacctggacagtaggccttggtctgggggccctcctctctaccgggcttccgatacgaaggagcctcccagcagccgcctgggtcctcctctctactgggctcccaacgcgaaggggcctcccagcagccgcctgggccttggtgtaagccttctcctgggccttccggaagaggtactctcggcacttctcttttgctgtggcaatgatctcctcccgataggtcttttctgtggccggaaccgttacgtttgggcagataaccttagaaaggttgaagtcctccaccgactgatgccccaggatcagcttggccttccggcaattcttcgtcgtgaccaactccccgatgtccaggtccttcttgtcatatgttgcaaaggtcttggcccgttggagaaagagttgactaggcacggtccgctcatacggagcgatcctaacccactctgtgagaagctccggatgttccgcagctcggaacccgaaggagaagaagaagcggtgacgatactccttgacgtgtttttgatggttgaaagggaccgagccctcattcaaaggtggatccggaacccgtaaaaaccatccttaagtttgtcccccttcttggggacagaaacaagttcataaaagtacaaaatctctgccggactgggagagccccatccccgcgcagagtaaaaaataaataagcctgaaagcaggcggtaagcttgtggaataagttggtatggcgcaaggcggacaaatacaaggaaattaatgaaataatcctgaagcggaagcatagccccggtcatcaaatgcgtctagctccaagctccgaagcctccttaattgtgatggggcgtctccgcgtcacggggcggcaggtggtacgtcccagaagtcacaggcttgatgccgaccaccaccacaattttctccaattggtgaggtcaagttaaggtagagtgaagctcagccgcttcccatcccgtggcacgtggcctatacccctcctgggcgacg

SEQ ID NO: 92531 - DNA, 659 bp, Cannabis sativa
tcaattattttcatttcttctataactgcctatgtacagccaatttcatgggctatgtacggagtgactaagacaactctacttgggcttacaaaggtaaattgaagaaattaaattgcatacctactttattttacttgttttaatttttacctctatttttatatttttttaagataaactcacttttatggatggtgttctcattagatctcttaggttaatgtaaattatatagtagacttaagtagagagtgaggttatattaggcaactcacacaaaaaaatgagtatattttaataaaatataatattaaattatttttaattaatggatataaaaaaatgatattataagaaaaatttacatttcatattattttttccattttattttaattttactgttgtaagaaagaaaaattatgttattgctgtttctttttaatattgtatgctattttctttttacttttggtcaacactcaacagcccacattttttatatataaaagtttgaaatttttatgtgtttacacatgtgtataaaaatttgaaaattttttatttgatggctcgtgttacttttgtgacagtttttgttttttttcttaaaatatttatttttattaggcctgcacatgggttgggttgggcgg

SEQ ID NO: 92532 - DNA, 708 bp, Cannabis sativa
gaccggttcctacaggcctccctgaaccggaattccggttcagtgcaggaatttttcaaaaattcatttctcaaccaattcaagcccaaaccttctaaaactctccagacatgctccaaatatcccaataacatttcaaaagcaacaaaacatcccagcatgtacaaaaacaaaaaccaccatgtgagctccaagtttgagcttcaaagctcaaagcttggctaacaccacaaccagccaccataaccaacttaattcaacataaaacaacatatgtaacatccagaaaccaaactcaaacacaaacaatagtcacagtagaaaaaacaccatttgaccattaaaatccaaagttttgagtttaaagctttacacatggttaaatccaactaactaacaacaaaaccagcttgaatccactcaattaaacacatctaagcttcttaaaacgacaacaacaactaacagcaaccacaacaccaaaatcaccaagcatgcaaccattttcttccttaaattacaaagtccactaaaggacaaaggattaaaaagcactaaagggtattttgggaaaactctaaattcccgactaatcctggcattcctaatgtctaacaaaactgccccgctatactaaaatattagattgtgattctactgagccatacaccgcgttccatgttgccggacaccggaaatgtaaaatta

SEQ ID NO: 92533 - DNA, 819 bp, Cannabis sativa
cagtcaaatattgttcaaaggttaaaactgaaaaagataatcgcaaactaataaagcaccattaacttcagcataaatataaatacgcatacaaaaatcacccaaattgaaataacccagaaatagatcgttctaataaattttgcagttatttgattcagaaaacaatcaaaaactatttctttattcactttcaagtttcaacaatctataaaagcagcatacacaattcgtcctacggctacacaaaaaaagcatagaaacgatatatatttatatttatatatatacacacacacaaagcaaagatcatcatagaagcttagaacatcaaatcaaagttttgattttgatttcgatttcagggccataaaaacttatccgatttttatgtaaaccaaagatgaagatccgatccatataactaataaaattgaaatatttaaaaaaatacaatagtaaaacaagccaaaacaaatcaaatctaaccttgtagtaggcgataaggtaaggaagtaaggtcccctgaagctttttgttcttcttcttggtctagtttctagggtttgaagagattgaaaaaggcagaagtcctaataagagcctttccttggatttgtacccacgtcattatttatttatctattaatcggtaaatatataatttttttttgggaaaaaagttaaaaaaaaaaagaatagtgatagttttcattttttatttggtactctatccttttatcttttattttttgtttttttttgaaacggaactctatccttttatcaaaagagaactttgttacttttttttttttt

SEQ ID NO: 92534 - DNA, 818 bp, Cannabis sativa
aaagtcatataatgagaaattgcattagttgttctgccataaaattgaagttcttgtacaaataaaatgatctcatccaaaacaataccgtcgaaacatcgagtccatccaagtaattctgaatgtgttcttcagtaattgtgctagtttgatcgccatagagttctgggtcaagcttgctggcaggtgggaattcctgcattcaaaattagaccaaattatatgaccaaatatgatacaacattatgtaattgataatcacttataattatagtaatgaaattacattgagacgacggatgaggatagggtgaactccagcaaccatttctcttccaaattcttcatcagtcctccatgcagatttactctctacaaatcattgaatttaagactatttatgatactatatatgaagaaaaaaacaatgtataacttgatcaatttaagattggttacccttaataaccgcaggcatagggaacttaaggaattgttcaccatcagttcggagtaattccctgaacagatcgacaggaacattgttcctgatagtgctaagaactgatgttggtagcttcagtcctccttcatacaagtcttctatttccttgaagctatcaaactcatttcgagtctgatcaaagaaatgtttcagtgcaggtacaatggcttgagacaatgacttaattgcataagcaagaaaatctgacatcttcaagtgaccaaatcgttcatctcttggaacataaatgtctaaagattcaataggatccaatggtttcattatatttacttgtttcagcctactctcactt

SEQ ID NO: 92535 - DNA, 691 bp, Cannabis sativa
  modified_base (73)..(75): a, c, t, g, unknown or other
tacactgatcgtgggatttagacaccttgccatatctctacaatctgatccccaagttatagggatttctttnnngactcacgatgcgaaagctgaaattcgctaagtgttggtcgctctccgcggattgctaatcgcgttggttcaggcgtgcatatgaggcatcatgttccgactgtattctccgagcaaatactcgaagttggtttcacgtgtcaccatcatgtgatgccacgtcagagtgaaaaaattgggataatagattccaaaatagtatgcacatttaaatcataaaatctacttgctttactattaacaacatatccaataaaaacacattcatatgctctactagccaattcaattctcttaggatcatgaattctaacatatatcaaagaaccccaagttttaaaatatgagatattgggttgtttatttttcaaactttcatatggagaaattttcttttggatttaggaactctcttaagcacattatacaaagtaaataaaatttctccccaccaatgagaagcagcacccgaattcaataaaatagtaacaacagattcatcaagagttctattttttctttcaactttgccattcgtttcaggtgaataaggtataattcaccttgtcgtgtataattccatgtgagttataaaattcaacaaaagcagtggaat

SEQ ID NO: 92536 - DNA, 996 bp, Cannabis sativa
gggagggaggatgggcttgcagacagaaatcgacgatagatggttgttagtgggaaggttcttaacaaatcggtccattgattttcaagctatgcaaaacaaaatagcgtcgctatggcagccggggcgtggtttgtatgtgaaggagttagatcctaacctattccttttttaattttatcatgaggtggacatagagagagttatcgatggtagtccatggactttcgatcgggcgcctttgattatggagcaggtaacacatggagttaatcctagatcaatacctttgaatactctggaactctgggttcaattacataatttgtcaattggttttatgtctgaaaaatttatcagaagggttggtaattacattggaactttcatcaaatcggatccaaacaatttctccggagtttggcgagattatttgagaattagagtgaagatccattggagaagccactgaaaaagaagaagaagttggaaatgcaggggggcctggtatgtcatgtcacattcaagtatgaggatctacccacattttgcttcatttgtgggatactcggccacacagaaaagttctgtgaacggctgttcgataccccgagagaaatgattacaaagaactttgatttggagttgaaggcggttctgagaagacgtaattatgcggatggatcacggtggctgcgatctgggttggctacgaaaaattcttggtggcctggggcaagttcatcaaaccagcgatgaggtccggtggttgcgccgatgataggaggggatattaatgatcagttaatggcagagaataatcaaggagagcaattagggggatatggccttaacaatagcaatccagatagtgtcaataaaaacaaatcccatataacaggggaggcgtttttaaggaaagaaaaggtgggagatgaggtggacaattcaaatgatgggctggtttttttgtgattctaaaagaaggagagttat

SEQ ID NO: 92537 - DNA, 919 bp, Cannabis sativa
tatatatatatatatactaccatatgatggatgtcctgatctacacagtagtactgtcaaactttcccagatttctataagaacattatgattttaattattgtaaactgtttaatttccatggaagaaagagaaggatcaccttcaaatcagctgggatcttccacaaattcaccattactttatgcttttcaacaaaatggtaggacagtgtgtatattctttccttttcaccaatattcataatccatccgtggccacttttcattaaatatttgaccttgttaatttcaatttcgactatcatatataaatttcaatattattttacactttattatttatttcttctcttacatttaattttgaacaaaaggaattaaatatctctaactctaaatttcataagctattaagctgttgctatatcaatattttttttttctaaagtgaatatatatgtactagtagagtttaataatattcagagtaccatttatataaagtctataaagtggggacacgtaaatggccctatatttttttttactcaagtttaaggaatatgtcgaatttttttttttatattcattaattaaaaataatcttataatattgtttttattaaatatattcactttttggagtgagttgcttaatatacattcactctgtacttaaatctaccatataatttatataatttaaagggtttaatggagacatcatttataaaagtagatatatcttaaaaaatatgaaaataaaggtaaaaattcaagacaagtaaaataaatgggtatatacgatataattttctcaaagtttaatgtccctttttaaaaataatatagtaaatgacctttataattttttagtacctaaattatccttgattatataaaggtattattcacat

SEQ ID NO: 92538 - DNA, 755 bp, Cannabis sativa
taaaaaaggaaagtttacctattggtaacctgctattacaggttaaagaaaaatataacaataaaaatgtaatcattgaatagtcacccatatatatataaataggccttagtgtatcaaatgagattttggtttgatttaatcaaagtaaggtgtgatgatacacaccttaaatttatcatttcattgttccacttaggtaaatgagtaaaatatgaaattactctatttcacggatagaaataaatttcaaccaatcttctcctcacttctttcagccaagtcctttgccacggagtcactgaccatttctccaatcgaccattgcgctcatcgaattagcttataggtcttttctgatttgtttattatgaaaccatggcttcagtcccttataagactaaggaatctagtattgaataacaccatattataatggccaatttctcaaaagctatatttcaaaattgagtattaaaatatttaactatatttatgaagatttggttttctttttttttttatgtgtaaaattagagaatgtaagaaggtgtgaaaaaaaaagttgataatttttaaaaatttagaggtgcattgatatatttatgttggttatagttacaagttttgtcattcgggataggaagcaatgacactacaacattcaggagcaatagcggcgggcccctcggccgctattgctccagtttttggccgctaaagggcaatagcggcggacctcggccgctattggt

SEQ ID NO: 92539 - DNA, 509 bp, Cannabis sativa
aggtagataattttataattaagctttatttggaataacatttcttttattacacaaaaatatgatcaaccaaaaaaaattacaaatgcaattaattttgtaactcatcttcatgttacaaagtgtaggttataattttagcataaataaatcatatgttacacaatttatttaccaaacacttaatacataataacatatattaccacattttaatcgacatattattatattatcaaataatataacaattaaaccattaaaaattattttatatattattttttaatttttttcttaaatttagcgtttaagttgctttagtggtttttatgtaaattttagttacactttaaattggtctattgttgctatgtgggtttttatgtagatttataaaattatggtatataaaaaattattttaaagtgttaaaataaaaaatctctaaaaatatttaatgtgaaagagaagagggaaaactccttacctattagccgttcgatttc

SEQ ID NO: 92540 - DNA, 549 bp, Cannabis sativa
agtatgtggtgtaattatcccttattttagatcatttttaattttttaaaaaaattaaaatagtttaaaatataaaaaataaaatttaaatattttcttacacatattattttttatatgaataataaataattatttatattttattttagacactatatactatttaaaatattttaaaaattaaaataaaaaaaaataaataactacaatgtttataaatattatatataaaaaaacaattaaactaaagagcactctaaatatcgaaaaatactaaaaaatttaccagaccaatcctttaacataatttgttacgaagttacatgtacatatccattcaaaaaaaaaaaaaaaaaggttagatgtacatatcgtgttagagatgattattattgatagaattttaataagcatatgccttaaatactactaaccaaaagatcccatcttaatatattatagggtaaataccattttagaccctgtgttttgtaaaaattaccaattggaccttgtattttgttaaataataaaatggaccctgta

SEQ ID NO: 92541 - DNA, 815 bp, Cannabis sativa
aacactataattggcaaaacgaaaagaaaatcattgtttaactaaaagcggaagcgaaactgaattactttaaaagtaggaatcaagaaagtactgttcacaacaatctgaatactaaactgtaattcaagaattaatgtgccaacataaataacgtcaactccaatataagtgcgcactttaagcatttgacttcctctaatttatcttcttgagatcccttagcccctggttgtgcttgcttcttttcatattttctttatcctttgttgggcttgagttgagaaacaaagtgagaatactcattcttctgattttgttagcttgcttgttttagctacacactgagaaataagttcattaacactccatgctttattataagtgtttaggcagtcttgataaagctaaaaaaggtaggaagttcatgaagaacttgaagaatagtgtaaaagtagggaaaaggaatattatgacctttcaactcggactgaacattaataatatttaaaataaaacctcgcactctttcgatttatcatactgaatggttctcatttcatccataaaatgttcaactgcagtgttttcactagtgtcatataatttttctacagcattgaaaaactcattagcatttgaggagtttggcaaaccattaaatgaatgttatggaattgaactttcataacaatgagacttagatgatttcaatttttccattgtgcatgaagaattttctaggcaacaatgctgatattagtaagatcaacagatttttcttctcgaaggcataagtccaaatttattatgcc

SEQ ID NO: 92542 - DNA, 500 bp, Cannabis sativa
atctcttttgcatgaataatttttcaataatggttttattaataatgagattattatttccaagaatagtacacctattatttctgcaaaatagagtaatatatattatgtgctcaagccaagtgagcaattaattttaaataatgaattatttagagtagcattgcctcaatcaaataagaggcaaaaggtttgatgatgatgaaatggaatctacgtttaggccacattggcttagatagaataaattggttagcaaaggatggtcctttgacagaactaaaagttagaactcttctagtatgcaaatcttatctagaaggcaagatggtaaaaatacatttttctacaaaaggcaatagagccaaagaacaacttgagcttacacattgatgtgtgcagacctactaatattcaatctcgagaaggttatgagtactttgtcacttttattgatgattattgtaaaaacggtcatacttacctgatggccaagaagt

SEQ ID NO: 92543 - DNA, 1162 bp, Cannabis sativa
gctagtaatttctttggtgtagtacttgggcagcgaagaggaaatattttccattctatttactatgaaagcaagactctcattgatgctcaaattcattactcaaccaccgaaaaagagttgctggccgtagtatttgcttttgacaagttccgatcttatcttgtgggaacgaatgtgattgtatacactgaccattcagccatcaaatatttaattgccaagaaagatgcgaagccaagactaatttgttgggtgttacttctccaagagtttgatttagaaatctgagatagaaaagggacgaagaaccaagtggctgatcacttatctcggctggaaataggtgttgagtaggaagacaaaatgcaaattcaagaaactttcccagatgagcagctgcttgttgtaacacaagcaaacactccttaatatgctgattttgtaaattacttaatgagtgggttgcagcctcctgatctgaataggcagcaactaaaaaaattctttcatgatgtgagattctactattgggatgatccttacttgtataggcagtgtgtggatcgaataatgtggcgttgtgtacctgaagaggaagttgcaagcatcctagagcattgtcattcatctccctatggtggacactttggtggacaaagaacaacagcaaaagtcttccaatcggggtactattggccttccattttcaaagatgctcatgattttgcaagaagttgtgatcgttgccaaagagttggtaatatttcagcaaggaatgaaaggccattgaatttcatttttgaagtggaactttttgatgtttggggaatcgacttcatggggccatttccaccaaccatcttatggcaatctatacttcttgttggcggtggattatgtctctaaatgggttgaagcagtagcaagtcccactaatgattcaaaagtggtgatgaaattcctcaaaagcaagttttcactcgctttggaacaccacgggcataataagcgatgaaggtactcactttgtgaataaaactcttgctgccttgttagctaaataaaattttccacaacaagtttttggcgttgttgccagggagtggtggaactacgtgatgcactttcaagaagaaaattcttggtgaaaggccaagga

SEQ ID NO: 92544 - DNA, 700 bp, Cannabis sativa
cttggtgggcacgcataagtgtgtcaaagtcacttatgtgtactctaggatccgtactcctatcgtacttcgttgtggtcagcatcttaaacccttgcgaatatgttaaggccaatattctaggagagtaaggctctggctcctcatctgaatcatacccagtgacattttagttattgtatcatttccaaagcattgagcctagggtcattgacttgtctttcctcgccatggccagcttggggatgctattttgatgtcccccatcgatattatccttgttatttgccactggtggaattaggttttaccttctattcaaatgttccctcaaatcaggttgtctttgattgaggagttctcgcaaatcaggtcttcttgcatcccctggaggacggttattgtgacgacgtttataattgcgagattcattattatgaacactaatggagcgtcttttagagttagaatgactgctatcctcaataaagcttaccgttctttgttgttgtggatgatgaggagagtgtgggggcggctcagagtacatcgtcaaagtggtgtctgatttggacacataactattttcttgggcaggttggtgcctttgggggcatcctttgtttttgcccacgatattctggcctccgataggcgcaatctttgtgaggtacggtgcgtcgcctatgccccctaggtg

SEQ ID NO: 92545 - DNA, 713 bp, Cannabis sativa
gccaatctagagaaaatacaagccttcctggatatgaaattgccaaaaaaaactaaagaagtccaaagcttaactggtcggatagctgcactcagtaggttcgttttgaagtcaacagacaagtgtgttcctttcttcaacatcctttgaggtaacaaaaaaattgaatggatggaagaatgagagaacgctttccaagagttaaaaagacaactttcaaagcctctcgtactctccaaaccactggatggagaagagttaggaatatacttagtcgttacagattatgctataagtgtcgtgttgataagagaagagaacaacatccatcatcaagtctactatatcagcaaaaggctcgttcaaagctgagggatggtatcatttgataaagaacctcacttactacctaatctcagcaacgaggaagttaaggccttatttccatgctcatcctgttcgggtatacatcgaccaaccattgtgccaaatattgtaaaaagttgatgcctctggacggttacttaaatgggcaatagagttgggtcagtacaaaataatcatccaaccctgaacagtaggtaaaggataggccttagcagactttgtggttgagtgcacaggaaaagaagaaagcagcataagggataacccagagccggtacaagaacccctgcttgacaacaacaaagacagacttacttggaaattgc

SEQ ID NO: 92546 - DNA, 1087 bp, Cannabis sativa
  modified_base (312)..(313): a, c, t, g, unknown or other
aaaatttgaggggcataatttggtggatatcaaagtctgagagcatgatttagtacctgaaacagtaaatgaaattagacaaaagtccataaatttaacaatctccacagttcaggggaaatttttaacggccaaaaaagttcagaaaatataatttagtatatgtcaaagttcgtgaggaaaaatcgctaattagccaaaaaaaaaaaattatcaaactcttatcctacataatctcttaatccaacggctcatgaatgattatgaggcgcgtgcaattcccataattaaataattaataataataataannataataataataataaaaaaggttatccattggatttaaaaagtttaatttaaattattaagttggtggaaaatggtgattgtgtaataattcaccagtgatatgtggacacctaacatcctcatttgttcgcacgtgtcatcacacgcaaaccctaacgcccccaaacacacacacaaaacccttctctctctttctctttcctctctacaatacaagaagccatctcattggacaccgccacaccagatcacactctccctcccttcctcccacgctagttgagcgcgtacctacacgctccaacacagaagagaacaacaagaacaagaagaagatgaccagccatgactatctatgaatgagtgaaacaacagaagtggttcggttgtgagacttgtgtgttttttgagtgagtagtactttcactgtaactcctctttttatttcgacggctcagattggatttactttctgatccttaatcttcgcccttcatttcattttcagtttcttaattaaatactatcgtttcttccttccttctttcgtcccacctggacttttttcatctgactcagactcggaattactgtattgccctttccttccccatgaaaccaacaagtcagttctctctttctgtgaatttatggtttcgattttgaatttttgtttctttatttggaaattataaggggttgatttcgttttttgtttgttgtttatttcaaattctgttggttaattttaggatcaggtacatcataagca

SEQ ID NO: 92547 - DNA, 749 bp, Cannabis sativa
gaatggaatgttgaattcttggagaggtgaatggcactctgactgtcacagaagacaatgtatctttcttgttgcaagcccaactcttgtagaaattttttcatccataaatcctctttacaagcttcagttacagctatgtattcagattctgtagtagacaaagctacacacttttgtaacccggattgccatgaaacagctccccatgcaaatgtcatcaagaatccttaagtggatttcttagaatcacaatcaccagccatgtctgcatctgtgtacccatcaagcataggttcaccactgccaaagcataagcataacctagaagtaccttatagatatctcaatatccatttcactacttcccattgatccttgccaggattagagagggatcggctaacaactccaactgcatgagcaatatttggccttgtataaaccatatcgtacattaaactgccaactgcatatgagtaaggtattgaagccatttcttgtttatccttctcacttgtaggacattgtttgaagcttagctttaaatggcctgcaagtggagaactaactgctttagctttgctcatgttaaatctttcaagaactttttcaacataggcttcttgagataaccaaaactgctcattcttcttgtcacgggaaatcctcattccaagtatttgtttcgccgatcctaagtctttcatagtaaaagatttgcccaactcttcctttagcttctcaat

SEQ ID NO: 92548 - DNA, 708 bp, Cannabis sativa
ctcaacatgcaagagaccatgtcacccacctggaggccatgttcagaatcctgcgacaatataaaatgcaactcaaccccctcaaatgcgtcttcggagtgggttcaagaaaattcctcggctttatgatgaatcagcagggaagtgaggccaatcatgcaaaaataaaagctttgctggagatgcgatctcccaccaaaccaaaagaagtccagaggcttacaagtaaagtcactacactaaatcgctttatatcacgtttcactgataagtgtaaagaatttttcttgattctaaaagggaataaaaagtttcagtggactaataaatgtgaagaggcttttcaggcccttaaaacgcacatggggaaacccccaatactatccaagccaattcctagagaagttttgtcaatctacctagcagtgtccaaatatgcaattaattcagtactaatccgcgaaaaccaaggtagacgtcttctaatatactatgagagtaagcgccttttaaacgctgaaacctgatatctgcaaatggaacgacttgcatttgcacttgtgattgcttcaaggaagttgcgaccttatttttaggcacacaacattgaggttttaacgaactatcccttgcgacaagttttagccaaaccagaagcatcaggttgactactcaaattttcagtagaattgagccagttcgacatca

SEQ ID NO: 92549 - DNA, 602 bp, Cannabis sativa
aataaaacaataatttaaattaaaaatttacatttcttttaattattaatattattttatttaaaaatgaaaaatctaattaaatattaatataatgagtataaagttgtaattgtatacgagcaattctatcataaaagtatataccttatatcataaggaccaaatgatgtaaaatcaatagaattataaaaaatattcttctttaatatttaatttataattttacagccaaaaatttttaattagaaaaataatcttgtaattttttaaaattacaaaaatatattctgttcagcaaaaagtaaaaaacaacaacataaaatcaacgacaattaaaaatcaactataaagcaacaaaaaaaatctcttgacaactataatacagctataaaataactaaaaattaatcagttcataattttcactagctatttttataaacaaaaaacttcaaagaataaaattaaaaaatttatgtattggtgtatttttgtaaattttttttaaatttttagtcgattatgtaaattagtctaaaaaaagcctccctactagtatgtcttactatagtcttatcctatatctattctatataaagt

SEQ ID NO: 92550 - DNA, 500 bp, Cannabis sativa
accttttcttaatggccatccacaatgtaaacctatccttgggaaaaagagacaatcccaaatcaaggaaaatctccatttcaaaagagtctgttaataattactcttacaattaatacatcatttaccttataattatattttatatattttctaatatattattcattaattacttacttttagaacataaattccaacaatacgtacaacaactgtcaacaatcctttcatcttgatccttatgatttgaactgatacaagcatctcgagtgcttgaagttgcatcttgatccttgaaaactgtcaacacatctacatcaaaaatgtagttatcatccaccacaacattagaatcactgctcttgtcttttcctgccttatttttctttttattgtctcttaattctaacattttttgattaagtgacccactttgttacaatggctatatggtgatacttcctgattttccttgatcttgatttggatcttgaatt

SEQ ID NO: 92551 - DNA, 910 bp, Cannabis sativa
cacaagatgtcactcttagttcgttgatgattgctaatggagattggaaaatcaatgaagtgagcagttggtttcacaacgatgacattccttgggttctaggcatcatcccatctatacacaaaccaaattggattacttggggattaactaacaatgggaattactcggtggctagtggctataaggtaagatttagtaatccggattgggcggcttgttcaaacaactccaaattaaaagctttgtggaagttcatttgggggtcaaggctaactccgaaaatgaaaaagtttatttggaaagtgtttaaccattggatcccgactaaggtggaattgaggaagcgaggaatgtccttatatgctaactgtgatgggtgtatgcagcaagaggaggatatttgtcacgcgttgtggtgttgtccaagagttcaaaaaatttggaagcagctgggctactccaaattcaaggaccaaagtgttcataatgcatcggcctttttgtggtggcagtgggaacatctctcaaaggaggagttcatccgatttgtcggtttttcttggttgatttggcaaagacaaaacaaatatatctttcaacacaaggccccggacaacaaatattggattccttgggcgatggagacaatagaacaacacctgggactgcaacaacaactaccagccgctccttcatccaagcccttaacctcctggcagcctcctcccaaggacatgtttctcatcaacacagatgcatcccttgtccacggtcaggagggctgtggcttaagtggggtaattcgaaactatgctggtgatttaatagttgtgcaactgtgtacattccaggttgtatggctcttaatctggcagaggctactgccattcatttggggactcggcta

SEQ ID NO: 92552 - DNA, 751 bp, Cannabis sativa
tctatagatatggttatatacacacactgaaaattactttgcaataattttttcttagcagtttttcttctactaacgatttgtcaacacaatctcctttgaaagtccaaattacataggtttttgagtgaataattaatatatgcatattatttttgggataaatgttccctttcttgagacactattctaacccagatatatattatctattagtattattttaaagaaaactttttgaagattttttttctctctgtatattatttcctatgctattatttaatattgatgtaagttttgaattttaatttgattagtttgattttttttttttttttttttgagataactgtaacaaatattgggtataaattaaatttcttagaattttttactcccttcctgattgacacggaactttagacatattgtgttcttattttttgtgattataattttggcgaattataatttagttcttgtgtgagttattggttattagagttataaagttatacaacttttgaagtcatcgattattgaattagtactcataaattcactagaggcactatttacatttgacaagagtcattctacattttcttttacatatatatatatatatatatttttactgaaaatattttttatagttgtcctttcaagtttttagagaaaagataataaatttgtaaaacaaattacgtgacattgatgataacagtggattggaatgtatttccag

SEQ ID NO: 92553 - DNA, 784 bp, Cannabis sativa
tagtcacaaataattttttattaggactaaaaatcatatttagtcacaaaaaatttatgttgtgactaaaaagttgtgactaaaagtaacaattttttgtagtgtggtttgcgacaatgattccccttctttccatatctttaaatcgggatacccgaacttgtactatcctcatgtacccgtaaacttgtgaagatactcacaggtcgggtctgacccgtctactttataggtgggttacaagtttaagaaataaaggctcgcaattacatgtccaactcgttaatctccaagcctgccctttaacaaatacgaaataataaaatttccaaattatacatatccattatattacctgagtactatagattaattttgatggagatggcaaacttaggcatgtcaaaaaaaatattgatacgaaagccaacttcatccaaaactggtttcaattactctataaataactttacaagaattttgatgtaccaatcgtcatccatatcattatataaatcatcgattcaaccaataaattatacagtattatttatctaaaaaaaattaatactaatctcataacagatacatcataagagtagctttaacgtaaatctggattgaatacaatccatttttaagtcaaccatcccaacaatactattttatagggcatttttcatctatgtacaactaaagttactatattacaatatatctgcaaaaaaacatatttacataatctagctaatacaaaatatatagggtacataattaatgtatt

SEQ ID NO: 92554 - DNA, 4175 bp, Cannabis sativa
ccgcttatgagaggtaaaatggctagccttcctaatgtaagagatgaacattggttggagtttcggtacgagaatcttcctattttctgttctcattgtggacggttgggacacccctttgagaaatgtattggctttttggaattagtggataatggtgttgaacctgatctcccctttggtccttttatgattggtgataaactccctagttcgagttacgctcgatacagaagtgatttctttaaggcaaatgtttatccttttcttacaagattggcttgaaaaactattgtctcatcaatccccaatgtaattatccttccaccccaccttttgccacttactacggctgaaaattattcacaatatctccattgacaaacaaaaagatattataccagacttaccttcccctttttcctcctatttccaaaatttgtcatcttctctgcggctacaagtaatgctaataccagaccacctgtccaaaatgtcactcactctatctctggtactcatgttattacaagtgattcaatcattacatctactaaagacaaaggaaaagctattcttagtgaagataacagtcagcattttgagtctttggctatgccttttaagaggcagatcaatcctgataaatttcgaagtgtcttaaagagatgtagaaatatcaaccaaggttgcatgtccaacgatgattcagccctcaacatgtttctggtacacagacagattctactgaggagacttcatccttttcagtggaggttgcttttaagcagccccgcacctagccatgaagatcatttgggcaacccttctacattcagacatctcaagctcttggttaatcatcagcgtccacatttattgtttatcatggaatctaaattacaatgtaattatgtcactcgtattcgttcttcccttaagtttagtaatggtcttgaagttcctagattgggcatgaaagggagtttattgttgttatggatggataatgttaatataaattttaaacacctattcaatgaactattttgatgcttttgtctcgtatgataacagtcaccgtttctactttactgcaatctatggtgcacctgaagctcatttaagaattcatacatggaatttgcttaaaaacttagcatcatccaccacctctgaaccatggctaattcttggtgactttaatgaaatattatccaatgaagataaagaaggggtcctttgaggagggaaattctaatggatgactttcgtacaacaattgatcattgtcacttgactgttattccttttacgggtgaaaaatacacttggagtaataaaaactacaatggcacactcattaaggaacgattggatagaggatttactaatgggtattggagtgatttctttattgattcccatcttacacacttggatttcttcagtttagatcatagaacaattgaatatgttgtttcagtacctgatcagatttggacagcggtgaaacacaataaccagtttcgattcgaacaattttgacttaaggatgatgactgtagagatgttattgtcaagaattggaatgattccacacttaataatccaacagcacagctggtacacagtttaattgcttgttcttctgctcttcagacctggcacaacaagaagaatggcaaaatgaaacgagatattaataatgctcaaaaacatacgactcatttacacaacagtatgaatgattctcatcagcacactactgatatgttgaatgctgagaaaatcttagatgatttacttgaaaaagaggaaaagtattggcaacaacgtgcaagagtggattgacttaaaagtggtgatgctaataccaaaattttccatgctaaagcaaaagctagacacaacaccaacaagatcaaaatgctccaaactagtgatggaaatgtacttcacactgatgtcaattttgctacaaaagcctcaagtttcttttctcaattgtttactacttcagtgattgataatgatgctcttaatgtcactttgcctgccatcacctcttccattacagcagacatgaatgtgagtttactgaaggatttcactttcgctgaagttgaagatgctctccattctattgctccacatagatccccaagtattgacggtatgtctgccatgtttttccaacatcattgggatatagtcgggcctcttgtttctaaatgtgtgctacaaatcttaaatgatggagctgacatctcggctatcaactcagcaattaattatcactttaatccccaaggtggagagtcccaaacaattgggtgaatatagaccaattagcctatccacggttatctacaaattggtctcgaaaactattgttagcagatttaaaaaggtgcttccagttgctattttcctaaatcaaagtgcgttccttcctggaagattaattattgataatgtgcttcttgcgattgaattggttcactgcctgaagaataaaaagagaggacgtttgggtatgcagctttaaagttggatatgagtaaaacttttgatcgagtggaatgacattttttagaagcggttatgctaaagatgggatttgctactaaatgggttgagattattatgagatgtgtttcatcttcaactctctgcttcaatgttaacggagctattaaatgatcagttatgcctcaaagaggacttcgtgaaggtgatccacaatcaccttatcttttcttgatttgttaagagggactctcagccttattacgttcaaacaaaagttatggacatcttaaaggatttgtcaatttcacggggagcccctttagtgtttcaccttttatttgctgacgatagtctccttttttgtcatgctactgaagcttcttgccaagcaattagtagggccttaataatatatcatcatgcctccggtcaacttctagatatgggaaaaattgttatgtccttctctcctaacaccactgatattttaaagtccagatttcaccaagtgctgggtgtgcctatttgcgaccttcatgaaaaatatatgggttaccttcttatgcagggcgtgataactattcagcaacataaaggaaagaatatggaagcttatgaactcatggcatgctaaacttttctctgtaggaggacaggaagttcttttgaaagcagttgtccaatccatccctacctacactatgagttgttttagcatgccaaaaaaattctgcaaccaattagaatcaaagatggaaaatttttggtgggggttcaaacaccaacaaatcgaagattcattggaagaaatagaaatttttatgccaatcaaaagcaaaaggagggctgggtttctaatcttttattcattttaaccaaccactcctcgcaaagcaagcttggcgcattcttgaggatcccaattctctattggctagagttttcaaagctcgatacttcaagaatgaagattttcttaacgctactaagggtgtcttaccatctcttacttggcaaagtatttgcgatggaaaagagctattagctaaaggccttcgctggaaaattggctacgaaaataaagtccaatatgctattgatccttggctacctgataatataaagagatgcatattgcgtcggttagcaattgacgctaactactttagtgtgggtgcatattagatgctaagttggtttgcgtcaaataccaactgacgcaaaatgtatgcttataatttttttaataaatttcatctttagcatcaggtttcgttttagtgtcggagttacaactggcacaaattaattattatttgcgtcggttaccaactaaagcaaaaaagtaaaagttgactttcgcatcggtcaacaatttgaccagacacaatgaccaacacaaaaagtcttttttgtagtaatgcagctatggatttggttttaactaccaaatcaaaattaagaagatggcctctgttaaccttctgcttaccaacattctttccctgagacgaaaagatcttttgaggccgatgttagtgaaatgccttcttcgagacaaggccaatctcccaaagcacacttaaatgccaatttcattcctccctctatttgtgtaatagtattacatatttatacta

SEQ ID NO: 92555 - DNA, 654 bp, Cannabis sativa
tttttgtattacaattttttttacttagttttgataacttgatttattttttttgtactattagaatgtttttttttcttcatggaatttgttgttacaactttattctttcaattttttttgtactattaccatgtatgatcaactggaatttatctaggattacatgatgtattgcaaatctactccactttaaaaaaattcaaataattgattaaagttgtctatggacaatgtaaagtcgaaaactgaacctttctcgtcagaaaggaaaattaaagtagcagttgtaaatgagatttaactcataaaacaacattaagctacatgcaaggctgactatataacgactcacattatgtaggcatgtattataaacgagacacgaagatggcttgagaagataatacttaacctaaaatatgaatagaaggcctaactattcatataggcaatcaaaaaatgtacaaattatttcataaaatgaattattcaaagtatgtttaagttttcttactaagttataatggcattgttgaagggtaaacgagatttcctttgagcttggctaaacgagattaaatggtagagtactcattttagtaattatattagtttactaaaatatcatttacaatgagctaagtattttaa

SEQ ID NO: 92556 - DNA, 909 bp, Cannabis sativa
tttttttaaaaaaaaatattaatctatagtgacacaccaaacgcgtgtgggtaaacgtgtcccgacatgctaagtgtgtcactatatcattttaattttttcaagtttaattaatatttttcaaaaaaaaaaataattatatataaatataatcaaatattttatctattaaataaataaataaattaataacatatttataacaaaaacctattcatatctctttctaactctctctctctctttctctgttcaaaaaaaaaaaatctctctcttcctttcgtgtaaacctagggtcggcgccacccctagccgagggtttcccagctactgtgctgccatggccgaccgacatttaagatgatctgaagcccaaacagttcaggtatttgggatcgtcgccccttaaaaccaaacccaggtactctttttttcctcctctgcttcttcttcttctttgagatcgacgtcgatctctttctcttcttcttctactgagattgtcgatctcgatctcatcctcttcctcttatttttttttcgtttaatttttttatcacagatctatgggagtacgatgtttgcatcaaccggtatggggtttgtaactacggtggcagctgggggtttacatcgacggtgatggtgacggtggttcgcatcggctaggttttcatcaatgtttgcatcaacggagttgtttttgtcttttattttagtttctggtttactaaatggctttagtaattaatctttatgtttgttttttttttcatttagggattttttttggggactcttcccttttagtgcctcttctagttatttcactattttttttatctaatttctctttgcttcttagtttgattggaaaaaatagtggatagttaattatgtagtcaattt

SEQ ID NO: 92557 - DNA, 2416 bp, Cannabis sativa
tttcatgttggaaagagttagggaagatgattgaagatgaatttcatagagttttgcttagaaattttctaggttcaaaaaaggattcaaattgccaatgatttttttttcttcattttgttgagataatggatgaaaaacaaaagagtaatttgcgatcctggtggtgggaatctcgtccataggttgtggtagaatgcctcatcggggtcgggtagaggtgcgccggagatgaaacctgtgagaagagagaggagtaaacggaaaaaaaaagattttttttattttttataatttaaaattaatttttaaaatattaaatgattatttaaaataaaaataaaataaatctatctggaccaatcacaacgtaccatgtaggtactcacctggtacttaacgtccaggttcctacggaagttccaagaccctaacagaaggtatttttaccgccaaaaatacgatttaggtatttatctgctactcggcataaaacttaaatatttatgccgcaaattactctaaatataatttgtacttataatgatatccataagtaggtagttgagtttaaagaagttaggatcctcatatctaacattgtcctcaactcacaacacaaatgaaactaatgccaccttgaatggtggtccatataaaacatgtcatcaagttttggtgtagttaatttaatgtgccacaagaaccaacaacaacaacacattttcctcaatgcatgaacagtcgattctattggtccaagccaattgcctccacacactattaaatcaatgcatttcaattttcatccaactctgtcctttttcactgcggtacgtagctgtctcctaattaaggtaaagctaattcataattatttctagtattctaatgattagtagatatatgctgccactaagcaacattagctcttaaaattaaagacacagagcatatagctaggatcattccttttttttagaggttggttgctcattcagtcatttgatgtagctgcagatctacattaacatcagtgggcctcatttctgatcaacttagccacaagagatgacataattgggaactctgtaaatcaaaaccagctggtttctctcatttagtatgacactcaactacctgcagagtagaaattatgaaatatataaatactattaatatttaataggtattacaaatgcttattatctaaaaaatttgaattttcatatataataaaaaaacttcatttttatattatatgggctaatgttattctgtcaagaaagataaaaaaattgaatttggcttagatattttttatatatttaaattaagaataaattttatataataagcataagtaaaaattaaattaacaagttaaataaatatacatttatattagagtgtataagtgttttaatcataaaaaataaccctaatcaattttattaacattttttttttacagtaaagataaaaagtcaattttttcgttgtattacaattatgtcccaaactatataaaaagaacaaataaatattatttattagtatatatatatatatatattaaatagtttgataatataataaataagatactgataaataaaaaatctacatactttcccctttcttaacatatcccataacaaatttttgtattaaaattacttcaaacaaatatgtccaaaacaaaatgcttcaaaataatacatatcccaagccaaacgtttaattgatgaaagataaaaagatactaaccaaactttttcaaacattttaactactattttttttttatatatatatatatcaattcatttatatttcaattcgaaattccttaagtgacatatatattattataaaaaataacagatatgaaaatacacacaatcgtaatttgtaataaattttagtaagaccgagtatcatcccacaaaaactgattatcaattaccaattaaatatgttttggtttctatttgatcaattaattaaaagttttagaaaaaaaaaaaacaacaataatgaaaggttcgagaagtaaacaatgagaaaataattagaactatgatccttaactattcttccttttacttaatgcaattacccaattcattttcttcctattcaattaactaagttgataaaaaataatttataatctagttaagacttataaactcagtctaagtaataactccctatatttctatgacaaaatcaaatcacaaagaaattgaacataaaaatcataaaaatatacaataacctagaatcttttgctctaaattaaaatgcaaaaaaaaaaaaaaaaaatcgcacaactataaaaattatcgagaaattattaatatatcatcgataagaaattaaaaaatgcaaaaaaaaaaaaaacaaaaaa

SEQ ID NO: 92558 - DNA, 570 bp, Cannabis sativa
aaaagcagacactaagctgtaagcttttgttacacgttagaccgactatgtctaaaccatttgctcacaagattaacttcttaaagttagtctttttgttccacatgcatactatggacacaaccccaaagaagaatctaggcaaagtctgtgaaacttggtgaatagcaagtggccaatagacttgcttgcatggtcgcttgaggggtgcccataccgtacaacacattaaactggcacaatgaacttattcagagaaattttaaggctttaaataagctactaaacctgcctctaagtcgtgtaggcatactttagcttgacaaagtaaatccagatcgttacctatcaaggccataagaagatagccaggatgatcatatgtccatcatagatggctttaaggctaaacaatagtagtgttcaaaatagagggcctataggcaaaataaagaacatgaaagcgttgagaccgaatatgagatcggttcgcatgcatgaggccaaggcgctgctagaaccgtatagccagaaaagacctggacagatctcctataaggttcacgtaac

SEQ ID NO: 92559 - DNA, 795 bp, Cannabis sativa
acaaaatgtgggattcaatcaaaacaaatcaattagtgcagccaatcaagctacaagaaatatggaagagaatttcccactattgaaggagaggccgaataaggaaagtgtgggaaaagagcaatttcgaactgaagaagggggaactgatatggcaaatccaattaataatgaggaggctcttcttattatagaaaataagagaaggagaatgggctttgccaatcaaagtgggcttttggttatggaaaatgtgggacatgggacaaatgtggaaaataccactgggcctaccgatttaatagatgtggatatggacgctgaagcaaatggtagtacaaaaaacttgtttggggtgggttctggatcacagacctgccaggaattatgaatgtgttaagttggaattgccgtgggcttgggaaccagcgggcttttcaattccttaaggagattgtgtctcaaaagaaacccaattttatttttctttgtgaaacaaaaagtgacaaaagtaaaatgcaaagagtggaccgtgctttgggctttgaaggaatgttcattgtggaagcccaaggaagtgctgggggcttggctatgctctggcgttttcaaacagagggtcgactgcttggttactcaactaaccatatcgacatcatagtttcttcaccagagagagacgagtggaggctaacgggggtttatggggaaccagttcgaaacagaaggcatttaacttgggatctccttcgattcctatcaagagactctaatctcccatggtgtgtaatcggg

SEQ ID NO: 92560 - DNA, 732 bp, Cannabis sativa
tttgcaaccaacggctttatgtccgggtggtagcttggtaatgacccaagtgttgtttttttcaagggcggttgtttctttatccatggcaagcagccaatgtcaacattgagctgctttagcatagtttttaggctcaacttcagaatatgctgcaagtacagctgctcgaattgaggatgtaacttgatatatgataggaaaggttcaattggatgtgatgtagatgaagcatgacaaacataatctttgagatgcttaggtttgtgcaaaattctaccagttttggtagtttttagaggtgtttgggctgctgttgtgacagcttgtttgttaggaccagtagtggtggcttcggatgtggaggctggagttgttgatgctggtgtactgtcattttgcagggtatttttgggaatggcttcaggagtagaagttgtgtgttgtttgtgggaattgatggtaggtactagttcttgaatgctaccagtatctgaaatgttcccttggtgagtttctggtgtggaaaccagatggtcagaaccacattggagtggttgaggttgtattttgtgagtagtaggatctggtgtgacaccagatgagttggagaactcggttgctggtgtgaaaccagatgggtaagatgcttcagttgtaggttttgttgtaggggcctgttgttgtattggtttaaatgttggaagaacaatgtcagcaaacaattggttt

SEQ ID NO: 92561 - DNA, 1271 bp, Cannabis sativa
aggatctgaataaaggcaatcctaaataaacagagtcacttttcatccttttcatgcctaggatgttcaatacatcatcagccattctgttgggaaccccttgcgtgaaatggaccgtagacttctgataattaactgcttgtccggaccaggcacagtactcttaaatgcagttgaggaagttccttgcttccttcaccgaggcttttccaaataaaataacatcgtccgcgaacattaggtgggtgatcgttggtccatttctagtgaatttgaacccagcgatctttctttcatcagtttttgccatgagaagtctggagagaacatccgcggcaataataaatagagccgaagatagggggtcgccttggcgcagaccgcaagttggagagatagaaccttgaatagttccactgaggagaagccccattctcttaacttcaatacacacctgaacccacttgatgaaagtatcctcaaaattcatattctgaagcacttccaagataaaactccagctcattttatcataggctttttccatgtctagcttgatcatcatgaagccttttttccctcgcttcttactcatagagtggacaatttctctagcaaccgctgtattttctgcaatttgatgacctttaacgaaggcagtttgggccggggagataatacacggcaggagatttcttagacgcagagctaagatcttggagatgcatttgtaggccacattgcacagtgctattggtctgcaatcattcaccccggttggacattctttctttggaactaacacaatgttcgtgttgtttataaactgcggaagctcaaagttcctgaagaagtgagtggccatatcgaacacatcccttctaaccgtcggccaatgttggaggtagaaccctgtggacattccatcaggcccgggagctctatcttgtcccatagatcgcatacacaattcaatttcatcctccgtagggatagaattcagttttgcattgtcttagggcgagatgtgacaatcatcaaggcaccttaactttgggagagaagccgttctcttgtcgatgaagatattgttgaattttgtggtgaacatttcagcaatatttttaggatctctttcccatgtaccatcatccgtcttaagttcttgaatgaagtttcttcttcttctgattacagttgatgccatgaagaatttggtacaactatcaccctgttgcagccatttgactcttgacttctgcctccagaaa

SEQ ID NO: 92562 - DNA, 1114 bp, Cannabis sativa
tacaaaatgtacgtaatatttatttctctagtaattttaatttttataaattttcgaagttttctgaagctccaaagattgattaattgtcttcattccattttgtgtcttgttgaagaaacaattcaacctgcaatgaactatacaattcaacagtaaatacatgattataaatttacattactaataatgtgaatttatacataaacaaaacttggcaaaggactcaattattatggtatatatatattattatcaaagggttggttcacttcactgcataattagtgtgcaaaatgagaaaacatgacaattaatataaaatctcatataagtaaataatcataaagagaagatgaaaagcaaaagaaaaaatttgataacaaaaatcaaagaatacagtaaaatataaataaaaaaattacctttattgaaccaaaaaaaactgtgccataaatttgaggagagctagcactctcaaatcaaattgatgaataatgttgatgccgaaaaatcaaataatgctaaacttgaattgcaaactttaaaaacctatcttcaaataatacattaataaatagccaatatataagagatatagaagtgagttttggagatttttgaaaaatttgttgaaatcaatggtggtttggggagagaaatggtgggtagtttttattttttacttggtagctcatctttatctttaataatgaaagaagttacactccactaaaattaatagaatttattttttattttttcatttttattaaaacgtacacttttttagaattgttaatattgattttaaattttatttttaaaatattaaagttttaaatatataagctctttagcaacactttatttttaaatgtgtctaataagaaaaataaatgaattagcaacacttatttattaagtgttattgaataaatattgttagatatcaaagttttaaagatattaattatttagcaacattttatatttaagtgtgtctaataacaaaaataaatgaattagccacacttatttaccaagtgttattgaataagtgttgctaaatacattttttgtagtagttataacttcttaattaaatcaacac

SEQ ID NO: 92563 - DNA, 679 bp, Cannabis sativa
actaagcgggctttacacaagtagggcaattaaaggtatgtgcaagagatttagatgaattcaactgtttatttattttgtttgtaatggttacagacggatgtccaaggtgtgtatgccaaggattttcaatatgaacattacatacaacaggtgtacagttgatattatttagtgatatagcttcttgctgagtgtagtatagtttcccttgctttttagctatcctagtcttcgatatcagtgaagggccctggacataacaaatggtaggagtaaatgttaaagtgagggatgtgttatgtaataatgcactgacagattgtaggttgaatttgaatgttggaacatatagaacatttgatagtgttatagtggaatttaagataattgtgccagatttttcaatggtcacagaagtgccattgggtaaggtaacttgtttatgagttgtcatattatgaagagaagaaaaacatgtaatatggcaacaaacatggtgagtagcaccactatctaggatccaagatgtaggagaaaagggattgattttaccagtaatgttgttgactacgggttggtctgatgttgaggcatcagtagcaggttggagttgttgggtcagcatggaaattagttgctggcattgtgcttgagtcaactgggagtcagttgttga

SEQ ID NO: 92564 - DNA, 737 bp, Cannabis sativa
tttttttttttttttagaaaactacataaactattatttttgataaaaaaaaaatttatacttctacgttcaattttctttttttactttttacgatattatataaagagagaagaaaaccatatgaaagttacatgaaaacaacatataaaataatatacaaataacaaaaaaacaataataaaaattacaatagtataacataaaaatatataagaagactgtattttatgtacaaaaaatcttaaaaattgtaaaaaaatatttaaaattccgtacaactgcatttttataattttttttattatttgtgtgtgtgttttttttttttttaaaaaaataatcctttttttttcctatttagaatccacaacctaaagactatcaaaattatcaaaataccaatcgggcctatgaattcttgagaatgcccacaagctaaggaaacaacaaatggcattgccatatgggcccaaacaaacaccatccatttgataatatatagtttataaattataccacggaaaattgattttcgcaaattggttttattaatttcatttattatacaaaaattttagtgggtatttttacaatacaccctcttaaaataagtgtatcgatgcacccgtatttattttaacatctagaaaaaaatttgggctattttcaaaaatatgagaaaaattattaaggttatgataaatatggcataaaaaataaatgccactaaatat

SEQ ID NO: 92565 - DNA, 784 bp, Cannabis sativa
acgacatttttcaatggaccgtcttgggttaacctatgaagtctatcatagcctatatgacctaatcgtaaatgccatagataagttgtatcatcattatcaatctactttcttttatggttttaggtttagcaatatttaaaaggtcattgttaagtgcgatttgtatttccaatcttaaaacataaatcccttgtcacatgtgagcaacacataacttaaatccattacgagaaattgtgcaaacagaactcaaaaaattcaatttataaaattgtgtttgtaaaaatgaaacactaatcaagtttctactaaaattaagaataaacaaaacattgtctaaaactaaaaatttcttctaaaacttgaggtgggctcttcctttagcttggaccgatactaactcgccatttccaactttgagcttgaactcctctacattcaggtagtcccaagtttcaagcagctgcaatgaataatccataaggatttgtcattctctaaaacacatgattcaaaaataaaagcactaccttcactcgaattgtttagaagtctgggacatcgttcttcctgatgtcccttctcattacaatttgaacatggaagagtactaccatcaattttacttgaagaagcaacattgttagaagcttcatccttaattcttttcctcttacacaggtttgcaaatctggggcggcattgcaatcaagttccattcataagcttgcaattctgcttctagcttatccatgtcgaaagagttaaaattgttgatcat

SEQ ID NO: 92566 - DNA, 751 bp, Cannabis sativa
atatatcaaatcaaagaagtataatatattttgttattataataatgattgggagattcacgttaattacaattgatacatcaaatcaaagaagtacaatatattttgttattattataataaatgggagattcacgtggtgctagtgaatgttgtctttttgcatcattatttttttattatttagtagaatacaactatttattatagtctaccaataatgtagaataatagtgttcaaacaaaattatgatcatacgccaaggtcaaataaatagatttaatatgtatttcaaaaaaattgtggtacttgattggacaagagaagtgattcattttatgctcatgacttctacattaacgatcttttagtcttaacaaataagtaagtatttcaagtctttctatttatgaattgttttatactataataaaattattttaccatctttttttcattttatctaatttttcattaaattatgtagtaatagagttttatttattgttgttttgtagatcagttttgtggagagattacagagactttgctgataagtataattcaaatactgtatcttccgatacctgttgtttcttggtgttgtttattttttcaggtagtatttctgtattacaagccaaaacttaggctcttttgctatcgacaaagaaaggatattttttaatgagttggaagtgctatttgagaatattatagttttattgtctaaatttttgggaacagttt

SEQ ID NO: 92567 - DNA, 1851 bp, Cannabis sativa
  modified_base (918)..(923): a, c, t, g, unknown or other
atttgtatgcccccgattctagaacttcaacaacctgatatggtccttcccagtttgctccgagcacacctgccatactgtctttggtgttcaaaaatactcttcttaggaccatttctcccacaaataatttccatgctttcacttgtttgttaaaataccgacctatcttttgttgatgggctattagtttcaagtttgccgcagttcgcttttcttcaacttcatcaactgactctgtgaggagtacatgattagcctcttggctatatgaatcttctgtgggatggcaatttgagttctacgcggagtatagtttcatatctatacgtcatggcaaattggttctgtcttgtcactgttttcttagttgtacgatatgaccatagaacttcaagaagctcttccggccagtttcctttagcatcttcaagtttcttctttagggtttccttaagtgtcttgttgactgcttcaacttgacaattttctcagggatgtgcaactgcatagaaactttttatgatcccatggttcgcatagaaatcagtaaaggattgactgtcaaattgtttgctattgtccgagactatcttgtatggtaatctgaaccgaaaaattatgttcttcacaatgaagtcttgcacttttttggacgtgatggttgccaatggctcgaatttcgtccacttggtaaaataattgactgcaaccactgcgtactgcactctacctttgcctttgggtaattgttcgatcaggtcaattcaccaaatggcgaaaggctaaggactttgcatctcaattagttcgttgggcagagcccgaggtatctttgaaaatctctggcatttgtcacatttcttaacgtaggccttggagtcctcaatcattgttggccagaaataaccttgcctnnnnnntttcttagataaactctgcccgtctgcgtggttgccacaaaatccgtcatgtacttctgaaaaaagtcgtacagcttcttcttgtgtaacacacctgattagtggcatggagaatcctcttcaaaacataactccctctacaatgatgtactgtgcagcctttcgcctaattttctgagcttcgtttctgttatctgggggctctccagtgttgaggtagactgctattggcctcatttagtttggggatgtattaatcatttcaacctctttcatgccggtaatactaggtttttcgagaagctagataggaatcagatttgctttatcatttatgttgcggctcacaagttgggctagtgcattagcagttgtgttttcttcccttggaatttacttgagaacatagcttttgaattgcacgagcagatcatgtatttttctcagatgtgctatcatcttttctccccatgcctcatgctctccagatacatgatttaccactaattgtgagtcactgtagatctcaatgtgttcggctttcatctcaatgtgttaggctggcgataagagcttcatattcagcttcattattggatgcgttaaatccaaatttgaccacagcgtgcaggtgttgcccccccaggtgtgagaagggcgattcctgcaccgaacaactgatctgtagctgaagcatccacatgtagcttccaagttggcttatcttcattattgctcggctgaggtatttttactggctctaggttactttttgaagtgctctcttctttacccatacattcgaccaaaacatttgttgaggcttgtcctttaatcgctattcggggctgaaagataatttcgtactggcccaactccactgcccatttgagcaatcgtccagaggtgtccagttttggcaatactt

SEQ ID NO: 92568 - DNA, 545 bp, Cannabis sativa
gtaattactaattagtgtttaattgccttgattaggcaattattattagttaacttttctctcttttcgatcatcattgccttgattaggcaatcattgtctaattgccgcaattagacaatcattgttagttaatttttctctctttttggttatgcgtcttagggaatatttctcttgttttcgggatcttccaccttttgggtgaggtgtcttttcttctcgaatgtaccacaaagtagctctagtggttatataaactgaaattccatattttaatatttccagtttattatctaattaaatacttaattaaatgtagaataatgaaattggtactgatacagtttttttgtagctacagaagtcaattctgtaattctagaagaaaccagaaaaacaaacagtgcagaaaagtaaaaatacacaaggtttttgtacgtggtttcaacaatcctttaaaattgttactagtctacggagtcatgcccagagataagattcattagatagatctcaaaaatacaaagtaattgacttatgca

SEQ ID NO: 92569 - DNA, 505 bp, Cannabis sativa
  modified_base (478)..(479): a, c, t, g, unknown or other
aataacccactacgtctcaccagtagtctatctcactgctagaaaatagcttcaacaaataaatttcaaagcttacctcagttattatgaaactgatgctgggggcaacaacaacaaaactaaggcaaccattgagctagtctttcagcattccacctacctgtctcccaatagcaacatgcattggttgtatctttgatcaaccaaagaatgaactgctcatcagtgaggtttaaattgctaacatgatagtggaaaaggtgattattaacaatggagcatcaacaaataacctgttcaaatagaccctaaaaagaatgggtttgtccctggaagattctagagccatgcaagcaacttatgtatggttttagtgaagttgacatcactccctgtggtgaaatcagattaccactaacagttgaaattacatcgtggcagaacaccacgatgactacctgttgggttttatgccctnnataaaactctttacaatctgattagt

SEQ ID NO: 92570 - DNA, 538 bp, Cannabis sativa
atctctcaagatggtatcattgtggctccttctaaggtagactctattatacaatgaaaaataccaaagaatgttaccaatttgtttcaagtttccttaggttagaagttaactattgtcactatgtaaagaattcatttctgattgttatacctttggtaaagtggacatggaggaaagtaaaatctgtatggggttaaagttgttaagaagtgttctataaattgaagtaaagattgaagacaacatactctctctatgcttaataatgaggaaccatatatggtatccactaatgtttcaagtacaagcttaggaggcgatttgagggaaaatgacaagattaaggagattaccctacccatgacttagacttgttggtaattcttaaagatataaagatgttctttgtatgagcaaagattcaatcatattcatatcataagagcttatagtaactctatacttagtgatctgaatttgaggcaacaaagatggattgagtttatggaagattatgatttcccttcataatatt

SEQ ID NO: 92571 - DNA, 602 bp, Cannabis sativa
  modified_base (471)..(471): a, c, t, g, unknown or other
ttgcaatcgaaaattccatggcagtttgctctttgaggtcgctaagggtctaaggtttccccctgccattaaccccgtatgcgttggaatgtggctatgaggccgtattggcacaatagtttagttgtcaccaagtcctctacccttaactcttccttggaaaaaggctcgtaaaaggtgatccgttgtcttaactcatccgcgagctctgttttgggaacgaagtctgcaagaaacaaactagtgttaaatcctgaaatggagccatctttcaagcattcaaggagataaaataaaaataaaaaggagtgaaagattatacccaaaattttgaagtccaaggagagtggtggaacacgccccatgggaaaattggttatgaaaaactagtactcacggtggtctgggcaatgagaagaaatgctcgtgggacactatgttggaatctattttaccaagatctagatttantaacaagtatgtttttaacatcctgaacttctaaaagattatgaaataaacacataaaaggtatgaggaaccttacggtggttgcagcggaattaaatggctcattgcgctgagatctctaacccttgtat

SEQ ID NO: 92572 - DNA, 1244 bp, Cannabis sativa
tataaaataagttaaataattaagttttaagtaagaaattattttaatagctaagagttttaagaaaaacaactacattatcattaatcctcaaaataataaaaaaattaagcttttaagacaattttttttaattgaaaagagtatatgctgtatataagtttttacaaatttgttattatttttttaaaaaaaaatatgaaaattgttcatcaatgacttcaaaacatctatacgaggaaatggcaagtcgagtcgtaaagtagggaagcaatttaagtcacgatacacatgtttgacatgaatacaactcgatattttgcgagctcgacacggcgacacgaaaattttgctacatatattttgtttgtcaattttttatgttacgggtcgtgttcgtgtctgtcatctaaaataaattttaaaattcaacataatacgaagattatatgatgacattaagattaacaattaattagtttacaacccgccaacacaatatgcgattttgtaggttcaaaacacgaacttattcgagtcgtgttcgtgtacgtattttataaatttttcgagtcacgtgtcgtactcatgtcaacaactttttagtaaatttaagacctcggcacaacacgaacatgacacaccaacactaattgtcaccccaccaactataaagcatgactatattaaaagaatagtcaaaatttttaagtatgttttaacaaattttcaaaaacaataaaagaagaagaaaaagacaataatgtaagacaaaagaaagtgtaaaaatatgattaggtaggttccattattactatcatatttcttcaattttattaccattagatcaactatcaaaggctagatcaacaattttgttaccattagatcaacaaaatcaagatctccaccatgtaaatatcctatatatctttatagtcctatccctttatgtatatatattgttagcttggtttgaaggtacagtgatgttagtttgtgccgttaataaaaacctcacaaaaatgttgatacagaggtgcgtgtttgtttgttatctttcaactttgtcatcatctcaagtgattattatacatcgactgttaattaaggtttgcttgtgtgtgtatctatataatattataggtccgtacgttgtagaccagtactgttctattattatttttgaaaagaaccactggttctgttattagttataacatatatatagatatatatttata

SEQ ID NO: 92573 - DNA, 2374 bp, Cannabis sativa
tattctttaaagataaaacaaattatattggaaagtatatgtatagtattataattttcacaatttttttttattcttctaattaatttcacttataatgttaaacattaattgcttctactcatgatctccatccttggtatgctctcttcatttatcctaccaattttctttcatatcaatcacatgttagaccaccttcaagagaattgtactattttggtgtatttatattttacactaagttggtgcagaattatttattgcattttagtgctacaattctaataatttacacaaaatatcacattaaataaatatattttgtttaaaaatattttacattttatactatttatatttataaccaaaaaatactaattaattataatataattatgtatattgttaacaaataatttatggttaatttttaaagaaaattaaaaaatatttaaaatgaaaaaaatttacacgtcaattaatttagtgtaaatttaaaacctaacattattactagtgtgaaatttagtgcacatgtaatttagtgtatgtttagagtaaaataatatgaaattccacactaatttagtggtatgatgtagtaccctttaataaagaagctacttagcaacgagccatgtataagataaggagtccttaaaattaagttggacagtaaaatttattaaaactaaaattttaggaatttttgtttatataaaacgtattttttataagaaaaagtctatctaaatataatttataattatattttaattaatggtataaaataataacattattttttatttaaagtgcatgcatgttagctaatgtacagcactaatgttaaaaatagtatagtacaataattcaatttatttattgcgactactcaccgatttattactctttatttaccttgggctctttgcagaccataaatgatgttgccttgggagccacccaagctggtttatcaaaatatctcaatagaagatatggtgagaaaatttcatcacaattaattatctagtagatccacctcacttaattttagtaatacatatatatacatgtatttattttacttttaatataataataaatatcagtacgtaattcattcacaaaaatgaaaccaacatatttgattatttttctcatgagttaggtatattgaataagaatgatgtgggggaaaccgagaagaaaaacaatcttccaaagaaaattcggttaagatcaattttattcatcaacattagaccatccccaggaattcaggttagcatattttattatagatatataatttattctatatatgtaatttgttataattttgtaaatatatatgtatgcaggcattagcagatatgatggagaaaaacacaaaagcaaaatggggaaattcatttgcatatgttctccttcccttcactataggtttaagggatgacccattagactatgttcgagaagccaaatcaaccattgatcgaaagaagcattctcttgaagcttattttactttctctatcattggattagttttcaagttttttggcatcatggtacgtatcaatatctaactttataattgatcaaattaattaatataattaatgcacactttctaattctaatttatttatttaaatataaatatataataacagtcagctagtgcccttttcgaaagactattcagtagcacaaccatggccttttcgaacgtagtcggaccacttgaggaaattggtttctatggtcatccaatggcttacctggctgcaaattcttacggccaagcaaatgtaagcattaatattattaattacacttacaaaaagacagtactattattgagtcaaacatataaaagctaagtgatattatatttggctttttaataaaggtgttacatatataagaaagaaagtaattattatttatttatatgtaatttaaaaactaaatcgaaaaaaattggggaccattgccaacccgagctagtcctctacctatacttattattagctatgttgaagtatagtgatcgacatcttctataaatgttattcatggattaaatataaaatatcaaagagtgtaatatttgaaaggtaatttataagtaaaaaaatacatactctaaatttacaataataatcctctataaaataatatttttttaggtaaatattattttaaactatatgtattttgtaaaatttactgtttagatcttttgttttaataaatgagaaattagattatgtatttcttaaataatagggtaaatactattttggaccttgtgttttacaaaagttaccaattaaaccctttattttgttaaatgaca

SEQ ID NO: 92574 - DNA, 501 bp, Cannabis sativa
caaaaaaattattttttttattatcattttttatcaaaaaaaatatatttttattattatattatttaaaaaaataaaaaaaaagtatatgatattaattaaaacttaaaagtactattaccgtaattaaactaattataattaataataaattttgaatattttgattttttttttgtaaataatactcatattaaatactttttaataaaaataattattcaataaaaaatataaataacaaaataaaaagtaagaatataattaaaatattaatatatataaatatatatttgtttgagccaaaagataatattggtccataaatactttgagatgttaagaaaataaaagtactttgagataaatacgtaattttaatgctttaatttccttctattctttagttacaaaaataaatacttatgctacgtgacattaatatatacttgatccaatatatctatagtaactaaaattggaggtatatatatatatata

SEQ ID NO: 92575 - DNA, 792 bp, Cannabis sativa
aagaaactgatgatattatatgcaacattaatgagttgtggagggtggaggctgaagttttttcgaggcagggactagaggagatgagactagttgatgggagtgatgataagctagatgaactagaaaaggaagaagcgagggaagcagatgagatcatgattgaggcaacttcttggtcaaatattgttgaatccatggctgagatgggtatggaaattacacaagaaaacgaagatagtgatcagaagacagaagaggtcaagaaggctaggaagaaatgcagagaattgaacaaacttactttcaacgtaaattatgagaagagttataataaaccagggccaccaaacggttcattatgaagattctcacttggaacatcagaggcagcggggacaaaggaaagagaacagctatcaaagctacaatctgcaaagctaatccagatttggtaatcttacaagaagtgaaaagagcaacagtggatagaaggttcattggaagcatatggagatccagattcaaagcgtggattcttattccagccatagggagatcggggggaacgttactgatttgggacactagaaccatctcggtactagactctttggttggtgaattctcaatctcagttttgattaatgcagaaggtaaagagccctggtggttttcgggagtgtatggtccgtgttcgtataaacttagacctgagttctgggatgaattagcaggtttaagttcaatatgtggaaagtcgtggtgtgtggcgggagactttaatgtgac

SEQ ID NO: 92576 - DNA, 757 bp, Cannabis sativa
aaccatgcaacataaaataatttgtaatattttattaattagtaaatttgattatatttaaatgagatttatttagggctcaaaacccaacagactagcagtgacaaatggttcgatggtgatttagggttgtgatttgagtttcagtttgggtttgtactctcaaagtacagaatctcaccaaaataaaggaaagaagaaaactcacttgggaagagaaagatagagctaggcagtgggttgcgagttgagtttcagttagggttgtgatatgggtttagatggggatgcacactttaatggcgatctccaatgatggtctctaatggtagtctcaaatggaagtctccaatggtggtctccaatggaagtcttcgatggtggtctccaatagtaattctccgatggtggtgtccaatggtggtctccgatggtggtccctagcgccagagcaatggtggtcttaaattatggtaccagacgaaagtttagagaagaaaaaacaaaaaatgagccttgtcataaaaaagaatagaacttgttgctagtcagtttctcttgatgtagtaatctgaatagagcttgtgtaataacctgttgcacgtgcatgttatctctttgaggtctactgtccatattttttcattctgattacctgaaacaaatattcagtggttgatttaacctgtgtaatttgaaactagtatttgttaaacataccaaacaacagtggaacaacattacaaaaatcatgaca

SEQ ID NO: 92577 - DNA, 1055 bp, Cannabis sativa
  modified_base (50)..(51): a, c, t, g, unknown or other
aaaaagttcagggggcacgatttactacatgtcaaagttcagggggaaannttactaattagcctaaaaattaataataaaattatgcataatgtaaatttagcatcatagtgtttgaaaaaaaaaaattagcatcattgtaaatattgttgcaaaattggcagcacatataagaagtaacacattattattagtgtattttaatattagatttcacatatttttgctgataaataataaaaaaaaattactaattaattatgagatgacacattggatatgatatgatattatattttgattaatctaataaagtaaaacctttattcaagaatatatttgagactaagtaaattatattctatgcccaatttgtgattcacacaatgaaacaattatgcatgtgctagccttttgtcctattgcagctcaatgttgggagaaggctgctattcgaattcctacacagcaggacaccagtttcttggactggtgtgtctcgattttcagtagtgcaaacacggcaacttgcagattgttttgtgtcttatgttggtccatttggggagctagaaatgacaaagtatggaaaaacaaagattctagtgcctcatttatttttgctttcgctgtttgttaccttgaacaatggacttcggcacaagctccttacttggagacatcacggactggtttactagtcggggatgggaatgaccgatggtgcgcaccaaatgctaatgaaattaaggtaaatgtagatgcatcaatatttggcagtagccaagactatggctatggaatggtggctagagatgaacatggttttatgctggaagctacttctcggctttgtcatgggtatgttcgaccagagttagctgaggcaattggggttcgagaggctttaagctggataaaaaataaacaatggcctcaggtgaccttagagactgattgtttggtggtggtacaagcgattcataatccaactgttgctatatttttaagcgctacgcaagtatacgcaatcaagtagtaaatctcacacaggt

SEQ ID NO: 92578 - DNA, 768 bp, Cannabis sativa
gaaacaattcagaaaattatatgtcaaaaaattaataattcaattttttaataaatattcatatatatattttgtaaataaataaacaaataattaaaaataaatattctatgttccacaatccactaaaatagcatgtgtctcaatattataaccaaccactattcaagattttaagggtgcatggttgtgaccaatattagggtgtccattgtagaactacccaaaaatttattattttttaattttttaatttttttttcttatttttaatttaattttttaattattaatattaggtagactaataaaattttgccacgtgtaacttctatacacctagcagaccattttggctcttaacaaactaaaatagacggaaggagtgttgaccaaaacgattgtggaggataagaagttttgccataatttttccagtctaggggtttgatcatgccaaatgtcaaagttaaggaaatttgaccgcaaattaccctcataaaaaaaataattggaaccaaaatatttaaattatgttaatttaaaaatgtgatgcaccataaatatgcacacacaaaattgagaggctaaaggaatttaaattttggggccttatataaataatttaagaattattaaactaataattactttggtgtactagtaaaattttttagggctcgtttggaacgacgtattaggtcgtattgtattttatgcaatatttttttatgtaaaactatatgatattaacttttatggatacct

SEQ ID NO: 92579 - DNA, 2910 bp, Cannabis sativa
  modified_base (317)..(319): a, c, t, g, unknown or other
  modified_base (2232)..(2237): a, c, t, g, unknown or other
  modified_base (2530)..(2535): a, c, t, g, unknown or other
attgtagggtagtatatcaaatttaacaaaatgacccgtaaaaagaaactcataaataaacagagaacaaaaccagaggtaaaaaagaaatcataaaataaacagcatgcatgaaagagaagcaaataaacatttaaacccacgaaaaggctactttttgcttccattagaaaaagaaagctagaagaacgagggtcatacaattatatacataccactaatctaccgtaaatacattgtgggaatcaaccacaaacaaataatcagaaactattttgaaggtcacaaacgtaatccaaatattggggttcaaaacnnngcaaaccaaaccaagactctaaatattggtggcaatcggatgtagggcaatgtcaatcgtatatattttttgaatttaaactctgccaaaaaaatcgtatatattttttgaatttaacctcagccaaaaaaattgttattttcgaataaaaattaaaaaaaaaaattcacccactaattttttataaaccaagaattcatttataccacattttatatagaatagatattatgctctaattaagtacacaaaaactaatcactaaacaaaatttgatcatttgttaattcaaagcctaaatcgaaccatacctgtctaaacaccttcataataacatcatggtactcatcagaattcaaagtgagataacaagccaagagttcttcaaactcctcaggttgtgtaatctttttctccataatcatctccaccatggattctttaaagtccttatgagggtcgtatgaacactttaccacagcaaagctttccaaaccacctgtcgttgactgaacccttgtactgatcacttttctgtccatcttcatcttcatcttcaactttgctttcttcatatcctctagtgctttcactttgcatgtttcgattctcgacaatgttcttggtgaataagctctcatttttcctcgactctgttttggctttggtctcttcttctggtcctgaatctgatcaagaccacattctctgcttacgtgaacagatttcctctgtttctcaatcttgtcaatcttcaactctctcaactttctccaatcaaaactcattttctcttcctcacattcttctaaattctccgcttcttcgattgttttaagcctcaaatttccgtccctcccagtactcgttctctttggtgtcgtcgtttccatctctctcgtaccaaactctcttctaagctctaaaactcttctgttctcctttgtttcacatatttcatcctcagcgtctttccctctgcaatttggacaattcgagaatggaacttctcgctcatcataccaaactgacttcaaacaaacattgcttggcttcttcatcgtcttcttattcctgttctttttcttcttcttctccacagagctattatctttcctaaacgacagactccaaaacgtatcgtcgtagaagctaccgaggccagagctagcaacagtttcagtggccaaagcagcaatctttggtgggttagtggagggaagagaagtattccagtttccttgtggggttccctttataggttttggccctgagtgactgctcttctgtttgaacttcgaaagccatgacagaggaaagacatgagagatcacatgtggtcgaggagcaggagatggagttgaagaagacgaagtaaaaggaggagggatggtctttttccttccccacttcatcattcggtaatgggaattgtagtaaaagaaaacaaaaattggccttgttcgatagtatgtaattgcttaatatataaaaatatttacgaaaatctacttctttggctttttgtaagaagttgcagagaacaaaatgattgaaaaacaaagaggggaggagagagttctagcaacggaggtgggacagttagaagaagagagtaaatactaaaaagaaacgtgggtttcacagtaggtttattttttttaattattattttatttttcaaaagagagacccgccctaaatcttgtgaccactctcccacttttttgtttggcaggttcacttgaaaaagatttctgccctttatggggccaccaacctcacatatagccaacaaattaaaaaaaagaaagaaaaatagaaaaagttaaaatgaaagttgggtatatctttaatcctctttgcaaaacaccaaggacttgtttgttacgccgtataagggtcgtattgtnnnnnntaataaataacactatgtttagataaaacaatgtattgtattaaatattacaaccaaattttttaatacaatgtatgatgtattctttaatatattatgggatcgtttggtttgccgaattgtattgtattgtaatatattgggttgtattgtattggattgtataattttaatacaatactatgtttggcattgaattgtattaggtacattgggttaaattatataatgtttggcttacattgtattgtattaattaaaaaatttgtgaaaattcaaaaaaaaaaaaaaannnnnntgaaaaaaaaaattaataactaaaaaagaaaattaaagacactattttttgtttttaaagaataaaaaaccttaaaatgttttaaaaaaaaaattaactaaaaatactatttttctttaagaaaaaaaagatatcttatgtgattccaatcccgaatattaatgtcaattccgagtaaattgtcataaaaaaaagtaaccaaaaattgttagaaaaaacaaagtttacatacctaaaatagacattgtagcgctatcaaagtttcaactattaaataaagtttgaccgaccaaatcaaaatttaaccaatcaaatcaatgttcaactgatcaaattaatcttcacatattaatctaatttctttaagaactctgg

SEQ ID NO: 92580 - DNA, 1409 bp, Cannabis sativa
catcggctcgtcctcacggttctttagctttggcctttcccttacctacaccatgaagcacccgtgagtcacggagctcagcaagaaaaagtaattaaaacaataatcattatgacatatatcgatcaagcgtaattaatatatttaaacatttacaccataatacaatcacaaccatggtactttataaagtactcttaccattcgttaaccacgagctgtatatgtcactagcgttgcctgataaaggaaacgataagaaacctatccgcgatttcaggagtaattactcgtaacagtaatgacagtttctcaaccctcagtcataatcgaggctagacaaacaattaatcagaatctcgatcataatcgagatttacaatactcatattaatcacttaatcctaagtgatacttaatactctttcttacctcagtccaaaactcaagtgtgcgggccgacttgagtttaaaacaagctgggcaatcccggtcctatgtcaagacagccaaaactcagtaaaagacttaatcaaattttcgataatagactctaattctcattaccggacacaccctacttttcttgatcaaactagcttaaatatatctctaaaacaccctgaatttcactccagaagataccccgaacctgatcggacttgaggagaaaaaccaaaaattcctgtctactggccaaaccggtcgaccgatttgatagttgcctgaccggttttctgggcatccatggggatttttggttttttttcaccccaaaactgatctaacctccatcaaacctgctcaaaccttccagaacagtccaatatcacaaatacaacataacccaagcttcaaaacacaatacttcaatcaattgatcatttacacaaagttacatactcaaatgaatataaagctttatctaacttaatacatgctaagcagcccctatttctattcaatccattccaaactagcttaaaaactaacctaaaagcttactccaaccctaactaacctcacagcccctaaaacctaaaatctctaatcaaaagattcactaacactagaaattaagaagagtatcaagattttaccttacaaattataggctaaaactaggtttgattcctagcagattttaggttgaaaagggctgaaattcagtttccccctttgcttcttcttgagccgaaagagaggagagagagagagctaggtgtggaaaatgaatatctattcctaggtttttctatttctattccttctttctttctcatcgaataaaataattaaaaaacaaataataaaacttaattaacttttaatgcaaataatacctcagcccaaaatgcataaaagaaaaaataccaatcttgtagaattactaatttaccccttacaaa

SEQ ID NO: 92581 - DNA, 749 bp, Cannabis sativa
aagtcgatgagattgagtagaatgccatgattactattattgttgttattatttaccattgtacgagaagtaccaattatctcttcttcctctccattgttaggcacatccatttcaggtagaacgtctatgactatggatattggcaaatttgacgtagttgagaaagagagacaagaaaatgcttaaagaaacttaattacataatgaattcttatataatttttaggattgtatacaaatatctattctgacagttatatttgtcttcttttccgttagatgttatatattttttttagaaaaaaaaaataagtcaaaatttaatttaaaatactgttatatcacttaccaatatattaagaaaaaagaaaaaaagaaaagaaaaagaaaagatttttttttattattattatttaaatttgatttctccctttcgatttttcgattttttttttttatttctgcagcacatgtataaatgtattcatttataataaatgatttttttttttataaatttatctccttagtatccgcttgttttttttttcttttttttttttaaaataaatttattattattattattattattggcaagatgtttattctaaacatcgaaataaattgaccaaaaaaaagggattttttctattttaagctattactactcaaaataaacattaatataattataaggagaaaataaatatttatactatttattgatttcaaaatacaatttg

SEQ ID NO: 92582 - DNA, 615 bp, Cannabis sativa
ggaggggacttagctacactggacctgctcatcaaaggcttcagtcaactagaaaagcccacaattaacataaagattaatgaaacttcaagattatttagtatgtattattaacagaacagaataatcaaattaagaaaatgcatgacatttttctttctttttgaacaatatataatcttgaaatgaaacttttcagaataataagaattaaagagaaaatgaaggagaaaatacaaaccaatgaggttgtaaacgaagcagggagaaaatgaactgtacaagagtttcctttgaagttgaaaagcagagaagaaatcttggagatgagaaatggcctttctttctcagaaaactcaaagaacaaagattttcaagctaaaaaaactgtgagcttccactatatatatacttagtgccaacggcaattgcacccgtgtttttctttttcacggatatatttttcataacaaaaataaaatatattgggaaattctacaatacatatgtatttattgggaaatatttttttttttcacggatacattgatgcactcctatctgttttagcacccgaaataattttttaattaaattttttctcatggtcatgta

SEQ ID NO: 92583 - DNA, 1353 bp, Cannabis sativa
ttttagtagttgttcggcccatgggcctttttttttcagtacaatatggccgaccaagtggcttttaagttttgtaatatttcattttgtttcaagataagtagctaaccgaggagcttttaatcctaaagttatcatgctttgttatcctttaaaataaatattttctcttcagttaaataattacacatgcacatgtttttctgtttttcgagcttgttatttacctatgctttgtacgggtagttgcccccaagagaccgagtagacttatgactcttggtcacttgtattgcacaagtttgattttgtctttttggataccgggttcaagcaaaccctttgtacacatttttaagtgtaattacataacttgctattgaaaaaaaaataatagacacaattaaaatgataattataatatatttatccattcattagtttggatattttgttaccgtagtaacatacatttattaaattataaaagctattatatgcctaattaaaacataaaacaattatttttctagacggattgtactttaaagatggtcatccgacctgagtgccagtcattttttctgaacctttgagcgaggtctgctcgaaaggccatctatttaagaatagatgtttgagcattataaactttgtaggagtcatcagaccttgtacactttttggtagtattttcttaaatgcttcccattccaatacattggtatcagaaccagttccatgttttcattataccgaccaagtttatatgctccagaatttgtgacttctgttacttgatatggtccttcctagttaggtctgaacatgccagccgcactgtcttttgtgtttaagaagactcttctcaggaccataccccttacaaagaattttctccccatgtaagtaccgagccaccttttgctgatgaactactagctttaggtttgatgaggttcttttttctttaatttcatccagtgattctactaggagggcgtgattggtttcttgatcataagtttgttttatgtgggatggaggctctaactcaacgggaaacattgcctcataaccataagccatgacaaatggtgtctgcacgattgttatcctttctattattcggtacgaccacaatacttctggtagttcctccggccaattccctttggcctcttcaagccatttttcatggtatctttgagtatcttattgactgcctcgacttgcccatttgtttgagggtgtgctactgcagagaaactcttgatgattccacgtgccgtgcagaaatctgtgaacatttggctatcaaactgcttgccattgtccgagacaatcttgtgc

SEQ ID NO: 92584 - DNA, 643 bp, Cannabis sativa
gttattaccctagtgattaaataatttaaaatgctatgccatgctatatatgtcgaagtaaagaataatgcgttcaaggcataatttggttaggctcggtaattagaacggagataaaccattctaaggccttattgtaaatagacgtgtgagcgtaacacgtgggtctatgctacatatacataaataggcgagtgagcgtaacacgcatgtctatgccaaatagacaataagtgtaatggcattaatatatatgtgatatgttttattgtgtatattgttatttatactattttactgagcttgcctcacgagtgctctactgtgcaggaaagggtaaatctatttgtaatcagacatgagtttgagagcttggcgaaggattgtacatgttcaggccatactagaccaagcgggttgggtctaccagcgaaagtatattttataatctcgaattttgccgcttaggtcggtatgtaaattaacttgtaatattttacgaaaaattttgtgggatcccgaaacatgttctttttttggattgtttgtaatctcggtttttgccgcttaggtcggtatgtaaattaacttgtaatattaaagaatcctgctcttttcttttctagtaatctcggtttagcgg

SEQ ID NO: 92585 - DNA, 949 bp, Cannabis sativa
ttgttgtttttatgtttttgtgaaataatcccttttatttaatcttagctattttttttttttttacgtttgtagcccttttacattagctattgttatgagtgctatagggtagctttactaccctttcaaaaaaaaaaaaaaggtattttcataatgttgacgtagttttttgtcaactgatctaagaagatcgtaaaaataagaggactggactagatatatattattatattggttaaaataaaaccacgaaagtacacagacgacactaagatttatagtatttcatcccatatcgcgatagtaatagcattacgtctactttatattttattatttaaatccaagcacaccagagttatgttttcaagagtacttagacaaaattataagaaagacttatgggtgaaatctatacaaaagtttatcaatttatgactcttgggagcccaacaattcacaaagcttagtgatggtgatggtgagaccaatatttttaggaacaatggtgaaaagaaagggaaaaatagataatggtctctaatcttctaggaagttgtgtctcaaatggttgagaatgactttgcttcaaagagagtagtcacttgaaggaattcaaggtgaaagtgtttgtgtagccaaaaaagtttctctttacttaggtctataactatgtatatataggtctagggttaggttgtgattccccacaatccaggaaatcttaccaaaaatgtcacattccattacaagtaaatgaatatgcgagatgtgatcatataaaatggtcacatctcgtatggaagtcttcttgggtgagcctttccacaacaaaagtggcataacccataaaaatacttcctcgtggcccacacatggtgaaacacacaaattctcgattaaagtcagccaacctatcttgtgaccctactttgagattaaaaac

SEQ ID NO: 92586 - DNA, 515 bp, Cannabis sativa
acgatgtttcggaaaataacgaatccaagctggattttctccgggaaacagaatgggaaagtaaatgctcaggagagaaaatctaaggtgttaaagaaccgaatcatgaaatcgggtcaaggatggaggggagaagggttctagggtttgaggatacaggagtgagaaacaagaacgacgttgaggaagaaagagagaagagagagagagagggcggaccagaaaagaggaataaagagtggaatataaataggtttgcatccgattataagcgtgggtccacgtgtcgaaatctgcacgatcctgatatttcgggtaaccccaccgggaaacaaaaaggcttggggcgagctcaactcatttcatacacagctacttacttttctctccctcttctctatccgtacccacctatttaagatagcttaaagatatttcaaaaaaaaaaaccgaaattattaaaaattacagaagtttgagattaaattaaattgggcttttttcatgtatttatt

SEQ ID NO: 92587 - DNA, 516 bp, Cannabis sativa
tcttctcacatctatcttctctcatcctttttctccctttcaaatctgtaataaagtagccctccattgaagatgaagagcttcaaggccaaggagagctccatcgacggacaacggtcgcttccaaacgccgagcccaggccatctccctctgctctaccatggtatgtccacaattggcgtctccgctgcccaaacgcccactaagttcacccataatgctggcttaatcggtgtatttatttttttgtccacttaattatctttctctctccctctctttgtctctgatctatgcaggtggacgatgtttgaaggtcctcgtgggtcttgcctttaatgtttttgtggttcttggtacacgatcgacgttcgtgtttgaagggcttgggttcgacaagcctggtgtttgatgttcgtggttgacagtgtgggactttgagttcaaacatggacttgggattatttcattctaaagcaatgtttgacagtgtgtggttgacagtgtacacttta

SEQ ID NO: 92588 - DNA, 809 bp, Cannabis sativa
ttgcttccccaaaactcaccagggttcatctacaaaagacaacacacgagatgagtttttggtcgggatatcaaacattgaagaggcaaatataccgagtaggagtactcgacagattaaagggatgaagatgtacaaaaacgagttaaaacccagaagtttaaaatttttgggtttagggttaaatttcacgaagcttcgaatgagcaaggtgaaagttgaacaatgtgtgattaaaggcaaacaacgtaaaccgtgaagctgtacagactattctagagaaaatcacaaagttttgagcctagattttctatctatcttctacaataagtcgagaacgcgtgtatgaaatccataaattaaacatgcaaagtaaaaagggaaagagattgaaaaaacttacacactgtttgatgcctaagttcagtccagacgaagttcctcagatgcctctggtgggaatctcacgacaaacttgaagtaaaaatcttttttgctctgagtttgtttagtggagaaatcagtaaaaataaagttatgaggaagactcagccttatttataggcaatgtggtgaaaaaggtaatcattttaaaatgcctttagacgcttcgattccctgccaaaatcaaatattgggaaaccaaatttaatcaagtgtaatcgtcaaaacgtgatgagaaaaactgagtttcgaggctgttaggttatttttagtattaattttagattaagtttagtatatttttatttgagttttaatcgtgtttggagcatttttacgcttgttatcttttatttgtgcagatt

SEQ ID NO: 92589 - DNA, 739 bp, Cannabis sativa
caaaatggaagggcagagaggaaacatagacacattgtggaaatgggtctaactcttcttgctcaagctggtataccccaaaaatattggtgggatgctttccaaacttctgtctatctcataaaccgactacctacacttgttctcaagaacaaatctcccatagaggttttgttcaacaagaaaccagactataaattcctaaaaagctttggctgtagctgttacccgtgtctaagaccataccaaacccataaattccaatatcattcaacaaaatgtgtcaacttagggtatagtgagagctacaaaggctacaagtgcttgagtagcacagggagactttacatctccaggaatgtaatcttcaatgaagatgaattccctttcaaaatcggttttctcaacactcatcaatctgaacaatctattcaagtctcagttcctagctggagtacagttctcccactggccattaattctcaagaaaaattctccaacacctcagaccatcctgaagcatctgttggagaaccaccatctgctcattttccttcacctgacagcaatcaggatgtaaattcaccaaactctctggtttatgatgatactgctcatatgcaaggggacacacatgaagctgagactccaacctgccactacaacaccagaaatacctgctgctgtcattgatgttcctgtcaacccgattatgcctacacatcctatgacaacaaga

SEQ ID NO: 92590 - DNA, 674 bp, Cannabis sativa
agactacaccaatttctagtgttttgtggatctaggtgtttgaaatgatcagtttcacttcaggaatctccattttgggtgtttccacccgctcccagtcctcatcggttggctcgctcggaatggctgttataccataccttttgactcaactctactctagtagtaactgaactaactatagtagtctgtccggctactcttgctaaaatcattactcttcattctcctgtgctctagcaattgcgctccctagatcactatgatgtagttaggtagggacaatcaatccgtagtggtgggaatctaggaaggaatgaggatacctatcaatataaaaatgaagaatatataattagagttttatccctttctctcactcaatagatgtttctggtcttatgcggtacagtcggtttcactaacatgtatattatttatgcaccagacaactcgtatagcgtcagcagctactccagcacttctctttcagattcttgttcttcagggctttctagtaaggggggcctttactcattttttagtgtaactttacataaccattgctttcgtagtagcatgcttttgactgctaatatgaggagcaggaggtgttaaacccactcatcgtccagctcctgatcctactaccggcgttggttgactacatagtt

SEQ ID NO: 92591 - DNA, 720 bp, Cannabis sativa
taaagtgtcttccttgctcaatgatgagggagattgggatcctctgcttgcccacaggtggttggttcctagtgtggctagctctcttcacctgattaagagtctcccaagctctcagcatgatctcctggtgtggaaggatgcaaccgatggaatgttctcccctaaggttgcttatcagtccattataaaacacagaggtaacaacttagatgtgatttggaatcgtatttggaagctaaatattactgagaggttgaagatgtttctgtggaagttgggtagggatgccctcccttttggcagccgattgcaaaggatttttggtaacccggtaaattgtgtgttgtgtggtgagagtgtggactcctggttgcatctcttctgccattgcccgctagctaaggctacctggtttggtagccaatgggcgatccgaggtgagaatctgaacttctcttgtcctagagattttatcctttggttgcttgatcctggatttttaggaagtgctagtacagaggatagagaggccttttccaggtttggaatttgtctgtgtgatgagctatggaatgctagaaacaaagcatatcatgaacaggagtttccgacttgcttgggagtgttagcgaaagttaactcagcgtgttcggctatgagaagggcctgggaggaacaggcccggatcgatgtccaggtgagttgggactctgatag

SEQ ID NO: 92592 - DNA, 781 bp, Cannabis sativa
tgatcgaacgtaaattttgaatgacaccacagcttcgtaatataatttgagttaaaaacaaatattataaggtttttattaaaataaaaagaaatataaatgttatagaacactcgtgacaaacactctatattggtaaaaaaatatgcaaaatcatagccaatatatggttgtaatgtcatttattctttttgagttttaaaaattgaagagtacatttggtaatacttttgaattattttttattttaatttttaattaaaaaaaataaaatattttcaaaaaattttactttttaatttttaaaataaatatcaaaattttaaaaatataagaaaatcactttcaaaattatttaaatagtcttttttttttcttaattataacatatttatatttttttttcattaaaccaacttgaatctagaccaggacaccaaattaggacctagtcttggatctcgaattcaggacctgggagccgacctcgactatggacccaaacacgcactcgaatcctaaactcggactcggacttagattcgaacccgaaacttgaacccggattctaacctcagacatagacctcaacttagaccccatatgcagacctcctcgcccccatcccactttctctcacatcaaaatctcattcctcacttaaataaaaaaaagtactaaatacacttttattttttaattttaaaattttaaaaaataagtaattacataacacatttgaaaattctactttcaactatatgatttaaaaattaaaaaa

SEQ ID NO: 92593 - DNA, 605 bp, Cannabis sativa
tcgtcaacggcgtttgaagttcatttgtggtttcggttctggttcgtggttgatcgcaattgaagctcgtccctggttggcggtgtttgaagctcatctatggttccagttcgtggtcgtgattgaactctatgaatctaacattttttttaagttttcttgtttaatgtttagtctagccaaaagctatgaacagtattatgtttgtaacaatttatgttatacagtatataacatagaaaaaatggtatgtcttttgtcaaaaatagttcaggtataaactgcatatacaatgatatgctttcttctgttatggcagctctatccaataaatggaatatggtttttttatatatattttttggtttaaattaatgtttatacccattttgaattactgatctttttgaggatataattatgtatggagatttaattttaaactttgaatcattatgtatgtatgtgtatttttagttaaatttttttttttttgtatattattttaatttgagttaattgtatttattaaaaaaaactaaaataaaatctgatattcctttttaattttggtacttttttttagaaaaatatttattatagtg

SEQ ID NO: 92594 - DNA, 660 bp, Cannabis sativa
gaggtctttatggatgatttctcattgtttgggtcttcgtttgatagttgtttgagtaacatagacctggttttgattagatatgaagaatctaattagggtctcaattggagaagtaccattttatggtgaaggaggggatagtattggggcataaaatctcgaaagaaggcaatgaggttgataaagacaaggtgtctacaattgagaacttagcccctccagtttcagtaaaaggagtctgaagttttctgggtcatggtggcttctaccgaaggttaatcaaggacttctccaagattacaaaacctttgtccaatttgcttgttaatggaatgccttttgagtttgggaaggattgcttggagtcttttcatactctcaaggagaaactaatttcagcacctattgtcactacaccaaattgggagttgtcattcgatattatgtgtgatgtaagtgattataccattggagatgtgttgtgagaacgtgttgacaaggttaaaccttgaatgatgcgcagttgaattatgccactactgagaaggcgatgttggctattgtgtttgcatgttataagtttcgaccttacttgattgggaacaaggtgatagtttatacagaccattctggaatcaagtacttgatgactaagaa

SEQ ID NO: 92595 - DNA, 731 bp, Cannabis sativa
ggtgtgatataaagatttgagtatttataagcaaatattgaaattctaatgatgttaataattcttgtatataattatttataaaatattgttcaaaagttatataaatataactaaaattttgaaatatacatataatttagtaattttttaaaaaaatatataaaaaattaaaacgtgaatttaagtccgaatataaaaatagattggcatgtttaagaaatatgggtcggaaagagcaaagtacgacacaaaagtaccgggtctacgggtcgtgttaggcttactttttaaaaatgttggcactacacggtacggcctatattcttctgtggtacattaagatactgtctgttttttaaaaagcacaaataaatacgagttgggtcacgatacgcatgaacttacaacactactaaaaggaaccacttagtatcataccactattagcgtaattaaaatattagattttatataacttaaaacaataattttgagaatatcactaacttatcgtacaatactacttataaaaagtgttaaagcccacttatgatgctgaataataatgctatatagaaagatatataaatcaagagcaaattaagtcattcaatacgtttctaatctaactttctatggaatatgctttcaaggggaagaaatttcacataataggtctttctatgtagtttctatgtagctacttggcactatcaattatcaaatga

SEQ ID NO: 92596 - DNA, 547 bp, Cannabis sativa
atatatatgcagggttgtgatggatcagtgttgttggataatgacacaacaaatgggatagtgagtgagaaagatgctggtccaaaccaaaactcaattagaggatttgaggttgttgatagaatcaaggctgccttagaacaagcttgccctcaaactgtttcatgtgctgatcttcttacaattgcttctgaacgatctgtttatctggtatgatttaataaataataataattcattattctttttcttaatttattatatatatataagttaaatcttccacctctcccacttgtttattctttttattatatatctagctatatatttacaacaattattacaattaaataatatatataaatagtactgttcatatttgagctatttgtacttattaattattatgaattaaattaatatgtcttcatgagccatgtattaattattagaactcaaataatatttcatatatgaggaaatagaaataatttaaacaaaatacttctgctactcctatatctaatctaaactttataaaaaa

SEQ ID NO: 92597 - DNA, 2438 bp, Cannabis sativa
cgtgtacattaaaaccacaattctattactagtattttttttaagattcgttcataaattttcaattataattttcttaattatgtatatataatagaaaaaaaaataaccattttcttttttaaaagaaatgggccttaagaaaatgggggccttgtgcaatggcccaagctgcccaatgcttggcccggccttgagttcaggtgcgttatcagatttgaaagttttcaaaacataattgaactgagtttgcacataagacataaattgaggaatgatagttatagcatcagatttatgttgcattagataaagtcatgtgaacctagaatgatcatcaactagagtgagaaaatatttaggattagtgtgtgaagctatgtggtaaggtccccaaatatcacagtggataagatcaaaaatgtggtctgtcaatttgttattaatttgaaaggggagcttcttttgtttagtaatagaacaaatgtaacaaggtctatttttatgcaaaacaaaagtattacaatgcaaagtatctttaagaagatctaaacgtttgtgggacaaatgtccaagtcgagaatgccaagtttctgctaagatagatagaacttggggaggatctggtgcagtatcaaggatgtagagaccattgacagtgctacctcttccaatcatcctcttgttggcattctcctgaatataaaaaatatcagaagtgaaatttatcgagacaggggtatttctagtcatataactagtagaaataatgttgtacttaaaattaggtgcataaagaacatcagtaagcataattttatcattcaaaacaactgtgctacattggttaacaaaaaaaacattgttaggtagaataagcttagttgcaagtatcttacatatgcattggaaaatactcatgttagaggaaatatgtcttgctgctccagaatccatgatccaagaattatgtaaaggagattcagaattatgggacaaaatgatacttgtgttacatgatgaggtgcttggttctgattattcataccagacttctgagatgcaagcatgttgagtaattactaatattgagttgtggtcagttgtggaaggagtgcatgattctcttgttgactgctactactttcatcagtcgcttggacttgatttgcattggcttctttaggtttattcttgttgaaactaggtggatacacgtgtattttgtaacatctctcaattgtgtgtccgagaatgttacagtgagtacaaaatggtatgttccttttgggaggttgagtcttagaattttgattatcattcttttgtcctgcattcttattcccttgaagggaaaaagccatagttgagttagaattattggtgttagatacaatacctctttggtgttcttcttgtgtagcaagatgaaacacacggttcacttctggtcgaggatccataaggaggatgctaccacaaacttgagaatacgaatcagaaagtcccatcagaaatgacataatatgttccatgtgatagtgatcttagagtctcttaactccacaacatgtgcatccattacaagtgcaagatggtctgaaattagttaattcttcccatatagttttaagcttagtaaagtacatactaacagtttgattatcttgtttaagattcataagatcttttctcaggttgtatatatgggggccatttctttagtggaaccgaaccttaaggtcattccaaatggcagaggcaaattcatcatagagaatgctagatgaaatttatttagaaacagaattcaaaatcctagagataacaatgttattatttcatatccatgcattataaagaacttgattagaaggtgagggtttagagatagaattgtccaagaaaccaatcttgttctcgactgagatggcgagttccatggccttgctccaagacacatagttgtcttatcccgtgagaggttgagaaaccaaggtatgtcctggattctctccatggtgaagggtggattctttgaagtcgagatttgaagagaagaattttgtggatcaccaacaatggtctgaatcgaggcttctccatgagtcccttgcttcgtttggttgttatcagtagacattgcagaatctcaacgaggaggaagcaattgagattcaacaagaagaagactgcagcagaggaagatcagaggtgacgcagcttcgtcagagaagacagacgcagttggctggttaactggattgtataagaaagcctatatttcctgcactgataccatattacaaaatggacagacaatacaataccatcttattaatatgtaattgtaattaatcaacaaagatgaggtacaacactatatataaatgttactcgcaattaactctcaacaacataattagttaggtaaataa

SEQ ID NO: 92598 - DNA, 703 bp, Cannabis sativa
ttattgggccgagatgaacacataattaaggatatacggtaagccttatctcatggtaatgccttgctgggaatggagctgagttaactttgatggcgagcagttgcttatcatcttctagagagatagacgcctcactatctgttatcttgattcaccaaactgtttttacttagtttgtatatcatgtgatatacgctaagtgtttttattgtttctctttcacgcagcgaggttgaagcctcgtcgtgcacacttgtactcacatggtttctcgtcgatacatgagttagtagtttgtacgttcctgtctcgcagaagactgttcagccagccgagttataaacatactctgctaatcatgtttctaactagttgttccatgccaagtgtacttatgattgcgtgtttgagttctttccagttcgacacgtgtcttcctctgatgtgctcactaaattttgggtataacaattattataattattattattattattattattatgattttattagaatatataataattttaattataataataaaacagtaataatttaattcaaattttggtttagaatttattaaagatatcaatatttagttaaattaattgaaacaaaatatcaccaaagtgatttcttttgtgtagattaatttagttaaaaatattaagataattgtgtgtatgtaattcat

SEQ ID NO: 92599 - DNA, 1108 bp, Cannabis sativa
  modified_base (434)..(444): a, c, t, g, unknown or other
ttcttgctgatttagaaggagaatcataatggctggaaaccaagcaaacggaggtctcaacaacgaatccatcaatatcggaatgatgaacgttgcattgttaggaagcagagtacctcccgtagatgtgatcagcggcagagtagggagtggcaatgtgacacctcttaatctattccctaaaaccactggccctcaagatggggaaacatctacaccggcagccacaacgggacattttccaccctttactccagcaatggtatccgaaggtatcatccagctgactactgatcaatacactacaatccaagaccagctacgcgctctgcaggctgaggttgatggacaaaataggactcgacgtcctctccgagtacctactactcgcacagaaaaccctcaggtaactaactctagatgtcgtaataacnnnnnnnnnnnggaacggagcgccaatcaggagggacttgatttgaaccagcccacatcgagggacaagtccgcgagaaaccttaatgaggaggcacagatggaggaggatcctgaacgacgtaatcctcgcagcagaccctaatcgcgagataacgacattgaattcgcctcctcgttctcgcatggtcgcacgcccagcaggtacactagatcaggttcggtggaaacaccgcaaggagggcgatatgaggttcataggggcgatctccgcgatcaccttaacactgtcttcagggcgcgttcccaaatgccttgggatgtcgaacagccccatgatccctgaactggcgatcagggcgtaaacaatcatatcaacccgtgtactgcaccagctgcgactactggggttaatatcccagcgaacatcgccgcagtagtaacgacgcctgcagcaacacaagccactactcccttgaccgagaatatcgatcaaggtatgcatctacaagctttcaaaatgctcgagcagtagagaaagcccatatacaaggtggatgggacttctctttttagtgtggagaagtgcgacaagctcgacttgttggaaatttattttaccaggatcttagatgtaacgccctgttcaacagggacgccacgtgtgtgcacttta

SEQ ID NO: 92600 - DNA, 775 bp, Cannabis sativa
tgggagttggagtctgatatgagggctcaatatccagagttgttcaagttagatttcgaggatggaattcttttaacggggagataattataaggaccgcttaattttagaatgagaattagtagatagttagggtttaatttggaattagactttaattttaaattctaggtgtattagttatgctatatatgaaattttatatttttcatattcgatgcctagtaacagtggaacgcgacgtttggctgataaagtcacattttcttatgatttaatatttagtaatagcggagataattagatagacattgggaatgtcaggaatattcaaggtattaggtttgaccaaaatacccttagaggacaagtgtattttttggcttaggcaagagcattatggtctttttgccatatgtttcttttgtcctttagtgaattattgttgggttagtataatatatagtaattaaggtatataatatgtttcttagattatatttgtttatatttttttttaagatgatgttgatgaaactttttctgctgcttttattgaaataattagtttttaacaaaaaaaaaataaagaaaaaaaacaagcagtagtttaaataaaaaaacaagtttaatttttgtaaaaaaaaaaacctctacagtcgagattattttttatttaatttagtgttttattttttaaaaaaagaaaaaaataataaaaaggaaacacaaatttaaagttctttatggtatttctcatgactttttcccatat

SEQ ID NO: 92601 - DNA, 673 bp, Cannabis sativa
tggcaccatcaaatgagctaaaatatctcaaaatttaaaagatatgaattttcattcttcaaatcatctcaataatttactcttttgtactttttataatttgaagcctttttatttatagatttaaaatgtaatatttaaacaatagtataaaaaaaataatgtatggcataatattatagtttgatgaggtaataaaatagcaactaaggctagtttagtgatgagggagggatgggaaaaaaagagcgagatcattggttcgaatctaagaccttgaagctattaaactattatttcgttataaaataccattacgctacactaaaaaaaaagataaggtaataaaataaaagtacaatgacacacaaatatgatacacatatgtgataagttattttaattaattatttttatttaagatgtatctcgcttatcaatttatgtgtgtccatatcattactcataaataaagataaatacaattttgataaggtaatatctgagtgctctaataaaggttagaactcagcaaacttcatgttattcaaacatgttaggttctcaaacaccattatttctttctttcttaattgctaaatttttcaaagaatgttatgttccacaataaatggtaaaaaaaaatgtaaccaaaaccaaactataacaactc

SEQ ID NO: 92602 - DNA, 556 bp, Cannabis sativa
taaaacataaccacaaattaaaaagaaaatataatataaattttattaaaatatttttaaaaaataaatagtattttctttgttttaagcatttataatttataacaatatataatttaaaactcaaatttaggacctacacttttctatgaccacttcaagtaattattaataatatttctctacatgtgaataagtactatagtgttttctaaatgcttctctaaaattatagagcatgattttcacactttttcttcaattctcatcttcattttcaagaataagccaatttaaaaaaaaatcaatgtgagtgctctaataacgaactttaaaaaaaaaaaggttcataagttaataactaattattagcatagaagaaaataaaaatgaatatatatatatgggtataattttaaaaagtattactcatgtatgggtattttattcttgaccattgaataaaatctaattaatggttgatatttatatcattaattaaatattaaaaaattaatattttctattttgtcacttctttctttgattttgttat

SEQ ID NO: 92603 - DNA, 587 bp, Cannabis sativa
atccgatgaagccacgccgatcttttccgccttcggtgttcttcgagctgccttcttcgtcatagatcgaaccgacattgattgcgatttacttagatcggatacagctgaaatgtcactgccgacaaaatcaagagccttctccgatggtgcctgagccgagggagccatagatgtctctgttgatgagcaatattgcccaactctaacatctaagtcctccatgagatgcactttaaatgccttcaattgagcatcgaagaatcgatcaatacgacgatccaactccatcaacatcttcgcaagctctgttttcttcatggctgagagttcttacagcgagtctttcactgtaattgctctaaatgaaggcaccagtgatacaattaccaattgtatcgaattgcactcttcgagtcagtgccaaactccaataggaataatcctaattttctctaatttcattcattcccatttgtgtaatagtattacatatttatactaactaggcaatactaataattactaattagtccctataacttttcatgtaatattatacatgttgcggattagaaaacctgatc

SEQ ID NO: 92604 - DNA, 2205 bp, Cannabis sativa
aagatataaaaaaataatgttcctaatacattcatgattaaaataaatattgttcgataaaaaattattattaaatttcaagcgaaattcgccaacacccttcgtagagacttgtgctccattcgtcacgtgcatagtcacctccccatcggccatctccctttacgatttaagtatctgcatagaagaacaaatagtggctctaaaatcaacaatccataaggatttatcatctttctctaagttagcttcaagaatgaataaatcaaatttacctttcttaagctgaaagagatacttgttatagtttcttctagttttccattatgccacaatagaaacacttgcctttctcctttttgtctttggacttgaggctagctttgttcttcttggccttgggtctttttgcctttgggcttgccactattgttgtccttactgttccactttcttttcttatcagaagaagaaggagagttggatttttcttcaacgatgtttgattccccttccttggacttaaccttgttaaggttttcaaatacggtcaactcattcaataattcagtcatgttgaactctagctagttcatcacatagtttgtggtgaaagccttgaagcaaagagatagttactcaaggatcatagacacttgagtcttctcatcaatgatagcatcgtgtgtctctgcgtaatgaattagctcaatcgtgcgtaatacataagatcgtacagggacacccttcttcatcttacaattcatgtagctacaaatagtatcatgtcttgtttgattagaccgttgcccaaacatggcctgtagaatatgttcatgcatcttacgcagaatatcgttcatgcttacaagcacgaaacatttggccttgttgttagattgaattcaagcatcatatctatcccgaatattctttagggcattggcagtgggctcctcaggacgctcctcagttaggaaaaatttgtgattctcacaaaccagcattaactttatattcgatttcaatttataaaaattatcaccattcaattttttaagtgctagtatagtaaggggatttggtatagtagacatgacctaacataatgattaattgtgaataataaatatcaatttggaattacaataaacgtgatggatgagcgcatacaagtaaaacacataaaatctggtttaagttattctacgataaaacgctttgataattgatcgccaccttagggttggtatcgagtcaatttcattaagcttatgagacaattctcatctttattattttaaaacctaaatatctcatatttccttttcaaaatatgaagtaccaattattgaccaagctaacaattaaccactatgaagcttagttgcactttgtgattgtaaggatttcatgacttaacttagtgtgctgccttaagggttggtgtcacactaaaatatatcacttcctcttatcttagtcaagagatcaaccttgagcaacagtatagacacatacttccttagggggacgaaatctaagtcgtcttaaagccagtctatattccatttgtgttgaccaatgatggaggtcgtaagttacattgacatatattccttctcccactcactattttaggttaatgtgtttgttttattaatttttagaatcaatacatattaaccactttaataattatgattaatttatttataataaaatgcttaaaaaataaataaatttctcgtcataatcactaaatttgaattaactctttattaattcataatttaaaataattataaattaataggtaaattttaaattaccaacttaattctaaattaatcttatccaatttacatgcttttggtttcaaaaatggtaaacacataaatatataggacaatcctaatatatcatatttctactatgagatgcatgatgatgtaactgtgtgaatttttatgtattacatgttatgcactactgcatgagcatattattaatcaataattaatgaaaatttatttaaaagcaataaataaacaataattatgaattgggtaataattaggtatttctaattttacaacctttaaaattaaaaaataaattacaaaactaatatatatcgcaacaagggaattttttataattttgtaagatcgacgcaatcctccaaattaattaaaataattt

SEQ ID NO: 92605 - DNA, 956 bp, Cannabis sativa
ggcaattgggatgttgccaaactcgtaaacctgtttgacctggagacaaccaataatatcattgaaggcggtaggcctaggggttaaggtagtgataagtggatttggactaaggaatcaaatggtcattttctactaaatctgcctatctagctcaggcattggatcgtgctcctcctagtgacgttgctcccgctttatggaataaactttggaactctagaatcttagagcgtcacaaggtcctttggtggagtattctctcaaatgccttacctattagggccgctcttgctagaaggatgcatattgaggatgtgtcttgccctatttgtggtgagggagaggaaataatggaacatcttgtcctctattgcaaccttgctttttacctctgaaggtcctccccctggggtgtgatgccagtgcgaaattctggggcccgaatgtgggattgggtcaaattcttatggagcctgaaggaaaaaggggtggagatccaagatttgtttatgtatgcttcaattgtagtggatacaatatggaaaacctgtaacgagacaattcacaataattctatatgtaatattaagcattgtattgactctatttctatatgttacgcagattttagttcttgtctatttccttccccgatgacaattgtgactcctgtttggtctcccactctagaagattgggtcaaaatcaacagtgacgttaaaattggttgtgactcaatgtgcgtgttggttttggctagagaccacacagggtcagttttgtgggtggctatcaacatgctcaacttctctgacccactcattggagaagcagcgacctatttgttagccctggaattagcgatcctttggaagcattcgtttgtgataattgagagtgattctgagacggtgatcaacacgttggaggggacttgttctgtttggagtatt

SEQ ID NO: 92606 - DNA, 1556 bp, Cannabis sativa
ttgatcaagaagtgaaataaaggcagtcattcttctccatctctcttttcatctgtttttaacttttagttttttggtttaaatttgaactagttcttgtcatagttgtgttgtttatgcttgttgtcttatgttcttgatcctcctttgtatgattgttaatcccaacaaatggcatcagagcaagattggaattggagtaatcaagaactgtttatttgaagaactctgcaccaagaactcgatcaagaaatggcaacagcaaagtatgaagttgacaagttcacaggtgccaatgacttcagcctttggagaatcaagatgagagccttgttagtgcatcaaggaatttcagaggctattaatgttgatgcactaaaagtaattgaagatgagaagaaaaagatggagatctaagccaaggcacactctgcaattctcctcagtcttggaaatgaagtacttagagaacttgtagatgaagaaaaagcccttggcttatgggataaacttgggacaatttacttgaagaaatcccttgcaaataaactgtatctaaagaagagattgtacaccttgaagatggaagacagtaaagaactcagaagacacctagatgatttcaacaaaattgctcttgatctgaacaatataggtgtgaaagtggaagaggaagatcaggctatcatcctactaagttctttacctaaagtgtatgaacactttgttgataaaattccttatggcaaggacacccttaccatgtcagaagttaaggcatccttgaactcaaaggagatgcagaagaaatttgatgaaaaaccaaaaattagaggagaaggattgtttgttaaaggcatgcatgaaaagaagacaaagtccaattctagaaacaacacagataagaactgtttctattgcaagaaggaaggccatttcagagatgaatgtattgctttgaagaacaagttaaaaaggcaaaaagagaaggaaagaggtcaaggtgatgtggctgcagatgggtatgattctgcagatgtcttggttgtatccaatccagactctggccaagaatggattcttgactcaggattttctttccacatgtaccctactgaagaagtgttcagaaatcttgagcagaaaaacaggtggaactgttttactaagagacaacaaggcttgcactatacaagggattggctatgtgatgctacagatggatgatggatcacaaaagaccatcagagaagtaaggtatgttcctgaccttaaaagaaatcttttctcaattggcacattagcttcaaaaggatattcaattaaaattgatgaaagcatgcttagaattactaagggcactaaaactgtaatggaaggaagatataaaaatggcctatattttctaaatgggaaaacagttactggtttagtgtcaaatgtttcaaatgcacatgatggtgacttaaccaagctatggcatttgaggcttggccatgtgagtgaaagggggattgctgaactcaagaatgaaggaatcttgaaaggaaaagtta

SEQ ID NO: 92607 - DNA, 513 bp, Cannabis sativa
agaaggatcttgagtgcgccaggagttgcacccactgggatgctcgtacagtggatcatatcaaggatcttcaatcccagcttgacactcttctttataaataagagacttattggaaacaacgggctagagcctaatggttagcccagggggataaaatacgaagttcttccatcaccatgcttcttacagaaagaaaatcaatcagattctcaaactccataattcgagcgggggcattgtctccacaaacgaagacaccactcatgaaattgaatcttatttccaatcgctcttcacctgctcaaacccttctgcaatcgacatgcaaactgccttggagggcatttatcgcaccttgtctacaagcgacaaatccatgctaaacgaggccttttcggtggaggaggttgaaaaagctttcttccaacttcctttggataaagctcctagtcttgatggtttcaactccaacttttataaaataaactggcctcttgttaaaaaagatgt

SEQ ID NO: 92608 - DNA, 900 bp, Cannabis sativa
gaaaaataagattaagcctaggtttcttgccctttctaagagagacaattttcttccaaatcatgtcagccaaattaatttttacactagtagaaactatatacaaaaagaaagcaagttcatttgaaaattttaccagattggaccaaggaaaccaggttgatagggcaaacctcataagagcagcatgatgataggtaagttgagacatgtgcattgtgtcggagagttccaaatcattgtcaccaatgagaaacccgagcaccttttgaatatcaaattccacttcattgggctcaatttgaaaaggcagctggagagcttcagctatatccttcacagtaaaagaatactagtgttcgttgacaaaaactttaccaaacataaaagagtcctcatcgagactctcataagttatattagaataaactcctttaaaattcgatccacataaccatcaaacctaatcaatgtatccacccattgtctttatttcaacaaattatacacctaaaaggcttatgagcaataacattgaaatttttcttcacagtaaaactcctattctcatagaatttcatatctctagcatgatcattgtaccgtgagtagtaagagcaaattttttttatagaaaaggaaaatcttgcttcggttttcttcacaaaaaatctgatctaacatattagaaaactcatacaagatcagattaacacatctggacaggtagaaaaatgatgggtcatacaacttactctttatactttggtttttataaatagaaaaactagacgactttccttttatataaaaatcaaataataccaaatgttaaagtcaaatgcacacctcaaccgaataaataaataaattataaaatgttttttcaaattaaagata

SEQ ID NO: 92609 - DNA, 1069 bp, Cannabis sativa
aaaaaaagaaaacacgtgacaaaatattctaaagagtttacatctcttctacctccctctttctgctttagtcatggcaatcatttttttgcaaagatttgacttctaccatcagccaccaccgcaccaagccatcttcgactacgaccaactccaaccagccgccagctctgttccaatcactggccactaacgacgtgtccccatggtggcatttggatctccaatcatgattgtaggtgaatgagcttttttgaatccaagttggagacctttcttaaataaccttgcatgagaagaattattaggatccttactggttacttgattattaaaagtgacctcagtagcttgtacgtctgctgaagtactagcagtgatctcagatgccacttgcacgtctctagatgaggggagtctttgtgttttatttatgtcttgaacatttgacactagaggcattattgatatatgaggatcaagtggttcttcatcctcagggactaagtctgaaactttcgaatcattaaatttcacattcattgactccatcactatagaagttcttttattatacacacggtatgcacggctgttgactgaatatttgagaaaaattctttcatcacttctaacatcgaattttcctagatgatcttaatcattcaaaatgtagaaaacacaaccaaagatgtgcaaatgactcaagttaggagtcttccctttccacagctcataagcaatttaagtagttcctgttctcaaatggacacggaaggagcataaaattttgagtaagcaatcaagagaatttcaaaaaatataatgtgaataagaaagcctttcttttgattcaatttgtcaacaagagaaaatctaaagtgttggtctcttgaatcaaaagctataacattatatttatagagagacactaggtttatggttagaattaaatgggctgaattaaagaataaaattttgggaaatttacacccattactgatttttcccattttctttcttttatactgttacacgctggaaacaacttttatactgtttttttttt

SEQ ID NO: 92610 - DNA, 1520 bp, Cannabis sativa
ggattttacttttttggaaagactctattgatgttaatgttattacttactcccttaatcatgttgattgtattataaataattttaatggtaaagattgacacttttctggctattatggttctccttatgctaatcaaaaatctgctatttggactttacttaatcgcttatttgatactgctcctcttttgtcgtggttagttatgggtgatttcaacgattatctttctgttaatgacaggaacacacctcactcccccttctcatgctatgcattctttccattcttttcttaataaatacaatcatgttcctcttcctcatgttgggcctaaattcacgtggaggcatggttcgatccttgagcgtcttgattggtgcacctctaatcatctttgaacgaatttgttccctcaagttactcttttccacctcggtttctatggttccgatcatagggccctgaagatcatgtttcaggacccaaaattcagcaatcttcgctcaaatcggtttcattttgaaaatcactggctcaaagacccctcctttactacccttcttaattcgtcctgggtcaattcccaggacctttcttcatcccctctgcaagttttcctggacaagcaatctcactgtattacggagattaggacttggagtaaatcccaacatcctattaagctccaaatctctcgtacacaggcggatcttaatcacctgttgaatgattcccaaccgactcccaattctctttctcaagttgctactctccaatctcgattggatggccttctccttaaggaggaagtttattggaaacaacgttctagagtcgactgttgcgtgctggggatagaaatacaaaataatttcatcaccgtgcctctactcgaaaaaagaacaatctcattcgccaaattactcttcctgatggatccatttcccatgatcctgctactataacttcccaatttcttcatttctatacttctctttttacctctcaaggtgtgtgtgatatggctgtcaactctcttcttcaagggattactaacaggctatcccctcatcaagctgcttttctggctgaaccttacactgatactgaagttaaacaagccttatttagcctctcgggtgacaaggctcctggccctgatggactcaactcacttttctacaaaagtaattggtccactcttgggaaagacttcactagggctatgcttcaaattcttaaccatcagggggacatctcccaaatcaatcaaactatcattgtgctcatccctaaaaagaaaaatcctaagcttgttcgagactttcgaccgattagtctttgcaataccttctacaaatgcctatccaaagttattgcaaatcggttaagacttgtccttcatcccattatcagtatcaatcaaagtgcttttcttcaggggccccaaattactgataacattcttcttgcgaacgagattattcatgctattcattccagaagatcggggaag

SEQ ID NO: 92611 - DNA, 588 bp, Cannabis sativa
ttatagataaatacttgttcataagttttaaattcttctatagtgaatttatcttaataaattatattttttattaaaataatgaaatagaacgatcttatcacaatcacacaaaatgaaaaagttttaattggtccaaaaaaaactttgttaagacttgtcaaactatgattttgttaaaaaaaaaaaagttttcaacaatatatatttatgacacgttaataataacttgacatttaacgattagatacctataaaaattttaaaaatataacttatatattattatcgtaaaaatttaaatttagatattttttgcaatcaaaaatttaacttatgtatttacgacacaaattttaattaaaatgaatggagatggccaaataatttgtgttgagaatttgatatcatatatctttttcaaaaaaaaaaattgatatcgtgcatatatgtatatgttaatgcaatttttcgttaactaataaatgagccttaattggcgattaaataatactgaaatgttaaaataaatcctcacatgccctctacactcttcaaataaacaacaaagaatacaagccaaaaaaa

SEQ ID NO: 92612 - DNA, 752 bp, Cannabis sativa
  modified_base (278)..(282): a, c, t, g, unknown or other
attattattattattattatgtcagacatttcaattacatcagttaaatcactaaaatcagcatgtaaacatacattttacaatagagcattgctattgaatattagtggtgcttagcaaccttaaaaggtgtcgccttgatactccctaagctattatattaaattatataggactcaatatttaattagaccaataacaatattaacacgtaagaaagtgtttaacaccaataataacttttagcatttctctttacaataataataataataatnnnnnataataataataataataagtgaagcatgatactttatgtcacgagggccactgggccactgaaagcagatcaggatcgtgaatcatttattggaatcaaatcattaccgagaatctgtgaacttgtattattggggtggccacaagcttaaagcatttatttattatttattaatattatttgagatgttcaaaataaaaagaaaaaagaattatttgagttgtttcattcaccttgtctctacatggactatttactttttcattgaatctttgaacataataaaaacctcacgacaaatgttatctgtaataaaactttgttttcattatcataaaagggtaacttactaattttacttcataagctaaatcataacgacaattacttgagagcaaaagaataagaaaaagaagaaagtgactaattaaagacaatagaagagctatctcaaaaaaaaaaaaaaaaa

SEQ ID NO: 92613 - DNA, 1089 bp, Cannabis sativa
acgaaattttaaatattttttttagagattttaagatttcatttttagtgactcgtggtaatgtcatttaattaaaaatacaaagtgggaatatcattttcaacactattattaatttgattttccttagctacaaaatttggccattattatttgtcccaattaatagaaaatgatattaagaaaaaggtgtactttatttttattctctatcttttgttacaagtaaattttactcaactttttgagttatagatgaactaaataataagtttgaatttgactcaattatattgggtgaacttagacgaaattgattcatagatttggtcttactaagagatgagcttaaacttctggtatgtgttatatcaaaacttaagacttccaaaaagaaaaaggaaaataatttaacaggacccataaaaaaggaccttttgaaaaatatatatatattgaaatagtctaattaaacaggttaatttcccaacaaacaagtctaagctttttttttataaaccaaataataataatattaatattaataaattaaaaaaatacgtttacaattttaaaaatggtaaattttggaccttgtgttttgaaaaaattgttgattgaccatttatttagttaaatgataatagaatctgtattttacaaaattgtaaaaataagactatgagctcaatttttaatttaattttaatataatcaatttgaaaacaatttttaacacgaacagatacaaaaaatataactagttttgttataatacttctagatcggattattattaataagttttattttaacaaaaaaaaatccgtttacgatcatatttgtactatttgggaaaatacagagttgattttattgtttaacaaaatagatgatccaattagtaacttttacaaaaacaaaatacatttttttaacataattttaaaaatcacatttaaagtaaaatataggaacgataactaaaaaaacttaaacttctctaataagtacataaaacctatgtcaaacaaattaactttatatatatggatatagaaatttgtctaattaaacaggttaatttcc

SEQ ID NO: 92614 - DNA, 1059 bp, Cannabis sativa
actcatcatatgcaactaacgcccgtacctttgcctggtacgttgctagatatattgcatcacctaatcaggtgagaccatatattgtatctatagtatcactacattatcgttgcctaatcagacaatcgataatttcagaacctgtcatgccatgtggtacattatacttttcttacctcaagtttcggatcaggtatgttggctgacctacttggagaacgattgataatcttgggccctatgtcatagcaataataaatgaataagtatttattccaaaacaccacttaacacttgtgtaagacaatttaggattttctaccaaacttcgtggtgtacatacactaaaagaaaacttattctttcgctcttaaacatacaccatacggtagatatcgtcgcaagcttcgaaacggtatatagaacgtccaaaatggacacccaagtaaaaagttatgataaaaatacgatttctaatctcttatgaatttctaaaaactatgaaagacgaaaatcttaatttttcgcactcacggaaacagtaccaaaacttatccaaatcactccaaacttcacagggcacatatataccatgaataataccattcttatgtaacagaaattaaaatcgagcccttaaatcgaaaacgccattaacgctcggactaagctttaaaaagttgcaaactcaatttctaacccaaaatcacctcaatttcagcaagaaaacatcggaactggtcccatgactacccgagaacaatcctataaggtcagaaccttcataactattctaattcacaaaacccccatacgaaaccaattgttattaatcttaaaataaattaaaccttaccttaagcttctctgctttgagaattcggtatcctgctactaccagagcttagatcgctaagttttcgattgaaaatcaaagaaaatagatataggggggaaaacactattgaagggtaggaacaagggttcgttctctgtttgaaggtttttattatattctgactaaaatatatatataatgtattttacttttttttt

SEQ ID NO: 92615 - DNA, 686 bp, Cannabis sativa
accggttcggagctccaggttaggggccgagaccgaagctgagactctcaatgtcttgctctgacgaaaacgagggtgatgagatgaggttaaatttgggcgaaactcaaaaaaattggatcttgggatctcagaaacccctccaaacttggagggtagtagtgcaaaagaagaagcagaagccatggaaatgaggttagatttacagagaaccgaaaaaaaaaagagaaaaaaatggttgttgctggtgctgtgtctggtgatggataatagaaatcagcatatttttaaaaaaaatatatacatcagataattggaggatgatgccacgtggatactaaatcaacgttggacccccttattgtttggctattggctgtaagtattccacgtgatcagattttaatttcatagccttatctatcccttctatatttgcactaattagtagtgttttcccttttttatttttggaaatggataattagtagaccttaaggtgcgttaactattatgaggtattcctctataattaattaggagttttttttaattttaattaaaataaaatatgtgagagtcgatattaaattataaggtaaatactattttaaaatttgtgttttgtaaaaatattttcagttttgttaaatgataaaatggaccttgtattttctaaaattgta

SEQ ID NO: 92616 - DNA, 1240 bp, Cannabis sativa
  modified_base (759)..(761): a, c, t, g, unknown or other
aaaaactcgaagtagacgtaactccattactgtcgcgatataaggagtgaactactataaattgttgtttctctcttttttttttacttaacaaatattctaatctcgtcaatctagtaagcgggtgtgacttgaaagttcgtgtctagatttctgagtcaataggcaacaaacaatattttcaatgtcgtcccatttaaatctagttcttaaacatctttagaatgttataactgtctaattatattagtttacgccaatacaaatttgagagtgccctactcatatccttagcaacaaggaatgaaagttagaacatagaactaaaatttacgtatttgttggatattctaaagatattgagagtgaactatattatagtcaagaaaataaaagaaaaatatttagttttataaatactaattttctaaaatatgactatatccttattttctaattttgtagaaaggtttttttttttttttttaagtattgtagcaaagttttaatagaagagatgttttcaaaattgacctaaaaaagttgtattaaacgaagagatgactttaaaaaagataattacataaaatattattttttataaaaaaaattatatttttacttttaaagatattttttttttagtatttttacaattttcataaaaacaacaaaaaaaattacataaaaataacatctaaacaacatcaaaataataacaaaatctaacatacaaataacaaaaaattaacaacaaannnacaagagtacaacataaaaatattgtattttctataaataaaattataaaaaatcataaacatatttaaaatttcgtaccaccatatttttataattttttttactaaaaaaatatgtattgtaattatcaatatcaatatatatataaaggaagatttttagagagttgatgtggcatgtttaagcttcatattatctctaatactcatttttcccttttcttaatttttaaaatttttctttccaaattgtttaatgttgtaagcagggacggagggacttaagccattgtataggcttaagccctcactcaattttataatatgtaaaaaaaaattatgttacatatatgtatctaaatttttgtttattataaatttttgtaagtacatatgtaacactctatttaacatgttttttatttcattcaatttttatttaagcccttgaaaaagaaaatattcaagccctcactgaa

SEQ ID NO: 92617 - DNA, 541 bp, Cannabis sativa
tgtcgttattgataccctcatttttaatgaggacttttaggcgttggtaatagtgacgttggtattaaccaatattcttgtagtgcacgtgtatattgtgtccacgtggacaagcctacctagcacttaacaactaaatttggatggaaagggtaaattgctaacagtttcgtggttttgggagtttacccgcagaaatttaggttgtgggggtttaatgaaaccaaaacgaaaatattgggggttttgccgccatttacccataaaaaaaaattaatttacaataatgtaaatagtacaacaaccattatacaaaaatactaaataacctatattttacttactcacctactcccatttactcccatttagaagaaaagttttatcgtgtccggactgtattagtggattgtgaatctacctacaacttaattatgattatttatattagtgggcaacccacgcatatcatatttaaatatttataagatttgacatatacaattggtctttcaatcaattaaaataagagtcattttag

SEQ ID NO: 92618 - DNA, 730 bp, Cannabis sativa
caactctatgtttgagaaataactttggtttgaacacgatttaatatgtacacactactgttgaagagcatcaatcgacgaagatttaaaaaagtttagagtttgctacacagactccaccccatttccaataatgcttcatttctcatacatcattatttgtgtgtaccagacataatgtattaagcaacgatcccatatatcccataatgtattaacgatccctattaagagtgcacctatatatatgtgttttactttcttcttcatttttttattttgtgaggggattgttagggcgcatttagaaagccacgagaaaattagaattgggtgtaattaaaggtaattacacaattttacgtatttgtctaaccacataattataccatcaagatgtatattagaggtaattgagagatcttaattaattacacttaccgtgtataattactcaaatctttttatttttcaaattattatttttctatataattactaactattttttcaaaccaaagtttttaaatcttttgtcaattgcatttgaaatcaacgaattataggacaaaaacaaatgcagcaaacactataattaattttattgaagttgggacaatagggaactatctgttgctatgcttggtttgatttctaataattaataggctctgtaataatatttccataaggcatattaaccatacataggtagcaaatatgtatatga

SEQ ID NO: 92619 - DNA, 1226 bp, Cannabis sativa
taggtttttctcctcgactagctgtgtccagtggtgaagaagactcgtcaaatggacaccggaggtggccgaaaaatccgttcaaagtttgaacctccaaactttaacttccaatctcgggctaacggtggcaaaaggggcagcgccgcttgggagttgaggtcttcagcatttgagggttcgaatggtcagcgcgtggggtcggacggtggtgagagagtggtcaccggaaagtggtggtggtggttatggcttctttgaagctttgaagagagagaaagagaaagggaaagagagaggggatgaaataggggaaaaaaaggttctactttatatttttttatacatgtatatatttaattttattattatacatatatatatttttcttcctttgtctcggttaaaccgagtcttcatattctcctctccttaaagaatttttgtcctgaaatttcaaagtacaacctcaagttgaaaattaaataaatgaggatacttcatatacatctcatactctaattctcaagtagtttcgtcttctttgtgatttttctataagatcttgagtactagaatctctctgttccttaacacctttagctctctcgccaagattttgacaggttgttcttcataagttacatcatcctgaagagggatatcctcatactcaatgacatatgacggatttggggtatacttcctcaacatagacacatggaacacaatatgaacatgtcccaactgtcctggtaagtttaatcggtaagcgaccttcccaatcctctcgataacctcgaaaggtccaacatacctcggggctagcttactcttcactccaaatatctttacgccacgcataggagtaactttcaagaagacatataatcaccaacatcaaactcaacttcccgtcaatggagattgacatagcttttctaacgactctgaacaacctgaagtctttcttggattcccttaatcttttcagtgctacttgtaataatttggggtccaagagtgacatgctcatctagttctacccaacacaatagtgatctgcaaagtgtctatacttgcttggtagctattattgtatgtgaaatattccaccagtgacaagtgttctacctaactacctccaaaatctaaaatatacaagagcaaagcatgtcttccaaagtctatatggtcctctgagactgtccatctgtctgtggatg

SEQ ID NO: 92620 - DNA, 2336 bp, Cannabis sativa
ccttagtttgaggggagaatattgtcttctgggtaaggtgctttcccatagggtttttggtgagaacgaagttgcaagcttttgtgctaagacatggaagtctaaggtgaaagttgattctcagatttcaggacaaaatattccaaaagtattttgctttggttttgaaaatgtagctgataagagacagattttagagcaaggtccctggtgcatcaaaggagaactcattgtgtttctttcttggtccacgaggtttggtttaaaggagctctccttttatagtgtccgtctgtggatacaacttcacaacttaccgcatgactacttctcacgatgtaatgccaatgtgttgagagcaaaggccgatagggtggtgtgcatagatctggatgaatcgaaaccatttttatggaagaaatggatttggattcaagtggagtctgaggtcaccaagccattgttcaatggttgttttttaaagttgggagatggaaactcctgttgggtgcagttcaaatacaaaaggattggcaacttctgttacttgtgcagtcgtttgggccatctctgaagtgggtactctttgtcgtcaccgatcaccgttcttgatgctagtggcatctcatttccattgtatggcccttggattaacacttcatcacagcatccaaactattttttcaggaaaaaaatcgtggcctaagttcaggaatagttttggccataacagtggtttgttgagaaacaaggagtcatcttctctggccatcgtgagcggttcttaggtagggacaggcaaggatgcttctagttatcatactcaatcctcgaacctcaaaactagattgatagcgacgagtctctcttatttcagtcgtgacatggtatgcgtttctaagccctcgacagtggaaccgagatgtgcagctgagggtgttgatggtttttgcatgcttatgtcgagaccacatctgaaggtgagaaagaggcatgtgttatttccaaatgaaggtgagtgtttgacttcaactaagtcatgtgggtttatgtccaaaagtaacaaggtgggtgacgtggctcctactattcctaagtatgatatttgtagcactgaaagcccattagagcaagggattattattggttagggagatttagatggaagttgtgggtttaggatgtacgccacctattgggttttctttaaatgatgtgggccgtgaggggaacccggtgagtggggtggttaataaggggtcgtttcttttggaaaataagttgggtaataatgatgtgttggtgtctgttaggccgagttctggtccaaataagcaggttcttttggtagacagtgggattgtgtgtgatgagcctaataactcatgatatgggcaaaagatctcagcacaacttgatgagaaaagggctttgtcaaaattttttaaggcataagagagatacatccaagaacttactactactgggacttctagccccaataagaggaaagcctcttgtgttgatattgaggttcaatcttcttctgaattcaatgagagaactacacaagtgaagaagtggaggttggattttgaaaagttttctcttaggcaaaaaccaagcttacctcttctaagggtgaagcaagttgttcgagactttccaaagggagtcggattggttggtgtgggcgtgggttggctaatcttgtttgtgtttttgatggttcttctgaggagcccatggaaagtgataaagtcaaaaggggtgatttctttaaggagttgtctgtctactcgcaacaagttgacaaactgatcttgttgggacaatctgctagactcatggcctgcaaggctaggactcggttgatggatatttctatccctgtcgaggaggatttcctggttaaagatgaggaatctgcaattggtattcctactgatgatgtgaccctttggaggaggatgttatccgtcctccactagagaaatgagaggtgttgcttggaactgtagagggttggggcagacctctacaattgtggaactgaaagccctaattcggtcgtgctcttcaaattttatctttgtgactaaactcaaagtggatgctaaatttttggtacacactcttaagaactttcatttttatttcaatactactgtgcctgctgtgggtaatgtcgggggtttaatcttagtgtggaaaaatagttttagttttgaaagcatctgtttaactgaaaatcaaattactggaattgtgtactctggccctacaaattatccttggtaattatcttgtgcttacgggccaccgtactttcatga

SEQ ID NO: 92621 - DNA, 946 bp, Cannabis sativa
tttcaaagtcaacaaacaagtgtgtcccattcttcaacatcctgcgaggaaataagtaatttgaatggacgaatgaatgcaaaaaagcctttccagagctaaaaatgcaatttgcaaaacctcctgtactcttaaaacctctggacggagaagagttgggaatatacttggctgtcacagaacatgctctaagtgtcgtattgatcagggaagagaacaatatccaacattcggtctactacattagcaaaatactcattgaagcttaaggccggtacccattgatagaaaagctcacctatttcctaatcctagcaacaagaaagctaaggccttactttcaggctcatcgtgttcgggtatacactgaccaaccattatgtcaagtattacaaaaaccagacgcctctggacggttgctcaaatgggcagtggagttaggccagtatgaaattatctttcagccccaaacagcgattaagggtcaggccttagtagattttgtggttgaatgtacgagtaaagaagagagcatttcagaaagtaacctagagttagtacaagcaccttaaccgagtaatagtaaagacaagccaacttggaggctacatgtagatgggttagctacggatcaactatccggcgcaggaatcgcccttgtcacacccgggaggtagcacctgcacgacgcagtcaaattgaatttaaggcatccaacaatgtagctgaatatgaagcccttattgccgacctaaaactcgttcgggaattgcatgtcgaatacgttgagatttgcagtgactcacagttagtggtaaattatgtatctgggtagtacgaagcttggggggaaaagatgatagcatatctaagcaaaatacatggctatgctctcaagcaaattccaagagaagaaaacacaactgctgatgcactagcccaactt

SEQ ID NO: 92622 - DNA, 705 bp, Cannabis sativa
gtgaaccatgcaacataaaatgtcatttctgatctttattaatgagtaaatctgattacatgaaatgagttttatttagggcataaaacccaacagtatcttggcacgtatacatagcacacacagccaaatactcggaagtggcttactgcaggtttatagccccacagtttctcgaagggttaaataaaccataacttttcttaaggaagtttatggacaatatgagctgttgttttcattccttctgcccaaaatttacctagaacattttgtgaatgtagcatgcttcgacatgtctctatagggtattgattctttctctcagctatcctattttgttggggtgtatgacgcatgtaaattgatggcgtatgcagaattccactcaaaaaattcacctaaggtatattttccattgttgtaaatttagaggcattaaattttctaaccgacttctccttctgctatttctttaaattctttaaattttgaaaaggttttggatttttcttttataaaacccatatgtacctttagaagtcatcaatgaatgtaaccatgtatctcacgccgctgattgatagttgcttgacacaccaaaacacgttagaatagactagctccaatggtgctttggctttgaacattgaatctttacacgttaattgatgcgccttaccgtattggttggcagcacataca

SEQ ID NO: 92623 - DNA, 595 bp, Cannabis sativa
catatataaatagcaaataaatatacatttgaaaatttgatacacatacaacataaacaatagatctccataacaaaatgcttatgaatatattcttataaggtaagcaataactgaaaactaactttccagcttgtcaactagatttatgatcagtagttaatatatacatttggaaacaaatgctgaatatatcagtccatgtaatgtaactacagcacatcaatacattatgcatataccaacaagacacaaatttagggaactcaaacaaaaatcaaagaaacatatactgagaacgtgaagagtgagtcatgagattcagaatgggaattctacgcaacaaatttcaaaccctaaacgatggtgaacaaacaatttaaaatctcagattagatttagaaatgccattaccctaaaagcaaaataaatgttcaaaaaataaaaaatatgttaaacttaaagaataccaacagagctgtacactagaggttgggtggttgattggtggtgctgctacgttgcctcctctctcgctactcgttgttacgccagaggtactgacctgagcaaagatgatgacgatgatggccgc

SEQ ID NO: 92624 - DNA, 751 bp, Cannabis sativa
tattgtaccctcattgatctttcttgcacgataaataacgtgcatgcaagactcatgttgaatttttatgaaataagctttggcttcagggaaggaaggctaaagttgtataaaaattaaagcttagactttgcttgaaaaagatcaatgggaaagcatcacagggagtaggatagacttcaagcaatccttccactttgggaaggagggttgaagacgtatcgtacccttagtgtctttcttgcacgaaaatcaatgtgcatgcgagagatgttgaattttattgaaacaagcttcggcttcctggaaggaaggctgaagttgtataaaaattcaagcatagacttcgcttgaaaatgatcaatgggaaagcatcacagggagtaggatagacttcaagcaatccttccattctaggaaggaggttgaagacgtatcgtacccctaatgatccttcttgcacaaaaaacaacgtgcatgcgagagtcatgttaaatttttatgaaacaagcttcggcttcaaggaaggaaaattgaagttgtataaaaattcaagctaagaattctcttgaaaaagatcaatgggaaagcatcacagggagcaggacagacttcaagcagtcgtaaccccagtaatctttcttgcacgaaaaacaatgtgcatgagagagtcatgttgaatttttataaaacaagcttcagctttcgggaaggaatgctgaagtttcataaaaattcaagcttagagttt

SEQ ID NO: 92625 - DNA, 586 bp, Cannabis sativa
aaagttgtcaaaaattgatcttagagtcctatttgtactattttaaaaaatataaggtctattctgtcatttaacaaaatagaaggtctaatttgtaacgtttgtaaatacagggtccaaaataaaatttagcctaattttttagatactgaaatagatatgagtatatcaatacactcattttttttttttttgagagagttaataaactcattttaaataggtgtattgtagaattttcctgcatcgagtaataataatattacgttaaaattaataaaaaaaaattataagaatcttagttagaaagatatgagaatatggcaataaaacaaaaaactgtaaggatttaattgttactgatttaattttatctcagaattagattatgaaagaagaaactagaaagatagttatatttgatttttttttttcacgtttcaatttttttttttttaaattttaattcacaagtaccaaacacaaccaaacggtcccatagattttattggtttattgttcttcatggttaatttaatgaagtataaaaattcttctaatgatattcatgtcataagtgcttgtt

SEQ ID NO: 92626 - DNA, 507 bp, Cannabis sativa
agtgatgagttgggatcgattgagtcgtcacaaacatgtttgaggtttgggtttttgaagtctgcgggactttaatatggccctagggaaacaatgctggaggttgttggttaatgatacgtccttggtgagtaaagtttttaaagctaaatactatgctaacgaaactcttctttcagctgaattagggaatagtccgagtttcgtatggtggagtatttttaaagcaaaaggactgatacaggctggggtagttcgtacgataggcacgggtgaacatacttcaattttatgtgactcttggcttccacacaacacgaatagctatgttattttttcacatcctgcacttgttaatcagactgtaagcagccttttcaaaatgaattctcgagattgagatgaagaggtaattaaggatctctttgatgatagatatcaagagctgattttttctatacaattgagttctactgtaatattcgactattggagctggcagtttga

SEQ ID NO: 92627 - DNA, 635 bp, Cannabis sativa
atttatttatttattttgcttttgcgtcggtgcataactgaggggaaatgttttgtttccatcaattgacaatcaacaactaaaaaccccaaattatggcacccacacccattagttttgtgaattgatgggaaaagtatttttgtagtagagaaccctaatctctttaatttcatatttgttaacactaagagtagccatgatgacgtggacatcaatgtttgacacatggcaagaaagatgatagctcagagttgattagtcccgagtcataacaatttggctagggatgggttcgtagccctgtacccatgttgacttcgggaactccgtgatagaagtttggacttcaataaatcatttccaactcactatctttcaatatatattgtaccatgaagacatggagcaatcatattcaggccccgacagctaaaattacacaaacctgcaccccagaagctaacctgggctcctagggtttcacccggtgcctaagttgacattcccaactagggtttcaatttttgggacatgaactagacataccactcacaaatttgtggcattagaatcaaattcgaagcaagtgcattttttagcaccaagtgcccaagcacccaacacccaggttg

SEQ ID NO: 92628 - DNA, 513 bp, Cannabis sativa
  modified_base (37)..(52): a, c, t, g, unknown or other
aatgttcattacaattcatggtaataaataaaagatnnnnnnnnnnnnnnnnttattaatatttataacactaatttcattttttgagctaatgatctaactaattatataaaaaaaataagtaaataattttagatattttaaataatataactaataaatttattataaagaatgattaattaattgaattaacatttaattcaaatttaaatttaaatatatatatatatatataaaaagtaataatatctaattttgttaattcatttaaattaaatttaaatattgaaagctatttttttttaaaaaaaaataattaattgattgatttaagagtgtaagttttaaccattaactttaataaaaaaaaaaaaatctttaaacccacaatttttattaggtaacaaaatttagatgtatatctatatttatatgcataccactattaactatcataggcattaaactttttagtgacaaccttttagtcacaacaattttttttttttt

SEQ ID NO: 92629 - DNA, 563 bp, Cannabis sativa
atgccttatcatgagagtttgcccttggtttgaaatttataggaagttgtgggtctcttctctgtgacgccaagctccacaggtttgtttccacttatgtaattcgtaagtatatattggatgggcttagctgttggagatcaaataatcatttaaatggtttaagtttacctatgaaagacaatattttttatggtattttaggtaatgcagaaatatgaaatgtggactatacatatataaatagatgtgtgtgtgcatgcgttggtgtttttatattggttatttttttgatgaagaatatatgagatatttgattaagtaatcatgtatcttgcagtataggtcaaactactcatctaaaagactaaaactaatattatactcacttatattatatttcttattctattattacacacgcatgcttcaataaaaatagtttatcattataacattcattaatacatcatatacattgaaaatattttgtgtttaactgtttataattgaaaatattcattaatacatcatatatattgaataggttttttttttttttt

SEQ ID NO: 92630 - DNA, 600 bp, Cannabis sativa
ttgtaattcacagcttgttgtaacattgaaaatctttacttattatatggttatttttacttggatgatagatcccggagttggtagaataggtacatgagtatagaatagatgggtactggtttagtggatgagctggtataatttttttacttgggtgggagtttgctgagtaattcatcttttttttttggttctttattctaaggcaaattccagatcttcctacttctttccattgtcttctactttcatattctatggcattgttttgaggaccctagtcgtggttataagattggagcattatttcaacttcaagaattgtttataaacatattttattggttctatttgggactttgagaatccattaacatattagatactagtttttttcttatctttgtgcaggttaaattgttaatcttaaaattgacttggtgtagtgaatattaaaaagttgaattttcttgggagatagagacagtaagggctcgtttggtaagccatattagattgtattgtattgtattgtattatattaaattgggtatagtactatattaaattttaatttatactaaaacattatatatt

SEQ ID NO: 92631 - DNA, 549 bp, Cannabis sativa
tctttttctaaaaagttaggggggaccatggccactccatagatacaaatagtttcgccactaattatattgtaagttgtaattaaatatagagtctcatagattttaatttgataattagtatcaaaaatcacaagaagtttacaaggcgcaacttcttagacactactatatcaattagagatagtctttcatatatgatcactttgtgcttttaatttaaccaaatacccatactcgcttatgaatgtttactgtgtttctcctctttcagtttgaaatatccaatttatgtttttttaaaaatgttgaagttgtctacacacaaattcaagatacgatgttggcaaattaggcttcttaactatattgttttaaaaattagtgtaattataatttttggttttagattgagaataaattaaaggattgcaaaaggaaaaaagaaaaagtgatgaaagtaagggacactgataaacagataaatgatgcaattaatgaaactctccaaattgttaggcgttattctgaaaataataataataataa

SEQ ID NO: 92632 - DNA, 761 bp, Cannabis sativa
cgtcggacaaaagaagagccagcctcgtaccacttcagtaggagagtccgctcagagtccacagtaacctggaaattcgaactcgaatgggaaaaggtctaataatggtagcaggcagggaaacggaaagaaaggcaagtttgtaggaaatgtcaaacaacaccccagggacaatgcctcaaagtttactgcttattctatcctaacaaaaaacttagagacaatatatgcaacaactcaatctatggtcccatacaagaaattctctcccatgaagaaggacgtgagtaaaagagacacatccaagttctgccatttgaacgcagattaaggccattacaccaatgaatgcaataacctgaagcaagaaattgaatttttgatcaaaaggaataacccgcacttacaaaattatgtcaaggctgacaagaactcgagggcctcccacaaacaacaaccaaaatcgattgatgcctccactagtggatgggcatttacaagttattattgagggtccacatcctgctggagactcagacaaagctcgagaaaagtatgcccgagccttgcagtacaaacgaaatagttttggccatagaagcaagagagccaaaaatacctcgggtaggggaacgcacaataactttcactgaagcatatgctaatcacgtccacttctcacacaacgaccccctggtcgtggaagtacagattgcgaatcaaatagtagcccgaactatgatagatgacggagcctcctc

SEQ ID NO: 92633 - DNA, 502 bp, Cannabis sativa
gagagagagagagagagaggcgaacttgaagttggctgttgggcaccgaagaagaggagcagtgctccgatcgggagagagagaggcataattggagttgggccgttggtcgccgaagaagaggagcaccaactccggtcgagagaaagaaagagagaggattttagggtttctcaaaatgagatagaccgcatatttaaactgctgagatgatgaaaatgtggtttattgaacacaagcatcgtcgatggtttagtatccccgacagttttaaatcatcgagatgccctttaaaattcggtttcattttttagattgtaactctttaaaactatcgggaaaagtataagagtttaaaaccgtcgggaatagtctactatagccgtcattttaaattcacttagttttattagcgatggtcctcaaaaataaacgttttgatgactgacgagaatagtgattttataataatgtatttagcctgtatatatttatatgaaag

SEQ ID NO: 92634 - DNA, 561 bp, Cannabis sativa
  modified_base (44)..(45): a, c, t, g, unknown or other
gccggcgacctcaccccccaagcgacgccgcttctttcgccgtnnttagctcaggatcgcaagtcaaagtttggcggttcaaactttgaatggacttttcggccacctccggtgtccaacagtcgtcttcacaactagacttagctcgtggaggagaacaacttacactaagctatctcgcccaactcgctattttttctggtgacatttttatagcttcacccctttccgacgatatcgtgtactgttttgacaaacggttggcatgggtgtgatctacttgtcgaggtgatcgttttgatatacactacccctatttttggcgacatttccggtacaccgatttttaccgccaacgatagttaatgtgcaatccttaggatggagtaatatctatgattggactaaacaattggagctcaggacttgagagcttaagatcgtctttttgacaagtttaacgactttggagaggtatggactcaacttgattattggacttgatttttatatttgttgtataacattagacatattctaaatttttatgatttgcaaatt

SEQ ID NO: 92635 - DNA, 862 bp, Cannabis sativa
gctcgacaagaaagttaacaaatttgacttacagatctgaggaaagacattgaagtatcaaaaacaataaatcaatcaattgagtgctcatagatagtctgggatagtagtagccaccttgacatatcttttcctcatataaaactataccaaagtacttatattataattaataatcaaaagaaaattaattaagcagtaacaagagatcaaacacaagatttcctaaaattcataatgaaagctcaaaaagtccaaaataatgtgagcattggcattaccgcaatgctatcatatataactcattcagacccactctcacatgtacggtgtcctcatcttttgccccaatcccttgagctggcgttggaggttggaccacaggcagcagtgccaggagtggcaccagaatccttagcattgcgattgccattggaaataaatcaacatgaaatttcaaagatggagactcttctgattgacagcagtccatgtaccttacgctgctggattcttagtggttacgcctggtatggtactgtcgtctaagacgttatcattcgtggagacttattattgtaatgattaccatgatcaaatatatgatacttttaaagaaaagagctcacagatgatgtatgactttattgaacgtattgctgttgtagtcaaaaataatcctttgattaaaactgtttacttccacaacttttcttcattcgatggtattatcataatggaacatttgtgcaatcatgataataagtacaacctcaaacctcttatgaggaaccttaagctttacgagttaataatctataaaggtaaatcgactattcagtattagagattccttaactat

SEQ ID NO: 92636 - DNA, 519 bp, Cannabis sativa
aacaataacttacttagtaatcttaataaaattattatatatttacaatatcaacaaaataaactcattgagatcacataaataccaaaaattgaacaaacagaaatttctttgagaaaaaaaataataataaaccaagaaaatcaaacgaggatggaactaactggatcgaaacttgttgcctgagattttcccaaattagagttgaagagaaaacaacaaatgaaatgtgtagagattagagttgaagatagcatagcatagaataccttagagaaagggaagcagccttgcctggttttgcctgagttcagtaaatagaagaggaacaaggtctggtgcagttttagggttagggttagggtattacggagagagagagagaatgagagtattatatggcccgggttgggctcaatgggccacaaaacaatcagcccgtttctgacccaacagacgggtttcatttttttctattgttgggctgaaggcccataaattaataggatacaaatccgg

SEQ ID NO: 92637 - DNA, 653 bp, Cannabis sativa
agggtatgggttacggagcttccaactagcttcctgaagcttgtcgtctttagtggactctgtgataatcccgtctaaatcgtagtctatcacctctttggcttcctttgaagtctaactttgtcctcggtcgctgatgttgtttatacactggaagcaaacaataagttcgtgcttaaggagtagtggtgtggtaacctaaccctaaacttttaattgggtttcagtgaaggccttatattgggcgaacttcttgaccggttcttcaattttagcactctaaggtaccagtagagaagaaccaacactccttgaggtcggcggaatgtttggtgtagctggtggggtggtgagcattacaatacctcttgagcttgtaatatcctaatttcttgcagttggttctcattagtttattcttcccaccgtagaagtatagaatctgttctagagtaggcaccttgaacatatgaatcttgcaaaaaatgtaccattcgactaagagcctataagccataggtattagttgaaatgaggctatcccgattcatgatgaagtttgcatagtgttatcaaaatttttgcactctgacgtggcatcccttcatggtgacaagtggaatcgactccaagtatatgctcgcagaatatag

SEQ ID NO: 92638 - DNA, 1915 bp, Cannabis sativa
  modified_base (1803)..(1812): a, c, t, g, unknown or other
  modified_base (1838)..(1838): a, c, t, g, unknown or other
aagcagccagagtggcgtacttgtgtataagagtcattattccgtgggtgtaagggcctaatggaggcttaaagcggggacgttataatttttctatgtgtaaagatcattattatattggtccaactaagtattaggtcctatatagtttaatgtaataatttttaaggagtatcgttagcctatcgcaaagtgacacgtctaaaaagttttaaacaccacttatattaataatgttatggttagtaattatttatgttgtttaataaattaataagaaatgttaaggtgcaggtaatttattttgattggtgcaatttattattttaaataaactttagagaacaagatagaaaaatacatcaaggtaaacaaaatgtattgcatttaaatgaattggttgaattacactgatagttagtttagtctttatatatataaagagttagctagaacagagaattagttacaatgacaacctctaactataacacccaaaatagaatctaacaactaactaattaacctctaatcatattctcaaacaaatatcacatattttttattaaataaataatatgagtaaattgcttactgatttcacttataatgtgtcatattaatatattaatataatgttgagtactttaatatactaagtaataatgttccaataatattattaaattaagtatgattggcgcatctatctattgtggtgctagttatttctcatattttatttactagcaggctttttgtccccttatatgaacctttgttaattattgctttcatcttcatattaaggtactatatgagctttaagttaatatattaaaattttaaaataatgtgtgacattttgatgaagaaaatataaaatatagctagatgaaccattttttattattattaacaactagaagaactattaataaaagaattgctaaaatatattattggtgcctaatattttcctcggtgtcatattgatattggtataattaaatatcggtttcatatatataacttaagaaaatagaatatcgttaatcaaccgtggggcgctacttaaatattaagcatcattggtgtctaatagtaatgctcttaataaaatagaaggttcttttcttataataatttattaatatgatattaacactacaaaaaattgttacttattttagtgataactttttagtcacaacatatattttttgtgactaaatgtgtcttttagtcacaacaaaaacttacttgtgactaagcatagcatttagatacaaattgtcactaatttagatttagtcacaatacttagtcataataaattataatttttgtgactaatacatttagctactgaccttttagtcacaaccagggctagccctaaggctaggcgggctaggcgtgcgcatcaggctcccgaacgctcaggccccgaaattgtgaaaaatatatattaatatatagataaaatattaaataagaagaaaaaataacaaaattatttggtgtagtggtaaaagggtttactctaaactaagagatcatgggatcaattttcaatctctacttttaaatttttttaaaaaaatatttaatgtgtagttatgagagggattgaaccttggagctcttaagagtttttgaaaaatttaccattacactaagcactagaactatcattttcatgatagttaaactatatattgggcccccaaaatttaatttcgccttaggtcccatataccttaaaatcggctctggtcacaacataggaatgataatttnnnnnnnnnnacaatttttttacttttagtcataanttttgttgtgactaaaagtaaaagggaaatttgattttctatacttaaaaacctttaaaaaaaaaaaattaaaccaa

SEQ ID NO: 92639 - DNA, 688 bp, Cannabis sativa
catatccaacttgctttcaatggccgccctgaacgagttagaacaattacccgaaaagagaatccccaatttctgtttgctacacttctgtcccgaccactcttcaatcagaatttcagccaagctgctgaaattctgattgaaaatgaaatattaggtagatattaaaattcatagggtagagctcttcacataaaggagtggtagatgtagctttactaacaagatgccatgtgtacaaccaattataactacctaactaatagtttaactaaccttcttaacatcaaatagtcctctcaaggtagagtataaagatctttgacacctatcttggagatcatagtgagaaagtttcaaatttctcagaattaatacgacattttttagaaaaaatatctatgtctgagtctgattatgaaaactcaacatttttggaacaagaaattcactatttacctgcatcatgattttcaaaacaaaaattgaggaaaataatgaaagaattagagaatgtattgatagactgaaaccgagctaatgtatccactcgttctaagcgctttatagatgagattagtaaatgctgtttcttgtggatgcggcttaggctgagccacaacacttaattaaataccatttggccaaacttttgtttttatctccagttaatgttgttttttcacca

SEQ ID NO: 92640 - DNA, 745 bp, Cannabis sativa
aaaaaaagaagaagaagaaattattagaaagatgaagatagattaaaaaacatatatcaagagagaaaaagaatatggagaagaagactgagtacttaaggagagagaaagacataaaagagaaaggaggaggagagatcgattaattatattagtgaggtccataatattgaataaaattaaataataaattaataaaaaaagtaattataaaaaattcgtgagatgatagactatatgatggacacgtgggacacaaataatatttttcaaataaatagcaaatgccagaaaataaagctgaataaaaaaatattttaatcaatcttaatttaaatatgttacattctaagaccacggtattacaatacacttacccatttagaacaagctattaaatgtcctataaataggacatttaggaaattcttcgtagaagaatcctaaataatatatatagttaaattttctttgtaaaggttgacaaaataagtttttgtttttttttaaaaaaatattttataagaaaaattaaaaaaaaaatagttaaaaaaaatatgaaaaaaataatattttacataaaagaagtaattaattaattaccctaaattatttttcgcatattttttaatttttttttttgcatgatttttattttttaaaaaataaatttatatttagtatgtaaacttcataaaatttgtaattttgactagtactcaccacaaaaaaaaaaaaataaata

SEQ ID NO: 92641 - DNA, 708 bp, Cannabis sativa
agaggttcaaaaagtaaaataaaaatattaaagtaaacatgcttttattgggattagaactcataaccttctttacaggtatgaaatgcttttaccattataccaaaggttattttatgtgtatagatatcacttttatttataaatatatattgtaactaactaaaatgcatatatatttttttcttgattttttttttcaaggtgggtgactgccccacctagcctctatgtgggtccgcccctgatagttacacttatagtaaaagaaaatatattatttaggaacttgattagttagaagccaatcttaccaaaaccttttgtagttaattttgaattgctatcggctctcgaaaacatataggtgccatagttaaataattttaattaataaaaggataaataatcgcattaatattcaaaattttgagtttttaagtggcataagtacttaatgttataaaaagtataatttttgtctaattttcgtcagtacagactccgttagcatcttaaatatgatagatgtaagacccagattctaaattatttgatctaaacgaaaatatgtagtataaattacttacaaatcttcttttaataaatttaaaactgagtttgtactaacaaaattgaacgaaattatagttttactaatattgagtacttatgccataattatcccaatataaaattagccactta

SEQ ID NO: 92642 - DNA, 544 bp, Cannabis sativa
ttgaaatgggctgagtatcactatcttaccagccatcactccgccattggtatgacaccatttcaggtcgtctatgccagacctccaccctctattcccatgtatactcgcggtgctacatcaatccaggctgtcgaagatgaactgctatctcgtgacgctttgttaactcgcctcaaggagaacttacatcgagctcaacaccgcatgtgtcagcaggccaacaaaaaaagacgtcacattgaattcaatattggtgatctcgtacttgttaagttgcaaccataccgacagtccacggtggcgcaccgcctgaatgcgaagttatgccgccgctattttggtcctttcccagtcgttgcacgtgtggggccagtagcttataccttggaacttccttcttccagccgcattcaccccacttttcatgtctccttactcaagccctttatcgggagtgctactgcacaccattttcccttgccggagctacaacgaggccaccagccattggtcttaacggttgctattgtttctagccgtt

SEQ ID NO: 92643 - DNA, 2629 bp, Cannabis sativa
ccatgccctggtgtggtttccttttctcttttgttgaggttggtcagcaactttagacttcttgggctgcttcgtggaaggagtcttttttggttcctcagtagcgattcctttgctcttatctttatgaacgcccaaagtttcggggtcctttggatcaaatttcataggtgcatttgttcttggaggagccagcacatcaggcgctgtcttagtcaatgcggtcattacaacctctattttggtcatcttggaaagtatatctcattgaattgatcttgttgagataaccttctctcagtcaattttagttgtcctgccataatgaccatggggtctaattcatcaggctagcatttttctccaacaataatctcagcggctttgtcttgagggtcatcttcatgcatatcctccagtgcaccatcggtgttagctttgacatcctcggaactactttctcgtaattctacatcctcaatgatgggattctcgattctgatcttcaccttgacgacctttctggcagctagttacttcctggggattactagtacctcctgctttggcatcggggcaagcaaaacaaaggctagatttggttctggtgagggccatgattacttaaataaaatcttgttaattatctcaacgcttcttttagctctcaatgaaagcaccaaaatgcttccctagattttctgaaatggaatgaaaattgtaagaactgaagtaataataatagaaagagaaaatataataagagacaagtagttttttacgtggtttggggattaattagccttagtccacgagtcagttttatttcgtactctatttacttgcaaatactttgagagatacacaggatgtatgttcatatgtttgcctgagcaaagtacgtaagagagttcaacccctaatccatgagattagtgaggtatttataatagttataggattacattacgatttttccttttccatccactatggagtttacaattaaacagtctctttgggctttctcatgaagtccagcccatgaagagtacgactgggtgctgactaggctgattgaggttgagttgatcgaatcaatattatgtctgataatggtgggtagttattttgaaataacatcacaattgttatggaaagtttctccttatatcgggatatgatattctggcccgatttgacagttggaattcccttatttataggccaggataaatagggaaaccggaagtgtctttcgggaacacaacatcttgcccctccgggctcggtcaagacgaaggcaaaagactctgcgagtatgaaaccaagatcacccccagcagggcatatccaggtggacttggcccactttattattgataagggtcctactaaagggtcttaaatgttgacttagaatccacgtgtctaatgccaaaaatacggataacagtaaattgaatgttaatgtgtattaaaccatttccttactatgtttttagcttatcctcataaatttcttcctacaggcaatagactaggaacaatgattatacgtatgatgaacagggtcaattttagtatgtgtattgggattgctacggatgagcaaacagtctagaaagttgatggaagcttaattttgttcatttgttaataaagcaatctaagctcagtgggatgttgtaaatttcttttgaaaatagactaaactatttattttatttttaaatataaatgatcattcgtttttgcatattcattgaaaactcactgggtatttctaaccagttttgagtcttttcacgtaatgcatcaaaaatagtatttttataatataaggctaaaatatcaagatgttgcataatactctgttacggacaagaaagggttagagaatctgaaggaagtagaaaatatttcatttggctaccaatacatatattttttattctctttagaaacatattttaagttaattgatatttcaattaaatattagtgaatatgaaaatcaataaaatccttgtaaaagtaattccaacacaagtaaaacgtaatataattaactactagaggtattagggatggagatcatacttcctcatatcttttttttttactttgctctgaggatcaatctgttgctagttgaatacaagagcaaagttaaaatttaaagggttaaaatttctaagaatgcacctcctatttcttatttacttgttgatgatagttaaccttttagtaatgttaagcaaaaatcttgttatgctataaaagaagagttttttttctcctaatactccccctattgatttttctttattatttgtttgcatatataaatatatttatttatatactagaaggtaactatgtgtaaggcacgttgtatcttatatttttatattttgtagtttttttttaaaaaaaaaattattcaaaatagaaatattatttataacctttattacatatttcataacataaattgtttaatcatttaaaaatattacatcgataagtgttgacttcacttttagccaacgacaatctttttgataagtgataaatgatatgtcgtaataagaatatgtagtaaagcaataataagacaaagaaa

SEQ ID NO: 92644 - DNA, 809 bp, Cannabis sativa
atatataatatttttacttaaaaaggaaatacataatatttaatataatttaaaattcaatatataattatataaaaatataatatgtaacataatttaatttaatattatataatataataggagatacctaaataactcttaaatatattattagacagactataatatactaactactaaaatagttgtgcaacctctcttttaaactatattcaaaaatcaataggatcatatttatgataattaattaataatatgtatatttgagatcggtacttttaatttgtaagtatgaggtgctcgatctttattagaaaatgatgattctttaggtctcaataaataataaattatgtgttgaaaattaatgatatgtgtacatacatcttgaaatattggacttcattaattaaaggatgtaacaacttaacaagtgaagttacatttgagctttaaccaaacaatgttgaagttgcagtggtatataaattgttctattataaacctatagatttacaacgagttagacttttgcttaatatctacccaacctaggaacttttaaaaaaatatttctatttaaaaaaaaaacataaatatttttaataatttttaaaaatatgatatatatttttggctaattaggattattatctttcaaactttgacatgtacccaattgtcctctgaacttttaagttcgctaaaaatgtccctgaactattgagattgttgaatttaaagacttttgtctaattttagtaaaaaaaatctaacataattgaaagttcatggggtatgattta

SEQ ID NO: 92645 - DNA, 624 bp, Cannabis sativa
taaagctaattaatattataagctgtcccttttgtgttcctaggttgtatatgtcaaattgcccactgcctacgtgacttaagcacattatttttaggcagattgtgtctgacaatgaacacatcattgttttttttttcttttcgaaatgagacagaggtcacttgtcttagactgacctcctcccaaaattaataatgaacacatcattgttaatagactgtcattgtaattttgacccttacctgctgctgagtgtgctgaaacaaaattggtgagctcatgaaaccttcaattgaccgagcgtggctaaggaacatgttaggccttgggattagtatggtgggctagcatatattaaataaaagggtaattgagtccttgtattgagggtagtgttttggagggaatagaatagtatatatagaataataaggggaattgagtggtatgcaatgttttgagtaaatactctaattgcaccaaaggagcctaagggctcctaccttttgtaattgagtttctcatacatcaaatatactttcttattgttttgctactatttcactcgtacttttgctactgttctattggttcttgagttggagttctcgggtcttatca

SEQ ID NO: 92646 - DNA, 1120 bp, Cannabis sativa
ctggccattcaataggttcttctagcacctttagcaacttttgttgttccaataaagatatgatctttctcctccaaatcctatagtcgcttgagccatgaaatttatcaatgttagtcttaacactactcatattaattttgttagaatataaatcagagatagggttaggaatctcaggttgaccattcagtggcacattcaccaaatatccaatgccattgtcatctacttatggattcaatctctcctgatcttgaggatcaatttcctctagtgcttaataattgctttcttccagtcttgcttgtaaactatattaatttgtatcttgtttcttgcaaaaaacactagctctgataccactattagaatatgcagcttataactcatcaaaatacaaattagtacacaataagcataatatggtatttttgcaaactttacatgcattcgtgaaaagtggaaaaactaaaaacaaaagtccacaactaaactcgatccaacccaatgagcaaaacacaacaccctaatacctgagttaaacaactcagatactcgagattcaatctcgatgcttcgtctccgtcaaagacagaaaccctagggttccacacacttacgatctcacagatcgatcacacacacaaaatagaaatcaaacacaccgagtatcaagaacacaatcacacacacacaacatagattgatgagagttagggtttgagaaaataaatagagaaagatagactagggcacaacaatttgatctcagaccacagaaaaacgggctacgtgtccataacttgccttagaatagcttgatctccactataatctataagtaattacaagtgtgaattagatttcaaaccacataactttttttttataatctctttgattttctctctattttctcatgattttccctattttgctatctctctctccctctctcttcttttgcatgtatttacaattgagctccagagagtttctctctctactctctcagtaacccagctcttaggagattaatgaaggtttcatgtaattctttcaaccttgatttgggtatttataggctgtaaaagtagttggggtacttagggatttt

SEQ ID NO: 92647 - DNA, 613 bp, Cannabis sativa
  modified_base (64)..(77): a, c, t, g, unknown or other
atgttcaaagagttttttctatatcttcgtttgtttactgttgttttgtagttttattatagtnnnnnnnnnnnnnnatgttatttgattatatttgctttctttgtaaaatgcaggatagggttaacaaatacagtccctctgattttctacagatcgaaatgtgtatgtacgagtaatttctctgttattaataacattaagaccactttgtctgtcaatttgttatctatgttccgtaacacctagtttggtcatttttttggatacctgactttttttttcacccttaagttgtccatagcctacttttgagggaagtataccagcccaatccaaaagaattttgggctaaggttgctggccgttgaatactgttcagtgctgaggagttttacttgatcactggtattgaatgctttggtgattgcaacaaactattgttgtcccaagaatcaaaacagttaattgagctttgtctgtggcgtaaaaaacatagatcataaagctatagaggatgctttcttgggaagtaggtggggacaagattattctctaggtttgaaactatatgttttgtatttcatctaatgtttccttcttagcaatactc

SEQ ID NO: 92648 - DNA, 1387 bp, Cannabis sativa
tgaaaaatgtggcagcctctattatctgaattctaatcattttcatggttctgttcctatcttttcttcattttctgatacaaagataaccaatgacaccatttggcattatagaatgggttatccttcttgtataaaggctcatccatttaatgaagaattgaattttcattccaattataattcccattttcattgctccatatgtcattatgctaagcaaagaaaattacctttcatttctaatcataacattgccaagaattgctttgatcttattcatgttgatatatggggtccctatagcaatctgactgttgaagggtttcgatattttatcactattgttgatgattgctctaggttcacatggatcaaattcataaaacataagtcagatgctcaatctgctattccccaattcattcaacttgttaagactcagtttgggaaaatcattaaaggctttaggtctgataatgctaaggaattgcaattcaatgatttgttttccaaattaggaatcatgcattatcactcatgtgtccaaagaccacagcaaaattctgtagttgaaagaaagcaccaacatcttcttaatgttgctagggctctcttatttcaatctcatgttcccttatgctattggggggactgtattgccactgcaacctatttgattaataggacacctacccctaatttgaaaaacaagtcaccctttgctattgttcactgtaagccacctagttatgctcatttaaaagcttttggttgccttgtttatgcctctaccttgagccaatctagaacaaaatttcaacctagagccatttcttgcatctttcttggttatccaccaggaaagcctacaaactccttgatttgaacacaaaccagatattctattctagagatgttcagttctatgaacacatttttccttttgtaaagtctgaaaatcttcctgctacctatgataattttttctctgctatgcctaatcttactcagtctctttctccttgtcctgaacctgattgtgaaccaacttttacatctacacagagtcttgaaccagttatttttcctgagcaggttcctggttctgttataaacaatgaacaggttcctaatcttattgtttctgattcacactaggttcaccatccctctgctgttaccagaacaggaagacatacacacaaaccatcttatttgaatgaatatcattgctatgttgctgctaatgctttcctcatcacggggcaaatcaactacaccttatcctttatccaaagttctatcttatcacaggttgtctcctgcttttcgtgcaacagtttgggccatttcgagttattttgagcctgaattttttagtcaa

SEQ ID NO: 92649 - DNA, 684 bp, Cannabis sativa
ccttgccaagtggggctggaattttctaaatggatctcaatccctatgttgtaaaattttggaagccaaatatcttaaggggaaggattttctcagatgcagctataaggactcggattcctggttctggaaaaatgttgtcaaggccaaaactatcttaaagaaaggggcttgtaaacttgtgacaaatggtagggcgactaatatttggagggatccctggattcctcatcttaaaggtttcatcccgaaactaaggagcgggattttaaccaatgataactgggtggctgatcttttgctggccaatggagattgggacatcccgaagcttaatatcctttttgataaagaaacggtgtctgcaatcgtcaaaggcggtaatccctcgggccgtggggatgatagatgggtttggacattggagaaaaaaggacaatttacttgcaagtcggcgtatctggctcaagctctggagagagcccatcaaagtgcggttgctccggcactttggaataagatgtggaatagcaaaattttggagagacataaggtcctctggtggtgcatcctttctaatgcactcccaactagatctgtgattgggaaaagattccacattgagaatactgaatgccctttatgtggtctaggggaggaatcaatggaacaccttttcttgac

SEQ ID NO: 92650 - DNA, 549 bp, Cannabis sativa
gcataaaacccaacacttccaacttgtttgcaacttcttaaatgtcatgcggttattagccccaattgtctgatctgtcatgaggccgaggaatctatttttcatgctctagtggattgttcttttgttagagcctgttggaatagatcaatgtctagcatttctagttggtcaggtgttagttttggctgttggtttcaggttctattgacaaggatcaatcctcaagcattggaggaagcggtaatggtcgcatggggtatttggaaggcccgtaacgaggttgtttggcaacaaaaatctcctactgttgcatcagttgtactgtcaggaagatcactccttgatcaatttcttttttcacaatcacggatgacgactttgttgtctaacagttcggtgggactgctttcgcgtgtgcatcagactacaccagctgctgatcagatcaaggtcaatgttgacagggctctgtttaatgatgtcagccgttttgggatgggttgcttgacaagaaatcatgctggtcaagatcttgaggccttcact

SEQ ID NO: 92651 - DNA, 920 bp, Cannabis sativa
ttttcacttttagtcataagttttattgtgactaaaaataaaattttttataatgtgcttccaaccttggaatgtttataacgctataacacttttataaggtttggtttggtatactaaaatttagaatttcactaattaacattagatatttcgatacttctacttttaatcgacacaatcaaggtgaacaattacttcaagtaaatttgcaaattcttgtttcttcgtttaccttatttttaattgagtgttgctgactattagctcgaaggagcaaaatacactagagagagagagagaaaatagagtagttagatgagaaaaatgtgtgtattgatcattaagtttataaaagaagaatgaagctacttatagtagctaagtacgaagaagagagtagtaactagctctctaacaaactcaaaggcaactcacacacacctaacaacctttaactaactctaaactaatcctaacaaccttgatactctccttaagatgggctatatatgtcctttaagcccatcttgtctttgaatatcttgagctggttaagaaacagagacttagttaagatgttagctagttgttccttttgaggaaacatgaaatgtctttatgatttctcttgcactttctctctaaccaagcgacagtctatttcaatgtacttggttatctcatagaaaattggatttgcagctatgtgatgagttaatttgttgtcacaatgaagtaatgcatgccctttatgctcaatattaagccaaataactgtataagttgtattggtcattgctcaatattcagcatctacagaggacctagaaacaatatgttgtggaccaaataacttttccatgagatgattgaatctctaataaagatgcagaaccttgttgtggaccttcttgtat

SEQ ID NO: 92652 - DNA, 722 bp, Cannabis sativa
acttgcactattggttattgtgtaatcgctaagagacgaatttatgacatttgatgcgtcctcttatgggtgttcccagacgcttcccccatgtcgcattaaatgtgaggtgaaaatttgtctcgagtttttctagttcggagaagttcatacgcccttcacctcccggagaggaagtagggctgttcttcctacgtccgagagcttgctcttgaactagatattggttcctttaaaggctatttggttaagtactttgctcatcttaatgggtcttagtttgccacgtgtcctatgctgagactgcaacgtatattgggaaaaacttgggacaacatttacccccaagccttatttagtcgtagataaataagacttgtacactgtctctggcctcaatgaattctgtgaccatcattccctgtcttttagcaggcaacgattcgtttcctgcctattgacagacccctccatcaatgccaatgtcagaaagatactcaaacgtttcaaccaccctttcttctaatcatgctttttcatcctgtccgttggattgggggatttaaaccgttgtgaacccccatcgtgtaatggtactccttggataccgtttcataccctaaatggcctataaaaactagcacttctctcgactgggttattttcactgcctttcaatttttagattttcaaaccctcttaacaaaattccagactttctc

SEQ ID NO: 92653 - DNA, 676 bp, Cannabis sativa
atgatgctgttcgttttttttttttgtgattcgaggaggaacacttacactagcactttaggtttataaactaagttgttatattcttgtgagacctcatgcatttataccataataacgctgaattctgttgtgcaaatagtatgtacgtgcgattgttcaacttaatgagcctaccagtaattgcactagccctttaggattaaaaaatttagttacaagggataacgtaaacatttcattaaacaatagaaatactaactcaggtgtgcaaaatgtcactgaaacccttggctctcgtgtaccaaggtgtttttaacatacatggctatcgtgtatcataatttttgagaatgctcatgtaacgtgcatagctcccgtatactatatcttatttgcccctcaatctttggcttctttgtcactagacttcgtgtataaaagggtggctcaagcttgtcattttttacaaaccttctggctctttagtgagatccatttttagaatggatcatttctttcctgccaaaatgtcccttctgagttcagaagttcatgcttccaaactcataatgcccagatgcaccaacaattttccttttgttcctacagacttcaagcctcaactagagccggatacgatgaattccagagctgaggagcttccgaccaatcc

SEQ ID NO: 92654 - DNA, 681 bp, Cannabis sativa
aagggcagccacatatgtttttgcatggttccaaggagacatgaccggcataagtccccatgtccttaacgttaatccagatatgcctccggttcagcagaagcggcgcccccttgatctagtgaaggcaaaagctctggaaaaagtggtggacaagctacttgctagtggcatgatctgggatgtatattacggccaatccaatactggtgcctaaacctaatgggacatggcgggtgtgtatagattttactgatctaaacaaggcctgcccaaaagactgcttccccttcccccgattgaccaaatggtagatgccacctccggattcaagctattgtccttcatggacgcctatgatggctacaaccagatcaagatgcacattgcggatcaagaatgcactagcttcaggaccgataagggggtatactgctaccaggtcttccctttcggactaaaaaatgctggtgcaacataccaaagaatggttaaccggatgtttaaaggccttctgggacggaacatggaagtgtatgtggacgacatgttggtcaaatcaaaggcatgtgcaagccatctagacgacctcgaggaatgctttgaagtggttcggaaatatggaatgaaacttaacccgaagaagtacactttcagggttaaattaggaaagtttttggg

SEQ ID NO: 92655 - DNA, 1329 bp, Cannabis sativa
  modified_base (881)..(883): a, c, t, g, unknown or other
  modified_base (1204)..(1230): a, c, t, g, unknown or other
  modified_base (1296)..(1302): a, c, t, g, unknown or other
actagttcacccaaaaaccccatttcttgctcaaaactccaccaaatgcaaccaaaccatctagagcacctaattagggcatacacaatataatcaaaccagtagaactcaggaaaacagatcaaacaaaaacatgccatggatgaaccaagtttgagttttcaaacccaaacttgttcatccacaaactgacaactcaaaactagcagctagatcatcattctaactcaaatcaaacttagaaaacaaaatataaaacattttaaccctaacagccatcaaaacataaaatcatataccaaaagcaagcttataacacaagaatcctaaaaaaaaaggtaattagggttacctcaagctacaaatcaatcccacaccttgaaaaagatccttgaatcttgctgaaatgaagaattcagcaacaactcttcttggttcttgttgtgttcgaagagagacaagggaaaagagagacaattccctaatttttatttttttcctcttcaattcttattttcttaattttcagcataacacatacattaaacacttaaaacgggagttgtcaacatccaaggcagccaacaaaaccccttgacaaaaagactaaaataccccttgatgcataacttaggcaaaataaagtctaagggtaaaatggtcaaaaaccataacccctctcaaacttggtattctattttctccaatatatatcacactaagaactaaggttctgaacatacccatgtggtcaaactagccatccatcacattttctgttgtcgctgagcaaaaattacaaaaataacataattcaaatataaatcaaataatactcctagaatttaataaaattttcggaattgagaaattataactcnnntgcccatttctaacaatggggcccagagataattaaattcataactaattataaaaatatcagaaattagtactaatttcttttactaatttaaattactaaagcgttcattacatgtatggtgaatatgaaggagataagactccatctttggaactaatttaggtagtaactagaagagggtttggaagaatgtaaatgggcatatgggcgtgtggtcataatcctttgacaaagacttttattttatttatttatttattttttctctctaattagttagattggttttgcttgggtgtgttggaaattattttaccnnnnnnnnnnnnnnnnnnnnnnnnnnnttgattaacaccctaaatataaacttctaaaacgattatagctaaacacatataaagtatgagaannnnnnnattgggtgtagcggaataatatgtctc

SEQ ID NO: 92656 - DNA, 802 bp, Cannabis sativa
agattaggatgggattagaacaacttttaatcctcttgggcatgtttttcggaaattcagacctagcagtcccatgtcaattgagttcatcaagttttgagatttttcgagtataatattcgtccctacatcatattatttaacagaagacactatatgtaatcttttgataatttaatttaaatataatcatcaatcatacaattatggtagttatatgatgcgttttgtactgcttcattggcttttttttttttaattaaaaaacattagacgtggcttcacttgggcatttttccacagggactccattattcaacatcaacacaaaaaaaaaaaaaaactcatctactgctggcactggcgttttatagctaggtttacaagaacatcaaactaatggcttaaaatacaaataacaaaaaaaaacaaaaaagaaaacgaattaatgaataaataaataaacaggaaacaaagtatgcattgatggattaattgagcccacactatgctctcatggaaggtgtctaatgtcgattgagctcacacttgcaacttcactgtcaacaaattaagccttgctttttcccaacaatatgaaggaatttagttacacaagcttcaacagaaactggtccgatttctttggtttccaagctgaaaataacccaaccacctgcctataataaccttccaagatcaatagagcataaaaatctgtaatgggtctgtatagcaactattttcatagacagcaagatattatccctaaccgaagaaagccagattggttggtaaataa

SEQ ID NO: 92657 - DNA, 1016 bp, Cannabis sativa
agatagttcagctttatctttcttcctctgtttttgtactttgttttgtttttttcgcttatagccaaaaacccttttctttaattagaaaaaaaaaagatattgtaaatttgtaataataataatttttctctttccattttcacaggcaaacataatagcacggggaatctaagttctgatctaagaacatggttgagtgcggctcttattaatcaggacacttgcagtgatgggtttgaaggcacaaacagcatagtgaaaggactagtcactggtgggcttaaccaaatcacttctttggtccaagatcttctgacccaagtcaacccaatgtttgattccaagcccaaaaaggctaacaaggcccatttcccagcatggatgaagcccagagacaggaagcttgtacaagcaaatggggtggaagcggacgccgtggtcgccgccgacggcaccggaaacttcacgaagatcatggatgctgttctagcggcgccggagtatagcatgcaacgttacgtgatatatattaagaaaggaacttatcatgagaatgttgagattaagaagaagagatggaacattatgatgatcggagatgggatcgatgccaccattatttccggtaaccggagtttcattgatggttggaccacatttcgttcggctacttttggtaagtgtctttataagtattacatatatatgaatatatgtaccttgtcggtagttatatataagtgctttttttttttctttattaactctctcattacttgtcattgaagaaatttatagcctaaaacatgtagatatagttataaactacatttgacccgtgtgaattgaaaaaaaaaaaaagtctgaattagtgagatgtgctatttttgaaatgctaaaagtaaagatctacatgcattgccttaatgcatgtatagcaaatggggtcatttggatgagccacgttttgatggaaatagtggtattgaattaataaaagttaaatatcacat

SEQ ID NO: 92658 - DNA, 1035 bp, Cannabis sativa
agatgcaaggttggtaattattgaaatcttttgagcattactccaatcctcaaagcttagcttagctaacaaaattacatcatcaatagtcggttgtttagcattccaaacgagctagtttcggtgatgccatatcgaccaacaaatcatagctgcttcaatagcttcacttgttgtccactgtcttaatccttcatcaaaccagctcgagaacaccatagcaacagcaccaagtcctccaacccgagaaccactccaactattttgagcaaagggacatctaacaaggatgtgaaaaatagtttcaggagcacatttgcaaacaggacaagtagggtcaatattcacttgtcttcctaataacggaaaacatgttagaagattgttagaacaagctctccaaagaaagtttagatcttttggaggtactttcaactgccataaatgactccaaaagcctacaatctcactgccactccaattccctctccatttttgcagcatattatatgttgatttaacagaaaacatgttggttctttccttagaccaaaaccacgatccttggccattttcactaatcggtacatgccaaatcaactccctatctcggtcagagagaacatctgttaacgcaaattttctttaacactcagagtaacgatttcacacagaaaaaataaaagctataaaaataaaagtatgaacacacaaggttttttacgtagatttgcagttaaaattctacatagtccacgagtcaatcttatgcagatttctgattatttttcagggcctcctttgtatgagtttttttgtcccccttttcatcttgcttgccactatttataataatatagtgagcagttaattacaaagttgactgtaatctttacagcaattattccctcaaatcatgggatttgattacatatcacgtagtgtaaatgcggttataattttaaaatcatatagttgtgagtttcccgcttttattgggtaaaaaatgatcgtgttttaaacatgtctttaatt

SEQ ID NO: 92659 - DNA, 827 bp, Cannabis sativa
ttttttcacaacaatattatttttcggttaatttttctgtaatgaaaaataaatccataaaaatgttatttagaccttatggttattatattaataagttatttggtacgaagtacagatcaaccatatcagttagtaagcccacttagccacattatgggttgtgaaattatacagtctagaaatatataagcaaaaaattacaactaatcaaaagatttgagagatgtttacattgaagcacatagttaccaatacccaaacagaacaagtcccctttcaccttgttgatcaccgtcttagaatcactctcaattatcacaaaagaatgcttctaaacgatcactgactccaggactaactaacaggccgcagcttctccaatgagtgggtcagagaagttgagcatattgatagccacccacaaaactgtctccttgtggtctctagccaaagccatcatgcacattgagtcactaccaactttaacatcataattgttcttgacccaatctttcagtggggagaccaaacaggaggcgcaaccgtcaccggcgaaggaaatagacaagaaccaaaatttgcataacatataaaaatatatagagtcaatatagtgcttactgttacatatagaattattgtaaatcttatcattgcgggttttccatatcgtatccactacaattgaagcatacagaaacaattcttggacctcctccactcttttttccttcaggctccataagaatttgacccaatcccacactcgggcctcagaatcctgctttggcatcacacctcagggggaggacctccaaaggtga

SEQ ID NO: 92660 - DNA, 765 bp, Cannabis sativa
agttcagggggaatttttaatgaccagaaaaattgaacgggcatgatttggtacatgttaaagtttaaggggaaaaaatcctaattagccttaaagtaatacaatttttcttgagttacttaaaaaaacctatacaaagaagagttttggtggctaaactctcttaactattattttacttgtatttaattctttaagtttgaattttgactagtaaaaccctttaaattactgaactcttagcaaatttaaggtgctatctaattaactgcctacatagattgtttatttggacactcttatacacgcgatacgtttatattggtatatagctaatattattattccaaaattcattttaaaagtacaaaaattaaaaataaaatatttacaaaaaaatccataaattttgaaataatttttataatatttggataataatattaggtgtactaatataaacattttcatgtgtacacgagtgtactcataagcattttatgttaacagttaactatatgataatagatgatactttaaatttgttaatgatttagtagtttagtgaggtttaccaccaaaatttaaactttgagggttaagtgcaaatagaatgatagttgagagggtttagccgcaaaaaactcagaaaaattaattaactgaacattttgggagttttgtttgtagccccacaaatttccacaattgtgtacaccctcaatattaaaaaaataaacttaaattaattttaaaaatcacttt

SEQ ID NO: 92661 - DNA, 547 bp, Cannabis sativa
ttgtctgaaaattttgatggatggggagagtagatcgtaatcgctatttggctttggcatcttaggaatccatttgtcttccttttgataaaggtggcctaaatttgaaatgctttaaagatattaacttgtcacttatttgcaaattaggatggaaattagctttgggggatcgatcattgtggtgtcgttcctttttggccaagtattgtcataattcctcttctttctggtcgttaaatgaacatggtccattgtcttttggagctcatggagtgatggctacaagagaggttcttagaaaagaaacttgtctcctagtaggccctagtactgctattgacatttagaagtccccctagattccttggatagcctgggataattatcgagctgcttttaatcctattattgaggtctccccatcttttgttaccccttgtttggttaaggcaaatggtgattgggactcgaacaagcttcaccaatggtttgtgcctagcttggatgagtcaattctttctttgaagaggttgccacctacaca

SEQ ID NO: 92662 - DNA, 804 bp, Cannabis sativa
tgaaccttctgcgacttgcttccttacgacctaaacctacccagagagcgcacctttcctttaccaagcctgcaataattcccacagaggatgtggtagtttcaatacccattcttcgatgtggggtatcgatcccttttcaccccttcattgcggccattctcaagcgttacaacgtgtctccttttcaactaactcccaatagttatcgcacagccctggccttctatgcgatgtatatggggtatgtacatagggcaccgacagtagaagagtttagttacttttaagatataaagagtgtaggcctccacaacggtttctattgcttcagcaaatgggccagctctgagattaatggagtggaaggcatggtttccaatatgggagattggaaatcgaagtggttctatatattcaaagtccctacgattaggtttgactttaaccgttgaccgagtatgtcgcatgtttcctgacttagttattttttgaattattttgagattccacgctaactcgctcttttcattttcgcagatagaccagctcgacctgcactcgacgcgactcgcagagagacagctgaagttctcgggagccttcatgtacaagatcgcgacgagcgattattgtgtacgactgccaagctgcgagaacataagctgattccaaagaacgctagtcttcagagcgagccggtgtacaaggaaccttctgagaagcaacaagagcgaatagataaacgcctctctaaacaaacttctagaccatcatcaggtaacatatcgcgtgtattaacta

SEQ ID NO: 92663 - DNA, 758 bp, Cannabis sativa
  modified_base (593)..(593): a, c, t, g, unknown or other
taactgaggagaaatcatgatcatattgaatatctgatcaggtccttttcgacttaaggcatctgccacaacatttgcctttccaggatgatacaggatttaatagtcatagtcctatactagctctaaccatctccgttgtctcatatacagatccttttgagtgaaaaagtacttgagactcttgtggttagcacagatctcacacctttcaccatataagtagtgtcgccaaattttcagggcaaacaccactgctgcaagttctaggtcgtgagttgggtaacactgctcataatatttcaattgtcgagaagcataagctatgactttatctgactgcattaacacacagctcaaaccctgccttgatgcatcgctatacaccacaaacttttcttgattcgatggcaagactaatacaggagctgtaatcagtcgttgtttcagctcttggaaactttttctcacacttatctgaccatatgaaccgctgatttatcttagttaactcggataacggcattgcaatcttggaataaaactttcacaaaacaccgataataacccgctaaaccgagaaaacttcgaanttcaatgactgttttaggtctaggctaatttttcactgcttaaatcttccctggatccatcataattccgtctcttccaaccatatgccccaggaaagacacttgtgacaaccaaaactcatatttttttgaacgtcgcattacgtttatgatctctgagtcgtc

SEQ ID NO: 92664 - DNA, 556 bp, Cannabis sativa
cgttttaaaacggttaaccgttttgtcacagggaaaaaaaatactcaaatttcaacttctcaaaacccaccaaaacctaaccaattgattccaaacttcacaaaacacttataaaacatccatatgacattctctacgtaacagaacttaaaatcacgcccttaaatgaaaagtgtcattaaagctcaagctttgagttttaaaagctcaaacttgattcctatctcaaaatagtagcaaaactattgaaagaacatcaaatccaatcccatatcaccttagaagcaaaatcaaacactcacggaccccataacaaccacaaaatacaaagtcaaaccttaaaacctaagcttttcgatgaaaaccataaactaacccttacctgaagcttctaatcttcttgattcacctctagatgctacaagcagaaggaagagctagattttgggtcgaagaaaagaaaattttgacagtggtggtggcgtttggctcgcacgagaaggagagggatgagggttaggtttctttgttttaaagtttaacatatatatatata

SEQ ID NO: 92665 - DNA, 1636 bp, Cannabis sativa
ttaggaaaagcctcactaccataggcagataggttttgtccacttatcataggagtagcaattggtttagcttcctgcatttcagctctgagtaatagatccttggcatattttgtttgagacagaaatagtccattggttgttttagcaacttcaatgccaaggaaatactttaactctccaagatctttgagagaaaaggtattattcagagatgtaatgagggaggccactgtcttggaatcactaccagtaaacaatatatcatccacatagactaacacaagtgtaatggatgtagaattgtgaagaacaaacaaagaattatcagactttgctgctgtgaaaccaaatgacagtagacacttgtataatttctcgaaccatgccctcggggcttgtttcaaaccataaagagccttgtggagtttacacactagattaggctgagtagtgatttcaaaacccggaggttgagtcatgtaaacctcttcatgtaaatccccatttagaaaggcattattcacatctaattgccttatactccaccctttggaaatggccaatgttagaacaattctgatggttattggtttgacaacggggctgaaagtctcagtgtaattaaagcctggttgttggtgaaatcctttagcaaccaacctcgctttatatctgtcaaccgaaccatcaagattttctttaatccttaggatccacttacatccaataggttcttttccttctggcaaaggaacaacagtgtaggtacgatttcttacaagagcaagaatctcttgagacatagcctgtctccacttctcatattgcatagctattttaaaactctttggtactttctctgtgagataaagctttggcttatgtatacccgatttggccctggtagtcatgtgatgtttgttggttgatgcaacagaattagggacaataggtggagttatgttggtggatgatgactcaagaggtggagagatgagattatgtgactcattagtgtgcgtgggactggaatcaacagctggtgcagctgcatgagagacacctggtgatgttggcaaaaataatggtggtggcagaggtatgaatggttgtgtggaattctcagtggtgggagatgtttgagcagatatcatatggaagagacagaggtgttgtacgtgtgttttgagtgtctatggtaggaatgagagcagatggagagtattgaataggtggatcagatgagtgtttctaacaagaggcatatggaaaattaaactcatcaaatatgacatctctagagatgtagattcgatcattagagtcaagacacttgaagcctttgtgattaatgctgtatcctagaaaggtacaaggtgaggatcgaaattgaagcttgtgtttgttgtatgggcgaatgttgggaaagcattgacaaccaaatgtcttgaaggtgctataatcaggtttgatattgaagaggacctctataggtgacttattgtttgagaacagaagtgggaagcttattatggatgtagacagctgttctaaatgtctcatcccaaaattttaagggcatagaggcatgtgctagaagagttagaccattttccagatcggaagagcggtt

SEQ ID NO: 92666 - DNA, 573 bp, Cannabis sativa
tgtacactaactcaaaaatatatgtacccataaaaatttaaacatatactaatttaatcttggttaaacaactaaataataacaaacaagaaactgaataataacactacaaaaataatattaatatatgtacctatataaatagaatagtaacaacaaaaataatattaactgttaacaaatatttaacaacaacatgaaaacatgaaaattactgtatataaaatttaaggaatctacatattttaaccactaaagttcaacatacaaataacatgaaaataacgtgtttaaaaaaacaatgaaatcaaataacgtgtttacaactttaaaacaactctaaaacaacaaacaatgtttctaaaaatattagttttcaattgcatgtaaaatatgagacttctgtcatacttgatttccaatagtgaatagaattttttaactagatatatatatatatatagttgtatatgtgttgttgcatttttgtaatgtagttgtatataccgtttgaattatgtaattattttattggcttagtgctattttgccaaaaaaaaaaagcaattaaat

SEQ ID NO: 92667 - DNA, 1114 bp, Cannabis sativa
accgaataagtaactaaaatctgggttatatataaattttgtttaatttaaagtttagttgcttatcttttaataaaatataaaataaactaaaatgtagattttgattacgttattctacctttgtgatgatgatgttgcttttgattcgtagatagatttttaaggtaatttgaatgttattaagaaagaaaaatataaaagtatcttaaataatttgacaacataatattacctaaattaaattaaattataacatatagttaattttatgatgtttaactttaagttattattaaatagaaagaaaacaactctataataacatataattagtagatatactgaattttatttaaatttatagtttagttacttatttattaacaaattataaaataaactaaaaggttgtttttatttttgttatattttgtttttaataataataaaagaaacatgtatcaaaatgatcaatttaaaaaataaattgtaataatataacttttaaattaaaatgatgaaaattgtgatgagaaaagatttttaaaataatagacaagagagagaataccaattaaaaaaattaaaataaaaaacgctcatacatagtttacacgagtaaaaaaaattgacataacttttgagaggaaagacttaaggaaataattatttatgttttcggtataacgttattcactatttgcatccttctaaattgcttcaattattttcataattaatttaaatactacttatataattaaaacttctctttttaaaaatgcttttaaaaataaataaataaatagaaaaaaaaaaattactaacagtagatcagacaaggagaaaataattttttaaaaaattgacatactaagagtaaaggcaaaaataaaagatttcttttttttttagagaaaaaaataattgaaaatggcttacgtaggaaagagaatcaaaaagaaatcaaatggcttgtcattcggcataagctgccagggtttttaggattatttaggtcagcgtcatttttgtgattatttacaaattcatgtatataattaaaaatctccctaaaaaaaataaagtattaatccatgtacaactaaac

SEQ ID NO: 92668 - DNA, 768 bp, Cannabis sativa
ttatattttattttcgattaattggattatttataatattgtatttcgaaagttctcgaaatattgtcttaataagttatctttctaaatgattaatcataatttatgtaggttaggtgccttataaatactaaagagacacttgtattgtgttgttaatgatattttctaaaaattattttcttaaattatataaaactcaatacttaattacactaatattaatacgatattaagaaaaatattaagtaccaataatacttttgaaccgttctcataattatactattacaattaaatattaattaatactatatatattttaacaaaaagtactatatattttaatttcataactactataaaatttattaactatttgcaaatgactaagtacttaataaaaaattgtagttggccttaggttaagatagactaggctcgcgcttagaacttaatcttattaagatctaaataaaaaaaatcttttattaaatatatatatatattttaataatttttaaaaatatcatttattattataacaatagactaaaaaaattatttttttaagacccaaattaactcatcaccggataattctatataataattgatacataaatacaagtctttgttgttgaaaaaacagaaaaaaaaaacaagacttaacattaatcactaaacatagaataatcatttgttaaaagcctaattaagtacatttttttttcactttcattcatgcaaaattggaaatttttgttt

SEQ ID NO: 92669 - DNA, 567 bp, Cannabis sativa
aaaaaaaaaaaaaaaaaacatgccgtgactacagtgcacggcatatatgccgtgcactgtagagaaacctacaaaatgctactcaatttgtaacctccttggaacaaatatatacaccataccataaatttacagtctccttggagctgctctaatatttgaggctttaataaattcatattctaccaatgtataaacatactgaagataaaaattttattaaatctaaaattgtctgtggactaagttttaaatttaataaaattaaataaactttatgatagagttaatcaaatatttagtttataaaaataaaaacttgttatttattttaattaaatttatgataacacaattaagttgattatcctaattaccgtaggtaaattaagaaaattaatttaacatattatcataattaattatataaatacaataaaatttataagaatgaaattattatacatagataattaattataatctatgtctattaatgtgaattttatttaatatataatttttatataattaaagatgttgtgactactctctaattatttaaaa

SEQ ID NO: 92670 - DNA, 1023 bp, Cannabis sativa
  modified_base (797)..(797): a, c, t, g, unknown or other
  modified_base (962)..(962): a, c, t, g, unknown or other
  modified_base (989)..(998): a, c, t, g, unknown or other
cttagtctattctatttatatgttatgttctggcgaagctggtgaccaaaccaattctcggagatgttgctgttctgcataaatgagactcgaaaactcttcatttttgagtgagtttcccatgttaaaaatgagaaatgcaaagttgtgaatttgacttctctgaattcatggatcttagttgtaaaaaactagacgaataagcagaaccagcgcactaggccatttgtcaacctgggcgctgggtaccctatttttgagctcccaagatctcgttttgatacatctaaggcttttgaacttgaggacgaggtctcctaccctatttttaccattccaaattcaatggtcgcgttgaatttgacattgagaaattaaaggtagcgtcccaagttgattgtcaacctgggcactgggcccagcaccaagttaacctgggcgctaggtcccatttctaggggctcgagtttgtggttttctcccagagtgtgcttgaattttcattatttctaatgactaaaaaaattcctggaataatttttggtgaacttgatcggaaatagcccaggttgacaatatgtcaatcgacgcttgggcccagccccaggtgtcaacctaggcactcggtcccccttttccccttaagaaattccatttggtctccagaaatagttgaatctcaatattttctaaaaacgaagaagattcttagaagttttcttgaaaacctataattaaaatggaaaggttgacaaaatatcaacttgggcacaaggccatgttgggttttgtgcccnaaataaaacccatttcaatagaataagatttactaataattaataaaagatcagaaatcgcttttatgttgcatggttcacatgatttatttgatgattatgtttaatgtataaatttaattaactctagaatatgtataaatatgtatatatttgttcatgatnatagtgtcgtcagcacagtgaaatatnnnnnnnnnnatatgttcaaaagtttaattcccat

SEQ ID NO: 92671 - DNA, 739 bp, Cannabis sativa
gaagagaaaggccttaggaagcgcggtaaggcgcggttatggaagctcaaggcactcaatatggagattgagaatgataaaagaggggaagaagagaagatgaagtcagagtatgaacaattcttggatgatttggaggagaatcctgatatgaggtttaatgtttctttgtaccataatgtcaaacaacagaggttggtgatggattagatttaccaccatcaattccattgaatgaattgcttgctgaacttgatcttaatgaagatgaagatgaagatggagacagtaacatgatggggtgatttaataatttattgagtttttgttgttttccatttaattttataatttttaatgatcagtaagatgttatgcaattttttatttattttttacttgaatagaagataaatgagtcatgttaatatgtatttgaataatttaccgtagttataatttcatgtaggtacttatctactaagtgttaaacaaattgctacgtggcaatttttgattgatcaacgttattaaatttttttttttttaaaaaaaaaataatttaaatataccaataaaaaaatcatggataatgacttgtaatttaacggtcatgtgtatatagagaattaaatttaggtatttatttacaactaaaaattaaactttaagtatttatacctatataattctatggaacttaaaatttaaggtaaatattattttagaccctgtgttt

SEQ ID NO: 92672 - DNA, 1466 bp, Cannabis sativa
tgaggccaagtaacagctccaaaccaactagtcaatctctgaatcacacgagtagataaaaacacagtcaaagaaaaggtgagcatctgtttcttcctctaaatcgcagactgggcaattcaacgtctctacaaggatacaaagtttgatcaacttgtccctcgtcaacaaataagaattcaatgcttgccaaagtatgaatctgtgtttaggaacactgaatctacaccaaacattcctttgatcaacatgtgtaattttattttataaacaaaaataagatttatttgaatcatatttagaatttttttacagtaataacaatagtgcgaatcgggaatcccccgtaccaatacaccaattttttagggtatatgcaaatataaacattgggtgattttggatgcatttaggtattttatatgttttgttgatttttgaaagaatggacttagagccaacttagaagagactaataagagcataaatgcaatggcaaaacgtgcattgcaagtatttggttagtgatagctccaaaataaactaatccttggattagactatatatatatataatattctctaacacctatatttttatatgtacaatccaatataaagtatacaaaaaatacaaaaatttcactctcaataacttatctctactttatttttaaaaatatattagtaaaatttcactttttttttatagtacatcaagcatttatattatatcatttctctaaattttttatttacttcatttaaatattatatcattaaatattttcttaattaaaataataatataaattatataaaataaataaaataatagtaattgttctgaggagagaggaacaaaattttgatactcaaaaatttatcagcatcaaaatataggctaaacttcatatgtataattaaatttaaatatttatttataataatatgaattaaatttaagtatttatattacaaattaatttaaatatttatatttaaagatgaatcacactttcatatattcataaaatataatcaaataataatgaaagggtagaaatgagaaaatgaaaagcaaagaatagtaagctaagctagcaaaagtgacaattatatataataatcatgatccatatcatattcaaaattattaattaagttgtcgaatatattttgttatggtgtgtttggatcgatgcaatgggaaaagaatattatttataaatatagatgataattaagttgttttcaattgctatgtataataatattcagtatatagactaatctttggtggccactacttttaattgcttggccaatagtgattatcaatgatgttattttcaataaaaaaaataatgcacaattaaccccaacactagtacaccaaattaacttattatataaacaagtcaaattgatgtaaacgtacgtcttaataatatgtatttatatat

SEQ ID NO: 92673 - DNA, 661 bp, Cannabis sativa
aaacagatagagcactgttatgggacactaaaatacttaatatctctatcacataacgtcttataattagttagtttctcattttttattaaatttaaataagtaggacccaatattaaattgcactaatggatattacacctcataaggtactaggcatcatgggtgctctttaaaagttctcaaacaaattagagtgtatatcaaaaaaatattgttattgagcactagtagtgtctagcaccttttatataggtggtgtcccataattagttaacaatattttctaaaagttattctattaagttatatgaaatctgatacttaattatactaataacagtatactatcaataaatgtattaaacaccaataatatcttttagcaattggggtatgataaccattgttgtaagagagtggtagccaatgggaagtaagagaccaataaaaacaagagacagacattctccctgcccacactcaaattaaaaccaccgtcagatcccaataccaatacagtcaaaactccatatccatatcttccataacaaaacaaacccattaattcattcattcaaatcaactaatataaaattataattaattaagctcaaattcctaaaacaaatatttaagaatatatatatatagagagaga

SEQ ID NO: 92674 - DNA, 547 bp, Cannabis sativa
taatatttactaattaaaattaacttataattataattaatattatatttttcaaaatcagaaattatgttgcatcaacaattacttttataacgtatcagcaccatttggtctgtatatataatagattattcactctgacatgcaagtctttccaaatgttgaattcattctatatcatgtactttcaacttaatttggcaaaatcatagcaattctatttttgaactataattaaattttatgtttaattataaattattttgcaatgtgtctatatttaatatatattaatatttattatttttgaaattaaaagtgtttataaaatacataatttaattcaatctatattatttaatccgtaaagtacggatatccgcacttaggaattaaattggattgaaaaatctaaaatctacacttgcacaaattgaatgttaattgacatgtagaagtaactgactgaatttaatttacacatttatatatattttaagaaaattatttatataattaatattttaatgtaaaaaaaataataatt

SEQ ID NO: 92675 - DNA, 613 bp, Cannabis sativa
cttataactaaatgcctctccactgtcacctaccagctttccttaaatggtcaactctcaactgttttctcttcttcccgtggcatccgtcagggcgatcccctctctccctatctcttcttacttgtggctgaaggtttatctgcagccatccgtcttcatgaggatgctgctctgttctctggcctcaaaatttgccgaggtgcaccctctatctctcacctcctttttgccgatgacagtatgatttttgcccctgtcacctctcattccactgaagccataaacagaattttgctcctttacttccaagcttcgggccaatctgttaatcgtgataaatcctcaattctcttttctcctaataccacccctgcttctcaaggccaattccgaacttcccttttgctaaatggtgaaggtttcattagcaaataccttggggtcccccattgcattggcagagttaaaaactctatttttcactatctcatccaaaaggtttcctctaagttaaatgtttggaatgaaaagcttttctccagggcgggcaaagaaactctcatcaaatcggttattcaagcaattccttcttttgctatgtcctgtttta

SEQ ID NO: 92676 - DNA, 610 bp, Cannabis sativa
cgtatacttagttttattctaggtgcaatgatacgataaataattgaacaaaaaattttattaattatattttgaaattatttttgcctaacaaagcatttacacataaattccatcaaaatatgcccaaagtagcaataaaagaagaattatactaataaacaaaatcactcatataaacaaagaaatgagactaaagtagaggaaacatattgaatttaaaagagggcattttctaaaattggtaagcttacaacatgtaattgattcaaactgtgaaaatagatcgagagccaaaaatcgatgggtcaaacgaaggaagggaaagagtcaatcgcaactcaattggctcaactgttgcttaccccagtaggcgcaaatcggtagaatttacattgagttcactaccttgtactcaatgcaaaagaaatttgttttttatgtcgagcaaaatcatacaagaaccttctgtagtcctacctggtacatttttaaccttcacttcctacacacaactcattctctttcaattaaaaataaataaataaaagctgaataatagaacctctgaataataaaagtatagttttcttgcctcgtcattagaaga

SEQ ID NO: 92677 - DNA, 1830 bp, Cannabis sativa
aatgcgtcccccagccacaacccacgccacggtcgacgacgacctaggggagggatcgacgacgacctcgggctttcctcctccatgatttcgtccgctcgagtcgcccacagcccacgtcgtcgcttcattccgtcgtcgcccacagccccaacgcaccaccacggcagtacgacaccacggtaactcctcaatttatctctctcaacttattttttttatttatttatgtttattcaccacattttttttcctcaccaaaatcaaactttccaacatagacataaaataaatttaatacctctatagagatcgtggacaagtttgatgactacaaccacctctagcatgtttttccaggtgtgttgaagatcatccatttgttcttttccacaagaaacatttatgaaagagtaaggtttgaaaagtggagtccatgaatgtaccttgcagattgaatttgttaccagtttgtttaagcattctccaatttccattatgtgtttctttctagtctagctaataatgatgagtaaatgcaagaagagtatatgcagtgcatgcagaatatactctatttagtttttaagtcgatctatctctctcagtttattttttattttctttgttggcatatattatatactagacttagtttttaagtcaatttaatgtctgcaaatagaagaaaaagaaatgtaactatttaacttggtcaacactgttgtaattttcattctctcaattaaacgattttcttaatttatttatgttaaaatttgaacaactaattaaattaatttttttaaagagttgacccggtcaacctgccaacccggtcaacctggccaactgaaacccgccaacccgtgacctgccaacccgccaacccgttccctattggggtccgagttcggttttctttttttgaacccgaaactcgtgaacttgaaacccggtaaacccgcccgatgttcagccctaacgtaaacctccatatttcttcctaggaggcccttaaacattcggttcaccattctctgataagttgcatcagcgttttttaatccgaaaggcataactaggtagcagtatacccctttgtcggtcatgaagctagtgtactcctgatttgcaatgtgcatcttaatctggttgtattcggagtaggcatccatgaaagacggtagcttgaacccagagctggcgtctaccatctggttaatccgaggtaaagggaagcaatctttcgggcagcccttattgagattcataaaatctatacatacccgccgtgtcccatttggctttggcactagtaccggattagccaaccattgcgggtagtacatgtcccagatcaggtcgttggtcagcagcttgtctacctccttttccagggcgtctgcttttactggatcaaggggatgccgcttctactgtactggcggcatgtctgggttaacgttcaggacatgggtaatcacgtgagggcttatgccaatcatgtctccttggcaccacgcaaaaacatctatggccgcccttaatgcttcaataattttgtttctttcctttggctctaggttttttcctagaaggaggatcttggtagggtcgaggtcgcatacccgtacttcctcgatgtcctccataggctctacaatttttttggatcccacgcggggatctaactcatcttcttccaccaatgcttgttcaatgccctcacggaccaccaacactggcaagtgtgctgcaacattatagcactacctggcctctccctaatttcccctcactgtacccactccagcttcctgagtaggg

SEQ ID NO: 92678 - DNA, 572 bp, Cannabis sativa
aaaattaaatgagtataattatattttaaagcatattgttagaaattattgattacttaccacagcttcccttacgttcaccattccactccgaccactttgatttctagattggatttttgctgaacattccctttgcaccttactcaattcctataatgccaaaaaaaaatattagctaccagtacttgtatttaaaagtttatcttagtacaaatataattggtacctgaaattcagaagttagtcgactttgaacaaatttcaaccaataattaaggtcaatttttggatgcttttcagggacgtatgccaaccgttgcatatcattttcttctaatgcgggcataatgatatcttttgtcattctattcttgaagtctttcattaacttcccagtaaggatcggacaattatttttgaaatcatcttgcactataaaacctgtatagctttaaggaaaacaaatatgattagagttaacatctgaattaatcaagcacatatcaaaattctcacaaataactacttacctatatatcttttttaatcttattttttagtgtagggtt

SEQ ID NO: 92679 - DNA, 2793 bp, Cannabis sativa
  modified_base (1470)..(1474): a, c, t, g, unknown or other
tgctataaacctcactttacacgagcagagatgcttgtttatagagtggagggacagggagatggaaactttaagggctcagcaaccagccattgacgatcgcatgaggcaggccaacgtactgataaagagggcctaccaagttgccaatcaacaactagctaccgcgtctagttacagaagagtatgttgctggacatactgcccaaactcacaatggtaagccaaccaatccacgaccacaggtccaacctatgggccaaacggtagatggctagatccttcctgaccgccctttaggcggagttacgcctaaaaacttgatctcgactaaaatttttgcccaacctaccggtcaaacaagtcagatgctgagaccacttagtacctcaatatttaataggttgggtgctacacgtgacctcaggggtgacttgaatagaagaaggggcttgaacgaatagtacatcacaccaactgtccagccaggcatctgcattcaagatccagctcaaagagatcttaatgtgacatagttcgggcacaagctgaaccagttcatttattcgtgcaagcacaattggatcaactgaaaaacatggtacaaggcctgaccgacccaaaactcactgatctcgagttgaaccgggcacgcggatcacccttctccccagagattgaagtccttgaattacccccaaaattcaagattctaacctagaagatgtatacggggaaagcggatcccttgtcacatcttaaatactttgagatgcaaatggatttgtagggggtacgaggtgatgcaagatgtagaatattccctgctacgcttgcagaagctgcccaacagtggtagttcaaattgcctccaagacagtttaattcgtggaatcctttctcctcagaattccacggatagttttcctcctcccgttaactctccttgcatctagaagacctggttgaggtaaaacagacaccaggagaaccctcagggcttacataagcagattcatgatagaagctacaaaagttaaggggttaaccgaggaaggaaggctggtttccatattggggagcattaaacaactaggagatctgtggaaagatatcatgaggctaacggtggggaccatggtagaatttttagattgagctgatggatttattaagctcgaggaagttgttcgacgtgtggatactatcggaaaaaagaaaagccaacaaagtacaacctcggcaggagcacccgcttaaagtccatagtatcatagcaacttaaatccaaacgggaaggggtcaaataacagtggcaggcaaggcaacggtgttaacgcagatttttgttaaccaaatttgagcctaaccgtgacaatctcacacaggaaaaaaataaagctataaaagtaaaagtatgaacacagagtttgtttacgtggttttgtagttaaaattctgcatagtccnnnnntcaatcttattcagatttttgatttttttctcagggccccttttgtatgagttttttccgtccattttttttgatcttgcttgccactatttataattatagagtgggcagttaattacaaagttcactttaatctgtttacaacaatcatcccctaaaatcatggggttagattacatatcacatagtgtaactaggattattattttaaaatcatacagctgtgattttctcacttttactgagtcaaaatgatcgtgtatttaaacatgtctttaattgttgtatctggggatgtctcgacagaagcttagttctattgatcacaacagcgagctggggccattttttcctttcgaggtcgatgatacatgtcttgtgacgattgcgattcttattgacaaagagttcttcgaggctcgtttgaatgttagcttctgactcgctaggattgtaagcctcaccgagaaaatgtctgaagttaactgggtgaagttactggaagccttcccatagcgaggttagggcacctcgcttactaggtcttgagccaacctgactgttgcacttagtttgttcattatacactaagtgcttccataattgatatgtgtcgctttcgtcttcctagatgtaatgtacttgatgcctcgctattcacattcagcgacatatggtttctcgctaatatactaagcaacagtttgtatattgattccttacataagaccttacagtcagcaggttacaaatatactcttcttaattaattagttattccataaaaagtgattgcatcgatccatattccttctatcctgacacgtgtcccccactgggagggtagctgaatttcgggtatatcaaatagaaagaagggtaagttcactagcaatttcgggcacaaccctaggaaaaatacctcaaagtttaccacattttctattataacagacgacctagagacaatatatgcaacaacctaatctatggtagcatataagaaagcctctcccatgaagaaggacgtaagtaagagcgatatgtccaagtactgtcgttttcacgcaaattacgaccacgacataaacgagtacaataacttgaagtgggaaataaaattctttattcgaaagaataagctggattttgcaaaaatatttcaaggccgatcagaatcaaacagccgccccaacatacaataattagaatatattgatgcctccaccagtggatgggaatttataagttattattgttaggtttcatgccctaaataaaacttcatttcaatgtaatctattttattcaacatcaat

SEQ ID NO: 92680 - DNA, 1026 bp, Cannabis sativa
agattcttgaacaacagtaaatgggactttagtggaagtgactttaactacatcccatttggttctggtagaagaatatgtgcagggatagccatggctgagaggatggtgatgtattcactagctactcttttgcattcttttaactgggaattgcctcgtggagagaaaatggatcttgcagagaagtttggaattgttcttaagaaaaagattccactagttgccattcctactccaaggttattggatcgctcactatatgagtaaactactttaatagtcagttccttgaaacactactgagttctatatagttctgtcttttaaggttcaatacttgtgaactcgttaattctgaaattgtaactttaatgagctctaaatgctgtctgtttgtgtttaaagtactagtcattcgttttcttattgttttaaactttggctgtggctaattcaatgacgagaatgagaataaattaggtgtatgttgtttatgttaatatgataccatttagttcctgtgttgtcttttggcctggcttgacacctgtgatactgttgtaattgtttacaaaatcaaaggcattcacttttacgatggaatctatatatctcggacggctcacaaacaaaaaggtacgtataaacagtaattgttttttaatattatacctaaaattaattttatttacaaaaatacttttaataaaattatttataaaaatactgatatccaccttagcaaaaataccgaaattcaaaataattattgaaaatgaaaaagaattaaaaaatctcgctttaaaaaatttcaatgttatgcaaatattaaaaaaagtaaccttttaatttctgttgatgtaaataatatattaattagttactttttattataaaaaatatttcaagataattgttttctcatacttatttggttgcttattttaatcagttggactttaaaaatatgattttatttaatagtttttaggctatattttgttattttattatttaagatac

SEQ ID NO: 92681 - DNA, 1757 bp, Cannabis sativa
agaaaagtgacctacctcttcagtcattatataaaaatcgaagacataggtaccttttctcttcagtttttatataataaccgaagagaaaaaatacctttcttttcaattattatataaaaagcgaagacgtaagatcttcttgtttgaattatgttccaattacgtcttcggttattatttaaatctaaatatatattaatttttatttagtgattaattatatattaattttttttgaaacaattataaactaattataagaataaacatttctttgaaataaaaattattttaattatataacaaaattaagtacaaaagacattgtaatatattattataacaaaattaaaatatacattacaaaatatgctaagtccttactaataaaaaccgtacacaaaataagtattgcctaaaattataagtctaaagctaacttgtacaagtatcatgtcaatttcttatttttgggaggatgattcactacattttgcccgtttctttcgaccaaatatcttagtgtcttttccagtgaacctacaaataacagttggaacactcattcaataaaaaagtaactaaaataaataaaaacaatctaacattaaatcaagaaagtggcatacccagcagctctgacccggccagggtgctcaggtgtctctaatgcttgaatcaatatgtcgtttcgatcactggcgaaaacttcacccgaatttactttttcctcgagttcaacctatgcagtatgattgataatagttagtactttataataataacaagacatacattcatgttattgaactttgttagatatcacttactatccttgcggcaatctccctatccaagtctgtaactaggacattattcttcttacgggaatttaaccaaacttgatggcggggtggatcttgatatttgttttattttttctgcaacaaatatgtaattaataagagttgatatcttgaagaaaatacatagtatatagtaatatataaagtgcagcaaatgtaaccttttgtggttgtaaaattttgctagtttttcaacatagtaaaataaatgaaataatactatgtaagataaactcaacggcctccttttgttcatgtatagaaaatttcaatctatatacaccaaaggcttaaagaaatccttatatcaacaaacaatgttatagcaatgaagtttcaacataaattactagctcaattaacttcattagctaaatcttgtctagtactaaaactatgttacgtcctagttggtccttgtccagatagatccttgtgacttttaaatatgatgtgaatatgttttgagatttatgttgtcatatttgatacacatacttgaatattcatatatgttaaaatacacggccaacttataaaacatgaacaactaaataagaaagaaacttcaaaattcaaattgtacagaaagaacaacaaaaataacataactgttagacaagaagcacaataatttttaactagcaggaaaataatacaagagcagagactaaacaacaccaaaagtaaataaaggagaaatgctagacaggacagagatgcaaagggtcttaaacagacagaattatgtcaaagaaggcaaaaaattgtatatgatagagataattagagccgttgaagaagatcgtagtttcaaatttttaatattgtctcattgatctcttcccaacttaaagagaataggacatagtaatccttctggttata

SEQ ID NO: 92682 - DNA, 704 bp, Cannabis sativa
taagaataaatgataattattaaaagaaattaagcaataagaacatagagatttaagagattcggccccgtgatagtggtaatagtctactccctttttacttgtattacttatgaaaaaaaaacacaattgtgtttcttgatctttctcaaaagcttacaattttgtagtataaaagctcttttgaagaataaaatttggatccctgaataatagaatggctccactatttatatatagggaagaaatacattaattaagttttccaaacaaatgaaaaataagaagggaagttaggaatgcttcctgttttataacaataacgtgtggaaatccctttaaaataataattaaattgataaaataaataagaaaagtatctctaaaaaattttgtcgcatttacactagttagtgtatgcgagcttgctgcgagattgacgctggttggacggtgctatttaccttatctggatattccagcttattcctcaaataagttattgatgaggaataaccctccaaggatggtatcacccgtctaggtcttaaaatgctccgcgtgtcacctagatgaacgaagtgtcaccttgtgtggaatttatgataacattattgggaatattttacaaagatctagatttactagaaagtatgttgaattaacatcctaaatatgagttctctaaaacaatgaaataaaca

SEQ ID NO: 92683 - DNA, 726 bp, Cannabis sativa
  modified_base (207)..(207): a, c, t, g, unknown or other
ttaaaagtctaatacatataatacaattatatttcaaaatttaatagatcaaatgtatatttcattctcatatataattttttcttctacatattcaaaacaaaattacacatttttgtacgtatgcatacaattttttttcttccttttgaatttgttactttatttattttaattttttattggagacataaaataataataatntattttattttattgctagttatgtaaaaaaaatcataaatattaaataatttaatattaaaaagtaactaatccaaaataatcgatccaatctacacttttgcggattggattggattggatctgaaatataaaatctgcacttagtgcggatcgaatacattactatgataagcaaaatagtacatattaaattggatgaacaccccgcaaatccaaaaatataatatttttagggttgatatatattaatactttttcaattttacttactaattaaaaaaacacattaattaaaaatgataaaataattagtgaaaatagaaaaaaaaaaaaaaaaaaaacaatcgtttttaaaaattaattactgtatattagttttttaatgggaaaaaaaaaggtttttacaccacatattaaaaaatttatttttttttcttttttactctataggggagaatttttttcagaaatactgtgtaagtttcatactgtgcactgtgttaagttttcactgtt

SEQ ID NO: 92684 - DNA, 541 bp, Cannabis sativa
tagaaggcttagaagccttcgaatcctcaacaatgtttcgaagactccattcaagtttgccaaacgggccatggtggaagaattgagagaaaagaatgcaattttgagaaaacctgagtgtggcactagaattttagttataaccgttttcaaaaagcttaggccacttgtgaccacaagagagatatcccttataaagggtaatttggtcattttctatactttacataattacagctgaagtggtccaattttcttatgttaattacagctgaagtaataaaaagaaaaaaaatgaaggatatgatatgagtctggatagtgctctggctagcaatgctggctctgagtatggtggcattgagtttacaagagaagatgttgaagctttgttgaggaaaaacctaaaaggaaggacaagtttaatctcgaggtttatgagatttttgattgatagttcttttttttttttgggggggtcacaaatgtttcttgatttgttggtttgaaatggggttttagtctagtttagcttaaattg

SEQ ID NO: 92685 - DNA, 1433 bp, Cannabis sativa
agcaaacttcatctcccttcttgagaaaaagtttgtcctcctaaacagtttggaggcattgggttccaagagggtaagaaatggaacactgctatgattgctaagtatttgtgggttgtttctagtaaacaagataacctttcgattaaatggactaatttcatttaccttaagggtcagaatatatgtgtggtgcttccccatgaaacatgatatgagttggtactttaagaagatgttgaagatcaaaaatttgacaaatgagaacatgttgaaccaggctattaattatcgaaggtaaattcaaggttaatagtttctataatgctttgattggggctactaaagtttcttaccatgcaactgtttggcacaagcttattgtcccaaaatatagattcatttattggcaaagctttaatgatcaacttcttactcgagatcattaactttctcagtcccgtcaatcttatgtcctatatgtgaggtagtcccggagtctcacatcacaatcacttggtatggattgcttctttactaaaaagagagttgggcttttagagagttcggtggggagttttaactggtcgaaggacctctacgagcttcagcaaaagaatctattccccaaggctgagttttgcaaatctaaatgcaatcattgttgctgctctttacttgatttagaagaaaatgaatggttacatatttgatgctctattattctcagcatgaagatcaaaatgtgattaagcctagtgttagggctccacaaggcttgtttccaaaaaaaagagataactatgctttaagtttagttaataattggtagtctgttcttttgtggttgatgttgctgtagcttgcctttggcttgtatctactctgttttttttaataaaatcttcttttttgttaaaataaaaaaaaaaaattgagctcccacacaaacacatgctaaaatacaaatctttattcaatgctaatttacgtacacaaagatgatgtggatacataaattctagattcactaaattttgttaagaattgtactccaaggttgtctccacaatttgtttgttgtgcatatacttaccaacaacaagtgctttgaatattattatttcaacaacataatgtttggcttgcatgagagcaaaaggtcctaattggacacatcttaggttttattcatctagctagttctctgcatcactgtaaccaggggcggacccccatataaccgaggcggggcagtcgctcctgaaaaaaaaatcaagaaaaaaatatatatgtaatttaattagttataacatgtatttgtaataaaagatgatatttataagcataatattaactttagtgtaatagttaagctacttagaatatgggttagaagataagggttctaatcccattaaatttattttttt

SEQ ID NO: 92686 - DNA, 889 bp, Cannabis sativa
  modified_base (27)..(57): a, c, t, g, unknown or other
tatgatatataatccaattcaatatannnnnnnnnnnnnnnnnnnnnnnnnnnnnnncgttccaaacgagccctaaatgtgttaaatagtaccacgtcgtttatgtgtggaaagataatagtacatataagaggaatgagttactcctttcattgctaattgattttgagataaaatctcattcatcttattctcaaattttaagaccagctctacttctgtgctcagctctaatttcttggcagcagccctcacggcacaaaccaaatattctatttttttttttttgaaagtgaattccttcaaacaagcaaaataacaaagttagcttcagtagtcgattaaacaccaagcacatgagctaacattcctacacccaatgtgattacaatccaaaaaattaaatccattatcatttataattgtacgatgattcaactcacctaatccaactgttatgccaataacagtgatcaagaacccaaaaagaagctaaaaaataaacaaagtaataaaccagaatgtttgaataaaagatggaacttagcttaattcattagttggaatgatgatactttattcaattgagttagcactgtacaacacgagtttcggcctcttaattacagaaacagtatatagatcctcactttgagagaagtcacttctagagtgaataatctaatacaaccctcctcacttgattcttggacagaattggaaagtgttgaattgagtaatgtagcttcaagagggtctatttatagactgggagttggttgaactgtgctgacagagctaactaactctgatgacatgtcttagttgtttttgaattcttaacaatgccacttgatttagctcactaaatcacataggtctaaagaat

SEQ ID NO: 92687 - DNA, 809 bp, Cannabis sativa
gtgttctatgttatatacaaatagatcttgggtatattattaatttttctaacatctactcctctcatctggtatttcgggatagacatccaaatatttttatttggcccaacttgtagcttttataaggaatttatatccaagtatctgtctaattgattagaccaacaagccgacttagtctagataagagcccccttgaagaactaattgtttgcacaaacattactcaaccaagaaagccacatacacgcacgcaacaacgactactcaaccaccatgctcgcaccattcaggcaactttcttatcccaaataacgagatacgcgtacaccacttgactaataaggtaggccgcttggccagcacccatgttattcaacagtaacacttgatttaatattattaactctccagctagaatgaattctagttagagagtgagggacaaactgtagagataaaaagttacttaatatttacaacatatttgagaagtccaatatgcaagtcaaacagacccatcaataatgagctcaatattattagacccaataaggcagccaaataaactcactagacctcgagatagaaaaatgggtgagcttatgggccatgagtcagttcaccccataattgggtccgagtccagctagttggccaaacgggtggaaccaagtagatattaaactagtcagaaagacgggtacgattcttataaaatgaggtaagcaaccaactggaaggagtccaatgggtgatgtggatggagggcaacagtactaagggaacacgataaaagaaaccat

SEQ ID NO: 92688 - DNA, 758 bp, Cannabis sativa
  modified_base (326)..(326): a, c, t, g, unknown or other
agtaaatttgattatattgaaatgcattttatttagggcacaaaacccaacaaccttctcctgaaggtttaatgcttgaatcctcccgatacaagacttgaaaaataatctcccaaaagctttgtaaaaaccatgtcccgaaggttgcactgatgttcttctttgttgtagacttgaatacagactcaagataatactatctacaaatagacagagtaagagtcgaacaactcttctctacaaaataaagacactctttccataagaaatgaatagaattttaagtgtatgaaagagatactaaacctagctgctataaggtgtanttataatcaatatacaccttatttgaagcttacacacggtctgaacaagaccccagcccattagaaacttccctaaaataattcttcaatcaacccaggaatttcgatttctgtacctacagaatcgtgggcagtaagtacaactttccttttatagaaaaggaaagtttagctccgattttgtcttcgagaaatctgatctaagaaatgggaaactcatacaagatagaaatatacagctggttagataagaattaattgtgtaatccaaattaccatttttacctcaattttcttaaataggaaagctagacaactttccttccaagtttagatacacaaaatatggtaaccaaattaaaaacaccagccgatattaataagaaataataaaatatttttttcaattaaatatgtcaaaaatggaattaa

SEQ ID NO: 92689 - DNA, 7950 bp, Cannabis sativa
  modified_base (115)..(120): a, c, t, g, unknown or other
attttgatatctaccaaatcatggatctcgaactttgatatgtaccaaatcatgtctcctcaactttcatttatgttagacttttcttactaaaattagataaaaatccttaaannnnnnaatctcaatagtttaggaaaaatttgtaatgatctttaaaagacataaattatatatatcaaagttaaaaaataagaaccttaattaacctgtgatcttaaataaatattcccctaaatgaaaatgtaaataaatttatcatgctattacgatttgacagtttaatccgatggctcccacaacatcaatcatatttactcattcaacggtccagatggccttcatcacctcatacttatagtcaccatcatcttaatattaatgtcacataaaaaaaatgataaaatagatagatagatagagatcgctcacgacaactcacgagttccccaaaagaaactattgttaaaggtgctaagctatggttactgaaaacttattttccctcaagttttgtcatttttggaacacttaattccctagttacctggctcatcattttctcaaagttttccattttatttatttttataaatatatatatagagagaaagagtatgtgtgtgtgcttttgtagggcatcaaaaacgagggaaaaagggtggaaaagaaagaaaaaagagtgtgtgtgatggagtgaggtgaagggtgtttcatcataaacgaggagaaaggggcagaataactatgatgatcctttctttgatccttccaaatatgctccctatgagagaatgaaccatccaatctcattaattattaataatattattattcattctctctccttaccaaataatatcaattatttacccatctctctctctctctaaacccttcaaattaagtctctctctcatttattccttccacacatcaccacctcttaaatagaacccatctgcccttttctctcaactcttccataactcatgtacataggatgctacctctgatattatggttttggtttcatatgggtttaagaaggagtttctcacagattttattggcattctgtccacctcctttcctaatttctttcattttcttttctgtatataacatatatacatattgctattactatatgatctatggaggaggtgggcatactgccaactgagttctgttggtttctctttgtaaaaccctcgtgatgataatatatacatataatatatatgtagaccagtgaaacttcttcttgttccttttattaaattatctaatatatatatatgctattaatattattatttcttatttgatctatgataattttaatgaatttgaaagttttatctgcttttcattccttgaaagtttttatttttggcaggtgtaaccacctaaatcatctttcatcacacactatacatgtatgtgggtggttagatctttattgcttccacttgggaaccctaattttttttcttttctttccttttctgatcttcttcagttatatatatatacttctgagagaaatcaggaaaatatatatatatatattaaactgttttcttcaattttcatacaatattagggtttcaaattgccaaaaacttttcgacatgaagttctttcacatctactaggtctcagcgaggatgaagaagctattgataaggtatatatatttatataaaatatatattatttttggttttattattaatatctaatatgcaacctatcttattatgagttatgacacaaaatgataaatgactggcttgttggctcaatttaagaccttgaatttgaacttgatttccctttaaaaatataaaaaagattctttttttctttcttacactaataagaaccaaccaggttatacaaaattttagtatattcatgcatgcctgccatttttatggttcatattttgtcagctcttgatcgtaatttttatatatatatatattataattacttttgcttaagtaataaaacctctaattaattatcatcattattagcttcttgtttgtgtgcttaattctctctctaatttaagtttatggcagctcagcaggctctatctactccagaatttagaataatacgtttctgtactactagtctactactactactactctcctcaaacccatatatatacgtaggctcatgattgactgacactgccaataaataaataattttaataattccacattttgttaatttatttttattaaccacacgctttttgtagcgcgtgtgtgcttttgattaatttgtgttattacaattaatcaaatcccatcattattatttacttcattttattttgcaagttaaatgaatatcaacattaagaaatgttaaaatgtagtaaatacatcttaaaaaaaagtgtactggtttcaaataactttcccatatgcccatattatttctaatctctattgaaaggtatgttgtatatatatttgaaatgagtgttgggtgagactggtgagagtagttttttcgttaaatgaatataaatattatatggaagtctattacagtaagcctcatataattattttttcaaggattgagcctctttattattattattattattattattattattagtttacttttttaatttttttttactatcttcagtcaaaatgtacattatcagatgtgaataaaacaatattttttaggtgtacctttttttttttagcaatatatttttgagtattgcactgcactgcaccaccaccctatcaatctattgctttgcttaatttaacttatttttaatgcgtgtacgtacttagtatcaaataattaatatattgattgtaactgttaattaataattattaaatattagacgcattgtaactgttagtcaattagtcatggatagataagcaaccgtaggtgttaactgatttaagggaaaaaataaataaatgtttcttgacctgaaaggtttgaagatgatatataatatatttaaacctcattttgaaaggatgttattgttaactattggttttgtttatgtaatataataaatacgtttttttttctcttttttttttattggaagggaatatatatgttgtgaattaacacactttaagaatatgttagtttcaaaattaatgcggaataaattaaataatggtaattgaaaaaaaaactagaaaaataactaagataacatgcaatgcttttgataaaatgctatatagcaccataaatagaagaaaaccaatttatcgaggttcgatctcaagtaattatattgcttggatctaatttttgagagtgatcaatctcgatcaagaacagcaaatggtgtcattcacctatacaatgctcacttgaggaagttgtgatcaaacaccacataactcctgtacatccctcaatcttttcatctcaatttatctcttcaaagctctccttatatagacaggcaataaataataaataaagagttggttgttccatcaaagaacaaagtctacaaagacaactatatatatttcttcaactgaacttaggcatatagcgtaaacttttttcttagaaatggtttggtaaacatgttagctggattgacatgtgtactaatcatcttcactccaactgtcttggtagtaataacatctataataaagtgcaattttaatctacatgttttaatcttttttcatggaacatgaattttttcatcaaatagggtgcactaggagtgcataatgggtggttttgacagggttcggtttttcaagtgcggatttcgggtttcaggttattgaaaagtgcaaattgaatcacccgtttgggaatacaggtttttgggtgcaggttgggttggctgcgggtttgggtggggtaggatcgggtttcgggttaggcttggccaattttttttacccaaattaatttataaatacaataatacaattaatattatcgcctaataataatcacatttacatttctcacacacatatataaacacaaatcaatttacttatacacaaaaaatttacttatatatatcaacacaaaaaaattacacaacaatacaatattatcatataataataattatattcacatttcttatacacacatacacaatcatattcacaatattatcatatacattttttgaaatttctagaacccaaacctgcattgtagtttttgaaacccaattttttcgagttcgtgtgggtcaagtttgccaagtgggtgaatttttttgggtacaaatgttccgccttacaatgcactgggatgttgtttgaatgaatcccatttattttgtttaacctttgatccatttagcctttataatggcttcagttgcagtcatgtattctgcttcaattgatgagagttaccactttttgcaagttggatttccaaattacacaatctcctagagttgtaaacacataaccagttagtaactttcttgtgtctaaatttgcagcatagttagaggcaacaaatccaatcactttctcttcattttgttatgtttcacctccatatactagacctgtgctcattgttcctttaacatgtctcaagatccacttagtgcagtccaatgatgatctcttagatttgaattgtatctactcactacactcatacagtgagcaaggtttggccttgtacagactatgacatacatgagactatcaacataactaccatagggaagcttttccatttcgaccatttcaacttctattttgggagattgttcttgtgacagtttgaagtgaggtgctagtggtgtagaatcatgtttgacatctttcatgctgaacttctcatttactttctcaagatagccttcctgagttagagtgattgtgtatggcctgttccttataatcaatgccaagaattcttttggctgcacttagatctttcatctcaactcactacggaattgttgttttaactagtttatggaagatttatccttgccaattatgagcatatcatcaatatacagtaataggtaaatttgattcagatagtaaacacataaatcatgtttactcttgataaaaccaattttcctaataaattcatgaaactttaagttctactgtctaggtgcttgctttaatccatataaggacttgttcaagggacatacctgattgggatctccattgtcatatccctcttgttgttgcatgtggatcttctcttccaaattaccatgtagggaagcagttccaacatcaatttgctccaccttaaggtcaaattttgcagcctttgacataatgagcctgatcgatgtttgcttgacattaagtgaagatatgccattgaactccttggtaaccaatctagcgtttaatcttgacccttccattcctggaataccatccttcatcttgaaaatctatttgcctcccataaatctctagtttttaggcctaggaaccactatccaggtcttattctccgcgagagaatccatttcctcatctgtagcttttgaccgagctttactattcttccttgtgatggcttcttcatagctagtaggttcatcactcttaatttcttctacaacaattaatgcatatgctataattaattcaacataaccatacttgtcaagtgctctaatgtcccttcttgtgtagtctcaagccaacttgtaagtgcttaattcatcttgagttgcattggtttgtgtggtagtttcaactttagttgcatcatctgatagaacttctataatttgatcagattagataccttgctccacctcaagctacagattatcaccttgtgtttgtgatgtaccaaatgaagtatcctcctttaatttcatggccatttcatcctctaaacatcacatctatgcttatgagacatttcttatgtcctggttcaaggcactacaatttttagcctttaacgccatttggataccctagaacatgcattttattgtccttggttgccacttatcttgtctaatgtaagcatatgcagtgcaaccaaaaactttgctcaaaacttggtggcttccctgtccacatttcttgaggagtcttgaaatttagtgcaacaaatggacatttgttgataagatagctagttgttttcttagcttctccccaacacccagcacccagcaccttgcaacatgcatctgactctttcaataagagttttgtttattctctcagcaagttctttttttgagggttacccttattataggttagttttaggtgcattttatgaagtattttagatgtgtattttagttgattatattcgtttgtgcaaaattagacttattttctacttgtttcatgtttaaatggtaaaattcataatatgaattgaaaataagaataaacatgttaaataagatgaatatgatggatttatcatagattacagagttctaagatataatgagtgaaatattctaagttttggatgatcaacacgctccgtttgtgattgaaaagcaagtgctttaagctaatttttgactatgatgtgttcactataagctaatttaagctaattatcatctcatatcaaaaaattattttaaaataggtgtaatcatgtattgtttgagagaattgtttagtgttatcgttcagccccaaaacataaattcattgtgtgacaggccttgtactttcatctcttactagggacaatctcattaaaaagcatattcctattgaatctcctccttcctcaatgcgtgaaatagacttggagtcatttgcacttgtttttctcttgtccctattcatggcgagtcatgcaacatattgagggatggttgggtagcaacctttggtcgagttcttatgatgagtgagttcaatggctgaatagtagggttttctatgcaactatagctggagctacctatggttctggatgaactgaaacttatatgtttttgaacataaatgtataactcttcagttagattctatagttaaagagagtatcaaagcacatgtgtcatttattaatgagaggaaattgtctaagagagacaaaatgacttaaatttgtaaagaatttgtaattttggtgtgtagaaaggggtatgccccgattaaagttgtaaatttgtgagttcaattaatgaagtttttttcttgataaaaaaaataaataagaaatcactttattcttttaagagcagcttcagtgggagtagttcaagggttgctcactgataaagtgattctttgtttgacttgaggataacaattatacttgtgagtttgggtactcgttcctgatgggcgatggcaggggtcgaatttcgggggcagaggcgggtatagtttaaatgttcttacccgaatcgggttcgaggcgggagaataaatactcgccttgaatctgtcctgatatgatatgtgtatatatttaagttttaaactattaattattataattaaaataacttcatgttttaagttttttattgatcactttagtgagacatttcaatttttgtgaaaatacctgcaatgatgcatattaatacactgattgctttaaaaaaataacacttaactacttattttcgattgccattgttttatttactaacgcaatttattatgcacactattccttatgtttgttttttaatgagtttttatgatttttttttaattttatttgagacatcatatatatgtaatggatactcgatgagaatcttttccccgccgagtaattctcatcccattcccgctttaatttaaacaagtattgagacaagtatggaggtaaatttaagaagtgggtatgggagtgggggagcaattcctagcccctaggcatggcaaaaagatccattcattcggatcggat

SEQ ID NO: 92690 - DNA, 722 bp, Cannabis sativa
aaggtacaaatgattgacaaaaaaaatactgacaaatattatcttacagatacacattcacatttaacatttttagttgcaattaagtcgcaccttagttaaataatagttttgctactacaatatcatagtattataaaaataggggttagattgtcaaatatgcgaccaaaataaataaaaacgattgttgtaatattggtttgtattaaatatgaggaattattagctgttttttaagttttatgttagttggctcgcaacagatataaatgttgtattacagttgtcttgaagttaacttcttctttcctttttgccgtcgaagttgattttttttttaaggcaaagacaccttcaacttcttcttcactggacgacgaccacctttagccatgtggggagcaaaatcgaagtcatcatcgtcgatgactgggcattactagccttattaacaactgatttatgatccatttttgaagttttttttggcgatgaagatggtgaagcagaagatggtatattagaaaaaactgatataggagacagttggaagaagaagatggcaaaggttatggctgggaggtagttttgtgagttttgaacgtggatttcaaaagggtattggctggaagatggtatgtgtaagtgatattttggtaaataaaagttcattaaagataaaattatttctcaccccttatagatgtatttttgtaaat

SEQ ID NO: 92691 - DNA, 1024 bp, Cannabis sativa
  modified_base (504)..(504): a, c, t, g, unknown or other
  modified_base (975)..(986): a, c, t, g, unknown or other
catctcatgcaacatgtaattatcatcttcatcaacaccataatcatgcatttctaacaatcaaaattcagtagacacaaccaaaatcacagctgtaaggattacctagagttcaatccaaatgcaagcacaaagtttctcaatcacaaagcttcaatccaagctaaaatccaagcaaattcctcaccaattcaaaatgcatttcaagagaggtttgagagagaggggtacgagttaggggggtaaaacaatcagaattttccttttttttattctaaaaattcatcttttattaattgtagaaaataaaggtcaaaaggccattttgcccctagggctataaaacatgcatatacactcacatgggcaatttagtcatttcatgctcattaatttccaaataaattcagatttctcattatcaaataaaatgccaaatatctcaatccaatttacatttcgggcccgaacccaatttggcccgaaatacccggttgtgactanaccgcgccaacctgtcagaacacatctggaaagacaacacatacatactatttaataatatagttttattaagcacgtaattaaattaatttcatcaatttacccttctctgctcataattactaaaatgcccctggctcaccaacggggtcttagcatattataaatcaattaaattcacatatattaaaccatctaataatatagttcctcacttattcataattatctaattagggtttcgctaatccatctcttaattctagggtattacatttagcttatggtcgcgattaggttttaggtagtcgcgacaatgggctaaagacgagattttggggaaattttgtaattttaccattcaaagatatctgcattattttctatataagggttgcgtgttttagaggcaagggactgaaaattatcgtttcacttctaaatacttatacaagctatagattccatatnnnnnnnnnnnnctcccactcaattgaactacaatgttcctaagatgtaa

SEQ ID NO: 92692 - DNA, 660 bp, Cannabis sativa
tataaattgtctcgtcaatgtcgctattgagaaatattgttttaacatccatcaaatgtaactcgagatcaaagtgagaaacgtgtgccattattatcctaaaagagtctttcgatgaaattggagagaaagtctctttataatcaatgccttatttctgagtatagccttttgctacaaggcgtgccttaaacctcaccacattactattttcatccctcttggttttaaatatccatttaaaaaccaattagttttacaccttcgggtaatgggacaacttctcaaattttattgtcttgcatagactcattctcttcattcatgacgtcattccacttttaagagttagaacttttcatgttaataaaataaagagagattcaaaaacatcttccaagaaattgaaagatgatcatgtatcattcatatttaaatgtacattctcaatgatgaaatataagtacatctcaacaaaaaataattattattttttatatatatagtatattatttaagttcatattaattgttaggataaggttattatttttttattgtgtttagatttatgatttaaaatatatatgtactaaaatattgtatgtttaaatatttgttagaaacttaagttgaattaatttgataaaataaaatgta

SEQ ID NO: 92693 - DNA, 990 bp, Cannabis sativa
  modified_base (69)..(72): a, c, t, g, unknown or other
ttcccgacattcctaatgtctaaccatattaccctgctatactaaaaaaaaaatactaggatgtgattnnnntagccaaacaccgcgttccaatgtcgtcggacacaaaataggcaaattataaaattccatatatgacatataaaatgcattctgaattcaaataaatctccgaaaattaataattcataactaatatgcaagtttcataattaaaccttaattatctgataatttctaaattaaaattaagcggtctttacattctcaacaagagatttgcattcagctgctaatattctctttgcccaaattggaattccaagatacttgaatggaatctcactcctgcaaaagccagaaacataataaaagtatgtacttaccgattattgtttaatttattttatgtacaaagcaaacttatttaaggaatattaatgatgattataagtgagatacagtgataacatcaactataaatatagcggcaactgcaaatgagatatggtgatgatagttgttttaaaattatgtgatgaattttctatagatttattatcttctttctgttttagatctctattttgtgtaagaaatatttagtttctaattttcttcactataatgtataatttcaaataaaaaattgcctaattttttatttatagaacaagttgtatgatattttttttttttaatttagagttttttatatagatttattattttcttaataagcatatatttttcttttaaaaaaaatatacataaaattaaatttaaattatttgatattaatcttattgttcaattaatatttatataattatttaaccgcggtatgcgaagtgcggtctgttttttagttacaaactaagagttgtaaaaaattatcctatatgggttcgtttggtacgtcgtattacatcgtattgtattgtatagtattatattgaattgtattttatgcgatatttttatgtaaaa

SEQ ID NO: 92694 - DNA, 601 bp, Cannabis sativa
gggggtattgtgggaattaagaaaatgttatcccattttaccaatattccctattttaagtttaggaaaaaaaattattctttaatgtaagcatagaaattcaaatttcccaataaaaattgggaatttaagaattattacctttattttttaaaattgaatacttatttgtgtcaaagtaaattttttgagaatttttgacgtaattatccttttattttaatttgaaatggtgtgtgagatctaaaatggtacacgtgggttgtattttggttcagatttgaaattgtggatgaaatctgatttatttttactcttttagtattagatttaaagggatgcatgtgagaaaaaattgatttatagagcattgtcaggttcataatagaggcatcgcgtgagtagtatagatgtcggttttagaaactgagggtaaaagtataaatgtcagttaaattaatatgaacgcctaaaagtgattagtcacattttgaccaatctttcaatgcaatgacaaagctacatcatactagaagaagaggagtgcccacctcaaataattcaatagtattataataataatataattatggtaaactta

SEQ ID NO: 92695 - DNA, 739 bp, Cannabis sativa
gttgtgccaacaattgtatctattctttgaataactatgccagctctcataaacttcattctcttcctcttcttctctccttctctttctctctaaccacactactaacatcagattgatcacacctcttcttctttctggttttttcataatatatataaattaataaataaagtgtatttatattatctttgcttatggttcatgggattaacttatatgtatgtttatataaatctacagtttcgacatgcacaccttttgggattgatttagatttatgcttatctaaatccatagcttcgatatgcagacatttcatcttttttattaataacaggtatgtttattgatttcaaaatctctaatccctttacctctctttctctctatatgtacgtataaatgtaaaattcctaattttttatccatatttttcaattttttttttcaaatccctaatttatttacatctctttctctctatctgtacacataaatgtgaaatccctaacttatttctttttcaacttttttcataaataaaatttacaccctgttactattttgatgaaatttatcttcctttacacatattttaatatcagttttttatttttgaattttttagactgatgcatgtttggtaattttttctttaaaagaaaaagctaaaaaaaaaatatagataatttactcaacagatacgtgttaggtgttacaatgctaaattttttat

SEQ ID NO: 92696 - DNA, 972 bp, Cannabis sativa
taatggtgaccaacaaccaaaatgccattgggtatgatttggatgaggagtcggagccttactctcctagaatattggttttaccatatccacaagggtttaagatgttgaccacaaccaagtacgatgggagtacaaatctcgaagtacacataagtgacttcagaacacttatgcgtacccaccaagtagttgatgacttgagatgtgtgttatttcttgtagcacttactggagctgccaaaacttggttcaagaaatttaagaggcactctattacctcatgggaccaactctcacgtgacttcaagaaggaattctgcaccgccaaagccaaaaaattagaatgttcctcccttgccaatgtgaagcaacaaccgggtgagagcttaaaagcctacatcaactgttttaatgttgaagccacgaaggctagagacgttaatgatagcggaggacttatggcgctgggggcaggaattgctaatgggtcccaattttgggataggttgcaagaaaagggagcacacaccatagatgagttcatgaaaagacctcaaaaatacattaatagggaagagacaaggttggccattaacctccctctttaatctggaacaatagaagctactcccacttcaacaaacaacaacccctccaatgcaaatacttccaacaaaaggaaaaatgaccatggtggggaccacaacaatactaagaaagggagggctaactaccctctttacaccatcttcacagaaattgatggaaaccgcagaaataattttcctcaccaatgagaaaactgtgaattttagagtcccagagccaatgaaaggaatcagaaaaagtcaagacacctcaaagtattgtcggtaccacaaagacgttggccacacaactaatgagtgcaaagccttaaaaaatagaaattgaagatctcatccgagccagaccacttgctcgttatgc

SEQ ID NO: 92697 - DNA, 678 bp, Cannabis sativa
aaataaaatttatatatatcaaaatacatataagattaaaacaatatccaaacacactttctattttataatttcaaccgtaagtttgaaaattagtacataattagattagatcaaacatgttttacttagagattaacttttgaggattgctaccatcaatctcctgttacaacctcttagtcaacctttacgcccgaaaacacatgtcagaatatttttttccatttttttttacaggagtgttcgttatgcttacaacatcatacatgtaaattttttgaaaatttcgaatagtttacagtaccgaaaatacgcttgaagttttttgaacgcgcgtggtaaactggaatatcaggaactctttttcggtaatgtaaactattcagaatttttcaaaaatttactagggatgatactctaactataatgaataccgctatgaaaaaaaatttgaaaaaaaatatttcgacatgtgatttcagacataaaaaatgactaagaggttataataaatgactgtaattagcatttctcttagtggtaatataattttttaatatttttaagtcttgggttgaactccctcacaactgagctggcctcagtggctgtggcgtgctctaagtaccaacttaatcataaaacaatgtcacaattcacaaggtgaaatgatac

SEQ ID NO: 92698 - DNA, 620 bp, Cannabis sativa
accccttctaaaataattttttgaatacttaattaatttttaaaaaattacatctaattattattttgcaacaactgcttgacccatcttcctcttttatgaaaaaaatttataaattagagttttagtttgtgccgacgtaacattatgtaaattttccactgcgatacaactcctagatctatgccacaaaccgatttctctattcaaccaattacagttagatttttcctttatttttttaataatttgcttgctatttttctactgttatgcttatttgtaaaaaataagcaacaatttcaattaattggtaatctactttgataatctttttttttttacaatatttagattgatgaagatgatttcaacaaggagcgaaaatagttaacaatcattaattttatagttgttattatatttttttacttaatttttcattttttaaaagaaaaaaaaagactaaataacttgaaccaatcttggactgacactctaatttggcgcttaaaagtattaaaaaataagattgaggataaaattatctttaattagaggtcattcatactacttttcattaattaaagttatgtgtaataactataaattataaggag

SEQ ID NO: 92699 - DNA, 792 bp, Cannabis sativa
aaaggattatgacaaagttttagaatgagtctaatcttatttaagtcaactgtatatgtaattgtttgagactttactaattgattttactctctaggtgtgaccccgtggactaatagtgtttgaaagaacattaataccacatataattctcttgttcaagttttaaattatgaataatttatttatgtttctaatctgttactacaagtctttatagtcacattttaattacagtttataagaaaataaattggtatatacaacaatacaattttttatttggtatcagagcgagacactaaactcttagtgtggtcctttaatattttcttgtattttttcaatatatttccttttgttgaaggaagatctatagttggtctacaattgctaaatgattctaattacccttattagaaggttaggatgaagactctcatcaaatctcaaaatgaaaaggcttggaaatctattctaatgggttggcctccaccaattgaagaagatgctgaaggtaatactaaggtaaaatttgaattagaatggtcaaatgaggaagatatattgtctagcaataataataaagttttgcatgttatttttaattgtgttggtgaaggttttattaaattaatctcctcatgtgaatctgcaagagaaggttggccaattcttgaaactcagtttgaagaaatagtagatgtaaatcgttctcggtttgttatgttacaaagtagatttaatgatcatagaatgtttgattctgaaactctttctgaattttatgaa

SEQ ID NO: 92700 - DNA, 922 bp, Cannabis sativa
  modified_base (730)..(731): a, c, t, g, unknown or other
cacttcatttttgcattgttgaattctctctttaaaattacccgtaaactccttcccccaaaccaccaatcgctgcccacacctttgaatcttctgctgcacttcaacatcaccactgtcatcccaacaatcttcgatcaattggtaacaaaatggttcccgtagccatgcattttcaaagtgaaaacgagtgacctgttgctgaacagcagtagtaaaaagttcaagcaaaatgggcgaataatcggatgttgatatctcaagattgtaaagtttagccgaattaaacatttgcaaccaagcaagatccgctaagcctttacccagacgaacttcaatccaaatcgaagtacccctacccctttcccaagtaaaaggataaccacaaagctccatctcttgtaacccactgtcattcaaagcttgctgaaacccattattaagaactcaggatagtgattccctccccttttatcctcatgagcacacacattattcatatcgcccattacgcaccaaagtaagcttgagctagctaccaaggagcgtaaaagattccaagttgtcatacgaatcactcgatttggttccccatacagccccgtaaacctccagtccgccataccatcaattgaaacttttacatcaatataattaagagagaatcctaggaccgagacctcctcttcaaccttccaaagtaacgcaatacctccacttcttccttgcnnatccaccaccatcattccttcaaaacccaaggaaaccggaaccctctcaagctgagcctgattactgagagtttcacatagcaaaattaaagtgggtcgcttttggatcacaagatccttaaggaattgaacagcccgtgggttcccaagtccatggcaattccatgataagattttcataatgggcggtg

SEQ ID NO: 92701 - DNA, 513 bp, Cannabis sativa
tgatcaaatgaactggggtttgaataaaaataaagtgaatggtctgtcagaaaaaaaaaaaaaacaaaaaaaaaaaacatgtgattgccatgttattcaggatacaatcattggaaaattctatttttgttcataaatcatttggggtgtacttagttttgaattaagtgagtccaattgatattggagatacaaagaccccactttaatttaatcagtttgggcctgagtttttggtcaactgggccccagtcaatgttgacccgcccactcagcatcaaccctaccaccatcaccttcatccttttcacacactcagccgtctaccagtttccaagccacagaaatcacacagccgaaccagccaagagcaagccgaagccttcttcacccaaatcgcacctcaccattcacccaccaagttcgaacccgcctgatcccatagcagcccgagccacctccaagtcgacaccaacccaccagaaatcaccattgtccagtccaacaccactc

SEQ ID NO: 92702 - DNA, 732 bp, Cannabis sativa
gttccccaaccgaaatttcggttctgggaaaaattcttggaggccaaccgaaattccagttcctacaggcctccctgaaccggaattccggttcagtgcaggattttttaaaatttcatttctcaatcaaaacaaccccaaaccacttgagactctccacacctgttctaaacaccctagagatcaatttcaaagtaacaaaacacagcttcatgcacaattacaaaaatcaccattgatgagtcaagcttgagttcaaaaactcaaagcttgctcatcctacaaactagctatcaaaacctgctcaattcaccttatataaccataatataacctcaaaaacaagccctacacaaacaacaaccacagtagctaaatcatcatttcaccattaaaaccaaagttttgagttccaactccaaacttacttaaaatcatcaaacaaccaaaaaaacctgcttgaatcttcatattaaaacaatattaagctttacaaaacaacaacaaacacatacagcagccacaacaccaaaatcaccaagcatgcaaaattttctttcttaaaacttaaggaaactagcaagaaagttacacaaggattaccttagcttggattgaccttaaaattgatgtaacaccctgattgaagcagcaaaaccagaaccctagctggttctaagtggttcgaaaatgagagagagagatggaagtgaaaatgcaatttttcctttt

SEQ ID NO: 92703 - DNA, 1174 bp, Cannabis sativa
gtaattaaaatttcatctatttttgctaatagagtgttctatataattaagagtgcaattccaaatctatagtggaattaggaagaattaatagtggaattaggaagaattaataattttggaaatttacttggtaaattttagatctacttattggaagctttattacatagttccatggtccccacactaattgggataatattatttagtagtctcaattaattggttttatttaatcaattagaattctaaataagattgtgcctactgtcttttttcagaatttttcactaagcaaggacttatttgagaagaaaagaggatttagggtatttgttaattaagagactttgtaaggtctaataaataaataagttggattaaaattttatttgataatcaattataattattaaatagatagaattgacatttatagagttagaattaaaatatggtatttgtgaaagaaaaagataagtctttaaataaaatagcaaaattaaaactagtggggtccataatgtggccgaccacttgaggtaatttaagccattatttcatattttctaattccatttaaaatctaaacctaaccctagaaggaatcctataaatagaatatgattgctcttattttcataacctacatcagtctcttttattagaagattaaaaaaatagaaaagagcctccttctatttgaaattctcttcttcttcctctaaatattctgaagccatagtgagttgagagtatgcccactcatgtcaaagtaatacctagcatactgaggaagactatgtctaacgaaattgaaggagaaaagatccatgttcagatcttgataatgctctgctacaaaaagaaaccaagggctaggtatctgaatggaatgagtcattattattctgctgccatcaatgtaaagatttcttaatctcttatatgtttatttcattattttaggtaattcatatttaggatgttagattatagattataatcaacatacatgttagtaaatctaaatcctcgtaaaataagttccagcagttaggactttatacatgttgaatagtgaagaaagctttgtgagaaattttcccagctttgggatagatctgtctgagaatcacctttctatgaaaaggaggctagaattatctgg

SEQ ID NO: 92704 - DNA, 612 bp, Cannabis sativa
  modified_base (450)..(450): a, c, t, g, unknown or other
caaatagaattattcaaataattaaaaaaaaaaaacttttcgtgtaatttttttaaaaaaaaattagatcaaaacgtttttacctaaaaaaataacaaattcaacatttgtatttatactgcatgtgttatagtgtaattaatatacggatatagatcttgtgtaatatttgctggtgggtagtgatatgaactgagagaactagcactttcaggaaataagagaaaaaataatagtctacacaaattataaccattttttttttattgtaaaggtagataaccattacaaaaattataaagattgatggatgatactaataggtgaagaagaactagaaagaattggcatgtgggtttgtacaaaaataaaagataaaaatatgggtaaataacattttagatcatgtgttttacaaaagttactaattagaccctctattttgttaantgacaaaatagaccttgtatttttcaaaattgtacaaataggaccttgaacatatttttttgctaaaataagacttaataataatccgatctagagatgttataacaaaactagttatatattctgtatctgttcgtgttagaaattatcttaaagttgatt

SEQ ID NO: 92705 - DNA, 700 bp, Cannabis sativa
atccaatccaatccaatccgtaatagtgcggattggatcggttgttttagtgcggattgtattttaatatttcattaaaatgaaaaaaaaaaacagtaacatacctaaaatttaacaaaaaaaacaattctttcttaatctctaacaacacattacactcccataagtgaacagtaaaaaaagaaaacatgttccatttgtttagatacttttgcacattcatctctctttattatctccatctacatacacaacaaaccaaatatatgtaactatatactatatatatactcatctcagatgaaaaaaaataaaacaatcattacagcaaaaaactaagtcttgcatatatacgattgcaacctcatcattttcctatttgagctgccacaaataaccaatcaatattattacaacccacaaaacaaaaattaaactttaaaatttattaatggttacatacaaaaaattttacctaattttgttgttcgatcgaaaacaatatataaaacaataaaaaaaaactacttaatgataaagaagaagaaaacaataggatcaaatttaaagcacgtctctttcttcttaatctattcccatacatactgattaagtttttagaaactaaaaaaagattaaaaattttaaacatgattatctacatccagaaaaaaaaatattgaaatcacctacatccacc

SEQ ID NO: 92706 - DNA, 536 bp, Cannabis sativa
ttttttttttttttcttttgaggggggtgggataataaaggcagtacatttggtctaagggtttttttttttttttcaaatgaagtgtgtacattgtgtagcagttaatatgatagtgatatcttcacaatctattcaacacaactctttttcatttttttgtcggaccctctttcaataacaacattatcaacctaggtattagcaacatcactttgaaagacaagacaaaggtaaaattcacttataatactttttttttctttagaaatacacttataatacttaaatgttaacctaaaacaaaaaaaaatacctccaaataatattatactaataatatatacttaaagttttatatcttatactaattttactccaacaacaaacaccgaaattaattttctctctctcatcaaccaaactccaaaacaccacaaccacaaagttgtttgtaacgttcccgcttcaagcctccattaggcccttacacccacggactaatggctcttatacacgagtacgacactctggct

SEQ ID NO: 92707 - DNA, 794 bp, Cannabis sativa
ggtttttatgaacacccctagtatccctcaccaaggatgttgctagaatgacctgggaggaatttcgggatttgtttaatgctaaatactacaatgaggcggcccgcagtccaaagcggaaagagtttgttgagttggtacaaggcgaaggtatgtcagtgactgaatatacaaccaagtttgatcgctaggctaaattggcctaagggattgtaccaacggatttcagtaaaaaagagaagtacttggcggggttgaatgccaagattaagcatgatctggttatcactacaaatgacaccataacttatgtgttaggctatttttagcctatattttggatcaactttacgttcgcttttcgttgttttaggatggaattatgcgggttttctatgttttcaggttcttcggagtaatggaggccttgggatgtaaaagtgcagtaaaagatgagtggagccaataaaaacgccattttcagcttgacgcacttctggccgcggctagatcactatcgccgcaaccataactcgaagacagaaacgaggtttttagaagccccagtcaccgcgatgagcatcaccatcgccgcggccataaagtccattacagaaccgtggtttttaggagctcatctggccgcggtgagagtccgtacgactgagggtatttttgtctgacgaaccctaaaaattagatataaatagaaaactgcgattggagatccaggggaagcgattttgaaccctaaaacacagcagtgagcggcaggaagagcagagtaaatcaaa

SEQ ID NO: 92708 - DNA, 1027 bp, Cannabis sativa
cccaagcctgaagaggtccttgttcgcttctgggagaagaagaagagacttgacgccttggtggaggaggcaggggtcctctccttccacctcgaattgattaagccggttgttcaccaccactatcattatcattattttcctctttctttttttttttatctacatatttaatccttctcccctatctaagataatttacttattttttcttaaggggagacatttaaggctcgtccccaggcccttatcttttttggagcttttctttgggattcgaactttgttaaatttggtctttttacatttgtccgtgtgatatgctttactacctttaagtgacatgaaaattaattttaggtcactcaggtttacaaactttaatttagaggttgcacatacttgtctggtacaaatttactttatagaacataagcttttattttttcaactattggtaatactttcggagttgatcagttttccaggccctaggcaccatggttttgtccattctttttagcttgtaggtcccgtagctgatttcgtcctcaattttttatggtcctttcgaatttggcccaagtacccccactccgggttcttagatcaccaatagtgaattacttttgactttcgagttgaagtgtttggccaccttcttttgaaaagctgccattcgtatttgagactcatcccggagtttgtcaatttgatccagcgcttgtaataaagccttgcttgtttgtttgttgtcggatcgtaagtcgtcctcctatgggattggaataatgtttcacctgggaccattgcttcacaacagtatgccattgagaatggcgagtggccgcttgtggttcttggggtggtccggtaggcccataacactcttggcaattcttcaggccaattgtttttgcatgccagtagcttcttctttatggtgacctttaggattttattgatggcttttgcttgtccatttgtttgtggccttgccactgcaaagaagcttttgatgactccg

SEQ ID NO: 92709 - DNA, 999 bp, Cannabis sativa
  modified_base (866)..(867): a, c, t, g, unknown or other
aaagcgaaacccaccttatttagtgtcaactgtgaaacgatacccactgatacattgttgattcacttaataatgaaaattagaagttggcactgcaataatccattttaaaaagacgtagaagagaaagtgaacaaaaataaaagaactatcaaaaatgaaacaaaccacattctttgatgaaccaaattcttcttggcatcgattctttcacgaaggtctgaagcatgaaaataaattggatcagaaccctcccatatatatgtatgaattatcatatatatgtattaaattagaaacgaaatatcaaaaattaagagcgagtaaaaagagaaacaaacgacattcttcttggcctcaattcttcttggcctctgagctggtatccaagctacgagggcaactattggggaatgaaggagctacatctgaatcattgtatgtgagaattggatctgctgcaatatttgatcgattaactttttgggcgacatcgatttggatctcttcttccaataaaatctagcgacatcgattaggatttcttcaaaagaagagaggatcaatcgattgggattttgaatttgcgatgaacgtttcagatttctttgaattcatgaggccattgttgttgcagtcgttctccgatttcgatttctttaaaagaagagaggattgatagattggaattttgaattcgtgttcgattttgatttctaggatcgatcgattgggattttgaattcagtttttttttttaatttgtttttaatttttttttaagaataatatgttaacggcgttaataaaatcgttaaaaaaaataaaaaggatcgttaaaccaagaattgccgttagatagacanntttaatatataaagatataaattaaacaacacaatgtatacaatatagaagcaacaattttcttcgcaacacaaataataataattgatcaaaattaattaaaaataagagcacaaatgtgacgtgtggaga

SEQ ID NO: 92710 - DNA, 1925 bp, Cannabis sativa
  modified_base (928)..(934): a, c, t, g, unknown or other
cgctcttccgatcttattattttattaaatataaataaaaagtcacccatgaatttctcataaactaaaaattcagttatataggcacactttatgtagagtagatatatttgtaatatatatttaattaatctgttatattatattttagtgtaatacattttaatttacttctattataatcaaatctctaacactatcattcttctttcttttaagatgtacatataatataagtacaaaaagattcctatttaatttttctgtgatggaatattttcaatgtcatggaatttatggaggtaaaataagacgacagtagtgtagaagctcacattaatgttttgcacctacgatgacaattccattaaaaccgtcccttttattctttccaagtacacaataaaaaaaaaattgaacaaaagaacaaaagagtacgattaattttggttttaaagagagatgatggattgatggtaaaattgttttcttccaaggcaaaaagaaacaaacaacaactaaagtgacatactttttggcgggaagagaactgttgaagaaaagaagccataaccgtagcttaggaaaaatatgtggtacatctcttgaaaggtgttttagcacacttcacaaaatttaatcatcattcttatgttatgattaaaaaatttgtgaataaatgtatttttggtcacaataattgttggggttaaaattaaattagtgacaacttgtatctaaatattatgttttttttagtgcataatgatattttacactcaattaatagcttaataacttaaaggtcttgagttcgaacccatgacctctccctttttctcatccctccctcaccactaagctagcattagtgacttctaagtactatgttttagttacaattaagtaacattttattgtgactaannnnnnnatttagtcacaaaaaaaattatattatagctaaaaagttatcataaaaaagtagtaattttttatagtggcagaatccttgatttggacatagattaaagttttttaatctttttctttttatttcatttcatttcatgatgttggaagttgtagttatttagaattatttgtaaattttaaaaaattatgagatactaaaaataaagttttcttgaatgccaaagagataggtttctaccgttaacacttttttataggaatgtagtattgttcagaatgtgaagagtggtgaagaaagtaacatagggtaaatgtgtggtaagatatatggaatttaatctaaaaattaataggcaatgagaggatgagtagctcatatatttgtaatgtgaaactctttaacatttcttgaagatggtgaatattttttcctcaccagtcgcaatcggctttttttggaatactattcatgaatcacaagcaactcttttgactcgggtattatatttagattagatactcgttaaagtagaataaaatatgtgtatgttaagatgcacaagtatccatctcaaaactatttttttacatatttaattacaccaaattaacatttatttgattacaaaaattttatcatgggattatggcttgtaagctactagatgtaatataaatgttataacattactcacacatgataaatatatgacaaagacacattgttaacccaaaattttttcttggtgtcatgaacattaatgtttgatatgtgccatgaaggatgacgtcacaggttgagtagacatgagtcatagtagttaacctgggaggggacccattagccctgtgcccaggttgactctgggagcttcgggatagaagtttgcactttaataactttaatccaactcactatcttttagtattatgtaccatgaagacatggagcaacataatacaatgtctgggagctaaaattacacgaa

SEQ ID NO: 92711 - DNA, 534 bp, Cannabis sativa
tcactcaaaaaattaactcactcactaattcgagtagagttctttaatttaatttcattcacagaggtttataatgaaataacttcaaatggatattcagtggtttcaaaaaaaaaaaaaaactaccatcaattaaaaaaggcatttaaaattatttaagaaaaataagaatacgtgactcaattcaaataaaatttagtggaaacactagtgcacttcttttatagaaagggataatcccctacaacacactatacttcttatcatgtccacaatagtatttataaccaatcaaagcacaccaaataagaagtattagagtatccgtaattagggtctccaccgtagaatttctctttacttatttattatatattgaaaaaataaaataattataataaaataaataattattaaatttcttattttttttaaaaaaataaattatattttattttaatatcaagaaacaacattaacctataatttttcttatatacttaagtttctatttttttttttacatttgataaa

SEQ ID NO: 92712 - DNA, 1554 bp, Cannabis sativa
tttataatttaattatttttattattatttttatttttatttttattttcatatttaatttttatttgaaaataattattaaagagtttttggcagttaaaccctgttttacttgccgttattaatcctcgagacttataaaattttagcggtaaaatttttcaaactactgaattgttagcaaatttaagatgttatccggttaactgtcgttatggactacgtatgtgtacactcttgtacacgtaacacatttatatatataatattattattatttcaaaattaattataaaattataaaaataaaaaataaaatatttataaaataaataatattaaaaaattttgaaataattttttataattttaaaataattatattaattaattgtgtcacatgtacaagaatgtacatataagtaatccatagtgggagttacttgtaaaaataaatgacactttaaatttgctaacaattcagtagttccgagaattttactactaaaattaaagcttaaaaatataaatgcaagtgtaataataattaagaggatataataaaaaaaacactcattattaaatcatttctatattattactttttacaattattatatatatttttgtggcggatcagagcccagataacgttcccattaatcgacaccggtagagaaagcccaccatcttacataatgactacaccttcagatattattgagtcttccagccaactctccactcataccaccccagtttccatgcctcttacagctagcccatctttacgacgatcttctgcgagcaaacttgatgctctatatgaagtctcatatctttctgatgatgggaaagtcatcctatccgaccttcctttaataaacccatatcaagctttctccaaaccccaaagcctttttacacgatcgataaaaaccctcattaaacaaaaccctaaaacagtcaaagaatatgtccaatcgaccaaatttgaccaatgcaacctcccagcaacagagcaagaacagttagttactctccaaatccctcctgaatttccacaacaatggatagaccaaggtctaactcatatcccatttcggagcaaggtaagacttggcccttaacccattcacggaagaaaaggcttaccagtttgtgcaagaataacattgcgcttgtgacacgagaatgaggggaagttccagcatgcctccacatcggcactctagaagcaacactcaatgcaggcacagtcattgtcacattctaccccaatttctgcatgtccttacgggataaacggttgctagatgccttgaaagttcagctgcaaattgtaggcatagaccaagatcctgattccctaggatccacattacactatcaaatggcttacagggtgcaaaatcatgccattgacatctcaattccgggaagttcagatgcgttgatgataactgtcgatacaaaccatgtaccaacatgcattcacattcctcgccagatcacaacagaagaactccaacaaatacttccaacctcatggat

SEQ ID NO: 92713 - DNA, 576 bp, Cannabis sativa
tcatgatgtcttaaaaagaggcctcatggccagatagatatataaaaaagaaagataaaaagagaagtatttagacagctggagtcccaggctctttgttcgggtcttctgggccgataggagctagaggatctcctgtctaagcgggaggtacatcaacgttctggccagaagtagaagtgttcgcctcgggttcaccataagccacttgggaagcacagtacttgagatacatgtctttggcctcgcccaagtaatcaaaattttcctgagggttagccttccaaaattcataaaaaatctcgagaccggctgtctctagggcatgcactttctcttccagcctcgtcacctcgctctctactgttcagtgtttgatttgtacttcttgacctcagttgtaagctcctcctccttagacttcttcacttcttccagccgatggaagacagtccgaaggactcccctttcctcttgaagacaattcacttctgctaacaaggtgtcaatggtagcttcaagttggtcagaaggctcgaggtccttagtcagctcggttattttcctctcagcagt

SEQ ID NO: 92714 - DNA, 513 bp, Cannabis sativa
gtcaacatttagatttaccatttaaatccaacgattatccttgctatataataaacatatgaatcatggtaatataccctcattatatggcgagtattatctttcatgtattaatacaatatattcattctataacaatgtactttatgtggcatatggatactgaatcccatatttactttactatccttgaatttgtgttgccgcatgcctttagtcaaggatattgtgatcaccctattcagtgttacgtgcttaaagaccagctatcacgcctctatatggttaagtatttaatgttgatatgccaacttcgaccagaactattatagttctttgccataaattctatagctgactcactactacaaactacacttttggtgttagttttaaactggcacttatacttttagtgtcggttcatagaactaacacctattccacagtcacaaaaagttagattttaagtgtctgttataaattgatacaaatgagttttggtgtcatttt

SEQ ID NO: 92715 - DNA, 520 bp, Cannabis sativa
tagttataaaataaaacatatatatatattttaaatattacagtaaaaaaattatataaaatttcattagaatttttttttaaacaaatcatacataattatcaaaaaattgaaaataaaataaaactaattattgatattaaataaaaataatgtgaaaaaaaaattaaacattaatttaagttaattagtgtgagtttggtaatatttttttaattaaaaaagtaaaaatattttctaaaaatatgttttataaaactgttttcacttttcaattttgtaattaaaaatcaaaattttaaattttttctaaaaaaaattactttcagaatttttttaaacaacttttttttcttaaataatattttagattttgaccccaccctagtctcgtactcggactatgtccccgaccccagacataaataaaatcaaaaaataaaaatgaaaatgaaaattatagagcacacttttattttctgttttaaaattaaaaaataaaagtagttaacatattttt

SEQ ID NO: 92716 - DNA, 1232 bp, Cannabis sativa
  modified_base (873)..(874): a, c, t, g, unknown or other
tcttcgcattagtatcagtttggtctagttagtaaccgactttgctaataactaacgttataaagctcattaatatcaatttataaatgaccttgtggacctcattagtgtcgattataaagtgacctaaatacaagtattggcgacagttatacaatgttgctaataaaaaaaacaaattcactttcaaacaacactaactcgaaaatacaaaatcaccacctctgattctattttttgtattacaacaaacaagatctgatcaatatcatcacatagaacctacacaaaacatatataatttaatagatttataatcctaagacaaattaataaaaaaaaaatactaaatctaaatatgaaaaataaaatgagtatagtagaatgagtaataacttgttgtgtggtaggtgccgtgagacaaagagagcacaaccgagaacaagaagagatggagttgtcgtgacctagagctacactaacaagagagaagttaaaaaactgtatttttgcaaatgccaataattatactaaatttcaataaaaaaaaaaatacgactgtaacagtctgcaacagcagaatgtaattctatcactgtagaatacagttttgcagaaacaaaccagaaataaatagtacagaatttaaaaacttgacacaagagaattatacgtggtattaagctattaagctattatttgattgtaactccaaaccgtgctggatagtcacccatcacacgactctcaaacccaacctgtggagaatcccgggggacaaagtcaaagcgcttgatcctttgccccatactttgagatgctcctccccgctgatcaagaagcgacgttgctcgtgataggcttagctttaanncgctatcgttcggttcgaataagtcaagtcccttcggtcgattcgctcaggtggtattcccttatctttcctaatgttcagagttgttctggtttgagaaaagagcaccggccgagcgccctgaatgaataagaaatggacaccattacgctacactaaaaaaaaattagactccctctagtgatttgccgcaaccctttgtaattcgccttgctaatctgatctctgaaacacgctacgtagtgaactcccttcagctattgatgtgtgcttacttcctcctgaaataaggcttaaacaaatttttttcccgaagatatatgctcactttctcccgaaatgagacttggaaaattct

SEQ ID NO: 92717 - DNA, 776 bp, Cannabis sativa
gtaaaataatttccaacatccacatcctcctccaaaggccgaatcgattgctgtaacttcaagagcaaaacaatgagagaccaattgtttgtcctagattcaagtacctagaacatacaaatcagccacagatgaaaaagcatgagttgttcgatacgaaaaaacttctttgcacctcatctggactgaaccaaggaacccaaggttttgtccagatatcaatctcccccatcccaattaggaaccccgcactagctacacaaaaatcacgagcctcaaggatacctttccacataaaggaatctccattgcttttttcaacattccaaaaatcaagtttttaacagtattttgcacaaagaatttcaacccacggccgactgctattacttaaaacataccaagctaattttaccaggagtgcaaggttcatatcacgaaaccttctcaaacccagaccaccatgttttttcgactgacaaagatcagcccaacatttcagagccaagtaatggttgctggagttgaaatccctacttcctttccaccagaaacgagccaccactctatccaaatcagagcaaatcgaagcaaggattttatgggtggccatagtatatcaaggaatgctatgtaaaaccgagttgataagggtaagatgatcgacctacgataagtttcttgctttccaaccctctaaatggttgagcactttcgttttgagaaaagagaaatcttcatgctttttcgcagatataaagaatgggttccccaag

SEQ ID NO: 92718 - DNA, 533 bp, Cannabis sativa
tacaaatttataaaaacaacatgtttcatttttgaatggaacaaaaacataattctaatgatcttaaatatgataaaatatatagaaaaattggtgaacatacttaaattcaaacatattaatatatacataagtattatttatacgagcagaacttttgtattaaggataactgtggtacaagttaataaaaacaaaaacatatttctttttagtaataaaatattagcaaccatctgtagtgaaaaagtaataattgtagtatagcaaatattcctacaaaactaatcaaatattatatgaaatatctaaattaataatacgaatcatgacatacctctgagagtacacaatgtacgtgagcgacatatttgcactcggcacaataataaacacgaactcgtgggtttcttttttcttcgcaaatgtcacaataatagtcaccaaatgtatcctcaatgcatgaatcaataagatttagacaatgtatatggctctcatgctttatgaaaaaccgtgtttttgcaaatgtc

SEQ ID NO: 92719 - DNA, 560 bp, Cannabis sativa
tggaaggctagaaatcaaatttttcgagttactttttgccagtaaatcagaatttgcaattgaaatttcgatttgtaacttctggtattctagtagacccaatttttgtattttgtccgtaactttttactatccattttggacgttctatatataattagaaagcttgtaagaacctctacagcatagtacgtaaattagcgttaaaatatattttgatttcagagtgtttttaggaaaaaatattaaggttttcatggtagaacctagatgtcatcttttgatataacggtccatagagaagccctatattatttacctaagtagtattttagatagaaacttatcaatttactgttaatgtgatttagggtcactgatcgctaaacaaaattctactcaggttgaccgacacacttgaattagattccaagtaaaaaaagcgttcaaatgcacatatgcacatatttagtattcgtttattatattatcatatagctagcatattagagataacagtatgtgtgttcgtagagttgcaccaatatactgatatctaa

SEQ ID NO: 92720 - DNA, 575 bp, Cannabis sativa
ctactgaggaatgctaattataactttttagtcaaactctccgctcgaaatcacatgtcagaatatttttaaaattttttttcatagcagtattcgatataattacaatatcattgctataaatttttaaaaaagtttgaatagtttacaatactagaaacaaagttcctgatattctaatttactacgcatgttcaaaaaacttcaaacttattttcgactatgtaaactattcgaaactctttaaaaacttataggaatgatgttatgagtattacaaataccgctataaaaaaatattgcagcatgtattttcgaaaataaaaatgaaaggtaacactcatcctttttcaattacaaaataatatttagacatgtaaatctaaatctttgtattaataatttatttattttttaacaagatatcttttatatatttataaaaatgcatttgctactcccaatttacaattttaccatgtaattttcaaatttcccaaatattgaaatataaacatataaaatgaacaaaaaaataggaaaatttacatgatatactaacttttgctattttt

SEQ ID NO: 92721 - DNA, 816 bp, Cannabis sativa
tcccttgggctttggtatttttattgctagagtgtctttctaggcaaaagggcgtcgagcccggaggcgttggttgccttctgtgcctgagaaggcctattggccagatttgcatttctccaaggaggtatgggagcattaaggttcttagggtcacctaccttcgccttccccttgtcttgtgcaggagcataggttccagcattggttgggtttttcctggtgtttcctccgatgcattccattgagagatcattgttagaatccccatcatctaaatctccaaacttggcttgaaggcaagccatcattttctccatcatttgagaaaacttctcttgatgggctagcttttgtttggtctcaagcaactcattagacacttgaactacttcgaggacttgttcataatggtagccatctttgtagtacccatctttgatgtattctccatcatcttcctccttttcatcattctaagcatttctctcatcatcgatgtggtcatgctggttgtttgggtcgtcctcttgactgttcgcattggatgcatccccgcctctcacatcgctcagttgggcgtgctctggtgagagggggtttacttcctccatgacagtcttgaggccaccttgaagagtctacttaggaaccgtcttttgtgtgaaaaccatggccgcagtaacattgtaagctttacgttcttcagctcccaatgaaaataccaaaatatttaccgatatttttggaaactaaatatttgagaactaaagaaataataaaatgcaaaagtagtgtgtgagagagagagagaga

SEQ ID NO: 92722 - DNA, 1678 bp, Cannabis sativa
aatctttaaaacaaaccaatttttgtcacctctccaatgaacaaaccaaagggtctctaatcgaaactaaccaaaacaaaaggtttgcttcattcaaaagctaaaacagttctaagatcaaagaagactagactcaactcgataaatattcaatcgatgagactaactacttagacttctctccttgtttcttttcaataacttcatcacatgcccttatttgacaacactaacatgaatttgttttcatacatgaaagtgagttttagttcatataagaatctttaaaacaaaccaatttttgtcacctctccaatgaacaaaccaaagggtctctaatcgaaactaacaaaaacaaaaggtttgtttcattcaaaagctaacacaattctcatatcaaagaagactagactaactacttagacttctttccttgtttctttttaataacttcatcaatgtacattatacctttgcctttgtaaacttcaggaggcttacagctacggacagtggctgcaaactggtgtaccctttgcttgtcaatcccggtgcagcaaacgacattgtttttgaagcaaaaaacccgaacagcagggggaacagtcaattcaacctcatgactgtaacccaatttcagcaacaaaagtcttccttctgattctgctctagctttgtacccaacacctacaatcttcaaaaacctaaagaatttcgcttccattgatgatgatgatgatgataatgataatgattatgattatgatgatcacaacatcaactcatctcctttaaacaaaaaacaaaaaacattaactcatcatcatcatcatcaatgagtttaattacactttttccaatcttaactaaaacaacaccaaattattcaagaaactctttaatttcataataacaaaagacataaataaaagcatatttctattcaaacccactaacaaattctcttattctgtatcatttttcacagattgtagctattggtaacccaaataatcataatacaaatctcagttcagatctaacacccatacacagaacaaaagattaaaatctaactataaaacataaactaatctatagaatgattaaacgaagatttagaatcaaaaatagttctctacttctgatctgagagagagagagagagagagagtacctgctgctccggccggtgattatgaacccaacggaattcctcgtctccgaccagagagaaatggagaaaccctaataaatatttatgtgacttttggttttgggtctgttcttataaatgggcctccattattgggcttctaatatgggccaagtcataagatacccacatttttataagggattatttcactaatactcaaaaatgacaaaagctttagatttttacgtatataaattgtttttatatttttatgaaatttaacttttttttctacagaagtacggagggttatttttctgttgctttccaaataatataagtaatataaaaataatattttttttctttaaaagtgaaaaattaattttaagtactttgtgtaaattacatatttaaatttatatatagaaagtgtatgtatatatggcacaaattttttttttttgttatgacgtttttccattagagattttatttgtcttttttaaaaaaaaaaaa

SEQ ID NO: 92723 - DNA, 521 bp, Cannabis sativa
tgctaacttttaaattttattattttttatttaaattaaattataaaatcagaaaaaagatattaaattatcattttattttacgcttacgtaaagaatgggtccatacttgtctcgagagagatatacttactcatcccatgtaatcgatatgcgcgatcagtattaaattctccctatcctactctacttttaatcatgccaagcataattatgcaactagacccttgttctgatcgtatcttctcataagtttgagtcatgcaaggttagctctaagaaaagcattatattgacacgtcattttttttattgagaattgagtccacatattcactactcagtacttatatttcaagataaaaaaattcgtcctataacaattcgaataccaataatacgagcgaaaaaaataactgttggaatttagtttatcaggatcttagatctactcacaagtatgttgtttaaaatcttaaatatgaacttctaaaacgataataaacacatataaattttag

SEQ ID NO: 92724 - DNA, 534 bp, Cannabis sativa
gtgcatgccgagtgacatgcgcttttgcatgccgagtgacatgcccgtgagcatgcttaataacttttgagagcttagagaaaaaaatacgactatgcattcggagcaactctttgagtatgtccctgctaatctcctaattaatagttggctaatctcgagggttagcattgctaatttttgggattaacaaattctatagtacatctcttaataaaaatttattttggtacatatcatctatttcgctatttaggaaagtcttttcgtttattttttgttatgatcatgtaagttgcagttatttatgaacacctataaaattttaaaaaattacgaatagttaccattccaaaaataaggtttaaatatattgatgcatgagtgattgtattttcttaaactcgtggcaaacaactatttaaattttatttttagtattgtaaactactaaatttttttaaaaaatttattgatagtcttacataaaaacatgaatatcgaaacatatatgggtaccaaaacaatcatttt

SEQ ID NO: 92725 - DNA, 789 bp, Cannabis sativa
ttactccagtgaacaggtgtctaatatttctctcataccacacttattaaagtatctaaccaatagtacatttaattatcacttttagataaacgcttcgtcagggaagagattattcttagataatctaacctttatcaaatatgcttacagcatgtttctaatattctattgatcttctcaggttaccaaccttttaataataaaacatcgtactattttctctttaatctccatggttctcaataaccttctttaattcttaacatgtttgccaaagatatcaaccttggaaattcagaagattagaaaattccttcgtatgaactccatattctcatttgatgcataaattatctacactaatagacaacatattaagtcggtgcatccaaccgctacaagttagatgaaatcataagatcccacagtacataattcataattatatctttctattcttcctatgggtccttttaagctaatctactcacttaacttagtcacaacttaagtattcgttcttgatagatactcaattagagcatttcttatttctactcactatatactcatctcgataccttataaatctctactgattaacacatctctttctccttataatttttggaacaactactgattcagcatcttaatactaatctttctagcgtactttgtccttacttatatactttttgagatgacttcatgaaagattttccatcttgagattaccccaagttaagtatggttaactctgaggtaagctcatggtggattaat

SEQ ID NO: 92726 - DNA, 710 bp, Cannabis sativa
accggcgacgcagctccgccacccctccactgccgagagcccctccttcaacctcagatccgatcatcgattctgcttcagctcttgatactctggtatgcttcagctcttgccttttgtaagttttatctttctagatttttgtttatcatttttttattgggctatctcagaaagctgatatgtacaactttggtgtcttgctttttgaagttcttacgggaagagcaccttcacaatacccttctctggccagtacttggcctaatcgcgttgaggatgaagaacagattttggacctcccgaaatgggttcgatcagttgtcaaggaagagtggacaggtaatgaataatgctctgttttatttatttataaatatcattttttgttgttttaaaattctggattattgaattgaatcaaggttgtttggatgccgagaaaacagagaaccattgagaataatgacctgttcaattagtttttgtttttagtcattttatatatgaattataaagatgaagaatgaatcaaatctgtatgtgagtaatttttgtcaaaaaaagaaaacttggaattgtttcttattgttaatccattggttcgtagctgagaaattagaagaatctataactgagactatataattttgtctttacaattgttctttctatctcttatgctaagtttaattatgattgataaaatt

SEQ ID NO: 92727 - DNA, 595 bp, Cannabis sativa
agtttgttggttaatgaagttttacattttccattcaaaaaaaaaaaaaaaaaaaagttatatctttccctatttgtattaggatatcttgttagtcttatagggcattaattattttcatatgattatcttgttgttttcttgtgtttttataaaatattgtaaaaaaaaaaatgaacgtaaaaatataaaataaaaaattgaacacaaaaatataaaaattttataaaaattagtgttttatgtaattatccctaagcctaatcaattacaagaatacccaattaattaaactcaattcatttttgccatgcaaggtgactatatttctatattataactacaaatcgaaatacctaccaagaatataagacaagcattttccaaattttacgatgttatattttccgaaatcaatcactcaaatttgatgacaataaaaacaagaagcataaacaaattgaatctcaaagtgacattctcctgtttaatggtgaattcctctttgtaccattgctgcctttttttcttctctgatctgaaagtggtatatatatcatcattacagaatgtaattaattacttatatggcaaa

SEQ ID NO: 92728 - DNA, 912 bp, Cannabis sativa
  modified_base (824)..(825): a, c, t, g, unknown or other
tcactttctctttctctcttcttcttctttcttctcatctattttatattattttataacaatattataattattatattattttaatatattaaactgtttagttatcagtttcgtttcatttatatacattatatatatatatatatattaagttttaacatataaaagtaaagaagaacgacgaacaaaatcctcttcttcctccttcaacaaaattttctctttttataatccattttcttcgattttcaacctgaaacctagcgatttaaggtttggtagtagcgagatagcaaatccttaaagagagaaagcttaaggtatgatttaatttcgttttaagtttaaaaacaattggtttcatatatgggttttgtgaattagaatagttatgaaggttctggccttataggattgttctcgggtagtcatgggatttccgatgttttcttgttgaaaatgaggtgctttcggtttagaaattgagtttggaactttttaaagcttagtccgaacgtaaatggcgtttttcatttaagggctcgatttttatttctgttatgtaaggatagtaatattcgtggtatatatgcgccctgtgaagtttggagtgatttggataagttttggaagtgtttcgataagtgcaaaaattgggattttccagttttataatttttagaaattcttaggagatcataaatcgtatttttgtcataacttttgactcgtgtgtctgttttggaagttttatataccgttttgaagcttgcaacgagctttacaatatgttgtttattttagagccaaaatataagttnnattttagtgtatttataccgcaggatttagtagaaaatcctagattatcttatgtggatattaagcagtgttttgggataaacactt

SEQ ID NO: 92729 - DNA, 789 bp, Cannabis sativa
  modified_base (97)..(102): a, c, t, g, unknown or other
aaatgataacatgaaccaaatgacgcacaaataggtgatgaaaatacttctgtttctttattgttattaaaaagataaagattacattgaaatagannnnnntttagggcataaaacctaacacggccagcccccatgaggtcgctggtttgtcatttcgttgtccctcctaagtacttagactccttgctggttgaaagtgctgagtagatggcttggccttcttgttggcgagctgtactcccacgtggcattgatgttggccatgtggacatgccacgttaggtgggaaaaaattaagataacacacattgtgctaaatttaagattaatcatcacataataaatgagaaaaatacaataacaaatacacacacaacaattacaaacagagattttcaactacgaaattacaataaagattataacaaaaagaagagataaaacccagataggaaaagggaaagaaagagatgggttaggcttactttaatgggagaagaaacatggagacgagaagggcgagctgggccaacggttctgatgagaatctccactttgttattatatgcatggattttgttgtggtttaaagatcaatagattaaagtcctcaaccaaggaaaaaaaaagggaaaatagagagcaaagaaaaacttacacagggtaaaggtcgatcgagtgattgagagggctccgtcattgtcaaagagagagaagacgggagagaactgagaagattcgaagtttcgaactaaagaaattgagaaaggtttttttttttttttt

SEQ ID NO: 92730 - DNA, 696 bp, Cannabis sativa
ttgtaaaagttattaattagatctctaatttggtaaatgacaattcagaatctatatttttttaaaaataatacaaaataatactctaaactcaatttttgtctaattaatacgtaataatagtctaacctagaggtattataactaaactaattacattttttgcatctatttttgccataaactaacttaaaaaaggatgaaaattgagctaaaatattattttgtactattttaaaaaatataagatatctaatttattatctaacaaaataaaaaatttgattagtaacttttataaaacataaggtcaaaaataatatattttttaaaaataaaatatatctaataaattatttaccaaaataaaaaagcaatcactaaatttataaaatatcaaatctaaaataatatttatccatatatatattattaaattaggaaacttaactagttagaccaaactctacctatatgtaacttcaatgtgatgtgatctccttgacacataagaaagaaaccttttcttttgtctttcatttgaagagataaaacacaatttattaaggttcttcttattcttcttcttatccattctcattcttaatttgaacacaatctttaattattaattaattaattaattaattaatgtatttacataattctctagacctagcttggaatatcccacaa

SEQ ID NO: 92731 - DNA, 558 bp, Cannabis sativa
ccgacgacagaagagcaaccagtggggccttcgtggtaatggatatcgcagtacgattctttgaaacaaagttcttagcccctgagaacacattcgcatacaaggaagaagaaataatctacggcccataaagaggaaatggaatatcagtactgtttaaaattgtatcaggcgacgaggaagagcatccatgccattgatgtcctagccgactgcaatgaaagcagaaaattccaattttctcgaatttcaaactggacccatcgtttaacactgtggcttagatcaatgaaacaccacgagaaaagaggatcctcaacccgtagctcaatctcaacacgaagctagttagttcaggaagttggcttgtcctcatccaaatcaaccttgatcaccttgccagcaagagctgcaagaacttccccatttgcaatagaaaagtactcatggggaaggtgatgaacctgaacccataaccaaaggaaacagaccgggatgacaccctcaactcttggagaccatggttggagagcaaaagtataaactttaacacaccag

SEQ ID NO: 92732 - DNA, 519 bp, Cannabis sativa
  modified_base (360)..(361): a, c, t, g, unknown or other
taatcatcaactaactaataatcattaacaaagttgtagggcacttaaaaggtgtaaaatgaataatttatcctattaagattacataagagcatctctaatgaagagctataaatgtagtgtattactattttttagaatattttgctaaaagttaactccaaatataaaatgtgtgccaaatttggtccaagctaaaaattatgccaaatttggtacaaaagatagcgtgtgacaaattttaggccacaataaatcctactttttttaattacctatttgccacttattaataaaaaatatttttgtatttataagttattaaaataatataaataaagttaattgtttgtatatttnnaatgagtattaatggtattattgaattttatagctaatttgatctttgtgtattggagcactaatacaaaaattgggccaaatataattttgtgttatattttggactaaatttaacttaaaatatacactatccatagaagatggtctaactagatt

SEQ ID NO: 92733 - DNA, 667 bp, Cannabis sativa
ttaacaatctcaatagttcgaggataatttttaacgaccaaaaaagttcagggacacgatttactacatgtcaaagttcaggaagaaaaattaataattaaccttttttaaattatataagactattaagttttagcaatactctttatgaaattatcccaaggaaaaatgaggttgtatttatactagtctcaagtttttttttttaccactcaaagttagttgctttgctcaaaaatggcgggaaccatataaaacccaaagaagaaaaacccttcttcttcatcttcatgcgaaccatcttcactctcagtttcacttcctctactgcattcaccatctctaaaaatttcacctttttccactttccaacatacccatactcaataatggctccttccacaaaaatcgtggcagagtacgccaaatccaatcgctcatcttgcaagaagtgctccaacaccatcgattccaagtctctcaggttgggtttggtgagccgcgattctcggggtttcgacatgactaaatggcaccacttgggttgcttctcttttggctcggaattacctctttcggctgaggatattaaagggtttgatgctttgaaggtgaaattaatttttgggctttatgggtttgaaaaagattggatttttattttttg

SEQ ID NO: 92734 - DNA, 519 bp, Cannabis sativa
tgatttgatagatatcaaagtctagagagcatggtttagtacataaacaattactgaaatagtaaaattgaataaaattagacagaagtctttaaacctagcaatctcaatagtaaggaggaatttttaacagccaaaaaagtttaaaggcatgatttggtacatgttaaaatttagggaaaaaaatcttaattagcatttttcttatataataacacatcatgtattaaaaattcaaaataatgtgtaatgtatgagtgtattattaatcatattataatacacactctcacatatatatattttttaaaaaaaaattactaaataatttggtaatcatgttcccaccattctattctacgctattataatgtactcaaaattttaatattaaaaattttattcttaaaaacatgaatttttttattattatttattattttggcaaaattccaattaagatacaacatgacggaaagaaaaaatataaaagggttcatttcaatttttattactata

SEQ ID NO: 92735 - DNA, 546 bp, Cannabis sativa
tacttagactagtttgaggcatcagcatctaattgtaaaaaaataattaattatttaaaaatttattataaggagagaattttaatttacataaaaataactctaatttttgtgaatttttttttttaaatattataattaaatgatttaactgttaaaataattatagtaggaatttgtatataaataaaaaaattatttataaattttaattgctaaaagagatcttgttaaatatttatttaattattttaaaaaaattgttaattataattaatcaattctaaaaaaaaaggggattttttatctattcgtaacctgctattacaggtaaaaaaaaatgtaactatgatggttataataaaaatgtcaccattgaataatcaccgtacttttagaatacattggatacatttttattgatttgtatttttataaaacaatgaatatatttgagctattacactttctttattcaatacactgaacattttattccttagactttttttgttaaaaaaatatgataaacattttagaaatgta

SEQ ID NO: 92736 - DNA, 554 bp, Cannabis sativa
taaagcgttatatagatagggaaattagacctcctggtaattacaaagaatagtaacagatatcgaggagggctccacaaaacctgtaatgttatgggcaaacacccatctagtcacattatgagcagcgaaattataacaacgaggaataaacaaaagtttacaagatacaaagtttttagatagttaattacataaagagacataattatcaatattccatatagaatgtagaccctttagcgctttgagtctacattctagtcacaatatagaatgtgactcctgagtctagccgagtcaatggcaaggtgacacgccgccgcctttccaatcaacgggtccctaaagctgagcatggaaacagcagtccacaaaacatcccctgtgtgatctctagccagggtcgcaatgcacatagaatctctaccaaccctagcatcacagttgatttcgatccagtcctcaggcggaggggtccaagcaggagaagccataggtaacgtcggagggaataagcaggccacataatctgtataacaatgagagataga

SEQ ID NO: 92737 - DNA, 1144 bp, Cannabis sativa
gtttgtgcagcaaaaactagagaagggaatgagatttgtaggttgtgagcttcttcttaaaatggagattgaaaagtggagttgggtttttcaaactggaaaaagaatctgaataaaggaggagagagcgtgatagggttttcgaagatttggaaagacatgatgaagaagaaggaggtgttgttattaagcatatgttgtgtaatgatgatacagctgatgcagctatgaaaattgtttcctttgatacaagcaaaacccatttcatctcccctcctatcatgagttggaacaagagaagagagttttacagagagagattgacaagctaagacacaatcttgcagaaaataattttaaacactagcaagaaaataaaaaaaaataaatcaattaaccagtacacatacagaaagaactgaaatcattttctactgctgagatttctttacagattttagcttctgctgtttggaaaaggcgcgccggctttgcatagtcctaaaaatctgaaatgagaagagttttcagatagtctaaattcgaaatctcagcaaaatttcttggctttccatgaactaaaaatcgattacaaagttttctttgcaatgccaatgacttactgtcaaaggatcaaaatctaatctaatcactattcaattagattaacaactattgatgtaaacatacaagtatcaaacttttcacaaatttcaataggcacaactgaggactattactctatacagtctagcaacaaaagcaatatgtgataattaaggtattctattgttaattaacaattgtcatcaataatcactggtaggaattttatttaaacttgaattttagtatattttgtaacaaatatagttacccttttgtgaaacttctacatttgttcataattcatttcaaattaatattattaactctaaaattgttctctttctctattgttaaatttacacacatacacatatatgttgatattaacaatctataagaaacaaccttttatgactaagaaaactcaaatgtacacataaaagtatgcaactttgccaaaagtttgaaatttcaagcttagtaattccatagctgagaaaggaaatgacccttttcttatttggttataatattt

SEQ ID NO: 92738 - DNA, 533 bp, Cannabis sativa
gccccctcaatcgttatcttttaaccagaccaaaactttgctctcgggatccccttgtctgcttctcctgatctcgaggatggatgtaaagagagacatgtaattagagggatgcatagggtaactttttcagaagagaatccgaaggtgatcctagtggatcttgtctgtcctccacctcaggaagctggtatcttagagtccaaagcttgttcccaacatatcacccaaacatgttgccattttaggagcttccagtcgggcagctggaatttgatcaaaaatggctcttcaattaacctcctaacgagaagtgcggagctcctgtactcagttagtactctctgatcttactattttaacttctttttccttctccttatttctttttactaactatttcatatttatgtaggcttctcttatgaccactatggttcttcaagcccatcaacagaatactactcaactctcattcgagctgagtaaagccaaagagcactgcgagctcctggtttcttaataggaaaaaa

SEQ ID NO: 92739 - DNA, 2141 bp, Cannabis sativa
cctggcttcgggccacagccttggctacaaacctcggcctcagacctagattttggcccaaaacctaatcctgacccgaactcagccatgatcccgatcctggatcccagcctggacccagaatccagccccaaagccggtctcgactccggtcccgactccggtccccgcccaggactcagactctagattcgagcctcagcccggacccaaacttcgaccccatatccaatttaaataaaataaaaataaatgaaaattttaaagaacaaactttcattttttgtttttaaagttaaaaccaaaagtaattatagaaggtctttcatttttttaaaaaaaaaattaaaataaaaatattattaaacaatattatattttttttcaataaaaaaaatggtgagggagaggagaaaagtgaaaggtggataagttgggaagtgaggtggatctgaagagtgatgtagaccactcatgtcatagcatgcaaggacccacctgtctctcccaagaacaatttcatagcttagtcctctctactgggtcccatctttcacgtactattacataatctatcaccctctctctttcactctccacgtgtcaatttcctattagacatttcatttttggcaccaaatctttttattttattttatatatatatataactcaccaaatgtaacattttattttagaagagacaatatttcaaactatcaatcaaactcccaattgatcttcatttaaattaatttagtttgatttgtgttttttttttttttttgttgagataaaaggaaattcgatttggtttaattgtggaaatattataaactcttctggttggagaaatctgatccgatgaaactcatttatggtaagaaaatagcttcaataatattacttacttttttacagtatgaaatttactttccatgaacaaatttaagtatcaaaataaatatatcagatgcaaatataagtaacattaatgacaaaggctaaactaaccgaaaatatcactctgtaatctctatcacaacaattaagacacaccaaagattttcatctcgaaaaccctaaaattttaacctttataacaattttaattgtggaacaaacaacaaataattaaattgataattcagaagaaaatttactggggaaccgtacaaaggttttggtacaataagtaaataatttagtttagatatatatacattattgagaagaaaccaacaataactaaaagctaaaaataataatagtacgtatagctattatgtcaggagtgctaatagttgaagaagctgaattaatcgatctgaaatatttgtgtttttcaaaaaaccttacgaacctttaatttctttgttctataatgaataatttcgaatatttttgggtatccaatatacctggtgctatctatgttgtttgcatggaattatatgtatgaaaccctagtaattacctctagatgttatttagaggaaatgatataatcaatttccattttaaaaaaaaaacttgatgatcaagaaacaaactttgggacagttactgtttttgttatgtagtttatattaaatatcaaaatgttgatgatgtacccgatattgtatttatatgtatacatataatatatatttaaaactcataataatatgactcttaaaggaggtaagttccaacaaaataggtagagcaatgcgacagtatatatgaccaagcaattaatatagtaattaattaacaataagttgggattatcgtttcattagttttaacttcatgtatatatatggataagagtagttcatcttttgaaggagacggattgagatttcactactaatatatttaaatgtatgtgtatatgtacatatatatatagagagagaatataatgtataatttataacagttaaagtcgtattaaagtcattttcttttaggcacactatccgatattataaaacaagattcaaactcagcgttatgtaagtttcaattaaaaaaattattctgataattacctttttgaaaaataatttttaacgctatcataaatataatgttctaagatcaaatgtaaaaaatgagttatatttttttgtgatatttttatattaatt

SEQ ID NO: 92740 - DNA, 1452 bp, Cannabis sativa
tcaatcttacagaaggagttaagtcacatcaattggtatcatagcaacaatttcattgaatgctttcagctcaaatgaaatcaagggtggaagcgaaagaggagactgtaaaatcgcattcccacgatttgacagtgataaccaagaatcttgaaatgttgaataagggacaggtgtttattgcctctaaaattgtctcgagatctcttgctcctagttgaaatctcgagcccaactcaatccatctaagaaaaaaaccttatggcaattgttcttgctataaaatggcattcaaacttgctaagctaaaattttgtggtgcgtaccaatcaacaaggcatcaaatttatgttagggcaacatgtagttacacaggagaatcagaaaagatttgttgaactactggtttacaactttgagatccactataggtcaggggcagccagctatgccgtcgatgccctatcccgtgttacggtggagtgtttggctctcaactccaccacttgcttaaattgggatatcgtggataatgaagttcaccgatgcatttctctctcaagtttgcactgatttggcctaaggcaattaactacctagttttgcggtggaacatgatcatttggcatatcaagggtggttggttctttcttctactttgaccttgattcctcatttcttaaaagaatatcactgttcaccaattggggtcatttcgaggaattatgttccaacgaaaggctttacaatgatgtatttttgacaggtatgaaacggatggtggtcgagttcgtaagccattgtggtgtatgaaaggaatagaattatggtcatgtcacctacaagtttgttgttgtaacccttggtgctacgtgagtgtgtgtaggaggacttgactatggattttattgaggggttgcctaagtctgagggtgtggataccatctttgtcattgtggatcaaatgagtaagtactctcattccatgcccctcaaacacccttttactgttcatattgtcaatgaagccttcctccataatatggacaagctacaggacattctaaagcttatcacctccatttttggatcgggtagccatttttggaccgaactctttcacctccatggtatggaattaaagcacagaacaacttactaccctaagaaaattctaagttttagtgtaacacaccttttcactcttccttaggttttaccccattcaaggtaatgtatggacagggcccccctctaaagttctaacctcttcaggtaccacttctaccattgccctgtatcaactgctagaggtacacccatatcaccaaaagaccttggctgtcccaagaatgagaaacttgctgctcatttttatggcccatttcaggtgctgaagcgttgtcactgacgcttatcacttagactttcccccatccttggcggttcacc

SEQ ID NO: 92741 - DNA, 947 bp, Cannabis sativa
gccaatagaatcacattttagtatgttagttttagcaggacaatatagttaaatattgggagtatcagtattattcgaggtttaaaaaatgaccaaaatacctctaaaggaaaaataatttgtttggccttttgtctagtttttctttagtaacttatttctctaagttatgttagcaatctgtttggagtttattatagagttattattgattcatttaatttttacaaagaaaagcttaaattctctctctctctctctctctctctctagaaccactagggttgggtttttcttcagcttcattcgaggattttagcagaattttagtgtgttgattcaaggtaaccctttagcaccttcttttttggattttttatgctttaaataggttaaaatgcatgaatttgtttgtggaggttttgtggttgttcaagttacttggtttagtattctgaagttgtattgtagctatttatgttgaattgagctagatttaggggttgtttggatgtttgagcacggtttaagtttatgaattcaagcttttctctttaatggttgattttgattttggacatgttgggttgttttattgcttggattatgtttattatggtatatttaggcgatctggaagttattgtgaggtttgggtttgaattgaagtgtgtaggtggttttgggtgttttttgcactgaaccggtcgaccggttcagtgggacctgtaggaaccggaattccggttggtccccaagaacccaaccgaaccagcttttcagttagggaattggtctgccagttggaacagtttcaggaaccctagtttttccccgtttttcaatattaagagtattgcaatgttatccatcgataggaaaacttttagtttcaattttaagtccctaaaaaattgatttagcgtgtcactcatcagttttacgaa

SEQ ID NO: 92742 - DNA, 655 bp, Cannabis sativa
atttaataatttttttatcaattttgttatacattttaaattttattccattcctatttctattttcattcccatttttattcctacaatttcattcctctcaaccaaacgccacctaaatcataagcatttagtaatttatatagatttgtgtatgctttatagaatatgaaactttctttttgtttatattaaccgtatttgtttcttatatgtttatatatcaacaagtgcttgatttagggtttcccttatttataatggcaatttcagaatgataattttgtttgtttgttaataatatttgggaaagtgattcatttaacctatatttctccttgtagagtcctttgttatacatatacctgtaaatatgagcatattggagaagtattattttgattgcatttgtgtacatgtttgaagtaacgattatgattatattccgctggtagcctctaaaaattcaaatctcttctttacctccatacgagagggagcaccaacgtataagtggagttaatctattagaatttgtttggcatgtggtattatatcgttttatattgtactatattgaattatattttatgtaatattgctatgtaaaataatatgtggtattgatatttatgggtacctaaatatataatat

SEQ ID NO: 92743 - DNA, 800 bp, Cannabis sativa
  modified_base (32)..(33): a, c, t, g, unknown or other
aaaaaatggtgttaacccgaagatctcaaganngacctgacgaagagatggatagtgcctagcaagttccatcagcagcgcagccaccaccgctcaaactgttggccatggagcaactggccaaactattgccactgggtagacaactattgggtgtaccaccaatgccgccgtcgcaggaggcgacactactgatggtgccaccacaaggggtagtactggaaattttgtcccacctacggatggcacgggccaagcacaaactagctgaggccctggcgtctttaggccgcggagcgaaccccatatggatatcaaaggaattgaccccgagatggatcaactcgagatgcaataggtcgaatgcaaggccagttccagattgagcaccaagagcaaacttaagctcgagcaaccttgaccgaaagtctctccaaccaaaggagaaagttctaatcttagcttgaagatcatgcttgtgagataagaaggcaccaagaccgtcgcactcaagaggttgtcgggttgatacaaagctacttcaaccaaaacactcaagggttgggtactaacacccacaatcaacgaatacctcaaacctatcctcaggaagtccctaccctgaggaaccaacgggagagggtggtctatggacctgaagagctcccaaggaaccaagggagggctaggagtcacccctccaacagagttccctgcaacaataatcaaccactccttgtcgatgagcaagtcttagctggtcattatatggggcgtgatgactcccataatgttcgtat

SEQ ID NO: 92744 - DNA, 1014 bp, Cannabis sativa
ggaccaacggactaacaaaaatggtgaccttggggactattactgccaatttttgaggttggggactaatctgcatcaatcttaactttttaagggcaaaatgccgcaattatcccaaaatattatttataaatatgtacaattgtatctagtttggtaaaaataatttgaggtggagaagaatccaatccaagtatatataatagtagtatacactgtactcataaacaaaaaactgtttgtccacgtcagaaaatgtttctagatgacgcttatccgcaccgcgttgactatttctcgctcagtccccaaagtgggccccacccaagtccccattccaacaaaaccagccccaatcaaaattcctattctttcattcaacacaaaaaaacccatcacaaaaaaatatttttttattattactctttcaaaaaaatattttattattataaattataattaaaccaaacaaacaaacaaacaaacaacaataaataattcaaactcaaatttacaatattatttttgtttttttaattaataataataataataaaaaagaagcagttaagaatcagcgaaagacattcggtttttccggcttatcaaacggaaatcttatcacgttggttttcgctttcaaaaatctgtatcctaattctctctcactctcttttcccctccatttccttattcttctccctttctttcttcataattttctcgagaaaaaacataagaataatcaaaatccacttcctttcttgtcttttcaattcaaaatcagtttctaccgccttcgattgatgattctctttccgtctctagattgtaacaattttactcgattttgatcgcaatcatttaatctacgaagaagaaaacgaaaaaaagttttattaatgaatcgtcaagtggtacagcgatcgccgcagaagaatcgccgaactccgcttttaacaaaaagaccgccgcttcgggcgccgattactcgagagaagcggcgaatcggcg

SEQ ID NO: 92745 - DNA, 1043 bp, Cannabis sativa
cacgctaaaacacttattggggatctaaaattgaaactaaggataaccctatcgataaataggatgctaacaccctaaattacgtaaaaacgagaaaaactacggttcgggagaaaaccccaaccggcagaccggttcccaaccagaggcccagttcctgggtaccaatcggtcgaccggttctgtgctgggaaccaaaaccacgaccccttgacctcaaatccaacccaaactttgtgaaactctccagtatacctgtacatactcaaataaacccaaactagccaaaagaactcaacaaacagctcataaaacaaaatcaccattaaagctcaaagttgaagttctcaaactccaactttgcttcaacaacactatcacctccaaattaagcttgaaatataataaacaatcataatctaacttaagaatataacagtatatagtcccaacacaaacagccacctaaaacctagttatcaacactaaaacctaacttcaactcaagaaatacaaataaagaagagattaaatgaataataccttaaattaggctacacaattcttgctgaaatctcccaacagctacaataaaataaaccttaggtgatgctctaatgaattcgagagagagagagagaaggagagaggtatgtgaaaatggacaaaagtgattctagcttctccaatattgacttttgttctttgatttaatttatttcacaacccaatatcaaattttcccacacaatataatcccccacataagacaaaagaccacttagccaattacccatttacccttaaataaaagaaacaaggtttaaaccaactaagggtagtttagtcatttaccactcttgacaaatccccgatatatcaaaaacataccaaacgtgactctctaatggcccagcgtcgctttccaccgccaccaagctcgagcaccagaaaacaagaaagtcacatataacatatttaacatatattgcaattaaataaattttcaccaatatgcaatattataaataatatttaatctc

SEQ ID NO: 92746 - DNA, 531 bp, Cannabis sativa
gcatattctaatagtatcaattttttagaattacaattcaaatgcttgctctgtgttttgttcttctcttttgctatgtccttggattaaaaaaatatagaatttgagataccctgcttctttgtttgtattctagtaatttttttagttgaagagtcataattatgattaaagagtaatagttgttattggttcattgtttgtctaacagtgttattcatttcatgtcctctaatcttcttgatctcttatgcaggttaagcagcctggactggagatgcgaacagttcaaagtgaacttgacttatcatatgggcaacgttatcaagatacaaaaatcccagaagcatatgaacgtcttatactcgacacgtatgttattggcctaagctactcttgccttaggcaaatttcatgaactagtcttaatactcgactcttaactaattgacaacactgattttctttcaacagaataagaggcgatcagcagcatttcgttcgcagagacgagttgaaggtaatcacaat

SEQ ID NO: 92747 - DNA, 564 bp, Cannabis sativa
taagccatttgtacctttgacttttctttttctctctccctgacactgccattatttgatttaacatacaattactacaagtgtggcaccacttttaacgagcagaaatgacagaatactcatgttttgagtgtaaaattattattagatttcatttttttttattttaataaaaattataaaaaattacttattaattataaataccttcgtcccctaaccatacttttaaccatattgactagggtatgcataaatttccaaaatgttccactttttaattatttcaaatttgtgttcaatctttgtttggttttgtgagctcagtaaatattaaaaaaaatgtaaatattatatacctagtgatttgtaattgatttgaattgcacaattcaattttaatattaaaataaaataatgtaccaaaatatacttattactcttatattttaaatacatagtttgcaattttaaaaaagaagttacgcttatataggggtgtgcataaatcgatccaatccaatgacaaccgaccgatccaatcacaaccgaccgccaaacatt

SEQ ID NO: 92748 - DNA, 1280 bp, Cannabis sativa
ttttttttaaggaaaacgaagagagatggacatggtggtgttggtcttttctactgcttcaaatgacttcgtcaatggtctttctaatactactaagaattgaatttagagttcacagttctatgtatcttcttcgtattagttttcctgtggactcgaagcataaagaaaagattcaatcttctaaaagacataaccatgaaagtaatctaacctcatcaaataaatagaaatttgagatccaaacctgaatatttctcattttctaccatgtttactcatcagccaaacacgaacttttgactaaaaaaaataaaaaagaagagggcttccatgattactattatccttttctaatcagaaacgaaaactgaagttctctcagagggttccaaaaatcccataatggaagcggcaaagctctcaggtcagtccccaaggccaggctttgattgcgaacccatcaacccatctggggccgaattaaaaaacaaagagaaaccaagacccatacaaggaagcgaaaacaacttgataacaaagaaaccccagataagagagggttctaaagaatctgattgaggtaagagatgggtgtaaatggtggtttaagatatatgggtacacagtctacttggtacacgggcgctaggctgtttgagttagttttgtttgtttcgcgaggaaaaccgaaagtaatacagcgggtctttgagtttgacgcaaaacagagtagaatgaagttgtggatgaaatttagtatgctatcctctctctctctctctctctctctctctaaacaaacgaaaggctccatttttcagctaataataaaagaaaatacaatgatataaccaaatatccctaatatcacttctttaactattagttaatacccagtacaccatgggacacctcctcctaccttgctatcaacacaacccatctcaactgtacaagcatcttccctccatacccattacaagtactctctctagtattatatttgtgtgtgtatatattatttggggtttgttcgggctgaagttaatatttttatttgaaccaacaggaaaaagaccgaccaacaggaattcatatgtgtcaccatgtcagtgctcattttctacttcctcatatgatgtttcaaaagaaacgaagcaattttttcagtatgagggaaggagggccttaattggttctctcctagccacaggttactttcaactcctttagcttgtaaatgtacataaaattgatcttttcttccccaattatgt

SEQ ID NO: 92749 - DNA, 633 bp, Cannabis sativa
  modified_base (352)..(365): a, c, t, g, unknown or other
aagaaaatttctagcgtgaatgatatagttacgtcaataaaattgtatgttaaacaatagaagaatgttcaaacaaaggatgattttacatcattactgagtggtatgacatcaaatggtgccaaggtttgggtaaagcctcatgagaatcaaataaaaataaatgtttgatgttgcattgttcacttatcagtttggatataaattggtagctcgtgatcatcttcaagctcgtatgaactccccttttgatttagttattaatgactagacattatattaaagtttaacatagtattatataaaaatatgatacataatccaagacagtataatacaatacaatacaatnnnnnnnnnnnnnncgttccaaacgagccctaattgtataagtgtagtctatttgtgtatcgttttactggactaaaaatgaacttcttgttaatttccaaaacgattgttgttcctactatattcatgtctaagttgatcgcgatttgccttcttaaagttctatttccattcaaagaaaaataataagagttaaaaacagcctaaattgattaaaaaaaagtaattaacaatagaaagaaaaaaacaattggttacgagacattgaggaaaattaagaaa

SEQ ID NO: 92750 - DNA, 542 bp, Cannabis sativa
ttatacaatttttttattaattttaaaaaataccatattatttctaacataagggccaaaaaaaaaaaatttgtctgtggcccactttgtttcagggtcggccctgcctaactattattcaccctatttagattaaataatgaccccatctttcttgattgagatatttgccattgttaccaaccacaccctagttgacaatataactttatgttgccaaagtattttttgtttccaagccatctcatttcgagccttccaaaccgcctaaaccaactcgaaagtactccaaaaagtacttataatcctcacactaatactcaacctagctaccccaacaaaggcaaaatgaaatggtcactaaacaataaagattagtagtttcagcttttcataatagacaggacacaaaattattaattgggacatttgtaattcacttttaaattagtgtaattaattaactaaaaataatcatcaaattttattattcaaatgtccttattaaataagtgtggatttttctttctattttttttttt

SEQ ID NO: 92751 - DNA, 1205 bp, Cannabis sativa
  modified_base (460)..(460): a, c, t, g, unknown or other
tagaaacccaaaccgtaaatttgagaaaaaaaattcaaaaatagtatatggagtaatttcccaaaaaaaaattagtgccctatcataatatatacataaatttatatatatgcactctcgaatgagtagtatttaaaattgttatttttaatttttttatctaattagaaaattttctcatttcgacattatataaatttaagttgttcaatcagctgaaaagataattttaatgaaaaaatttgccaaaaataaaaaaaaaataagaaaaagttgagtttcacttatacattttttttatataaacatattttttatagtgtaaaaataaatattttttttgatatttttttgatagttttttaattaaatagtcaaattaaccatcgaaatttaaatttatttttattattcgctattggataaaaatctaatgttttaatatttttaaaattaatanttatagttaaatttatttaataagtatcaatgagaagtgttctatatatttatatatataaattatttttaaataggtattactcactaattagaattttttaaaaaataactataattaaataagaatttgaatgttattaattttaaaaagtataatctaaaggtaatggtatagtagcacctaacaaaagtttcttaccggtggggaactttttttttttaccattgattttagaacttgtggttattatgatgtaaggtatatactcttactctaggactgcttgaatacaattaaaattttatacatattataacaatatttaatgatatatttattttttgaaaaataaaaaaaaattaataattaaagaatttattaattttatttttaattattattattattttctaatgttaaattaaattatttttatataaatatttatttttaaaagttcctctgatgtaggatcacttaaatgattttagatgctctttaattggtaccgtaccaacttacttctcctaaaatactcatttttttggcaggagaaataatatctaaccgacttaattaattttttttttgataagtgtcgtctcaaaagagcagccaaacaactacaagataaaaatcataacactgaacaaaacagtcaataacaccagaactacgcacaacctaaaagcaaaacaaagaaaagactacgtgtaaacataataataaaaaaaaaaaaaaa

SEQ ID NO: 92752 - DNA, 866 bp, Cannabis sativa
agttaaaaaaaaatagtatatgggttaattccccatatttatattgagttaataaaaatatgctataacccaaccaaactgatcaacgtacaccgttaatgcttactttcatgcttgcattaataaaaaaaaagaatagaatagaactgtgtcttacattgatgatcaggagcatcttgtagaggagtatgataaagttgtgaagcatttcattgaccattttagaagctttatgggaagtgctagtttcaccacgaagccaattaacatccaatgcattaaattggggccttgccttgaccttgataaacagctgaaacttattagaaaattcaaagcaaaggatgtcaagaatgctctttttagcatttcgagtaccaaaagtcttggtctagatagttatagttcgaagttcttcaaaactatgtggaaggacattggcaaagaagtctcagaagcagttttggacttctttgaaacaagtttgatacctaataatctaaatgaaagtactctagcattggtgcctaagattgattctccttctcagactgttgattttagacccataacatgttgtaacaccctgtacaaatacatttcaaagatgatttatggtaggcttgctgaggttttgcccttctaattaatcaaaattagggagcctttgtgcataataggtcccttgctcacaatattttgatttttcaagacatgattaagaactaaaatagaaaggatacctcttagagatgtgctttaaagattgacttgagtaaagcttatgacacagttgattaagaggttcttgaaaggcttattgcaagtcttcagttcccctctcggtttatcaagtggattatgat

SEQ ID NO: 92753 - DNA, 872 bp, Cannabis sativa
cattagttacaggtttaaaacctttagcatctgctacaatttctttcttcccctctactttcttctctttcaccacccattgctgttgtgcctgcactcccaattttttcctgcaagcatctgcactatgtcccaagcctttgcagtgtttacacaaaactggtttccactcgtacttaactcccacaaaggcagtaagtccatgctcatcttcaaatttaatcttctccacaagcttttgattcatagaaacttcaactaacactcttgggaaggttaatttctgcctttgcttagttacatcatccaccaaaattggctccccaatctctcctaccagtttgaatagagtattttgcccccaatacttcaattcaagattttcgagttggatccagatggggactttgcgaatatcttcctttctgaaattagaatcaggatgccaagccttcataatcactggcctcttattgaaaaagtataacccccatttagaacagagcccttgtcttcaatagttgcaaaccttatcaagaaaatgccatatgaaatgagcccaaccttgtctactttttctttccagattcgcctagcaaacccttccaacacctcttgtggaggattagctcctaaaacataacagacaattgcagagttccaaaacgaaacctcctcttctatatcatccattgttatttttacattaggttttcccacaggttgaaaggaagaatctaagctccttacaacagaacctgatctaagaacaggaggaacagagttcttaccgtgctcaagatcactgttacattgcttgttagcttccatgaagtgtgcaaagtccaatcgaacatcttcctgcctctgta

SEQ ID NO: 92754 - DNA, 644 bp, Cannabis sativa
cataatcatgcgagcagccctatgacgatccatcagggaagcaacgtggttctcattatctcttcattgactcgcatttgtttgtcattcatttccacgccaattgcacgacttagtcgaacagaagacatttctattttttctccaatgaattgtgaagcatccttaatagcctcagcaatatctcctaaacttgaacttttttgctttttctttgacgagccatctgattggattggaggagctcttggtccattttgtgcttatgaaaatgacatagactctccattttcagcatacgtatccccatagtatgaaaaaaggtgaagttatcatcatcaagattaacatgttgatcttctttctcattttcctctacatcagttggggtttttgcatgttttccagttgcacgatctttcccaaaaattgtgcacaaatcatcataataaggaaatatttgattcttgaatggtgctgcctttctatgactctgaaaaaaaaaataaacatgttattgtcatagtaagtgttgtacatatatgcttcgaaaaaagaaatagctaacatataattgttttaataaatatatctatatatatgtgtgattacctacctgtaatatgcctcccacacaggttttt

SEQ ID NO: 92755 - DNA, 585 bp, Cannabis sativa
  modified_base (217)..(219): a, c, t, g, unknown or other
  modified_base (287)..(290): a, c, t, g, unknown or other
ggagaatttttaacggcctaaaaagttcagggggcataatttaatacatgtcaaagttcggtaaaaaaaattatactaattagccatttttaaaacatattactaaaaaattttatttttttattttacagcatatttttaaattacaccatacattatttttttaaaatacattaccaaaacttctcattttttataattttaatatattttattnnntttaaatatataatattaatatatgcatatgtctctatataaaataattatttaaatttaaaatattnnnntttttttttgaaaaatgcatttataaataaaattgaagttagacctcatggtcattataaaagatattaataggtaagttagtatgtatctctaccatgcccgtaacattgttggcaaacgcccatttggccacattatgggccgcgtagttacagtttctagctatacaagaaaaattacaattagtcataagagtacagaggagcttgcaatgacgcacatagttctcaatcccccaaatagagttatccccttttaggttcttgataacaatctctgaatcactctccacca

SEQ ID NO: 92756 - DNA, 977 bp, Cannabis sativa
ttgtctggactcatcatctttaaggcagcagtaatctcggctggtgtgaaaggctgagtcaaggtgtcattcatagcagcagtaacagttgttgggatagtgcttattgtgtgattaagagcagaggaatcaagaggctgagcagtgaagagttcctggaaataatctgaaattattgttgtcattccttgcttcgaataatctattacaccagcagcatttttcaacgatttgatagcattattgttgcgtctcgaagtagcatgagcatgaaaaaactttgtattttggtctccattttgcatccaatccactctagatcgttgttgccaataagtctcctattgtgccaataaatcatcaagaatagtttctgaatttttaagctcctccattgattcggttgttcggttggtactgtgatttaaggcagaaattttttgctgcattgtgttaatttcttgcttcatgttcccatacttcctggtgtgcgatgtttgaagtgatgaagagcatgtttccaaattatttaagaaaagatcaacagcagcgactgtagaagatgtacaccagttttgcttgataatggcagcagcttcagcatctttaagccaaagtttctcaaacctgaagcgagacttcctcctcacttgttgaggaagctgattaagtgtttgtacagtgactgcaatagcacgatgatctgatctgaaaaagtccaagtgagttgtaaccaaaggttcaaatgttgttgtccatttgtcattcacaaagcaccagtcgagtctttctttgatggtgtcggctttatgtggacttttaaaccaagtgaaaggatcaccaataacaggtaactcagagaaagaacaaaaatctaaaacttgtctaaagtcgtccatttgcacttcatttcttaacgcacctccttgcttattcgcatttgaaagtatctcattaaaatctccaatcacaagcca

SEQ ID NO: 92757 - DNA, 702 bp, Cannabis sativa
caaccttagtctcatatgtggtttccttggaaactttgtatgaaacttaatggtgagtctattatagttgaatgttcaacttaaggctcaacatggcttggaacctataaagaactctgccttagccgtagctcggtacgtggcccctataggagctctgtctggtttttttctgaccatatggttcttgttgggccttgctttggcctataggccctctgttttttaacactactattatttaacctgaaaaccatctatgacagacatatgatcgtcctagctatcttcttatggccttggcatgtaagggtccggatttactatgtcaagccaaagtatgcttgcacgacttagagttcggtttagtagcttattcgaagcgttaaaatttctctgaataagttttttgtgctagctcgatgcattgtacggtatgggtgcctcccaagggaccatgtaggcaagtctcttggtcacttgctattcaccaagtttcacagactttgcctaggttctttcttggggtgttatccatagtatgcatatggaactgaaagagtcactttaagaagttaatcttgtgagtaagtggtttagacatagttggtcttatgtgtaacaaaagcttacagcttagtgcccgcttttgaaaacacgtagtggctacccctgcgcggcttaccgcgcaacgaccatcac

SEQ ID NO: 92758 - DNA, 2645 bp, Cannabis sativa
  modified_base (1035)..(1054): a, c, t, g, unknown or other
ctgaaacagacgcaaaacgacaagctaaaaatttgggtttccctgctgcaaaatccgggtaaccggttttacccagaaaacctaaaaaccaaccaagcttaaccaaatcgtttccaaactcaaccaaactttccagacctacatattataccccaataaaccaatttcaagcaacaaaacatcaatcaaagctcagaattgaatttcaccattaaagcttcaagtttgagtttaaaaactcaaaacttgaaagcaaccactaacagccctaaattcatgctcaaaacaacatttctaaacatatattaacctctgaaaactataacaaaccctaacagtagctacatcaacaaaaccatatatattaacctctgaaaactataacaaaccctaacattagctacatcaacaaaaccataaaatcatgcaaaaacctctaacttaaaactcaagaaaacatgaggagagcagctaaaaccgttaccttgattaatatcacctaaaaacaagctgaatctccctgaaataattgaagaacaaacaaaccctagctgctctagggtgggtcgaaaaagagagagagagagagagagttgagagaaattctttcttttttcaatttttctgttttgaagataaatgagataaaacttgatttattaactatttcattcaattaatctttaaaaattatattattacattgacataaagtccactaaaggaccaaaaatacaaatggaaaaaaagaccattttgccctttccacactaaaagtcataaatagtacttaggggtattttgggaaattctaacatcctgactattctcgacatttgcaatgtccaaactattgtcccgctataccaaaaatactaagatgtgattctattagccaaacagcaggttccaatgtcgccgggcaaaaacattcaaaattatgaaatttgtataagtgatatataaaatgcattctgaattcaaataaatcatcataaataaattaattcaatattaataaataattttcataannnnnnnnnnnnnnnnnnnnaatttctaaattaaagctaagcgatctttacaatggtgttgtagtatttcacaaccccatttgtgtgctgagtaagggaccctagtggggtaagagggtatgccttcacccacctgtgggcctataaatacctccatttttatgaacaaagagagaacaatttttacttacagaaactctgtcgaaattcctagagagctttctactttgaaagaaacaaaaggaatacagagattgtcattgtaaacacttgtaatatactcaaacattactaaagaaggctaatactgctaactcgtagactaaggatcattaacgcctgaaccacgtaaaaaatatgtttatcttctatttagtattttgcactttcttacgctcttattaatccatttctaaaaacctcggtaaataatttatctaagaccaactatgttatattgagttaaaaagatgtaacggtaagtttatgatatcttatccaacttcaatattggtccagtctgatgtatactctatacattccatactagtatactttaccaatacctagaaaagatatactacttatttaagtataaataaactttatcgctgattatcatgtcagtgtaaatccagtgtactgataaatcgcgagaattaactttgaagcatataatcacaactactttctaccgtgatgacatcactgtaaatgtgaataactatatgttctagatttatcagaaattatatgtgaaactataatcatgaaaataacatgtaaagttaaatgacttctaatcttctattgatagaaaataagattatattaaaattgattttagttagggtataaaatcccaatagagatatgggtttagacgaggatgtagaaatttgtaggcactataattttggatttcgaggggttgtgatatggctttacttggggatgcacaaattgctacagtgtaatagtggtatccgatgtcccttgtggtcttcaatggtctcataaggaagtttatagaagaaaaggaaagaaagaggagtgttaatacatgttttgatggggatgagagattaaaaagcaccgtaataatgtggttttcggtagtctctattggtattcaatgtctctagtggtactctgtctctatctatgatagtctgaaatggaaagtttagaaaagaaaaaaaaaaaacgaataggaagttttgccgtaaaaatgattagaaaagaataaaatttaatataattttataaaaataagtataaatagaaaaggaaaataaaaatcgtacaactagaaaaatgatataaaaagtgtggtgtatggggtgatttcgcttattactctaaggtggtgtttggaatgggttaatgctaacaaaagaatggtaatgtgaaacattatcttgtttgttttgagtctttagccttaaaatgttattcccttagtattataactacccttgaggagggtaatgttgatactttaaaaaagtgtaggatggaatcattaccttctattatattaattttaatagaatttttgaattaataaataaatttaaatactaataatattatcatttattataaata

SEQ ID NO: 92759 - DNA, 671 bp, Cannabis sativa
aataaacattccttgttatatatctttcttttattttttcaaatcaaatttaacaatcaatagcagtcaatcctcagtatataatccaattagtaattatcaaaattaatttcaatgtattatatagtaattcaatacattgaaacttttttttttgcaatttgattgggagttccgatcaataatttttcaagtcattctagtatgaaataattttaagttatatagtatagatcttaccccgttcatttcaagttttgtgcttctgatatttcatacttatttttaatataattttagatttaataaggagctccgctcaataatttttcagctctttattgtatgatttgtaatattgaaattacaattttaggttatgtagtatagatcttacccaatttattttgagatttgtgtttcggatgtatcatacctgtttttaagtatattttttctaaaggattttgctgattgatggatttacgttttttgatgattttttttttcaacctggctaatccaataggaaagtttttttaggatcatgcattgtatcaaaaagtttggtccaagatcaatggcagagtaacgaaggtgttattgatgatgacactgcatattttataattaaaatatgtattaccgtataaaagtttaaatctctgtgt

SEQ ID NO: 92760 - DNA, 711 bp, Cannabis sativa
aaaataaacttaaaaatacaataattacaacaagatatgaactagatgtgcaatgatcgcatgattagattatggattagtaaaggcaattagcattacttaatgatatttatgatcatacatggtttaatatttattgtgggtctcatttttagaaattggcattagagttataatttctcaattttgaagattttattaaactctaagtgtattattatgtcgtatgtaaattttacaatttttataatttttgctcggtgatggtggaaaatgcgacagatgaccgatttagtcacatgtgttagcttagaaactttttatttagcaaggtatccataaattgatatttgaattatatcgggattatgcagaattatgattttgaaccattttatctctaagcccatttattagttaaacttaaagaaagggggtaattttagtattttgccttggaatttattgaattattccatctttttatagctgatcatttagaattttgattaaccaagaattattaataaaataggaatttagaaagaaaaagtcaaaactgcacctcttgacccttctcccaaccaggagaagtcagggtgttcttcatcaattctgaagaattctagctgaattcaagtggtgaagattcaaaggtaagcactaaccctagttcccctttgtttctagtagtggaagttaggttcaagt

SEQ ID NO: 92761 - DNA, 1362 bp, Cannabis sativa
gtttaagaactcaagctttgctctataatagtgtttttagtttctgagttgattgttgagttttattgcttggattgggtttattgtggtgtaaataagttttctagaagttcttgtgcagtttggggttgaattgaggtatttttgatgtttcctgcactgaaccgatcgaccagttcagtgggacttataggaaccgaaattttggttggtccctaggaaaccccacagaaccggtcttccggttggggcaattttgggaaccctagtttttcccttttttgcaatatttaaggtattgtcatgttatccatcgatagggaaacttctagtttttattttaagtccccgaaaagtgatttagcatatcactcattagattaacgaatattgtgatttaggggcatgtaaagcgtcgagctactgttccactcaggttgactggcacacccgaattcgaaaacaaagtaagattagcataaagtatgtctatgcatgtgtatgaatgcatgttaattatattgtttacactaccaacactggaatagttataatactgagtgtgttggtacaatatatgatgttaagggtatgttataatgttaccaacacgagtacaagtgggtacgtagtgaatgtggtacaacactcagtagcacccgaaagtacaatttgaccctaccaacactagtacggaggtggtacttcagtgcgcctgaggtacataggtacactttcgttaagaacgttcttgactatttggtgagtcttataattaggcacctgaggacctaagtacaagttggtattgcattgtatatatattttatgcatatcttacagagtctgttgactcatcagtttgctaccttgtgtaggtaaaagaaaagccaaagcagaggaattgtgagtgtgaggcatggcaatgattgtgcatattgcaatagtacaacctggagagtttcaattttattgtatttgggagggatagcttttattgtcatcatgtgataaaatattaaaaaaattattaattaagtggttttcaagtttgggtgttacagaacattagtgaaccgcactagcacttgttgattaaaaattttataactttaatatgttgctaactattttatacaaggttaataattttaattctacgtacaatacaagtcacaacctcatatataaataaataatttttcgatatttatataaagattattcaagataaaatattaatagtttaacatttaagcatatatcaaaatgttgaaatactatttataatcgataatatctttacaagcttttaagaacataaactctaacacaaattccataacaaacacaccacaatct

SEQ ID NO: 92762 - DNA, 761 bp, Cannabis sativa
ttgctataagtcagagaaaaaactattgtctgtgcttgaatttttagttttagaccctgccaaaaaataacaaacacatttcacacaacacaacacatgaataacactctaaatcataaatatataacaattatatctgaaaatcgaatgctacttatatataaatttttatattgctatatattaatagctcaaggtaattataaaagatgattttctagaatgaacaacttgttttgtaaattcatcatacataacaattttcatgttaagtccccatttgggatcgtttgaacctgtttttgaaaccataaattattaagaattgtttaaaaattggcaaaatttctactataactacaatatatattgtaaacacatgaaaattatttttttggcctctctatataatatctttggaagaactaatttaattaagcctacaactcatgagatcaacataaatctattatttcaaaatctgatctcaagcatggatcaaaattcaaacaataaaaaaatgactaataactaaatcattaaaagtgttgcaagaagaaatagcataaacaaataatacctttggttgactttggcggattgacatctacatccatttcactgtcatcgctgtcttctgcggcggcggcttgactccctgtattattttcagaaccttgtaatagatcttccaaatcccatatctgtttaaaaatgtgtacatgcagagattaatggctaaaaatattgtcataattcaa

SEQ ID NO: 92763 - DNA, 835 bp, Cannabis sativa
attattattattattttcatcattattttataatgtcaagtattcatacctttcacttatctatgtaaatatctcaacaatatattagtttttttttttttgttatcatttttcactctattttttatgtacatgtataaatattacatactcttgatgttatatataaaatagagactaaataaaggtaaggtgtgatattctaaatttatttcattctaaattatctcatttctctttttttctaacttctatagttttaagtatctaagttattttaattatcaatattaatagaaaaaaaaaaaaaaaactgttattgataactacatggcctttgaaattccaaggctaccattttattgttattagtggaaaaaaaaaatgtaagtgataacttttattattagtgaaaaaaaataattaaccttaatcatatattatagagatcaatagactttttatttatattttttttttgttggagaatttttttaatttaattatatataatgcatattaccttactctatgaacttatatctatatataaagaaatattttgtggtttatcatcttcaagttcctcacttttatttttaattgtttctctatataaatggctctatgatattttatatttatagctaatttttttttctttatatgttatatggttttatatttttttgacagaaagattctaaaagaagtggtgttgtggactcactcaataaacacgacatcttacaaagattttatacttaaagaaaattagaaatgatttttagaaaaagtttgtttgaatttgaacataatagagtgagttcattat

SEQ ID NO: 92764 - DNA, 1150 bp, Cannabis sativa
tcttccaactgtaccagagactaagtctgctgatagatgcacctcccaaatggatgtgcttatgatgactcaaaatccaggaggaaaagagcgcagcaaaaaagagtttttagccttggcaactggcgcaggattcagtggcataagatttgactgttttgtttgcaactttgtgatcatggagttctataagtagattgttaaagctgaacaaagaataagtgagctcttgagaaacaatggtgaactagaaagaacacaatgatttgaatgaattgtaataagctctacattatcagtagtgactttatttatttagactgagatgaaagaagttagacaaaatagttacaagaattgtaattcagctgtaatgacaacttctcaactagttgggaaagcctcttgtgtatcattaacattccccctaaaaataattggaaagtagagagttgcattgagagatagcaagaagcttggtaagtaagtctgctatttggagattggatggcacataacggatgtcccaagagttggcaaggacttaatcatgcacaaaatcaagatcgatctttatgtgcttcatccgggcataaaaacaggactcagagtaagaaagttggctccttggttgtctttgacaactaattgttgatgattttcacaatgagcatgctattaaaaacaataatcaatactctttcaaaaaaaaaaaaacaataatcaatataaagacatgctcatgctcatgagtcacttagaatcatcaactagttgtccaagatcacaagaacataagatggtccaataaaatcgaccattccattgtggtcctaattacacaatatatactataaatgacactgcgtgagtaatgtttaattatgtcagtccttataaaatattcttaaactaattgcatttgtaaccaaatgatttctgaatgactcaaggccaaaaaacggtattcaaactctgtacttaatctttctacatcatgtcgttttcttgaagaccagccaagaaaataagtagtagcctactacttgtttgagattgaacgacgattattgtgacagtcagtagtcccatgctccgtaaggggaaacaccgggtaagctgtgcaatcccacatcgcctggggaaggtc

SEQ ID NO: 92765 - DNA, 695 bp, Cannabis sativa
tgcattatcaagatacataatgctatcagctatctctccagaaatcgcatgaagtatccacgaaattacaatactgttacatctgcaccaagcatcaaaatcttcatgttcctcatctggctgtggaagcttgccattgacgaacttcattttgtttctagcaacaagagcaatcatcatagaccttctccaagtactgtaattttcgctccttgtcaagatctttggcagaagaactgcagctggattatcaccattcgaaaggaagaaaggattcgatgtgtcattggcagtgctggatcttgagttctctccaagaacagagtatctgttcgaatcgtttgatgcattagcagcatgacgattagttcgagtttgagctcctccaccacgtgccattgaagaagaaacaagaaatcaatgaacaggaaagaagatgaagatgaagcccaatcattttgtttggttgcttgctcttttcacgaatccataacagaaagaagaaagagaaaacggaggagaagaactgaatctattattcaatgctcaaagaaaaatactgatacatttatgctacttatagttgctgatgttggttatagctgtcataaccaactcccaatcctacaactaactaataactaacctaaacagattctaacaacttaacagctctatctcagattttacaggat

SEQ ID NO: 92766 - DNA, 871 bp, Cannabis sativa
tgtagagattcagagtatgaatttcagaaaagaggaaaatttagagagaattttagcaaaaatcaaagctcaaactttattgaatgaacacgttatggtatttcaaccaatacacataacaaaaaattaagaaagcaaacagaattctattacaatgtaaacaaaaatagttaaagaaagttgttttaacttatttcaataactctatttgtaatgacaaatatttttatgttatgtcaattaatgtccaggtaaagctagttgttaaaatctgagttcaggcttgtcattttagacatatgactaacagagaaaaagaagttatgaacaagttaaacactatgtaaggggtcctccttgcaacttgtgagcagtttgtttgtagtttggtggttgtcttttaataaaatttgtttttcctttgcttcaaaaaaaaaatgagaattaattaactatcttacgatatctcattagaatgaaattattaacataaataatccaagtcacactaaactaaaccgaaaaggctagcaattatcaagaggtcttgatcatactaatagtaccaaataaatatgcttagtgattttaattggaaactttgataagttcccaaattatagaacatgactaatgaacttttactttaaatagtaatggatctaattagcagtagaaacattgaaaaaaaaaattatattatttctgtgatacacagaccagtgatcacagccttgattttgtacagaacaacatttcaatggaaaaaagatagcagtatttaagggatcaactttttctaatattgagaagcataaaattgacatttcttgggtgcttcagtttcgtagcacatcaataaattcttact

SEQ ID NO: 92767 - DNA, 506 bp, Cannabis sativa
aaatccttcaccttactctttgtccaaagaatcgggttacccaaaaatttatcctcagtccccaacttgcgaaacccaagccatccacaatctccaattgagtatcacgggccgtgataccaaaacaatataggcagatttctgcacatttagccgttgccccgtccacgacccatactcattgatacactcgagaacggctcccacatcctcaatattagccatacaaaaaatgatagtatcgtcagcatacataaggtgagtgattgaagggctccgactgctcaccttaaagccagtaatcagaccctcgacttccttcacaaggagcatccgagagaacacctcgctgcataaaatgaagaagtaaggcgagatggggtctccttgtcgggggccacagttcgacttaaattgtttcaaagggcccccatttagcaggatcgaaagagagaccgatctaacacaatgcataaccattccaatgaatctggcatcgaagccat

SEQ ID NO: 92768 - DNA, 1249 bp, Cannabis sativa
agtaggatcataatcccacttattacatgattaactcataatataaatataaaccctaattatttaccattagacttattgggatattacattaagtttcttgaattcttattctatttttcatcttaaaaactattggtttgccaaatagaatcataaatttagtctagtggtattcaatccaattccctctggttcgacctcacctgtgtgagattactacttaattacgtgcacttgcgtactgttctatgattttcgtaacaatcgttgatcattctccatacaggtcgaccaacatacctaaactgagacttaaggtaagaaaagtataatgtaccacatgacatgtcatgttttgtaattgttgattgtctaattaggcaatgacaatgttctgacaatgttctgggactggaaattccaattctgggtgaaatcttttcttttgattcttgatcaggcctggccggcatacacaatctactttcattcgttaccctgaccaactcttattctcttgtttcccaccttttgtagatgaaccatgctgatttctagggaggtaagcatcacattgatcaggacttacttcaaattctgtacgaagatcacccacaccttcgtgctgacccatcctcttctagtgacaatcttttgaattctagttttgaatattgggaggtgagcagcgaacacacaccttccctagagcccaaggtgcaacaccatttgtatcctgaccaaatacatggcgaaggatacacccgtttcatctaggaactaaagaaaggttggagatgttatagtcttgcaaactggacatgcagagtccatctgagcatggtcaagactctgcctaagggtcgtccaatcccaatagctaaaggaaactctattgatgagtttgttgtgaccgctgcgaagcacacctccaataaaattctatcgagtcgtaaaatgatggcacgaaccaagcagattgtcagaaaaccttcatccgccaacccttatattgctcgtctggctaccctggtcagggcagaataggcctatcctacggtcgaggaaaaggagattactggatatgttgaagttcaggaaatggaggaccagggcgaggtccatcctacaactccttctgaggctgagggcgaagaggaagagggggtagctcgggtgcttccctttggtggcttcaatgagaagggggaacctgtcccataagcagaataggtccaaagggagg

SEQ ID NO: 92769 - DNA, 843 bp, Cannabis sativa
aaaaaggctcactgctgcaactaatagttggtttggttacttccaatggccgaaggacatctcggagctgcaaaaagggaccccaaaagctgctttaactttgagaaatcaacttcaaaatgttgttttggcagcagtgttatactttgtgtggtggaataaaaatctttgtgtgtttgaatccaaatgtatgactgtgggtagtgttagcttgatgattaaacagatgattaaatatagaattttatgctttatagatagaagtgacaacaaggcagggcattatgtaagggccacggcaaagagttggtgaccctgctgtgttgtgtttttgtgcagccggtttgactgggctgttttgtattggtttggtttgtgtaataaaattcagtttgttcaaaaaaaaaaattacaaacatttcctccatagtggatttaatgtgtctatagtgacttaggtccagactcgcgacgtccgaacccattcctttttccgaccacatctttcagaatgttgttttggcagcagtgttatactttgtgtggtggaatagaaatctttgtgtgtttgaatccaaatgtatgactgtgggtagtgttagcttgatgattaaacagatgattaaatatagaattttatgctttatagatagaagtgacaacaaggcagggcattatgtaagggccacgacagagagttggtgaccctactgtgttgtgtttctgtgcagccggtttggctgggctgttttgtactggtttggtttgtgtaataaaattcagtttgttaaaaaaaaaatttacaaacatttcctccatagtggatttaatgtgtctatagtg

SEQ ID NO: 92770 - DNA, 885 bp, Cannabis sativa
attctatcaaaatggtagaaagaacatttcattggaatgtaattctaatactttaaaatacaatcaaacaaaggaatagaatgaaaaatatatcatttccattctattttatttcattaccttcaaccaaacccacctaagttcttaaataattttctagcaacattgtttgcaacattgtttgttgtttttatggattaatgctaataaaagattcttggaaattagattgggaagcctcttgggttgagaggatttgggcaaacatagctttcattcaagagatcatttaagaaatattcaaaaataacaattttttttttacgtaattttaattttttatattttttcgattttttttttattacagatcattatctttaagttactttttaaaaaaattttgtttacacgttattttcacgttgcggtgacatgaaaataatgttgaaaaaatacaaatctatagacatataagtaaaaaataaaattcgtaaaaatgtgaaaaaaaaaattaattttaaggtgtattttgtaaatttctagggattattacatgaactattgaaatttgaggcatgatgagtgctaccgtcaaccttctataacaatctcttagtcaatttccgtgcctgaaaatacatgttggaaattttttttccaaaatattttttatgacggtgttcgtcatagttacaatatttttgtaaatttttaaatttttttgaataatttattataccaaaattaggtttaaagatttttaaactcgaatagtaaactagaatattagtaacactgttttttttttttttgaatgaaaataaactttattagacagaaatatctgctaaaacaatagattgaagagcaaggggaacatca

SEQ ID NO: 92771 - DNA, 657 bp, Cannabis sativa
agagccatttattccgtgggtgtaagggcccaatggaggcttgaagcgggtacgttacacacaatatgaaaaataagacagcagtattgggttatttgaagggtagggtcaaaaagcatcttatgggatgggaaggaaagcttttatcacaagccagaaagaaatcctcgtcaaaatagtagctcaatctctcccaagttatgctatgaatgttttcttgttgtccattgagattacacgggatatagagaaactaatgacaaagttttggtggaaatcttcattgaaacagagcaaaggaatccattggatgtcccgggataggttgtgcaagcataaggacctaggtggtatggggttttgtagtttaagggattttaatctcgcaatgcttgggaaacaaggttggcgtctcatccatcatccgaatatcttggcttccaaggtcttcaaagcgaggtacttccctcaagataattttctatcgacccagttaggaaataatcccagtttgtttggagaagtattgtggaggctcaatcggttgttcgtagtggttcaagatgggctgtaatatcctgataagcctaatggtaaataatttgagtttatatttatactttgggttaatcgggtaattagagggattatgatctt

SEQ ID NO: 92772 - DNA, 540 bp, Cannabis sativa
gagaagggagagatgtccaagaagagctatgaatgatcactggtggtggagtatgataattattaagaaagccgttttggaagggaaactccaactcgttaaatacaacattccaagataggtaaattcttcctgtgggacttagacatcgatagcctttatgagcattgctgatagggacgaatgcaaggaaaacatgccacaccaaaggtcttaaacaatgcataatcaggtttggtgctgtaaagcacttcatgtggggatttataactcaaaactggtgtagggagactattaattaattggacagcaacatgaaaagcatcacaccagtacttaagtggcatgtgagcttgagtaaggagagtcaatcccatctcgacaatatgtcgatgtttacgctcggctcggccattttgggttgaggtgtgtggacagggatgttggaattctattccatgtgcacgaactaaatcagaaaacatctgatattcacctccagaatcagttctgagcctttttattttggtgttgaatttg

SEQ ID NO: 92773 - DNA, 622 bp, Cannabis sativa
caactgtaaatatactctgtcaattctatattaatgagttattctatttttaaatataattactgttacattcatatatcgtattcttccccaaattttgaacacgtgttctcctttgaaatgatagctgaattttgggtataacacatgtaattagtaatatcacaatttttgataaaggagaaatgaaacaactaaatctactaatactaatttaagattgcataattttttttgctccactaatattaatagaaaatgtataaatgtatttttactttctaattaaacgagacatatacttcccaacaacttaacttttcctatttaattcaaatgagaagtatgagtacaatataattatacattcatattttatattaaaaaatattataattaatgagaaaatattatatatatgttagatttgaataagtcaataaattatttatacaatttcttgaggtgagagagagggacacatcttatatattgcatgtactataaagtaattatatataaaatgagttttgaagaattctaggggagccatggcccctgtgagctaacacaataccttcatcccaggtggctctgtccatgattgataatggagcctcgt

SEQ ID NO: 92774 - DNA, 649 bp, Cannabis sativa
gaatagggctttcggacttagagcaatttggaggctaaatgacttaggtttttaggctagtgttaaggcctttatataggaggcataaaccctatattatagtttaaatccctatatatttgcataggttgttagataattacaaaagactaaagtgcccttgaatctaaatattattcagccattgtgttgggcttttagggccgaatttgcagcccatgacttgctgtccacattttgggttgtatatagagtcctgccaagttaatcctggccgcccaaggcctgcgggatctgacaggtcaaggcctgcaagatttggcaagtcaaggcatgtagaacctggcaagtcactatagctctaccaagaggaggccaacctttggttgtggaggccagctttttgcaagttgaggacaactttgtacactatttcctggtagaggttaggttcccttggtcgaacggaagctcccttggtccagaagtcacttcttggccggccagcttgtgcacagatcttggccagcctataggattactctggttgaccgataggcttctcttcactagccagggatgttggtacaacttcttgaggacttgcttcactccattcagttgttgcttggcagttttgctatatctt

SEQ ID NO: 92775 - DNA, 879 bp, Cannabis sativa
atatattatattatttattatatatataatactttttgacccggtcaaaccgaggtcttacaaccggttaggtccaagtcagggttcaagtctgggtccgagctggattcgagtcagtcctgtcttcagtttcgggtcaaagtcccgggtttgagtccctagatctgggtcagagattggagttgacctcaaattctttataaatattataatacaagctaatatggatcatttattatgtattaaataatacaacttacattaatgtattaaaaaatttaatacaatacattgctttatccaaatatagtgttatttattatttaatacaatacaacatttatacagtctaccaaacgagccctaataaaaaaaattaaaggagaatttacaaaaatacccttttatgttttatttataattttacggcctaacatttttaattacacatatatgtttgtaaacgagaaatcatctataaaaataaattataaaatagcttaaaacaaccaaaaaaataatttcacgagatataaaacaaccaaaaaataatttcttattttactaaagatgtacttttgtaaataaaaaatttcaaagagtaaaaatatatttttttccatattaaaatatttttgtaatttttttcaaattttttatctattatatacttttcgaaattaaaactcatatattttgacactttttttaatctaattgttctacaatattatataaaaaataaaaataaaaaattaatattactaatcatattttttgaatgcaaaatggaattttattaatttactaaatagccaaaagacaagactaaaattcagtaggaacatctctcccactgaaaactcgatctggaaaaga

SEQ ID NO: 92776 - DNA, 531 bp, Cannabis sativa
  modified_base (26)..(28): a, c, t, g, unknown or other
tacccggtgtttccccttacggatcnnnggactactgactgtcacataagcccaaataaaagtctaacattcacttgaaccgcgttatttgaataaaaattgagagagttatgaccatttttttgagcggtgtattgtaaaaaaataactgcgagatcaaccgaacttttgggctttaggcatattttgagatgcttgaatgatgtgatagctatctttagtttgttctttgacatttggtaagttcttctagcaattttactttagtaaacggcttatcggttaaaactttaaacgaatgggcctaaatgtatggccttatctgagaggtcaatactaagcatttttttagtttctcaatgggtggatacctagactcgactctttactgacatagtaaactgagtgtatgtttgttaaaaaaatataaaatttaagtaatttttctgcaaatatctctattatatatcatccatttttaaatataaaatattagtatatgtgacggactataattataatatatagatt

SEQ ID NO: 92777 - DNA, 763 bp, Cannabis sativa
tttaacgaatatatattctttcttttattatttgtgtaaataaagcatattctgttaaaccaagaattgccgttacataggcacttttaatatataaagatatatatatatttatgtgattttatatatattaaaaaataaaaaaaaaaaataaaaatttcaagcacatgcataatatagtcataagatatgaacctttaaaaaaaaattagaaaatttaatattcaaaatagttttggatatcaaaattaaaattaaaatatatcttgtcaaaaaacgattttttaattatttttttataataatgttttcacgtatatatacatgtgttttaatatttatacctgtgagcaaaatgtttaaagattagaacaatgaaagtaaagaatgaataataaatcaagcttttcttgataaaatttgcataatttagatttttgaaattctaatgaacactttatatagtgtaaaaaccaccatcagctcatccaatatatatttttttttaataaatcatgcaattttattattagcaatcaattaaaataatagcatacaattcaatcggaacatcttccctgttagagacacgatcaggattaaaattaaaagaaagaaccaaataatcagccgtctaatattttagattatttcacaaaaaattaaaaaaaaaattgcagcatcatagttaaccttaagaatacatatattcagtttcatctaccgcttaaaagacacaacagtcactacaagaaatgtcact

SEQ ID NO: 92778 - DNA, 588 bp, Cannabis sativa
  modified_base (37)..(42): a, c, t, g, unknown or other
atattaaaattcctttcatatttatttttttaaaaannnnnnacaaataaaactatagtgatcgccgaagttgtcacttgtgccggaaaagtcaccgcagttcactgccggcaccagaaaagtcgtcagagtagcctccggtgccgaaaaagtcgccgaaatttctgccggtgccgaaaaagtcgtcagaattagcattgtccctgaaaaaatcaccaagaaactggttttttaaggaagaaaccgatttcttggtgatttttccagtaattttaccggtgacaatgccaagtccgacgactattctagagtttgatgtcggtgccgggaaagtcgccgaagtagttggcggtgtcggaaaaatcaccggagtgaaaaaagtcgtttgaattggtattgtcgccagcaaaatcaccaagaaagtagttttttcatcaagaaaccagtttcttcaccaaaaaagtggtttcttcatcaaagaagtaattttgttacacaacaataataaagattatgaaaacaaaataaaaatgatatacactgaaaataattgaaactagtttcatcaatcaaccaaataaagaaaaa

SEQ ID NO: 92779 - DNA, 526 bp, Cannabis sativa
gcaactcaaatgatgtccaagttttagaaatattggtgagagattcacgggcttatgtgtgtggcggttgttttagacccgaggtacaagttcatgttgctcgaatattatttccctctaatttatggagatgagaaatatataactgaaattgcgaaggttcgtgagctttgttgcgagctactagaggagtacgggtctaagtttcctcatttgagagaaagaagtgttcaagaagaaaatgtataaacaacgtcttcaacacgctgattggatgccctttctaactttgacagatatgttagagcttcctgtcgactagagaatatgaagtctgaactggatttatatttagaggagaacttgatacctaggactgaagagtcatttgatatatgaaactattggaaggtgacgggccttaaatactctttgttgagtatgattgcgaaggatgtatttgctgtggccgttagcactgttgcttcggaatctacattcagcactaaataaaactcatttcaat

SEQ ID NO: 92780 - DNA, 567 bp, Cannabis sativa
ttttcgtggctgcaaactgggtttcctgggtctttaaaccgagtagccgcggccattttatggcattatagtgtgttttttttaggtttttgttttgatcataacttttgactcgggactccatttggaatgttctttatatcgttggaaagctctctatgtgaatatctagaatttaaatgcccagtttatacttgtgtctccaagaattgtgactaggattactggaacttggtcaggagcacctgggaatttggaatctccatatttgcgagacatcatgtaagacagtagttagcacgtagagatatgcgcaatgacgcttatatggaatatgatatatatgaaagactagaaaccaggattagagttattactctaaagtgagcgatttcttggcttagggttattaccctaataaatagtcattatgtaattgaaatgacacgatgtatatagatgtatattgaaatttacggttatgtgttcaaggtataatcaggttggactcggtaactagaaccgagatgaaccgttctaagctcttattgtaattagacgtgtgag

SEQ ID NO: 92781 - DNA, 1196 bp, Cannabis sativa
ttattcatgcaacacaattcaaagacagtattctgcttctccattttattcaaccccctcacattccaacaccctatattattgttatccattaattgtagcaggaaaaacaattacattgtgttcagtagatacctgcttttctaccctgctctcattttgttgtagcaaatgaaacacattgttgctgctctctgctatttctttcgagtttcctggttgttttgcagctgtcacagggactgtgttctttggaatcacccactcttgatgtgacttggttactgccttttctttcccttctttttttctgttgctgcttgtgtttctgctgctggtgctgctgtttctcgaccctttgcttcataattttatcatgccggcagttcgcttttatgtgtccaaatttagagcattgggcacacatagcaggtagccattcatattcaactttctggtcttggagctgcccaaattcattgaaataaggaataaaccgaggtggttcatccatgatttccatttcaactaagactccagcatactgtgaccaagtttggtcattagtgtgttgatccaccataattggcttccctatagtgataacaagagcacttgagcttttggtaccccagtattgcagccctaaatcttgaagcctgatccacaatggaacagtacgaaccaagttcatagcatttaaatctacagacctggggcgaacgatcacaggttttcgatcaaactgcacaattcctgcctccaccacttgatcacgggtagcctcatcattgaacctcaccattatcattcccatggacaacttgctgatttaaaccacacctaaatgaccccaaacccttttgataaacccttcaaaaatagatacagggggattagcacctagtaccttgcatatgactgctgtgttccagttcttctcctcttcttgaacctcttccaaatcgacttgctctatcttaatcccgtctctgattagaggctcagtgaacaaaatttgttggtcccgattcagagatttctctttcgtgaacgcctcctaggtttgcttagcagatctcatagttttttgtttctccacattaatcttcattgcatcctcaacctcctccacccaactctgaggtcgaacgctgccagatctgctcattttctctgtttcaaggatatcctga

SEQ ID NO: 92782 - DNA, 1947 bp, Cannabis sativa
tgtatgccctgatcactgagaaatctagaaaatgtcctgtattccccaccccaatcagcttgtactttcttgatgggaagattaaattgtttttcaaccattgctttgaatttgaggaacatgtcaagtgcttgagatttttgagtgagaggataaatccatgtgtatctgctatagtcatcaaggaagtgaatgtagtaaagatagccatctttggatgtaatgtgagatggtccccatagatcagtatggacaagttcaaggggctgtgtggctttggtatttgtactagaaaatggctgcttgtgacttttaccaagttggcacgcatgacaaaagtctatttgatgaatagtgccagtgtggggaacatgtggtaatattttggctaggacatgaagtgaagggtggcccaacttagtatgccaaatattaacatgattcttggtattagtttgcagaacagtaggtgtatagtcatttataggatcaactttgtctttattgatatgagtggtattacatggatggtcattgattacattgtgtaatgaaatatgactactacaattcatagcagtaggacaataaccactcgctccatactgctgcaactttgccattgttgactcttgagagacttgttctagcacatataggccatctttaagggtccccttgagtagtaccttccctgtttgcttgtccttgacaaagcaacatgttttgtggaattcaagaaacacacaattgtcattagttagttgagatacactcaccaaattctttttaattgcaggaacatgaaggacagaattgagtctaatattatgagaattgtaagtaggtaaagaagctaaaccaatattagagattagcaatttcttaccatctccaacagcaagaccttcggttccgggataggtgactgcagagtcgagattatcaaggccatttgtcacatgattcgtggctcccgtatccacgaaccatcctgaatcatcaccaaagtcaggaataaaagatgatgcaaacgcttgggggtcatactcgaattcatgctcagccatgtatgcccgaggagtgttgttggggatagatgatgaagggccatttgttcctggtttgggggtgacccaagatttgtcgaatcggtagtgacaaactggtgccgtgtgtccatagcgaaggcataattgacatagaggccgattatgttgatgcggagttcgaaaattggttctaccaccataccgtggtggctgagttggtcgatatgaggggttgcgagagcccgtaaacgcaacattagcttgaagtttcatggtggaatcggtgaccgaactatgatgctcaagtcgagtttcatgagaaagtaacaaggcttgaacctcctcaaacgttagtacatcacttctggcagtgatgccggagacaacgggatcatattcgggtcctagaccattcagtaattgcaagattaaatcttgatcaagaattggggaacctgctacagcaagcgaatctgcaattgcttgagttttgtcaacataatctgaaatggattggcctcccttgcgaatggtggagaattggttcttgagttgcagtagccgagctttggattgacttgagaacttttgttctagagcacaccagaccgcatgagatgaggaaaagttggcaacagaagctaaaacaccttcggtcatcgatgatcggagccatgacaaaagtagctgatctttgcgtttccaatgattgaactcggggtttggttcgccattgacaagggtctgcaaaggaggaacaccagcaagaagaatttcgtctaattcatggcctatcaccgtgggaatcacctgagatttccaagacaagaagttagttcgatcaagttttacggttaaaacagaggttaacgagtgagaaaacgggttccagttg

SEQ ID NO: 92783 - DNA, 571 bp, Cannabis sativa
taattagtattgattttgtttgtgttgggtttaaattgtgaatttttaattctgtatatgtatatgaaaaagattattattggtaaaaaaatttattcatttgtaaactttaaatgttagcatgataattagaaaatattgattactgaattaattttattaaaatgataattaaaagattatttaatgcaattaaacttaaaaaaaatatctataaaataaaaaataaaataaaaaataaaataaaaaatgatattgtgacacacattttagtgactatatatataaaatttaaaattaaataaaaaattaaataataaaaaggatatagtgacacacattttgtaactctaaaaagtatttttagtgacaccaccattagtgacacgcattgaagtgtcactaaaacactttagacactctcaaaacgtgtcactaaaaggcatttttgtagtagtgaatgttctcaatataacctcgagatgctagacttcgtcccccttatggatggttattcgttgaaagcatttaacactgtaagatctcacatgataagtgttttgtaagtttt

SEQ ID NO: 92784 - DNA, 1365 bp, Cannabis sativa
aataaattgtttgaatttaattttcaacattttaaaatattatgaattttttaaaattttacaagatatcttaaataactgcaatataaacaaccataaaaaaaggagactaaaaatctcacagatgcatggagaaaccccattctttagaattttccaaacctttatccagtggaaatctactcatcaacatctattaggagacttttgaaaaacccaacaagtgaagtcctcaccgacaaagacagctaccataacttttaacttcatctattagattcattataattattctctcatccaagtcaaccaaaaataataagtctttgtgactcttactcttacccaaaaagtagtacaataattcaactacacaaacaactaaccactcttctcctcttttgcattaaaaaatccttaccccatcttcaacctcaacaatgtcttcaaaaattcctctcttcattttcttattcattttaactcaaaattctcttcttcttctaacctcagctcaagcaaagaaatctcttccaaaatgtcacccaatcttatgtggaagaaatcaaaatcagatgagcccattcaacaacaagatcatgagcccagaatgtggggccctaaaattgaattgttctcaagatgggccaaggatccaattgaaaaaacaaggccattggtttaaaattgagaacatttctcaatctcaaccacaatctttaatctctattgatatcaaagattcactaccctcagatttgagtgaaagttgtaaattaatgaatcaatattctcttccaagccccactgattcatctcatttctcttcttataattttacagctgaggtcacttcaacactttacaattgtacccctaatattgggtctattgccaaagattttgttaggactgattgtaaagggtatgatttttactataagccaccaaatatgagttttccttaccaaaaacaatgcccaaatgttactcttccattttattcaccttttattccttttactttacatttgaaaataaatccttattgttttggatgtgatttgggaggtgggaaatgtcacaatagtactactcaaagtcaatttcattgtactttgttccctcaaaaaggtaatttttttttttttggtctaattattattctgaatttatatacaaattatcatatttcattgttatttttatgtggggatctggctttatttgttaatcaatacatttagctatgtgaatctgagcattttgatttttgtttcttcttttcaggaccaaagaagaaaaagctaaatttaggagtggaagtaggtaagagttcttctcaattgaattagtgattatttt

SEQ ID NO: 92785 - DNA, 878 bp, Cannabis sativa
tttttaccatttggcctaaaaaaatgagtttggaagatgctatttggtttgagaatcttttggataattaagtaagattctatagaaatttcaagtcttttatcgagagtaaattacactgtatatttattttttattttagtttttatttttattattttaaattattatttaacccaattttataagttatatttttattatgtgcattagaaattttaattttaataagttatgtaatgttgtatttgatactttaattataaaaaaatagtatttataaattaaaattattagagttatatatctaattaatgtgtaataaaaagaggtagttttcaacttaaccttttttttttatcaaagaaaatacttcaaaatatttgtttatgtaatgcactttctaatttttttaaaaaaaatgttaaaattcatttaatttttattttttaaatgagtttgtgtatgtgagtaaatgtacctaatattttatgatcttgtatacacatatattatatattattaaaaataatttattttcttataataaatagtacatattttggtgttgcactatgcttggaataaaaaaaaatgtcattgttgtggtttgttggagataacaaatgatgaatttaggtgttacttttccctgttttagggtttagagtctctttaaaaaataaaaaataaaaagtgtccaaagggaaaaaggctagaataattaataattttaagttgttaataattttaataattagcttaatacattaataattaatcacactctacttatatattacgaaattgatatttttttaaattaaattgaattataattaatacctttatattttttatatattaattatttgttg

SEQ ID NO: 92786 - DNA, 553 bp, Cannabis sativa
acactcacataactaagacataataataaacataatagatttgtgttttttgtaaatagatgtataagtttatgggaaagttgagacaattttaattagagaaaaataaaaaatttgtgaaatgatagaggtaaaattagtagaatgattgaaaaaagaggtaaacataaaattttaaaagagaataaaaattaaagacatcaaattaaaagagatatatagtataattttcttatagtacgtttgtaattccataaaggttaatgttagggtagggacattttaattcaaactatgatgtgtttcaacttagacatactaattataaagtgttactcttaaaaataataataataaaagctagtttcaatttatagacaaattataaataggaataaaatttacattataataaattataatttttttttgactaatttatagcaataaaaataattcatatatataaatatgttgacagtgagaactcattaattaacttattggtcagaaaatcaaactctacagaattaagatgaagaaaaaaataaaa

SEQ ID NO: 92787 - DNA, 896 bp, Cannabis sativa
cgtgaaaacattcacgcaccagtccaggaaaatattccctgctgcagtcacggtagtgccgatgcctaccctctcccacacctttgtaaccactctacaggttagaaggatgtgtgtgattttctcgtccatctcctcacacaaaggacatctagtgttgactggaacatgcttagaagcaagctgagagaggttggaagacaattagaaccgactctccacatcaggttcttgatctttggtggcagcttcaatgaccataacgtcttccaaaactcagaggtagcaatctcattaccaagtcctttcagtttttgttgtaaagtgtaagcacttctgaccgaatacatgccattggactcattagaccatcaaagaacatccgaaacatggtttgtgcttaaggaaatttactttatcaatctctgatcacgctcctcaaacaagtcttttaggatatcatcatcccaggaggacatgtcaatggacattaagttgcacactttagcatgttgaagggatggatgagaagaaatcactagaggttgctggtgatcagccagacatggttcattcagcacgttaatagaagagccattcccaacactccaacgaactcccgcacgaacaagagattgagcttcccaaaacttcgccacacaaaacttggattgttacctataggagtcaagaggtatgttccattaggaaagtatctagccttgaaaatacgagaaaccagagactcggttcttgttaggaagcgccaaccttattttcccgaaagagccaaattaaaatcatggaggtttcgaaaaccaagacccccattgtttttgctattacacatacgatcccatgacatccaaggaatacctttgttttccttcgacgaa

SEQ ID NO: 92788 - DNA, 934 bp, Cannabis sativa
tttctgaacttattctctacctcgtccattcgcaaatggagtaaatccatttgttttggaccaagtcgttgatgaagatcaggttttctcaagttcaaatgttcacgtaggtcacaccggtcatgactgctgtcggaccttgctcttcctcttaaggtctaattcaccttgttccccctataggggtttgcgtgagttcctttatcatgaacttggagagagggttggcgatctccgtctgatgctccacatattccaggctgcgcccccagactttcctcagttttctcaggttgcctctcctgagaattctgggaatacctctgggttgtctccttccccttggtctgcgagttgcgaggtttgcctcgtgaatctctgcttccaaagtcaggttgatgttgaggagtattctcctacgttgccctggctgcagctatttgacgctcacgctctagttcggctcggcattttacgcctacgccggtttgcttcctccaatcgacgcctaagaaggtgattttttaactcaacgattggtatgtacttggttggatcgtatgcgccatcctcatcatcctggttaggaaatgaccggttgttgtttatcctcggtccttcaagcctgagaccccaacactaggtttcccggagctagcagcttgttcatgggatgaatcgatagatccctgaggactcaatggctcttttccagggcgatgtttgagtacttcatgaggattattttcttcggcgtcatccataacttttatgtcagaatgcttaatctgagctttttcatagaggctctcaatgaaagcaccaaactgttaatgtagatttccgttaaccaaattgaagcctcatggtaacaatttcatacagaaaaaataaaagctataaaaggaaaaatatgaacacacaggatttttta

SEQ ID NO: 92789 - DNA, 639 bp, Cannabis sativa
aaaaaaagtattgtttatatttttttttttctgtgtttttttttctctctttctcgaccctattttttccaataaaattattatttttttctttatcctgtaacgtaaagatgagtaaaaataggggagtggggagttgagatcctattttctctctatttgactaatatttattttttttattattattattattttaaaaacgaataatgaaataataataaatttatttattcttcttttttttttatcgttcaacaaattgcatccaaaaaggagacaaattcatagtttcagcagtggtaatttggtgaacaattggaggacttaaaacaatatgatgattttgaaagtgccaaaattccaaaatagaactttccttaagtctcttatgtatccacaagtaactaagaacaagcctgagtggtgatcagtaatggtaatcgggtattagccttttcaatgaccattcattttaatacgaaaagtttttcgattaatatctcaagatgaaataactctcgcatagagaatatgaccttggtttattcaggaaggatttgaacttcacttttagaatttgttagcaccagagattgattcgtgtttgtaagaaaatgatccataaaatgaaagaac

SEQ ID NO: 92790 - DNA, 533 bp, Cannabis sativa
aaatggctccttttttgcatgttatcatgcacattaatttttctcaaagccaccatcaacccaaacactatcacctttacaggcacattacttttccaaaccactttaggccactcaattccttttgaattctgattcgcagtaaaccattgaaaatctgatttacatgagaatagacccccaagatctggcttccaaattctgagcaagtttacagtttccatttgatgcatcaacccaactaggctaggaacctaactatccatcaaattccttctgaatttaaaatcccagctgcaaaccctttccttcctatcctccttcctcaatccacacatcctcccaaaagcaaatttcatctccttttcctaccttaaaggaaaccagactcaaatattcatcatacatatttgatattcctttccataggcctttagaggagaatctttcacctcttttggaaaactgtctgtgatcccataacgacttcttatcactttatggcaaaatgaattgggttcaagaggaaacct

SEQ ID NO: 92791 - DNA, 2042 bp, Cannabis sativa
taaaataatttccaacacttaccttgctagcacaagcaagtatgcccctcaaatattggtgcgatgcctttcacacttcactctatttaataaataggcttcccacacctttacagcactagaaatgaccttatgaaacattgttttctcgaaaacccgattatgcatttctgaaaaacctttggtgcaacgtgttttctgtgccttcgtccttaccaatcccacaaattctagttccacttatcaaatgcgtcaatctcggttatagtgactcctacaaaggctataaatgccttagtcccactggccgcatatacatctctcgagatgtagttttcaacgaattggagtttcccctcaaaacttgttttctgaacaattataccactccacaacctgtcataattcattctacttcatggtccacttttcccactcattacccttctccatcatcaaacctagtcgattcttcttcaactgatacatcgcgtgaagcctctcctgcagtatcctctagcagcccccgtgctcactcttcaactgttcattttgactcacctagttctgttttaggtcctgacagggacaatgatcaatatgcccatgacctgcaacatgaacacagcctgcaacaaccaatttcaggctgtgttgagcctactggtactaaaactggtcaagacatacctgctgaacacaatgttccattcccttcacaccctatgatcactagaggtaaagccggtatattcaagcctcgaacatttgtcagtcaagtgtaatccgaatctgccattacagaaccggttagtgttgctgaagctatcaaacatccaggctggtttaaagcaatgaatgtggagttgtatgctctcaaatctaaaggaacatggatccttgtacctccttcagatgcatacaacttagttggaaataaatgggtatataaaatcaagttcaatgtcgatggtattgtaaatcgtctcaaggccagacttgttgcaaagggattccaccaaaggcctgaaatcaattacgatgagaccttcagccccgttatcaaggttgctaccgtgcgaattattttgactattgttgtatctagaggatgagaaataaggcaacttgacattaacaacgcctttctaaacggtgaattggaaaaagaagtttacatggttcaaccccaagggtttgaagagaaagggaaggaaaactttgtcggtaagctggaaaagtcaatttatggcttgaaacaagctccaagagcttggtttgacaaactaaaagagactttgacagcttggaatttcaacaattcaagggctgatacatcattgttcttctacaaagatgaaaaggtaattatacttgacttaatctatgtcgatgacattattattacgagaaatgacaaaagcaagctgcataatttcattgttgaactgaacaataagttcaccttgaaagatattggacctctgcaatactttcttggcattgaggcttaccgtaatgcatcaggtctttacttgacagaaactaaatacataaaatatattctaagaagagtaaacatggccaagataaagatctgtccaacaccgatgactgttggcaaacctttgtcactcactgatgggaagcaaatggaaaatcctactctttacaggagcaccgttggtgcactccaatatttttgtcacacacggcctgatattacctacggcgtgaacaaattgagtcatttcttgcaaactctaactgacactcattggagtgtagtgaaacgcgtgttacggtacttgcagggtaccaaaataaaaggccttcgcttcagctgtagtgacagacttagcattactgggttctcggatgccgattgggcttgctgtcctgatgacagaagatctattgcaagttattgtgtttatttgggtgttactcttgtgtcatggtcatcgaagaagcaagtcattgtttcaagatcgagcactgaatcggaatatcgtgctttagctcatgtagctgctgaaata

SEQ ID NO: 92792 - DNA, 2209 bp, Cannabis sativa
tatgtagaagaatattgattaattctgtttttgtgttattttttgtcatttcttgaactgaagggtttttttttgtgttttttcctattgatccttgtataattatccatttaaatatgcaacatgcttctgtgctgattgatacagtatatgcagtcatatcatctcaatacatctcttccaatgtttattcctatattatggtttgtgcgaaatttaaatacggataaacatggcccttagtattgagactcttagtctcaattaagtaccgagtgtgctaatgatcaaaagtatcttggattgtgttcttctattactcctgaagttttggacttcctttgtatgggctgaagcttatgaattgctgtgcagactgtagaacataatgcttatggcaatgatccttatgctaaggagtttggaatcaaaatcagtgagaggcttgctcaggttgaggctcgcattctacctgctccctgggtatgttaactatatatgtacaagcatttatttacttctagtttttggtatgtgctctacttatttctttgctttaaaattgtggatggtaaaatgacgtttgattttttgtgttgttccagcttaaatatcatgatacaggtagagaaaaggattgccttcctcaagttggacaatggaatatgatgaacaaggtagcctttttattgaattcttgatttatttctgcctcaagttgagtttgctatctaaattcttgctctgtaactcatatgctgaaaatttattgcactaatttatgtggatacctgaatttcaaatggggtaaaatgaaagttcctatgttgtatactaaaataaatgtcagaggaatttgccatttattctagcatcaacagaatgatttattacctctgttgcatttcagctatagcattcattctgacttcttacttatttgggttattcttcttaattacttgtagaaaatggtcaatggtggtacggtgagcaattggatgtgcataaacttttctcgaaatgttcaagaagctgttgctcggggcttctgttatgaacttgctcagatgtgttttatttctggaatggtacaggatctatatgcttgtaaaagttattccttttgaactttacttttaagtgttgtaaatgttgatcttttggttccattttgcaggcatttaatccagaaccagtactcccacctgttaatggtcgtcctgatcaggttgaaaaggtcctgaaaactcgctaccatgatgctatgagtcgtcttcaacctcaagggaaggagctggatctgcttattgttattttaccagataataatggctctttatatggtacgaaagttaaagtctgttaatctattttgtatcctgtgtttcttaacatatgcttatctagtgttatgctttcatttgcaggtgatttgaaacgaatctgtgagacagatcttggccttgtatctcagtgctgtttgaccaagcatgtcttcagaatgagtaagcagtatctggcaaatgtggccttgaaaataaatgtcaaggttggaggaaggaatactgttttggttgatgccatatcaaggcgtattcctttagtcagtgaccgtcccactataatttttggtgctgatgttactcatcctcatcctggagaggattcaagcccttccattgcagctgtatgttatgaaaacatttctatgttcttttgtgggctttgttcttttgttttttttaaaatttttttcactggttatctgaaatactttcaactgtcttcatattataggttgtggcttctcaagattggcctgaagttacgaagtatgctggtttggtttgtgctcaagcccatcgacaggagctcatccaagatctgtttaaaacatggcaggatcctgttaggggaacagttacgggtggcatgatcaagtatcaatctttctctcctctccttttctgatttaatgatactactatttacatgcatcctaacaacagaaaatgagtttaagggtcgtttatggttatatattttctgtgtgcttgggtaatactattcttgaggggtctttgaattgcatatgctccttgttctttgactgcagggaacttctcatttcgttccgtagggcaactggacaaaagcctcagcgtattatattctacaggtatggcttcatgatgttaataatctc

SEQ ID NO: 92793 - DNA, 1821 bp, Cannabis sativa
  modified_base (227)..(227): a, c, t, g, unknown or other
agaatataatttacttggtcccaagtgtattcttgaatagaggttctactgtatatacaattacacatattatgatattaattcttgcaaactactatcatatgtgatgctctttatataaagggattcattgatcatacattctctattgattttgatatttctgataaaaaaattagtttaattttttttattatttactttgtagttatttaaaatattttatnaaattttaaaaaattcaaaaaattttaaaatgtcaaaaaaatagttcaaacaatctacatgtatgaaataaattatttgaactttcttttcagtgtgatataaattttttaaatttttttaaaattttacagaatattctaaataattacaatgtagacgatgattcaaaaattgatctaaaaaattatttcaaatactaaaagatgcaccaataaaatttgttaaaaagtagagattgtaaaattttcctattccgtcttattagtttctaaaaaaaaaataaataaaaaagcaagaaaaaattaggtgggtccccaaatattgcaccacatgatcacttatttttatttgtcatgtgagagagagaatgtcatatatttaacgatatatacaatatactgttcatatatatatatgcacttttggctacacgaataattccatatatatatatataaaatgaggagagatataattaataacatgtaaattttaaatttaaatatggagctaagaccaatatttttataaaaaattacatttattgcttctgtttttacaattatcaacgtacgtaaaataagaacaatagtcaatagtacgtactatacatattatacaataatatatgtcatgtctgtgcttatatatataattaattgaaatgaggaatatatattttgtataaacacttataatttggaagttattctatcttatatatatatatagcttgtttatgatttatatatatcatgcatgtgccatgcatgtaataagttataactcagctgaagtaacaaattaattacaatttatttaatcacttaatttttgattttatatgttgtagaacttctaattaattaaaccctaatatatatgaaagagagagaaagattaagaataatatatatatgtaaaaaaaatgatatattatagttttcttactaattaataaatactccaaaaatgtgtaatattattttttttattggcttatttttggacacaacacaaacaatgtatgaattattattattattattattattattttatttttataagattattgcttttattattattagtcattttcaggtttgcaaggtggctcttaaattttgtttgttcccttttgtttttgtttcttcgaaaaaaaagttgaagccagctcttcttgtggggtttcctcctctatctatttttaaactttttacatattctagattaaataattatattcataaatatacaactcatatttggtactatttgatcaaatgtattatgatttaaatgatgaattaacatatatttgaatatattggaaatttttgtaagcatttctataaagaattgttttgatagattttttatttaatttgatattcagaaaaaaaaaattagcctatttttttttttttttttaatttcatacgttgtaaccatttataaaactacttgtaaatttttagaaaattttgaataatttataataccgaaaatatttaaacagttatgttgaccgaggttttcggcaactattaaaatataattataataaggagctgtaagaaagtgagatga

SEQ ID NO: 92794 - DNA, 1235 bp, Cannabis sativa
acaaaacaaaacaataagaaaaagagtaaaatatgaagagagagctgcataatgcaaatatatctagaaggcttcacattcaagtttagatcaatcaagtaaatcaaactctcaaaggaacaatgagacgaaaattttgttcgtaccgcaaaccatccacagtagctcataagttcatctgtatcaagaaatttgctccggaaagcacttccttccaatgccactgggacaagttttagttctataggtcgtaaaagagctgtcttttcagcaacctgaaggcaaaatatgttcaggtatcaagagaaaattaccaactcattctatcaaccatggaataagatagagaaaaccgagcagcactccaaaaatccattagcaatatgccaaaataaatactgtatgatcatccctagaaaccatgggattaagaattcaatgaaagtcaaacaaacaaaagtcatttaagagattgaaactacctttttccagtctacaaagtcaatcagctcagtgtccatactctcttttgcagcaatctgtaatattctctctctttctgcttgcgttggtctttgaagatgaaatattctatccatccgaccaggccgctgcaaggcctcatcaacttgttgcagatttctagtcgtggccatcaaaacaaccccatcttgtttttcaaacctgcaaaaaggaaaataatgagaaactgcagagattgcatagggagagcaaacaatgcaggttgctccattactattaataataaagaggcaaggacagacacggactgaaagtgtggataaaataaagtaagggcatgactaagtggcaagacttagacgccacagatcggattacggtaaacaagaagttacccatcaagctccacaagaagttgattgatgaaagcctcatgatcctgatttttagtgtgaatatatgtgccacgaactccagcaaaaaggtcgaaatcctccacaaatatgattactggggcctggaaatgaaatcatagtacttaagaaaagatagagcacaaaacaacatgtctcttatcaaatttaacaataaaataattttttttttggaacaaacaaaagcatttccataagcaatggcagaacttttttttttttggatagatttcaattacagcgatggcgaaattcagttccatatatattccacatcatcatttagactcagtctttcagtttctctccatcgttcat

SEQ ID NO: 92795 - DNA, 732 bp, Cannabis sativa
gttttttagaaatataaatcggtttattcagtttatttgatttatttaggcaggttagaataatattcaacccgcccaatatatttattgtgcgatttgaatttttcgtaaagttattcgggttaaattttttgtcggtttattcagtttgatttgggcagtttattcgagttggacggtttgttaatttttttgaacagtcctagtttgtacttaataattgtcttcgctcttaaataaatttttattttttttaatgaaaaatgtgggatatatttacataagtttctaatattattatcaattggcagtcaagaaaatataataaatataagaaaattttataatgtaccctcttaaaaaaaatgtattgatgtatttttatctgttttggaatccgaaataattttttagtcaaattttttactatgatcatgtacgttatagttatttaagacatactgtaaaattttaagaaattcaaaaaaatttaacacgccgaaaataggattcaaacattgtattgcacacgtgactattttattttatacgcgtgtaaaatagtctgtttgaatattgctttctatattgtaaattatttcgaatttcctaacattttgtaaaatatcttaaataattataatatagacaaatataaaatacagttagactaaaaaattcttctcaataacaaaacaggtttttaaaagggttcccataaatatataatga

SEQ ID NO: 92796 - DNA, 1129 bp, Cannabis sativa
aatctaaaacattgggtacttatgccgctatttacccttatatatatatatatagtagctcctcaaaacatttccctccaaaagaaacacatgtggaggaaattacactacaaacatataaagttataaactactcaacaaaattatgtaaaaaaaaaaaaaaagctaacaattttatgtatacttttttaatgataacaaaaaatgttaacgaaaattataaaaatcaagtactccattagataactagtattgtaattaaggtacccactaataaaaaataagcacttcatatagaatatgaatagaagatattattttttttcttgtattgtcctttcgaagcctaatagaatataattgccacaatttcatccttgtcgtaattttgtatctaacaaataactaaaactaggatgagtaaatgatcctttaagaaacatatcagctagtactttatacattccttcagtaagatgaactccatcccaattcacatactgagatggtgttgaacaggcactgatagaaggcatcccgcaaacagaaaacacatcaaaattatagggttcacctgcgccgcaacaggctttaaatgtctccttgataccaaacttagccggactttgcatgacggtttcataggcagtccaataatcggcatatgatataacagcttggggaaactgtcttctaagagattttaccaggtttaagatagaaagattgtgagtgtaactttggttgttcacactcttaacacaacctatgttgtccctgtcatctggggaagctaatgtcatggccaaaggcaagcatcctgacattggcatgccttgaaccacaacatactttgcaccttttttcaataatgcctgcaaaaaccaatacattatataagagtattgagatcttgaataaataggtagtattaataagagcattgttattgttattgggtatatcaatggtgtctagcacctttaaacatatcgttttgtgattggctagcgatactccctaaaagttactacattaaagtatatgagactcgatacttagttagaccaatagcaatattaacacatacgaggatgttaggcaccactggtgtcttttaacatttctc

SEQ ID NO: 92797 - DNA, 853 bp, Cannabis sativa
accaaacttgactttggttgacttccccaacacacattgatcacagaaatctagatcttgtagcttgttcttaccaaaaacacccttcttttcaagaattttaagacctccattgctaatatgccccagtctcttatgccagatttctgtgtttttcttggcatcacaggctgcaacatttacttcactaatcatggtatttccttgtagtatgtagatcccatggtctttgattcctttcatcaccattcttgatcccataatcactctcattgttccactttctattcgaacagtatacccttcttgatctaacatagccacagaaattagatttctctttagttcaggaacatgtcttacttgtttcaactctgcaacacctccaccatgaagctgtaattttatttttcccattccagtgatgggacatgatctgttgtctcccaatcttacagtcccaccttccaatgcttgatattcactgaattgtgatttatcaggacatacatgaaatgaacatcctgagtccatcacccatccagttcttgaatttgagtctgagacaacaagaactccagcactgtcatatccctcactgttatcaccatcagaaattaaccctgcatcaccagatctattctgattttagcttttcagaattggacaatctttcctgagatgagtagtattgctgcagatgaaacatttccttttgaacttagaattaggttttccttgatctttgttctatccagtgtgatccttgtttcctttcttggaattctttcctcgaacaaacaaaccatctccatcaacttcatccttttgttcagatttcttcttaagctcc

SEQ ID NO: 92798 - DNA, 1121 bp, Cannabis sativa
aaagaaaaatgtaaccatatagttacaataaaaatgtaacaattaaatagtcactcgtatatatatttatttagtgtgaattattagagttattgtacttaaaaataattttttttacatggtgtagataccacaggaaataaattagtgtgagatgatctaataataatactctttttgggggctcaccgctcttagcttatcgggaaagcttcatgttgtagatgcaaatcatattgtttcatgactcaaattcatataaattaagctgctaacatgagtcagatttgtaaaataaggtgacaaggaatgaattaaaagatgaaaaaacttaaaattgttaatgcatgctatagaaaaagtgcccactaataattaattttctttgtcttgtttattaattttatacatggttttggtggtaacatgggtcatgatccatactcgtaagtgttatatatgcaagtttagccttctaagtacaaacttgattatctacacattaagaaggtctcaaattgtatcatttccccaatttgatcgtgttcaaattacttaataataatcgtacacaagtttagaaaagaaattttcattaacatgatttctaaatttttttattttatttttcaatttataaaatatatatcctcccaaatattttattgtattttatgcatttttagagataagtgtagctaggtgattgctcaacatatatgagattttatatcttaataaagaattagtaattagttgaaggaaaaattgcggcataagatttcaaaaagttcttttgatgtaaataaattatcaatttcaaaaaattacggtaataatcctcaaactctctatagtccgttagtctttattttgactgaccggccggtagtagttctttaaaaatgacatgtgttgatttgtcagatctcagtgagggagagatcgagagggtaggtggtgagtttttcctgactggttgacaagatcagggatgcagtctaggtcaagttgggggtggatcgagggtcgtaggagtaagggtcaagttaagttggatgaagaagaagaagaagaatgaaatgaaaatgaaatataaagaaaaaaaataatttttatga

SEQ ID NO: 92799 - DNA, 500 bp, Cannabis sativa
atagatttttataaataattcattattttcttttactaaaattgtaaaaagtcaaaatgatttaaatttgtaatacagtacaaattcagtttaagtattaacgccctaattaaaaaatagaaacaaaaacaaacctcataaaatttaatgaaatttggacgttaagcgaacacactgtatttttttttttttgctgagacactgttttttactttttcatgaagaatatatatttgtttgagaaaaatattctctttgaaatgacacataatttgttattttttacaaaataattaagtaaaaaatggcatgcaaaacatagcaaaactgcattttgtgcaacctaattatttctttttgataagggtgcagcctagatacttaataactataaaataatatctgaaaatgtagagtaatttaagaaagaaaattgagaattctaataattaccctgaataacccttgaatatggtcaaaactgaaaattaacaatatac

SEQ ID NO: 92800 - DNA, 905 bp, Cannabis sativa
  modified_base (254)..(256): a, c, t, g, unknown or other
ataggatttgacatgttgtattcaatacaacccttcctccaccattacatctccttaatcataaaatccttggtattgtgaaattcctctatatgtttactcctgttagggttactggattctttaatttttggcaactacttttatgttagtcacgaagtaacactagtagttaattcattattggtacaatgctaaaaactgcatagaactttccataggatgaataagtatccttcctgcaactttaacannnagtctcactagtagagttagagacttcagatagtctttcacacttctctgaaaatctccgctccaccccagagtaatctccatctcataagaagaatttctagcatcaacgcaagtctagaaaccttatttggtgtagtctaagattattaaaataccacccttataacctaacatatagttcctcttttgatcttaagatttgtttcattgtctttcaatgttcctttcctggattaaactgatacctactcactacacccactaaatagcaggtgtctcgtctaatgtatacaagaagcatgcatgagacctctcattgttgatgcttaaggaattcttttcatgacttatatcttctttagaatagttgaaactgtttcttacatatataaaatctacgtctaggagccaaaaggcttcctttagaattagccattagagaaatgctttcaacatcttactaaagtaagttacttgcacatgagtaagtaaattaccaggcataccacaagccaccggttttagataatcccaaacctactacactaggatcgagaagttttattaagtccatttgaatagacttatttttcaaaatttgccctcttgtccttgttatagagatttttttggttactccatatgaa

SEQ ID NO: 92801 - DNA, 812 bp, Cannabis sativa
tataagtataaaactaaaagaatcctaaaaaaacataaattattttgggtaaaattataaaaaaaaaaaaaccaattatttaaaaaataatttgcggtataaatatttaggtttatttttttggttataaataaatacgtaagtttagttttttatggtagtaatactttaattatatttttaaaatttctgtaggtactttactataagttaatggccacataataatttttgattggtctaaattactaaatttttattttttatgtaaaaatttatttaaatatactcataaaaatgatacgtaaatattgatttaacacttaacgatcagtacactagtggcgaaatggagacatggagaaaatatgtgaggtaaaatgtaaaagaaaaaataagggggactataaaaaagaataaaaaatattacaaaattataagtaaaaaattgaagaaattttttttggtattattagcatctctttgacagtacaaagtttcaaaaatataatttaaatattattatcgttaaaaattaaaattagttaataatctataaacggaagttaaaacttaattatttttataaaaaaattgttaaaagttactattgatgcctaacactcgctatcatattactattggtgtaattaagtatcaagtcagatataacttacaaaaataacccaattgaaaaatgccacttatagaaagtgttaggcactactaatgcctaatatcaatattttttttatgtaataatatattttacaatggtaatggaaacttcttgttcacaaaaaaaaaaaaaa

SEQ ID NO: 92802 - DNA, 677 bp, Cannabis sativa
gggcacaaaacccaacaacaaccagcttctacccccaagaaaacgcaccagaaaccagatataaacaccaagaaaatgcattaggaacaacccaaagaaaactcacacacccaagcaaacaagattcaaacgcccaacaaccccaagagaacaacagcacaagaaccaccagatacttgcagaaaattagacacaaaaatcaacccaaaacacaacatcaaacacaaaaaaaagacacacacaccatgtcacaacagagaagacatacacccaagaaatcaacaccgaccgacgagtaaccacgacggagaagacgctgcctcgaaggattcactgacgcagaagagaaacgacaattatattttaatataaatatgaacatattatatttttattatatttaaaataatatatcaaaataacattaatatatttaggaaaaaaaactaatatttatatgttgtccatacatatatgaataaatgtaataagtaaaacataattcaatgccacattctcaactaattttaattaaattttattattagttttgattcactacttagaaagccctatgattaaaaattattaaaaaagtaaaaaaaacagtaaaaccaaataaatatactaataaataaaaatttaatgtagtgctcactgctacaaaaaatttgata

SEQ ID NO: 92803 - DNA, 508 bp, Cannabis sativa
tatcaacaaggtacggttatcattctggtgttgatttgtgtggacgatatcataataactgggaatgacagcaacaaggtacaaagtttcattgctgaattaaacaagaaattcactctaaaagatcttggtccactacactactttctcggtatagaagtgtatagggatcacacaggattgtacctaacgcaaagcaaatacatcgaagatctactcaaaagaacaggttttgaaaacctgaaaccatgtcccacaccagcaacagcagggaaacccatgtccttgactgatggagagttattaacaaatcccacggcatacagaagcattattggaggactccaatacctatgtcatacacgacctgacatttcatatgccgttaacaagcttagccaattcctaaaggctccaacaacaactcattggagtggagcaaaaagagtcttaaggtacctaaaaggcactatcaccaaaggactacacatcagctgtgatgacagat

SEQ ID NO: 92804 - DNA, 518 bp, Cannabis sativa
gattatttttctttgccaaagaactcactgaagtctttttcacattctcaacacttttctcgttcattttcttactcctctcattctcaacatccctacccatagaatcgttactcttcttacttctcctctcattcacaacatccatatcaatggaatcatcacccaaagatattttcctcacattgtcttcttcttcaccaccacattttctcttcaaaccagaaggcgatggagaaattgagcttctcgtaaccgccatagcaacacatttaaaatcttatagaataaaaaccaaaccctaaaatcagtttaacccaaaaacacactaaagaaagagagaaaaaaataaaatgaaaaggaaagataataggtagaagatcttactgattgatatcgaaatatatagaaagagaaactcaacaaacgaattgtctgagatcgtgactggtaaagcaatgagagagaaatagagactagactgatcaatgagagagaaataaaagaaagaaagagaa

SEQ ID NO: 92805 - DNA, 902 bp, Cannabis sativa
ctccctcaacacattggccgaacgaaaaaacaattgtttcattaccttcatgacaaagtctggggccaccttcataattggcgaaacaaagtcttctcaaaaggggcaaagagactctccttaaatcggtcattcaagccattcctacttatagcatggcttgcttccgcattcaagtggccacttgccgctcgcttgaatctaccatggcaaacttctggtgcggaattaatgacaacaattgccccaaaatccactggcaaagctggaaaaagctctgcaagtccaaaaaggatggcgggcttggtttttgttctctggtccattttaatcaggccatgcttgcaaagcaagcctggcgcatcttaaagcaaccaaactcaacggtttccagaattttattcgcctgatattaccctcagtcttccttccttagtagctccacggggcattctccttctttcgtttggcgcagcatttgctgggggaaagagttgcttagcaaaggcctcatctcaaaaattggcaatggacagaacacatccacttcttctgattattggatcccgggtttccgtcaagttactcccttatcccccgtccctgacaaggtcgcctcatttataacatccactatgtcttgggacatagctaagattcagtcttgctacccggcccacgtggctcagaccattctttccattcccctccctcttaccccaacccaggatgatctgatttgggaaccctcaaactctggggtctatacagtcagatcagattatcacctcagtttttctacaactaccccacctgacatcccctcttcctcttccccctcgccttggtggaaaaccctttggcatctttctatccctaccaaggtgaaacactttgctttc

SEQ ID NO: 92806 - DNA, 749 bp, Cannabis sativa
ccacaaaagaatcccaaaaaatttcaatttttgtccccgatcaaagacccaaaactgcactgactttgtcttggcctccatgaaatttttttccatggtacaggagaaccaacggatgggacgctcaaagggaactggtgggctccaaggcattttatttttgcctccattaaaatgacattttgggtaggacatccatggtggcacccctttaaaaataaattggtttatttctttgtttagttgggccatgaccacaacttggtcaaagcaaaatagccttttgaatgtctgggcccaagatggagtaaggaaaggagtttggttcccaaaatgaccctcacttactaaactggacatggaaataaagtgggtgggttccaatttaattaattcaaagtgacccattggattaagttcactcttgtgggccaaagctgaagtaagtgttaaggagttgggcttgggccttacttgatagggtttgggtgaaaagaaggtcctccccaccatcttcttcttcagccgtcccccttgtgcggctgtccatgtcttcaagctctgaatctccggcgaagctaccagcgacctcgtctctctcttctccgtctccggcgaagaccccctctgttggttcggctccgtccccgccagcaacgagatcgaccttggcaccaccagtgacaccaccagcagttcttcttcttccgccgctcgcactaataacggttcttctttcttctccggcg

SEQ ID NO: 92807 - DNA, 965 bp, Cannabis sativa
tcagccactaccttggccttcccatgatggtaaatgatctcacaattgtaatccttaaaaaactctaaccaatgcctctatctcatattcaagcctttctgagtaaagaagtatttaaggctcttatggtcagtttaaatttcacatctttctctgtagagataattccgccaaatcctcaaagaaaaaagtaccgcggcaagttctagatcatgagtcaggtatcgctactcgtattctttcaactgacgagaggcataggcaagaacccgatcagcctgcatgagtacacaccccagaccctgtctagatgcatcacaataaaccacaaacttctctttattagaaggtagggctaacactggagctgtgattaatctctgttttagctcttcaaaacttacttcacacttgtctgtccacacaaaatgctgattcttttgagtaagctcggttaagggtgttgaaattttagagaacccttcaacaaaccatcgataataaccagcagacccaagaaacttctaacttcggtaactatttttggtcttggtcaatccctaacagattctatctttaccggatccaccttgatcccatctttgctaacaatgttcccatggaaggacacctgagtagccaaaatttgcacttcttaaatttggcatatagcttatgttctcaaagccgctgtaaaaccatccgaagatgttgctcatgctcctcttctgattgagagtacgaaaggatgtcgtcgataaatacaataacacaaatatcgaggaaatctttgaataccctattcatcaaatccatgaaagctgcgggagcatcggttagttcgaaagacatagccagaaattcataatgcacatacctagtacggaaagccgtctttagaatgtcctcttctcggattctcaagtgatgatagcccgattagagatcaatctttgaaaagaccg

SEQ ID NO: 92808 - DNA, 1098 bp, Cannabis sativa
atacactattttattaacaagtaaaccataaatataataaaaattatatttaaacaatacacaatctattggtaaaataaatattcaaaatacaatttaatttcaaatttactaaatacaatagtcactatcatcatcactaatcaaatttgagtctatttgtgggggtggggacacatcatttgaatcatcaaaagcattatcaacaagtatgtcatcctctgcatctaagatttcttcatcttcatcttcatcatcaacatcatcatcatttacaactgtaggtaaactttgagggacatcaataattgttgggggatgattagtttgttggacattcaacactcctaaatccacaaataatgaaaaatttgatgagtctgcatcatgtacaatatcaatgtcaacatcatcgatgtcatcggtggcatctgcaaccttgtcccaaagttggcgatgatttacatcttggacaaccttccaattttgacctctaaccaaatcatcaacaaagaaaacttgtttcgcctgactagccaaaatgtatggctcatctttgtaccatacactggacaaaatataccattgataaagacctatcttactattataaaatatataaatgcatatataaaaaccttttgttcatttgttattcttccaaaaccaaaggaacagaactaaataatgaaataataaaataaacacacagatatatatatatatacatttatcaaccatatgaaatttaaacacttaaataataaaataaattagaaaaatcccaaatttaaacaataataacaaaaaaaaaaaatcaaaatcaaaacctaatttactcaccttatcaatgttggctgaacctcttcaaaaagtatccctctgccgcctatcaaccatcaccaaagcctccccctacaacccaaaacgtgagagatgaaaatgaacaaaaaaaaaatgaacgaaagagaggggtcgacggtgagagggcttaccaccggtgagaaggcttggctgcgtcgacggcgacagagaagggtcgacggtggctgggcttcaaatgatagggtttttcggctgagaaatggggctgagaaa

SEQ ID NO: 92809 - DNA, 534 bp, Cannabis sativa
cactattataaataaactcaaaatgaaacagaaaagctgcagtgaagaagtaaaggaaaggcttattatctaacaataatggtaagtctttccactaaatcaaataataataataactaaccaaagattacaaaaccgaaaattcgaaaaaaaaaaacgaggcaacgaaaacgctttcatatgccaattaagcacgaaagtgactctttagtaggtgtagcccttgacgaacattcccttcttggcctcctcgctttcaccctcggctgagtacctaccgagctgagccaacgagttcgcctttgcacgaatcaacaatgatgtttgtgcagctgtgacattctcagggcgtccttgccatgtctttaggacagagttttggagggcacgagcgtatgagaaggatacgtgccatgggttagggctctggttcatagcgttcaagtttaaggttgcttcggcttcagattggcctccagacaagaactgtaagattaaaaaagaaaagaaatgtgagtccaaatcactaagagc

SEQ ID NO: 92810 - DNA, 681 bp, Cannabis sativa
aaagttaaaattagttaaattaacattgtaccaaagcttttgttcttaagaaagaaaaaacatcaataacctaacataaaaaatctcattatccacaaaaatgaaatcattttaaacaaaatggttcaaaatttagctttaagaaaaaaaaactaatcaaacttattgaagcatttcattaaaaaaccaaaaaagcattttttttttcaaaataaaaaaccatttaatacgtcataaaatttaattccggtaaaattacggtcagcgagtatgttttttttttgggaaattttatttacaccctaaaaatttctaaagacaccccattttaataatttttattttatataaaattgatatctttaattgtactaagttttttgaacttttttttccaattcatattcttaaaaaatatacttaaaaaaaatatatttaagagtgataaaaaattatgaaaatgaaatcaaaataagtttgaaattaacataaaataatgtgaggaaatttttttaaaaaaaaatattaaaagtaattttaaaaaattatttaagtttatattttttttaataatgaggtatatttatcattttatagggtgcaaataaaactctcatttttttcataaataaaaaattatgaaaacaattcaaaataatatatttaaaagaaaagagcatt

SEQ ID NO: 92811 - DNA, 704 bp, Cannabis sativa
  modified_base (33)..(37): a, c, t, g, unknown or other
ttaaacaaaaaccattagaacttaaataaaacnnnnntttacgtggctcgccacgtaactttcatctagtataaatataaatatatttggaatcttgttacgagtggtttaacatttaatattttcaagtatatctaaatccgatccaattatatattgaatgttgatccaatctatctaacattcattagatgttagattagatcggttcaatttatataatgtatttcatatatatttattgtattgattcaaaattatctaatattttttaaacatagtattttttagatcgaactgaatccatataattttttagatcttatttttattgaattgaatccaattcgatccaatccaagaaagaaaaagtaaaatcttaatcttaattttcatatatgaatatatattttaagtatataacaacataaaatttaattactcatccaacctaaacgaaaatactaatgagtttgattgaatattggatgtattgtattttcggataccccatccaacatatgatccaatcctattagatataaaaaaaataatacccaatccgatcacaattggatatctaatgttttgtggtcggttgtaattagatcggatcgatttatgcacattacctctacttaaaggagtgttctggtaaccccctatctgtttcagtatccaaaaaaaaaaatagtctaattttt

SEQ ID NO: 92812 - DNA, 614 bp, Cannabis sativa
tgaagaattgattctataataaactaataaaaaggagcaatttttatagatcatttaaagtagtaataaaatttgtttaaaatagaaatccctattaattggcaacaccaccacataaaagattttgtgtggtttgcattattaatacggaaatcagttaacaaattaagagtattataagttagctagaacagctctggacttgagagagaggccatttagaatggtaatattccaaatcttaatatattgtaacctcaacttatttcatattttcaagttgcaatatattgttcttttcaaaaaaaaataaaaaattaagagtattagatttagactttaggtaggttatgtactatagttatggacaacctatattagttgtcccctaacatcttcaataatttcattatttaaagaaattattaataatagatagagttgaagttgaatggggtagtgaagaagagagggtatttgtatttgaattgtatagtagtgagtagtgagtggatacctaggccgaccacagtcagatgggttgtcccttttgaggcacagagcggctgacagtgctgtgacttagtggcacgtggtatcatcttcttcttctt

SEQ ID NO: 92813 - DNA, 702 bp, Cannabis sativa
caactgtttaagtatcagaaacttcaaactctagagagataaagtctagagagagaaactctaaccttgtgggtgattttctgaatgttgactagtatctgagacatgacttgatagagggcttaaatagcttcaaaacgcaagttgaattgtgtcaactaaatgaaaattgagtgagttatgatcgttttactaaaggcagtttaggttctagcactcaggttgacattcagctcccaaggttacatttcagcgcacaggttaacatgtgacgtcaacctggacactgtaaaggtgcaaaaacatctaagagaagtcatttgagatgcccaagtgatggtttgacacctgtttgtccttttatatattttggtgaagctggtcacacattcttagagatgttgttttacagaaacgaaagactcgaaacttctggctttcagatgagccaaaatttaagttgtgaattttattgctctgacatcatgaatcattgcacttgtggaaaacttgacgaacggtcgaaatgacatcagatttgggtaagaagaacccagtgactcagaccaaatgttgacctgggcgctggggcctttaaaccgaaccactgggattctatttttgatactttcaaggcttccaaggcttctgaacttgaggacgaggtccccccatttgtgaccatgctagattcaatggtcg

SEQ ID NO: 92814 - DNA, 534 bp, Cannabis sativa
aaagttttggccgcagctctaaataaaaccgttgtggctggaactgaaccaaatcctgttttctcaatttttcttggctcaacttgtcttttatcgtacttttgaaaccccaaacgtccacaactatgcgaaacctaaaaacatagaagacaagcgtaattcagtcctaaaacataaaaaaattactctatttatgacccaaaacataggctaaaaatagcctaacaaattcccccaaacttaatctttaatcgccatcgagtaaaactaaaaactaagacaaagaaacaacgacacaacagataactgggcctccaaatatttgaactaccactaccacctgtgcaacttcaatcaattggccaaaccataattttaattcagaaactctaggaattaactcggatgcacaagttagaaaaaattatgtatagatgcaaaacatttcaattggaaaaatatatcacaatcattctactcttaccaatgttccgccaaccaatgttcagtatgcttgcatgacctacctctctc

SEQ ID NO: 92815 - DNA, 1011 bp, Cannabis sativa
aaaaattgaaaaaaaaaaaagagtttttaagaggggtatttttgaggttttagaaaagtggtcatatattttcaatgtagaaaaatattagtttataaaaaaaaaaaattaggtatatataaatatagaaaatcaaatttcccacccaaaaaataagaggacttagaatttttggccacttgcaagtgagcatatattgacactcgtcatatacattgtttgttaggatctcatgtatatgtatgtgaaaatcacgttttgattttcaacctaaacaattaatcatctacgttaccttacccaaaaacaaaaacaatctcataataaactaacataacttggggtgttgtgttgtgttgtgtagcaattcctaactgaatctcatttatttaatataaataaaataaaaacaaaataccatcatttattatctatttggatttttgtcaccacacgacaaatcccaaatctgttaccaaaaaaaaaaaaacttcttcttctgtatctcaccacaatgctgatgacgtgtctctttttctttctcgtgtctcgtgtgatcttccatcgttattcgcacgtgccaaaaataggtaagcaaggaatctctgtctagtgatgaatggagaatgagaagtttttgggggcccacttgaataaagaaaagcccactaaggtcgttgatgggccctaatagctaatcgtcgtgacttgactactgttattgttgtagtagtaacggtactttcctcgataacaacaatattcgtttgggagccgtgatccttccgccacgtgtcatatctttgtcggaattatcgtctgtggtggatcccacgctacaccaccgaccatacatcactctagaacattgtaaacttatctaccaatttttcactacataactaaaatcaaatagaccacagtattgctatttatatctttttagatgtcttattttataatttttttataaaaaattaggttaattaggatttttgtcctctgaacttt

SEQ ID NO: 92816 - DNA, 563 bp, Cannabis sativa
ctcattgcatcaaaatcaatagccctctcggttagaaacttccctacaatgcaccaacgatcttccccactttggtctgaatcatcaaataagtcatatacagtatccccatcatcttctccttcaatcaatatgttagcatattgatcttccacatccttaatcaaagaacttgttgaagccatgacacatatacgaacacctctgtagtcaataaccagtagacgacaaaacgaaagacagaacactaaagagagaacaacacaaccatgtcaaaagacaagactactctgacaacttcaacttcaacattttttaaaaaacataaattggatatttcaaactgaaagaggagaaacacggtaaacattcataagcgagtatgggtatttggttaaagtaaaagcacaaagtgatatcatgtataatgatacaaatattattaataatgccaaaatagaaaaatagataacaaaacttacattacttaatcggagattgttgttataggcataaatttaccctcccgcgagaaagacttgtctatagagaactcgttgtat

SEQ ID NO: 92817 - DNA, 1141 bp, Cannabis sativa
aatatccatatatgtatcaaaagttcccatccatacaaatgttcgtatgaaaacttggagggaaaatgttatcctaaagcttgcacaactgacgtagtcctttcatgtggcatgttacaaccatctctttggcctagtagagaatcttcatgcatgaatatgcatggtaggtctatataaggggtaacatccataggatgttgatgtcccatgaagcatctggccggatgccagccaaataagatgggagtaacatcatgcaagaatgactctacaagctaacctcacaaagaaggcaagtatagagagattttaccgaatgactaacatacttgtcaaatcttccactgctaggaatatcggacagagatatgtgatccttgattttgtcttcaacaatcttcctcaaatatctacaatagaatcctttcggatgctaaaaatatatctaagaataaaagagattcaatagattgtaactgctccctagaaaatagggatatctattatttatttactccttttacggagccatatattaattttctcctataaatagtgaaagcattcacaaggggaggggaccgaaaactaagagctatactcgtacttgcatatttaagagcactttgttgaaagattttttttgtaaacactttgagagttgaagctagaaatcactttgtcttccttagtgatctgcctggtataatctcacaagtaatacaactaaaggggagtaggtcattacccacatacaagggagtcgaacctctataaatcatgtgttacttttatttatttgtttgtttataattctaacctccttaccagtgaataattaacatttattagactccgagtcatttggctatttccctagccgatagacaataatgtaaatgaaaaagtgcattaattgtgtgccaaatttgacataatactataacttttaacatgtacaagtttcaacgcacgaatggttttttttatcaaaatatttaaatggtatgctataagaagaataacatataactatctgtggaatagttcctctaaatataaagatctcaaaaaattattcctggaaagttattgactcgcagtagtaagtctgtaacatccccgcttcaagcctcca

SEQ ID NO: 92818 - DNA, 568 bp, Cannabis sativa
ggcagcatgttgcaataggcacatgtttagttgctagttggaaccttgttggaagattattaacacacactcggaataaaaaattaagcaccttcgggggaagtttaagcttccatagcctcttccaaagatcagtaggagagttagtaccaggcctagaaaaagttttctgttgcaatctgtaggcactttttacagagaaaaaaccattattttctttggcccaataccagctatcacccgtagacatagcagacaaaggaatctgccagatcaacctttggtctctatcattgaacatgtccaagataatctcattatcccactcaattttgtctacttccatcaatgaattgaccattttgttggttaggctcgggtgagaagattcaataaaaggattaacatcatccttaagccatggatccttaagaatgctaacccgtgagccatctccaaccagccttctcgcaccagcaaccaccaattcttgagattccaataaacttgtgacagtcagtagtctcgtgatccgtaaggggaaataccgggtaagctgtgcaatccc

SEQ ID NO: 92819 - DNA, 947 bp, Cannabis sativa
ttaaactatttagtcccatgatttacaagtgcactaaatttacacggatgtgataaccaacaatgtagttgtataagtggaatgccctttccagtgcattagagaagtaaacttgtatcagatgaatcgactatacatcggactagaccaatattaacagtggaaaagatattgttatcccaatatttgcccacctgacgtggcacctccacgtggccaaaagcagaagacacatgggagacaggtcagcactaaccggccaggttagtgtcgtgcaaccctttatctttcaagatcccaggtttgcaagatggactcgacaagaagagcatggagacttacacgatccacattttcaaggttttgaagtaagttcatcctgatatcagaatcactagcgaagacaaagatacacaaagcaatggcaagatcatggccgaacctctagctagctggccagggaagacaacccatgtaccaggaagcctccaaatatgactggccagcttaggaatgtcaaccgggccgggctgggccgggcccgacctgccacagacccggcccagcctgatatcactttagcctggcctggcccagcccgactccttcctttggcctagcgggtcaggcccgactcatattttttttattttttatttttaaaaatagtttatttattttatattctagtaaaactcttattgccatatattaagctatgcaatattgacaattaaaaagtatcggttacaatcaaatgattatgtggaaatataattgctgaagttaatctaattggttactctaagaaaagtttcagcaaaatgagatttaaatgttcaaattaatagcacgccagcaaaatagataatcaaaacatgaaacatagtttatatcgaaaatagattataaaacattatcgatatcagtaaaacaaataaaggagc

SEQ ID NO: 92820 - DNA, 655 bp, Cannabis sativa
caagatttaccttcctatattttcctatattttcgcctcctgtttatattcagctgaagtttgttatttagtttgttaggtagttaaattagttaagggcagtttagtaattacaggctaagttgttgatttgtttcttgctctgtttaatccttgtttatatacctctgtatcttttatctcaaataatacaagatttcatttttacccaaatgtgttttcatgttaatttttaacggtcaaaaaaattaggaacataatttggtacatgtcaaaatttagagggtaaaaatcctaattagcttatatatttttacaattaatgaaaaattcagtttacattttctatttgaaattatattttttttaaccaataaattaattaattaataatgaaaatactagaggtacttttcgctatattgattcttctttcactaaaatttgatttctagtactatatattgatgatatataacacttgggccaatgaaataacaatgttaatttcttgtactaattaacctatctatacaacaagataaagggtagttttaaaaattatttaaaaagtaagtatattttttaaaagattatttttttatttgggtcttgagtgggccttaaaaacaggcttaaattattttacgtaggg

SEQ ID NO: 92821 - DNA, 718 bp, Cannabis sativa
gaggccttaaccgtgtagtagaatttcaagttgtgcgaggaaaaactaattgaataatatgaaaagttttcttctttaagaaatggaaaccagtgtttgtagatttcaaaaaagttgtttattgtaatatcacttttggctttgcattttatgtagtttctttctcttttaatataattagtaaacaactagtttttccggatgtttaatttttttaaaattatattataaaataaattataaattttatttaatgataactaattaataaattattttaaaattccaatcttattaattgtaataatatgctaatttttttttttgaaaggaaaccgatacaggttaaaataacaaaagtaataaagttatgcaatagaggaggattttcttccatctataacagttcattgtctatcttaagggcatatagagatatcccaggaaaattagacaataaaactataatatcagaaaagaaagtctcaaaactgagagttgtcacttccgatccactagtacataataaatatttaataaaatgaaatttcccttacaaataaataaaataaaataaaatatgaaattttatataaatacacatataattctctgatataaaaactagagacgtgtttaatacacgatatttttgacccagtaaaagcgggaaaatcacagctaaatgattttcaaaatcatacactgcatttacatt

SEQ ID NO: 92822 - DNA, 633 bp, Cannabis sativa
gtctgaaagcatactcgcgtctgttgcgaactacaccacatctgcatctgtatggcgtgctctcgaacagaagtttgcctcccaaaccaaagcacgaagacttcaactgaaaggccaattctcacatgttcataaaggcggcttatccatctctgaatttcttgataaagttcaaaacatagctgactctctcgccattgcaggatctccagttgatgatcaagatttggttctacagatcctcaatggtcttggccctgaattcgattctgttgtctcaggaatcacttcaagaagcgatgtgttgtctgttgaagaagttcaggcacttcttctctcccatgaaagtcgcctcgaacaccatcatgccatgaatgaccttactgtcaaaatgcaagctaacatggctcttggacacaacagacctccaggtgctcgacctttttccaacaacaactccagcaacatgaacactgcctcccagggccgtaacagagttttttccagatcatctactcaaaaagtgatctgtcaagtctgcatgaggagtggacatactgcatctgtctgccattatcgttttgataaatcttggatcactcccaaaccaggtaatcccatgaatcgtgccta

SEQ ID NO: 92823 - DNA, 796 bp, Cannabis sativa
tccaatgctttttctttccctctctaagctttttgataagaaacacatgcactaagatcgtttatcatgtcatccactatgtcgtttggcctataccccttttttggattcatcagtttgttttttatgtaatcccttactacattgcttgttgcttgtcgatgatcaccagatataatgttcaaggaacaattatgtgcttcatcaaactttctaactttaaacatactagtttttccatataccgaagcacgaaaataccaatgacacttgtcatccaaacatcttaacacataatcttgtgttgagaagcgcttaactttatgatggtaattatttttcattgagtacatactcattgcattgacaagaacttgtttgctatcaaacacctgatcgacactaatagtatctgcacaaggatccgtaattattctataagcaattgctttatcttttttactcattctagcagcttcttcttctatgatgttgtctactatgctgctcgccattacacaccatgatggagattcaccacgtccttcatcattaatatcttgattttaatattaggaatggtgcctctaagcgattgatcatctgatagtatttctgtgcagttgactaataggggataaattgtttcatcttgatttttacgtctcaactcaatatagaaatgaaattccttatcatctcttatcttcattggcggtataccagattttacttggaattccataacaattttgcacggtgattggtatttcaaagcttcaaacaatgtcatttt

SEQ ID NO: 92824 - DNA, 1186 bp, Cannabis sativa
attaaatatataaattttgaaaatttagacttcgtatattattagtatcattataaaatacgggcgttacaactatactatactatattatatggtgtaatatcacgtactaaacgaactaatgtcaaattacatagtgtcattaccacttgttaaaaaaaaaaaattgcgacataaattttttatgtttttagttttatacacttaaatactatatacattttttcgacggattaaatataccttaagttacatttctattacttctgtcactactatgttaaatcttatttaaacaaggagtatttgcagtattaatatttgatgttttagatttcatacatttataaaccacatgttttttttttctaacggattatatacttaaagttacatttacaatactttcatcgcgtccgctgaatcctattagaagcagattatgttgacaatagtcaatatattattagtggtgtactcttatatatttctaataaaattaaatgctaaataatttttaaaacaaaaaaataactaaataataataaaattagaaaataacaatcacattctaagagaataagaagaggaaacaagaaaagatatatacttgtaaatagtgttttttattttttttattattttgttaattaattaaataaatattatttaattattttaaaattttaaaattatttaataaggctttttattgaaaaatacattttattcacatacaattatactgcccaatttactatttttttttttagatttttacagtatatattgaaatttttaatttttttttctcttttattactatggggcaaattttttttttttcaaaaatactgtatttttttcaaatgtgtattgtgttaagtttttactgttactccacggttgtttttagttattttactattatttttaattgttctattttgttattttacggttattttaagttattttaaaaaaagataatatttttgtaaaaaatttcgtgtgacagtaaaattataaacttttgcccaaaattcaatatttttataaaactctctctttttttaaggcataatattaacaattttattcactaaatacttatttacaccccaacttaatcaccgatatgcttaagattaagggattatttcacaaatacacaaaaacaacaaaa

SEQ ID NO: 92825 - DNA, 1008 bp, Cannabis sativa
agttcaaataaatgtattcacactttgtcccctaattttcaattccttcctccgtcggtaattgggaggaaggatttgaaccaaccgaggtcaactagaagggattgattcgatccccgcatgtaataaaataaaataaaagattaagagtgaaagattatacctttgtaaggaaaacaactttgggaggcttgaaaggataattataaggcattttgatggagacaaagaaaacaccaccttcaaatggggtatcacaaggacctataatggctccttgaaagtgaaaatagtcatgatcaaccactttgccatagctaatatgtgtaggtggattcaatttagtgtttctaatctcattttgtatcctatatttcacaaatgctttggatctttggatcttagtgattcttctaaacttttcatataaaacatttgaaagagaaaaatgaattggagaagaagaattattagggcaaggtggtttgccatggcttgagaaaaatctcattttcacaaaagaaaataaaagaaatgtgagtttatgaataattttcttaagagagagctaatgttaatataaggtattattataagagagtgaagtgattaagtgttgttatagccaaactttaaattctatagctttaggtttttgcgtgtgaattcttttaataagatgttatttgtctatttattaaacctttttaaagcataatttattttttattaaaaaaaaattagccataagaagaattgtttctttagctacccaaatatcatggatgttagtagggcattctaattcgtagtgcctatcaaactatgttcatactcaatatagaaaattttgtatacaaaaggtttaggctaaaagaagcataagaagcaaaatcgttgggtttttttaatttaaaaataaataaataaatacttaataaacttccttacccttcatcaattttcaaatttaataagcaaattttttttaaaaaaaataacaaatta

SEQ ID NO: 92826 - DNA, 635 bp, Cannabis sativa
tccattcatttgggtgaatttcatgtaaggattatgaataaaaaaactaaatcaaagcttacaatcccattaaacaaaatcccatctttttccttctaacatataaaatctccctacatttcaatgcaaaagaactaaacaagtaaaaatcattttaacaaattccttaagggattcaagcacacataatgatccataaccaaaccaacagcaattcaaatgaaacattatgtgaatcattacatgaatcacataagaaaccttttattcatataatcattatgaagataatctaactctccaataaatcattttgacaaacaccttctcttcaaaaaaaaaaggattatatgaatataaaaagttcctcaagtgatacaaacaatagtaattttaatgaaaatgtagcttttgggtaccaaaacaatagtaacatgcaaaaaaagaacattccacacaattgggtaatttccaaaatcaaaacattgatcataatcaatatcataatcattatacctgaaatagaaagatgcccatttgggttatttccaaaatgaaacaaatgggcattattatcaccatgcctaagaccattatattgaccccaaagagctccattcccaccaacttcttta

SEQ ID NO: 92827 - DNA, 634 bp, Cannabis sativa
  modified_base (413)..(415): a, c, t, g, unknown or other
aaaataatttccaacagttttcacttcaagtctaccgtgaaattttcacaagaaccatccaagcaaattttcttagactgaatccaaacgtcgatcagtgagtaagtttccaattccttctccatttactttgcacatttagtttctaagtgcgttcttaactttgctgtagaagatatgtagaaaaccctaggttgagaaactttgtgatttttctttacaatgatttgtgcgacttcatcattcatgatacttgccttttgattgcacaatttctgtctttcaccttgcttattcaaagcttcgtgaaatttggccctaaatcccaaaaatttcaaacttttggtttttgacttatcgtcaaatatttccattctttaatctgtttagtactcctggtcggcatatttgcnnntttattgttcgatatcccgaccaaactctcatctcgtagatgaaccctggtgagttttgcgcaaacaccgaattgaccaggatttgcttcaacttttgtacgaggataaccctcgtctttgttccagttcgccctcttcaagcgacggacattacaacttaatcttcctgtccagccaaaagatgatggctcgatcaaaatagacaatgcgtaaggtca

SEQ ID NO: 92828 - DNA, 1050 bp, Cannabis sativa
tcttaattacatgtggatgtgatttggattgtgtgccatctttttgttattagagctgaaattattttatatattatttttttattttacggtttattaagttatttcggtaatttttatataagttattatgtagatttgagttgcgatttaaattgcgatttaagttgtaattttagtttttatatgtgttgttatatagattttcaaaaaatacaaaaaaaaaatatattttaaaatataaaaataaaaaattattattttattattaatacaatatgctaagggccataagttgctaatttttagtaaaatattgctatagggcaccagtattacctaatgctatctattggtgacatttttcaaatggttattaatgacattttataataattattaaatttaataatgtcggagtcaatacttaaatgtaccaataacaatattatactttaaaatattggtgtcttttaacacttctattctcagtatataatttcttatttttatcttttataaatcttttttaacatatttattattaggcacaagtactagtagttcctaatatcaccgtcacatcacattttttacaaatatggttaataatattttataataattaattataaataaatcaaatcatcatataaaattagagatagaaattaatacagtgagaaattaggggagggaatccctcggcttaatggttaatagggtaatggtgtgaaacaatttcaatacccgaaacaagaatagaactggagtagggataatactattcacactatatgtaactttgatatagttttcttttatttttaatgtatatatagtataataaatatttgtgaaaatattagtttgatttaaatttaaaaagtttttcaattatttaaaattattacaatttttttattttactttaatgaatatctaatgagtttctcataagcaatagttattctcttatccaaattagacggggatggaaggcataaataaatagcaggaagaggaaggaaatttcattgtccgtacatt

SEQ ID NO: 92829 - DNA, 551 bp, Cannabis sativa
tcaagtggtttaaccgccaatatcaaaaaaaaaaaaaaataataacatactaagaaaatatttatttgctataatactttctacactataacaaataataatgattggattaatgaaagtggcaaagtatagcttatttatagtttgaatataaaaaaccacactatttctaaataatgtgggattttttaacaaagttagtagaatttttttcattagacaaaacttgaagctctcacaaaatagtaaaaatactatgaaaaaaatatgatatgtcacgtcatcacttttaaactcaactttatataaatatatatattgatgtgagattattaaagaaagtgagattagtgtctaattatgttttttttagcatattaacatgaaattcttactaaattgaaaaaatagaaagaaaaaattataaagagctacttatacttaggggtgttcatctgatccaattcgtacttttttggtcaaacaacattcaattcgcactaagtggagatttcatattttggatccaatccgatccgcataacagttta

SEQ ID NO: 92830 - DNA, 698 bp, Cannabis sativa
attgatttcttgtgaagaaaaccgaaaaaagactttcattttttataaaaggaaagtcgcacttgctgctctaaattctgtaagtacaaaaacagaaattcctaagataattgatgatcttttttagggaattgccttgtgagttgtggtcttgttcagaccgtgtatgaactgtcaataaagtgtatattgattataaatacatcttatagtaactaggtcatgtatctcttttatatactttaaattgtattcatatcttaagaaaaaagagtctttgttttgtaaagaagagtgtgttcatctcttacccggtttatatgtattttatattatcttgagtttgtactcaagtctgcaaaagaagaagaacaacaatgctaccttcgggagaatgttcaataagcttttgggatattacttttcaagtcttgcctcgagaagaaacaagcactcttcaaggagatcgaagggagttcgagcatttgaagtttcaacaaaattcgattaaaaggtggaatacattaagcttgcggcatacaataagatacagtcaatttatgcataattcaattactttatattttttaaatctatctaataaatattatctcccgtgaagtagtaacaatctacaaggattgttgatatcacgtacaaaaaccttattcatttttatttttctgcactgtttgttt

SEQ ID NO: 92831 - DNA, 811 bp, Cannabis sativa
atatgtctggttacgaaattagggtttgtttccagaggttggataacttatttatcaaattttgttgttgtgacataggacccaggattatcgagctttgtttcaactcaggtcgatgcgcacacctgattactggactaaggtaagaaagctaaatgcactaataagcatgttaagtgagaaacgattattattatttatgactcgattataatcgaggtaaaagatacagtcattaccgttagtatgaatgagtaattactcgcttaaaatcgtaaatatgttgcttacttattgattgctgtatcaggcatcaatagtgacatatatagcttgtaaatgacgggtggtagggatgctttatgaggcatcaagaacagtttgtcttattagagaaataatttttgtgtaatgcttgataatgtgctggatatgcgtatatgtgtgtatgataaaattgtacgctatacaatgttttattagctcgtggtgtaggtaaagggaaggataaagtggaccaaccatgagtcagaagtcttcaagcaatgtacatgtccaccgcggtgcctcggcttccaaatctgattttaatgcctcaaatatgttcatgacatgtctaattcatgttccagtataaagtttgactcatttgcactaagatggtcccaaaaataaaaactctagttggaatgtaaacttgggcgctaggtgaaatcctaggcgcctgggttgactttcggggtgttatttcgtgtattctaagcttctgagccttggacttggattattcatgtcttcatggtatataata

SEQ ID NO: 92832 - DNA, 852 bp, Cannabis sativa
tccattttacgatctccaagaataaagaaaggagtaaagagatagattttaggatgaagatgccatgaggacaaggagaaaagacatatggaagcaaaaggaaggagaatgggaagagttgaacaataaatgctctggccaaaataaaagcaatgggaaaggaaaatagtataaacctcagagtaatcaatgctctcattaatgaaagaaaaagagaaaatatggcgacagaataaagaagagaataaaccaccacaggaataatctgggtggatgaaatcctaaaaacatgtgattatttgacttcagagcattctcatcagtgtacttaaatgcattgaaccactcaaaaaataaagaaattatagaacaatgagctaaatatgtgccttgtgaggtgcttcaaaacttgatgcataatactataatgagaaatgctaaaaagctccaatggtgcctagcatcctcatacgtgttaatatcgctattggtctaattaagtatcggatcccatatagtttaatgtaataaatttaaaaagagtttcgctagccaattgcaatgcgacatgtcttgaaagtgctagacaccattggtgcccaataacaatactctactataatacctataaacaaaaatccattttttcctacatttgcaattggacaaactcaagcaacgggggcagctgtattccgagacacatctggagctattctcaacatcgccacgtttaaaacgaatcactgtgatcctctgttgagcgaggtctctgctgtctgtgaaggtgctgcagcagccgtcaaatttggctacaagaatatcatctttcagagtgactcgttgaatgca

SEQ ID NO: 92833 - DNA, 567 bp, Cannabis sativa
tgagtcggtatattcagttcaataggcagcattgctttcgagccaaatgctagcaagaagggattatatcccatcgctgtcttgtgggtagttgtgtgggcccagagtacttgaggtagctcgtcaacccattttcctttggcgacgtctaacttcttcctgatagtatcctttaaggttttattgacagcttccacttgttcatttgcctgaggcctggatactaacgagaggcttttgataattttgttcctctctcagaatttagtgaacaagtcgccatcgaattggattctattatcagatactatcttcatgggaattccaaacctagagataatgctcttgacgacaaagtcaaggactttcttgtaggttatggaaacaaggggctcggcctccatccatttagtgaagaatttgactgctactactgcatactcagctcctcctcacccagtgggtaatgccccaattatgtcaactccccatatagcagatgggtagggcgaggtcatcattgttatttccgttggcggcatgcgaggtatatgtgaaaactgttgg

SEQ ID NO: 92834 - DNA, 500 bp, Cannabis sativa
tatgtaccaatatgaatgttggattgaaaattgagaataagatgattatgttcataaattattcaagtgtttggcacatatgatttgtgggattagttctttctaatccttactgattcggtctgttagaatttcaagtgtcataagttagtctttggtcttttatgaagcacaactgttgtgaaagttcttgttcgggggatggagacggaacttcccgcgagattgagtgttcgatccgttaatcttgtgtttgaatctgtataaattgtgtgaacttttatgcttagttttgttgaattgtgttcttagtttttcaactctggtattctatgttgtttcatttgaggttctgaactagaagtatctttctttatttcctaaatgatatgagtcattatcttttattttgtaaagtaaacaacatataagtaaatcactaccccatacattaaaaaaaaatcttaggaacctagaaagattaatatcatttttagaaa

SEQ ID NO: 92835 - DNA, 638 bp, Cannabis sativa
aagaatattcattgctaagaattttattttgaactaagaattaatacaaaggagatttacattctcactttgtctttataaaagattctattatagtaaccttggcatttgttgctggtttcaatttattaattaattcaaaacagtgaactatagaggagaaggtatacagactactataaaaaatttcatctaatagtgaacatatgcaagcttaaagagtcaacctataggttaaaacaaattttttacaaatggcatttcatcttgtcaacttttcctttagttttaaaaaaagttataaattaattatatatcagaaggtcagtaagagtaatatttattttatatatagacaatatattacttgtaaatgatgataaaatttttctgcataaggtgaaataattcatgtctcaaattattattttgagataaagaatataaataattttaattaattagagagtagcaacaacttctctgattaaatatatgtattattcatctcatgttacttttatctttaagtgtgatgaatataactcaaaccaacatctaaaaaatgatctagaattagaataaattaagaatattcatttgcttctatttttagaagtctaatgtatgcctaagag

SEQ ID NO: 92836 - DNA, 684 bp, Cannabis sativa
ttcaccaacccaaaatctaagtactaacaccaaaacacaaccaatacaaacaccccactcaatttgaacaacccattaatcttcattaaataccaacacaatctctaataacacaagaactaaaactctaatcatatcctaatctctcactggaaatatcacgagaagtagtaccatctttggacataattcattctggacaaataaaatatcattaaattcccactacaaaaaatagtcaatgcatgttttcaatgagacaggttaatcatattatgacacgtaatttacatacaagtatattttaaggtttgtttcaccggtgtcatttttatcagttgggattatagttcaggttaaagttacctgtctctaggatataaatgtatgctcgttcgtgtatgcttcaggaaaaacaaagatggttcagaaagaaattgaatagcttttttggggattgtatcagagactagagattgagtattgaaagtgtagagatgatgtaagtttacctaaaaaaaaagaagaagaagctttgcttttctggggattgtatcgtagagtagagattgagttgataagagatcgagaactgagaagaaattagaaattgagatttttttaaggatttaggtttttttttaatatttgaaaccgggccgggtcgggccagaagcccgataa

SEQ ID NO: 92837 - DNA, 583 bp, Cannabis sativa
gtgatgttgagggaacctctaccttagttgagatctcttcttcatcatcactctcatcttcaccatgatagtcaatttgaatagtcttttcaggatcttccagtatctcatgctccaccttagaaagagtatttgggctttcattctctttcactaaggtagtctatcttagcataacagactcatcaaatgtgacatctcggcttaagctgatcttttttgatttattagaccaaagtcaaaaaccttttactccacaatcaaagcccaagaaaataaatttctttgctctaggatccattttgaattctttgacatggaaatatgcaggacaccaaatattcgtaaggaatcataattacaaacaggttttccagaccatacctctttaggtattttcccatcttgtgcatttgtacggagtttgttgacgatatgggttgcatatgacaaattctcgacccaaaatgtttttctcaatttggattgagatagcatacatcaaactttctcaaccaaagtatagttcattcattcttccatgccattttgttgcggcgcacggcgcacggggtactgaaaa

SEQ ID NO: 92838 - DNA, 920 bp, Cannabis sativa
ggatagcaaatctttgaagatagaaagcttgaggtatggtttgattttgttttaagttaaaaacgattggttttatatactgactttgtgattaagagtggttatggagattctgacttcgtagaattgttctttggtagctatgggactagtttcaatgtttacttgttgaatttgagatgattttgagatagaaatcgagtttgaaactttttaaagcttagtttgaacgttaatggaatttttcatttaagggctcgattttaatttctgttcataagtatgataatatttatggtatatatgtgtcttgtgaagtttggagtgacttggataagttttagtagtgtttcagtgagtgggaaatttgggattttcgagtatcaccgtttttagaaattcttaggagatcagaaattgtatttttgtcataactttttactcgggtgtctgttttggatgttttatatattgtttcgaagtttgtgacgagctctataatatggtatatattttacagccaaaatataagtttatttcagtgtatttatagcgcagggtttggtagaaaatcctatattatcttatgtaaatattaagcagtgttttaggataaacacttattggtttgctgttattgtgacatagggttgagatcatcggggatagttctccacttatgttggccgacatgtatgaacctgaattaaaggtaagaaaagtatattgtattgcatagtacattgtattgtaatacaattagtattgttatgaattgattaatattgagttatggttattatttttatataatgaaacgatttattgattaagtaatgataatgtgatgataccatgtaatgaccgctttagtaatttggattagtaaaggcaattaagatcggaagagcgtcgtgtag

SEQ ID NO: 92839 - DNA, 1311 bp, Cannabis sativa
gctcttctttagcctgtctataaacaacctgaatatcacaggatccctttttgttgatctctttcaggataggttttagggcctttagtttactgatcagctgaaatatcttggcccctctgatttccttgttccacacctcagtaacctttgctaaataatcaagatgtgaagaccacatcctgaaatatttgacaggtttctttccactactccacctggggtacaaagataagatacctagagtatgatcaaagacccctttattaacaaacattgcctcaacattaggataattgtcaagcaattcttgatttgccaaaatcctatcaatttttcagtaaattttatcctttcgttgctgcttattagaccaggtaaggtaacaactagtcgctcttacatcttcaagttgaaaattttgattacaatttgtgaaatctgtatccacgtgatattttactctatgccccaccctttcttctttagttaaaattgcattgaaatctcccataatgagccattttccatttgttgccaatgagaaaagatcagcccacagctcttttcttccttcgctgtcattttctccatatactacagttagacaacaattaaaccttccatatgctgtagcaattttcaaatgcattaaatgacaagtgcacttgagaatgtctacaacaaattttaatggattccatgcaataacaatcttccctacttgattccaagctatctttgtcgagaagcaccaccccttaaacacgatgaggtccatggttccaagcttatgaactttgaccctagttttgagaagcccaacaaagccagcattttgtgttttgataaactgcttgatcagctgctatttttgttgactgttagctcctcaaacattccacactatgattttatccatggcaaagagagggttcccccctccatcttgtgtcgccatattcatcagtaaccagttcctgtacataatcttcaagttcatactcttcattcttagtatctcaaaaccattttctagtttagtcctagatggctacccttactctcaaaccttttttacccttgctaactgcctgaaagccttcttcatctattactggtttttgtttcctcttatcctctttaacaatctattcttgcttggccttagtattcttcttccattccttagtgacatgccccataccaaagcaattcgagcaaataataggtttccattcataatggatgcctacatgtgtgtgttgggttttgtgccctaaatagaacccatttcaatataatcagatt

SEQ ID NO: 92840 - DNA, 601 bp, Cannabis sativa
ttaattataattaaatatttctaaaaaatgattgtctactatttaattaattattttaataaaatagttaattataattaattaaatttaaaaaataaaagtctacttattagtaactaaagaaaaatataactatagttacaataaaaatgtaaccattgaatagtatatataaatagatatattgataatttctattgttttctagcaagcagcttgttttgtttgttttggtttctttccactcgtttcccgaagactgaaagaaatataaaacggcatattctgtagatcagtatcgttgctttgtcaacagaacttttctttgatacctaacctaaggtacgttaattgaaatttattgttctccattaatatatacttttgtgtgaggttaatgttcacgaaaaaaggttgaattaaagcatacacatgtacaagtgacgcagaaaatgggagttaaagatattgaaagtcatggagtcaccgaagtgtcaatagaagatacagatgagaacgatagtggaacaatagtggaagaaaagtcaatcgacgttacggatttggaagaaacgtcggatcagttgcgttatcggccttt

SEQ ID NO: 92841 - DNA, 752 bp, Cannabis sativa
tttcttcgccgatgacagctttgtgtttcttgaagctaccccaaccgaatgtagaagtatgaaagccatattagaagaatactcctccctatctggacaacaaatcaaccttcaaaaatcggagttgtgcgttggaagaaagatcaatcaaaccgatggaactacgctcgcggctgaccttggggttaaattggtggactgcctcaccaaatatctcggcttaccagcaactgttggaagaagaaagaaagaagtgtttgagtccattcggtccaagattcgggataaactccaaggttggaaagctagcttattttcccaagcaggaagggaagttcttctcaaagcgataattcaagcaattccaacttatgtcatgagttgcttccgccttccaaaggaactcgtcaaagacatccatgctatgatggccagattttggtggggatcttcggagtcaaaaaacacaattcattggggaagatgggaaaagctttgcaagccaaaggataaaggaggaatggggttcaaagatctagagaagttcaatcaatctttattagctaagcaagggtggaagatcatcaattatcctagttcgttgctggctcgtgttcttaaggcttgctatttcaccaactctactttcttggaagctaaacttggaggatttagctccttcatgtggagaagtatattatggggcaggaaaataattgaaaagggagttagatggagggttcaatcgggta

SEQ ID NO: 92842 - DNA, 630 bp, Cannabis sativa
ttgtattgttaaaactttattagatttaattttgaatttttattataatatttaataataatgatagtgtaaactgctcaaatcgcaccgcacaacaccatatttttgcaatatggtttttacaattttaagatctcgcagtacggttagggtttgagaaaatacaaaaaccacatatgcgggttggttttaaaaaaaaattataacccgcaccgtcaatacccttaatatatatatatatatatatatataatgtaaaaaatgagtgcttggggggttcgagtttatgggagtatgaatgtgaaactaaacctatgtttggtacaattttagcaaaaaacttataatttcgatactataaattatttaatttttttaaaaaaatacataatatattaaataattaaaatgcattccatcataaacaaaataaaattattttaagtgcgaaaaatatgatagggatatatattatgcaaccaattcttttggtgtatttaaagtttctagggataattttaatcttacaaatgattaataattttttataataattattaaataaaattatatgaaattcaataattgtataaatagtagtataaaatattataataatattaaatatta

SEQ ID NO: 92843 - DNA, 622 bp, Cannabis sativa
aaaaaattagtgctcagtattcctctaaattctgcagcaaacagtgatggttggtactggtttaaagacaaaaatggtttgtacacagtcaaaagtgggtatcattgccttcaagaattgaaaggggaatggtctcaagatagcaacttgggtttttggagagctttatggcaactcaagttaccccctaaagtcaagaactttctgtggagaacatgctcgaggtgtctgcctacttgttcacagcttcgaataaggcatgtacagcttgatactcgatgtccatggtgtaatttgactgcagaaacctctcttcacttgtttgttcattgttctgttgcaaaggcttgctgaagtaatgtgggaatatcaggtctggactcaaccgaagccacatttgcagcttggttccaagcaggtattgctaactgggatgctgcaacaaaaattgaagtatccatgatatgttggtccctttggaagtaaagaaatgataaagtgtggaatgcaaagtcacctttggttgaagaaattgtaacatcagcaaaactcaccttagctaacttgataaatgctcaaaaccggtttcaaactacttctataagtcataacagggtagata

SEQ ID NO: 92844 - DNA, 622 bp, Cannabis sativa
gtgtcatcttcttaatcactgtttgcattctctcatctcactcttattacttttctggtatttgtatttgtgtgtgcattgagtgttcttgctatttttgggttgtgtttttcggtttgggctttggccgtgaggttgtgttttggccgtgaggttgtgacacttttctgggttcgggtttgagtgagtggagccatgagtgagtgagtttttggggttgttcttgtttcgggtagtagctgcaaagaaagaaagaaaatattagaataacccataaaactcttgctgccattagaataagaaaaaaaaagaaaaagctttaagaaaaatagtacctttaagaaccatatttcattgctgccatttagaagagaacaaagaaaatcttagaaccctaaccctagaacttaagtgcggctgtaaagagaagaagaagagaaataaactctaaccctagaaaatcctagctgccatttgtgttgaagaaaagaagaagagaagaaataaaaccctaaccctaagtatttctgctactgccgttagagagatagagagaaaaaggtttgaaagaatttgaattcttttgaaagaataatgactgccgtaggttgagtgttagggt

SEQ ID NO: 92845 - DNA, 637 bp, Cannabis sativa
  modified_base (197)..(212): a, c, t, g, unknown or other
gtaacatgtttgtcttgcttcatttcattggatgttttccttatttagctatgtcacatttataaccgtcgcagctttcttaacaaataatcaaactactcttcctctctctctataccatagaaaaattctacaatacattcccttaaaataggtgtactgatgcaatccctaactgtttcggtatctataagaannnnnnnnnnnnnnnnttttcatagtcgtgtacgttatagttattcaagacatcctgcaaaattttaagaaattcggaaaaatttaacacgtcgaaaacagtgttcaaagagtttgttgcacgcgtgacttttttattttatacgtgtgaaatagacggtttaaacattaatttttatattgtaaatcattccaaatttctcaaaattttgcaagatatcttaaataattataatgtacacgactatgaaaaaatttagactaaaaaattcttatagataccgaaacagttaggggttgtatcagtacacccattttaatggagtgtattgtaaaagcaccctataccatatagggagattctataatgcacccccttaaactgaatgtactgatgcacccttaacttgtttcggcatctagaagaattttttagtctaat

SEQ ID NO: 92846 - DNA, 716 bp, Cannabis sativa
ccatgaacaaattttatttgacaactagtgaatctttcacgtgctacacaggtggagtaaaatattcatgatcttgtaaatattgagaaaaaatattactcatactcaacactattacaaaataatagatattatatcactattactataattaaatattaactttcactctaaactatttgtaaggcgaagactatctctacttaaaaatatatatatataaatatataaaaaataaaccctaaaagataattgtacaatatacatctctattgtattttcaatagataaataattattattccattatttttttaagacaagtcacactttaattatttagcttctatatatatttcattctaaataattttaacattaaaaacatagtattgttgcaattatacttgtttttaatattctgtaaaataagttatttaaatcttattcttaaaatataaattactctaattttttttttaaaaaaatagttacataatattttaaatgagtacacaatataaatcaaaattcataaaaataaaatcatatctatataaatattatggatacgcgttttagaccctatatatcactctgtatatatatacataaaatctaattatataaattggaaaattttgtggtgcacctacatagaccctaattatatatagaagaattttttggtccacctaaaaataaaaaattacatt

SEQ ID NO: 92847 - DNA, 1446 bp, Cannabis sativa
cttaaataactataatatatacaaccataaaaaaattggactaaataattttttaaataccgaaatagataagggtgcatcgatacacccattttaagggagtgtattgtagaattttacaatatttttattataatttaataactatataccaaaatagcaaaatagcccataagtaattttttgtagcaattaaaccttctaaaattaaataaatttattaagaatgattatatttttcgtttaaagtaagcacacatatattttataataattattacttaaaaaagatattttataataattaagcttccacaaactaatttttttggaaccctcactggcgagaaggcacttataagagatgcgctagcaatatgtgcacttctggcaaagagaatggccctatttgagggacaggtgaggagactatggagcacctttttcttcactgcaacttagctttccatttgtggagatctcccccttgggtgtttggccggtttctggttctggtagtcgtatgtgggattggattaattttctttggggccttacatcaaacggtgttaatgttaatgaggtgttcctctatgcctcgatagtggtggatacaatttggtgtgcttgaaatgataaggtacatgacaatagtctgaatagcattaaacattctattgactctatcactcattgctatgcaaattatgactcttgtttgctcccttctcctcaagctgtggttgttcacatgtggtctcccccacctgaagactggatcaagattaactgtgatgttaaaatagggagtgagactaagtgtgtggtgactttggctagagatcatctaggaacaattttgtgggttactactgagaggctcgacttcgttgatcctcttattgatgaagttgcagctttgcttactagccattgaaacaacagtttctttgaagcacccttttgtgatgaatgagagcgattctaagacaattattaattccttgaaggagatctcttctgtttggagtattgttaactacttgcatcattgtaatagactctctaatttattttcgggttgtaactttttttttatttctagaccttataattttgcggtccataatgtggttaaatagatttttgctcaaaacttaactagtatggtagagatatctactgtaccaacgaacatcatttgtaatgattgggagatttaagttttttttttaccatagacgcttcttttttaaaaaaaattaattacattgcttatgtataagtaagctgtgatatttataataaatttagtaactactaaattataattctataatatatttttgataattagacaaatactattttttttaaaacattgattacattttgattaattggataattagataattagataaatgctacttaaatctttttttt

SEQ ID NO: 92848 - DNA, 877 bp, Cannabis sativa
ctttccaagaggcggccttacccaacaaacactgctaccaacaacagtagcatcaaacaacagcggttcaaacctgttctcttgagccaacaaccaattaaaaagacacgaccttgccactcgaaccacatccgcagcctgagaagaacgaccctgccaaagaagctcatttcgagcttttcaaataccccagatattattatactttttaagatggatattattagtcaacaatacgcagtaatgtaaaaatactacaggttaaccgtacatagtatgtgaagataatacttcttatgtcgatcgaatattatatgtcaaaccatacgtacgtaaattaagatcaattatatacttcttatgatgaatattattagtcaacaatacgtagtatgtacagataatactttttaataagcggaattcaataagttaaccgtacgtatagtatgtgaagataatacttcttatgtcgatcgaattaatattatagctcaaactttacatacatataaattaagatcaattatatatacttcttaagaattattagttaataatacgtagtatgtaaggataatatttcttaataacctgaatactacaaattaataaccggatgtagtacatagtgtacatgaagataatacttcttatgtccaatattaggtcaaattgtatgcacgtaaagatcaattatacttcttaaaatgaatatatattaattattagtatgtataaataatacttcttaagctgaatattctaggtcaactcagggacggagctatggggtcccaaatattaatttttttttctttttcaatttttagttatatataattttgtaatctttttattaaaaatttatttaata

SEQ ID NO: 92849 - DNA, 768 bp, Cannabis sativa
aaaataaaaaaaaaaaaaaaaatatacaaaaagcaaaaaaaaaaaaaaaaacaacaacaaaataacaagagtataacttaaaaatacattaaaaaactgtattttatataaataaaatcttaaaatggtaaaatatttaaaatttatataatcgtatttttgtaaaaaaaactttttttgttatttttgtgtattttcaaaacaatccccaaataaattggcaaacataatgagtgtatatttcaaaaaaataaataaattttgttcggtgtgttcctcccctaatttatggaccctataatttaaataatgttgggctcggcctatctcctaggccttggaccaagagcacaagtccaaaagaaattacatgattaaggggtgaggttaaaaataccacttttattaatcaattaattaaatttacctctaattttatatttaattgaaacatacttctttttaaatatattgtacccaaaataccctgacataagagagtcacatatagagtatgttaaagtgacggaggcaaaaattggtataatgttaatataaaaagggtatacaatataatttcctctaaaaagaaataattatttcaaatatctaaaaacaataaaaaatttatatttttacagaatattgtctttgttttttggaattttttttccttataaacagttacagttggttttaagttgttcaaaaaaaaatattatttacacattattttcaccaaacagaaatatagtataatattgctac

SEQ ID NO: 92850 - DNA, 554 bp, Cannabis sativa
ttagaatattctatacatattctctactattttaagttaattaaagttttgagaaattatttttaatttattttttttttatttttatgatttaagttagtttggtggttactttgataatttttatatgagctgttgtataaatttagattgtaatttagaatggtgttccgttagttgttatgtgaattttcgtaaaaatacaaaaaaaaaaaataatataaaaaaaaaactcttaggagttttgacctttgaactttaacatctacctaatcatgttcctaaatctttttggtcgttaaaattttgtcttaaactattgaaattgttgaatttcaggatatttgtcgagttttattctattttactaattttatgattgttcatgtactaaattatccaaactgactaatttattgagtaggttgaaattttatattttcttaattgagtgggatagacttagatttttgtgacccatctttatgttgggttgaataaaatataacgtaaaccgatcaaactaactgacgtacacccaaccacaaaccctc

SEQ ID NO: 92851 - DNA, 1467 bp, Cannabis sativa
gagtggaaaattggttgttcatttgacctctcaagttgttgaaattggaagtcatggaggtggtaaggttagcaaaagcttcttcaaggttgaagtgaggagcttggggtagtggaggcacttcctcttcggcttcctcttcactttgagcttggacttcttactcttccccttcactttcacttgggaccaaatgtgcttcctcatgggcatgtgacattggtttggtgggaatccacttcttttcctcttcattgaatttgtagcgcatagatttgaatgtgatcttaccagagtgtcggaatccttgggttcataaacatcagtttcatcttctattgggattcctagaagtgggaataagtagctaaggagataaccatagggtaatgccctttttagggaaggtttaaacacttcacttatggttttaaggatgagataacctatgttaattttgttatcaaacactataagattgtataggagcacttaatcaagggcacttaatttatcttgatggcctttcctaggaacaagattagagcataaaaaggcatggacaattttcccttgaagggtgaggtaggttctttttggttttaacctaaagatgttacctacacacatgattattgaaaaggttaaaattgaaagaagcatcatttgtaaggcgaggtctatggtcaagcaagaggccttctttaggtgcagtaaggagatcattaagcgagtctatagttaactcaattggtaccccttttagaattttatatggatcacaactaacctcaatgcaagcatagaaagctccaactaacctaggatatatatttttttgaatttctaacaatgtttctcatcccatatattcaaaaagaaaattaaaattgacatactcaagggcttggagatcacattgcttaccattgatgacatccctttgtgagaaatcttctttgaactttcttgcatattttccatgtgagaagagctcatgctttgccttagttctttgctccctttgttgcattgacactctttgcctttttggtcttgaagaagaggcatccatggtggtatgaggttgaagagaataagaaaattaggtttagagagtgagaatttgagagaaaaagggtttgaggctctatttagggttaaagtatctgaatgggaagtgagaaagtcagtagtggggtttttatagcaaaaaaatcaattttaaaaagaatgaaacagccttggaatcgtgacctatgaggaaactggttaagcggttaactggtttctacagcaggtagattccccgaaaaggctctaaaacccgttttatccaatcgtttgaccccaaattttcttaacacctcatatatgataaagcaaaattgctcaaacaagaaaaactaaaaaatgatgaaaaatgacgatttacggtaagcttttcgaaaattgccaagaaaacta

SEQ ID NO: 92852 - DNA, 720 bp, Cannabis sativa
tgtggtcaatccattctatatgatcctttttttgtgatcccaagctccttgaaaactattacaacactaaacatactcttggtaaagatttttttttatcatattaagtaaactctttataaactgttttttgtttttttaattttgtaattttgttttatactttgtgactaataatttcactttttttgtttaagaaaatatataacttttattgtggcgagatgaatttagtgctttatattttttttcctcaaacattaagattctttttattaattatttactatttcttctttatttttattttcttaataaatgaaaaattgtattgctacaaatttcatttataaactagacaacacaagtaaagaaggatggtttgagttgtttagctactgctataatgtacatgacatatactattttaatttagtgatttaaaatatttttttaaaaaatattgttttattttacaatattcacttttttttaattcattgtttgatttttttttatcaaaaatcataaacaaaatatcaagttcataaatttatatatatatataaatataaattattatttattctgatttttttaatatttttgacattgttatctaatatctcacaatatctattgttgcaacaaataactatagagatttttgtatattatttacataatttcttaaacttttaaatttaaaaaaaaaattaa

SEQ ID NO: 92853 - DNA, 694 bp, Cannabis sativa
tccttttagggctttgagataaaacgtttgactattgggttcgttggcaaactatgggccaaagcccaaattagttttagggctccttttagggctttgagataaaaggtttggctattgtgttcgttggcgaactgtgggctaaagcccaaattacttttaaataaaagtaccaatttttatttgtgttttttcaaaaaaaacaaaatcacatatttttcctaaatttactttccatgttttttattaatcattaaaactataacttttctatttaatttagttggtataacaaatattgtgtaaatagccaattaagtccaaacacatacagatttattacattttattaaaagtaatcagggttactaactaacattttgattaggggtgcacatcagttgggttttaacgggtttcaaattttcgagtttcggttttgaaattttgggactgaactcagccgtatgaaatctagattttcgggtccaggtgggttgggacgggtcgggtttcaggttaagctaggctcttatttttttttaaaatatcattttttcaataaaaaaactacaaaataatacaattatacaatatatcttcattatatatacatattacataaactaacacattaacaatttaacacacactcacaaatttacaattaaaaaattaacatatatataatata

SEQ ID NO: 92854 - DNA, 813 bp, Cannabis sativa
gtatgagaaaatgataatatgtttctttgcacatattttgtaattaattaatatgatgtatacaaaattgtaaaatgcccaaaaataaataggaaaacttatctactttcctaaatcaaaagaaataaaaaaggaaaattaggaaggtttcctcctcttttttattggtgcgaatctatcacacaaaatcagggatgtgattgaagtttaaacgcttgaaatttatagaagtatttctgaagatattccagtcgcatttcccctggccagtgtatgcgagcttactgcgaagttgatgatggtcggatggtgtaatataccatattcagatatttcagtttattcttcaaatgagttatttgcgaatgataattgacttggacgacacctcatggagcgtaccgtccatcagatcataaaatggtccccacgtgtcatccaagtaaatgccacatcaccttgtgcataatataggatatcaggtttatttgttaattagtacactttgtgggtctaattaataaatatatttaaattatcgtttatttaataattattaaaataaaattagtatttaaataattagatgcgataagtagtaaaattagaaacgatactttagtttcattagttaaaataaagtggaaaaaatctaactctaaagctcatatatattcggtcctgagagaaagattcagcccaagtctttattttaagctcatctcatctaaacctaaccctaagtgaatgcttaggggtgttcatccgatccaatccgcactttttttctcaaacaacatccaatctgcacta

SEQ ID NO: 92855 - DNA, 522 bp, Cannabis sativa
gctgtatatttatttatttggctagctgaaattatttttgtaatattgttacttttttttggttaaaactgaaaaaagtcatttttttcaaagtttttagccgccacttgatttttttgcttgaacacggctcacgggctgtttttcggccgtaatggttctagtcaggtgatcttattgattcccacactattttcgatttcacagtggttgtcgctatcattctacctgagtgttcttttctttttcatcttctttcttcaaaggtatgtcttgaaaatttgacttgctatcattctacctgagtgttcttttcttttccatcttctttcttcagaggtgtgtcttgaagatttgacttgctcattggctttgaattagatctttactggtgttaatcctcttagtgtgtgtgtgttttttttatttgcaatattttgtttttttatgtttattttaattttcaatataaaggtgttgctacatcattttactattgttaaggtagtattcatgacagtg

SEQ ID NO: 92856 - DNA, 686 bp, Cannabis sativa
gaatgcaagtgattctcaactaactaacacttgttttttttcacagcgaagtttgaatttaagaataattaagttttatttatttttattttttcttttgattaaaaataagggaatgtgttgtacatcacttctctactcattcggttattttgacaatctaagtatcatgtttgagttataggaacattatacatcggtctctattaattgagtaatcggtaatcatcttaaaagttttcatcacacaaatgataccgcctataatacttagcatttagagagtcaagtctttgttaatcccttcacgagacattgtggtagattttgaacccttgacacaagcaaagaagaatagcagtaaaagcaatccctaccactacaccacacaacacaacctctggtaagaataattaagttatgttaagtttgcttagcaaaatataaaatgttacgttaaaatatataacgactggaggtttcatcttggctggttttaataagattatccttaatttttacattatttacttcaagaatattttggagtacatgtgttttgggtctgaatttgatggcaaaaatttgaggacaaacttattttaaggattttatgattgtgatttttggaacacgttgggacatatttataattaataatatcctaattcttttttttaaaaaaa

SEQ ID NO: 92857 - DNA, 730 bp, Cannabis sativa
  modified_base (172)..(176): a, c, t, g, unknown or other
taaaactcaattcatggatataaactaagaccatctttaatggaagatataaaagttgaactatattttataagaattgctaaaaaatatcagtagtacataacaccctcctacgtgtcaacatcgctattggtctaactaagtatcgagcctcatataatttaatataatnnnnnttaaggagtatcgctagccaatcgtaagatgacaagtctagaggtgctaggcaccactggtgcctaatagcaatgatcatattttgtacaaaaagcaatttcgtgatatttttacatcaatttttactattgtactctaatacataattataaatcttgatgcaaaatttaatatattatttaatgctcacttaataatttattaaaaatataaaataataatattgtaaagttaaatttaaaatttaataataataataatgcaagtcatttaatacaaaagagtatattagctaaaatttaataataaaatattaaaaatagcataatggtaaatataaaagcatagcatttattgtcatgcaaaatttgcatcatgctatattgtgatgcaaattcggatcacttttgattatgtgatatttttgcatcataatttagcacatcattagagtatacttttgacaaattgagctatattttgcatttgcatctctattgtagatgctctaaggagcctaatgaaaagctttctagcaagtctaaatacttga

SEQ ID NO: 92858 - DNA, 732 bp, Cannabis sativa
agatgttataattcttttattactcataaaaatatgtaataataagattcaatttcaccaataatatattacatataattataaatatataaatatagatttaaataatatctttattgattcaaggagaagaagaacatgaataacagaatcgtaccttaattcataaatagtgatgattttaatctatcttaatagaaataatctttgtggtaattttgagtaatgattttctaaaaaaaacaagacttagaatttttaaattttctctcttgatgagagaagatgagaatataattgctcttttttcttaaggacaactatcattatataaccttaaaggttattaattttagtatttataatttagtttttcaataaattagaaatatcccttaagatatttattcatttagcccatgatactttaatacttaatgacctataattactaaaacgaccactttatttgggttaaactttatatagcaatacacacgaatacatatgagctcacattatagatttcaatccaacaatctcccacttgagctatatatcttttcttatagtgtgtaactttataagcgcttaattttcctatcataattataggtattttcaaataatctcgtccattgattatactaagatatgatcagggccggcccaagcattttgggggccttgtgcgaaatttttaaatttggccttttagaaaaaaaaaaaaaa

SEQ ID NO: 92859 - DNA, 602 bp, Cannabis sativa
gagagaaactaagaatagaattgcttttgtttcgtaaggactactaccattatataatctcatacctaggttattaattttaaatatttctaatttagtccctcaataaattaaaaatatcactcaaagtatttatacatttcaactatgatactttaatattcatatcccacaattattaaaataatcactttatttgtgttcacattagcacacattaaagattttacaagattttaatccagtactagttgtattccattctagagaaatctagattaaagtccgtggtgattttaacaagaacgacaacggtatttttccccataaactagtagctggttaccacttacaacggagaaaactggtaaccatatactatatagtatatatgaggtgattgttagtctcattcttatatttgtttttattttgcgttacatatctatcgatctaaacctatatcatccatttcatttatttatttatttgggctgacatcagaagtggttgccatctttctacggtttcgtatgtacgttgaatgccttatttttttttttcttcggaaggttcagtgatatgaaaatgtgagatttttg

SEQ ID NO: 92860 - DNA, 783 bp, Cannabis sativa
caattagctcaaaaacaccttcttaatggaaatttatcccaattaatcactttcaacaccaatccaatcaaacagcccctaacttcaatcaaattacactcaaacaagtttcaattcaaccctaagaaacaaccttaacctcaatttataccccagctcagaattcattaaaacttttaccaaaacctaaactaaactcaagaaaaaaaatcaaggaaagagtagaaagatcatacctccacttagctaacttctagggttaagattagctcagaaattgataaaatggagtgaatttttccttggttcccagctgcttctagggttcggcaggaggagaagaaaaagaagcttgaagtgttatgaaattttcttgttttcttgccttggaagtaaccttaaatagggtttgcttcatttcttttttttttatatatttatatatataatcagtctaaaattaaaaggaggataaaacctaaaagcaaaatgactaatctaccgccaatgaaaaaaaaaactttaaaataacctaggggcattaatggtaatttgactaatccgttaaaccgatactttaaaattttctacgtagttcggaaaaacactcaaaataattttccattaacgtcgtgacattattaaccacatcgctaaatttccacaatggcagagcctgaaaaaaaatattttatttcaaaggtggtatcctcggtacccacatatccaaatataatctctgtaattaataaattacgctatttattttattgagtaaattct

SEQ ID NO: 92861 - DNA, 2728 bp, Cannabis sativa
  modified_base (2700)..(2703): a, c, t, g, unknown or other
ataactattttgtgggggttttttactattttgttgtataattatttaactaaatagaagatatttaatttttttttacactatttttttataactatttttttttttacacacttataactgtgtccgtctctgtttataattataaactaaattagacgcattagagaaatataataggatatttttttatggaaataataggatattacttacttgaagtgctaaggtgcaatgcggctgaatgtcttgaaatcttgaattaaagagcaaaaaccagaaatggcaacagttctttattcaatataattgcaattcgactagggaaattgcatgcatgcatgaatgattcaagccattaatctttactttcttgaagaaaataattgtgaagaatgttaaacttatatttacatgatgatgcaaatttcaatatcgtaggtttaattaatttgcactaacgaaatgtaacatgcacacatgtgggtgcttccatattttgcacaaaatttatcctttcaagaaatttggagccttaattacatttgactttccgaacatgtagaggttttattacaattaattgacttcacttgtttcttatctttaatttatggattctttccttgatttggtcgggttcttgtttgctgtatatataatttccctagttttgtaccggccttagtacgtatgattaatgcatagtatagtttcacgtgggcacacaatagaataattaagacagaagagagatcaaaagaatccttcagttcactttgcctctgttttctttccaagcatgttacaacggaacaactctaataatcacattaattatcatttttcaatgaattttgatatcctcataactttgtagtttatattccaaatcatgaatgaatacggtaaatatatatataaattaattaaaatatcggttaagctgctactaattttaataaaaggaaacaaatttgagattttgtttgtgtacattaatgaggtatttaaatttggcatcttagacaaagttccaaaagtgagtcaaaattttgccttatgatttaagtaacgtataaaaattagctgtagcctcatcttttatttataaagcacaaaacttgtccttgaattttgcttcaccacaatattacaaagttggctaattgtcggtgctgaactctgaatttggaaatagttgattgaaacttaaaactctctgaagaacaatgtcatccgcattactaaggattgtactattaactctgctcattttcacactgacccctcaaagatcaggtaaactcatcatgaccctagatatagtttaatatcaaatctttactttttacataaatatctggtacttttgacactcacacaaatgcactattgtactttcttaatgtgaaataaatctttgcttgggtgatgaaaacgaaagatgggcagccggggatggagttggtggaatggtgcatagcagatccacagaccccagatgatgagttacaaaaggctattgattgggcttgcaatcagggtggtgctgattgcagtaaaatacaagcaaatcaaccatgttacttacccaacactgtcaaggaccatgcctcttatgtattcaacgactattatcagaagtttaagcaccaaagaggaacttgttacttcagggctgccgccatggttacttctcttgatccaagtaagtcattattaattcacagtttgttaacctatccaatacatttaataaattaatattgtgcaaatagtatctatcccctatatatgatcagagaaaaatgcaccctgtatttcactacacaaggtagaaataaatttgcaacctaatatgtttgacattataatgacgattccaagtggttgatttaaaattttcttaggtatcaaatcaatttaagattggaaaattttgttaagattttttgtttttttttcttcacctttctgtggcaggtcatggttcttgcaagtttgactatgttccttaacaaagcggaggatgactgtgaattatagaattataaacaaaatctgtactcttggtgttctttttgttgattttggagtgcaattttctgttttcatgattttttttctctttttcatattgtttttgctacttgtaattgtaattgctgaaaatgaaattccctttggactcaatagtccaagtttactcaatttataatgatgggcctccgtttatcagtcctgtgaagtatctgacccattttcaattgcaacaatgagcctttcatcacaaatctcagttttacgcaatttaacaccattccgtattggagaaaatattgttgtatgttatatttataattttacgacttcaaaattttatttacaaaaaactcttataaaattttaaaattataaaaatattttcaaaaaatagaaaacaactaaaactagataacaactatcaattaactataaataaactataaaacaatcaaaaatggtttattatttttaccgaagactaacgataaagcttgggaatttttttttttttttttgggatttattttattattcaattggttataattgttcaattattttattctttttgtcaccattttgatatgcatttcggtatgatatgatgttatgttaggtgctttatgtttagggaaaaaaacagaaaaatannnnaaaggaaaaaaaattacaaaaatac

SEQ ID NO: 92862 - DNA, 585 bp, Cannabis sativa
tacattttgatctattgtatacaaaaataaatttatgaagatagctgaccttcaatgtacctggtttgattttcttgtttgatctttgtttttattgaattgagttttttgtggatcttattaaacttttgaataatgccattttttgtatctttagctttaaagatattaagtgttgtttatgatcagtcacatgtaaaccaagttctcacgtgcaactaggagttagttggagttagttggctgttctgttttttgacagttaattctgttaactgttatttttgacagttttgcatttttgtcctttttttattttttttatttttcagcttgtataaatagcttgtcaactctttttagttaagccttgtacatactctctaattgtaattctctccaagattaataaaacaattcaagattattcaatctgttcatcaattttgttcattagttcttgactggttttgtaccagcattgctggaacattgctgcagcattgctgctgttagttgtgttaatctttgtctttaattcctagtgttcaatctcgattgaaaaggtgatcatcgatcacaaca

SEQ ID NO: 92863 - DNA, 1592 bp, Cannabis sativa
cttctcctcagcatcattgagcagcacattagctgataacaacacagtgttcaactcatctagctgatccaatatcactttctttccctggaatagccggggtatctcctcagaggccaatcgttcaaacaaaacttgaagtgaagcagaaagcaaagcactagctaccagttcggctgccatgatcacaacctgaagtgaaggagaataaaaagctatagcacactctttaattactactgcagttggtgtattcttcttatgactaatgagacctctttttcttttatttctacgctgataacatataatagtgtgaaagagaaaaaatacattgtctttatcttctttgtgaccaattattgcaaaaatcaaactagtgaccatccacaagaatcaacttttgtagtgaatgtcatattcaattgatccacagctaattattttacactaaactttattgagagaacactagaaatttcaaaaataaaaggcagataagataaatagtaaagatgagaatcttacaaagtcctcaataatggagatgtatggtgtttttattctcattctttccacctaggcttatctctcactttgtgtcattttctttttggtacacacactttattacttgtattattattccatcatttcttatccttattccttctaacacaattgctacaataaaaatctattccattcctctaaaagaatagcaaatgtggccttttagctccacaatacaagatcaagatcatttggtcgatagtagctcagatttgacacaagaatttaagcagaaacatgttaatgcataagaattacaaattgatgattccgtcccagtaagcatcatcccaccggtccttgtagccatcccgcatttctattatgttcttgacgctctcttcgtacatctgatatctccacttctctagcggaggcaatccaatctgagcacataaccaattttggtatccaacctgcattgcacagtaacctcacttaagtactttaagtactttgttgaatttcagggtttgacacatgctaccataacttaagaacaaccaaattatgtaaaagcgctataatcacaaccgtttcaagtagtcataattcgatacctgatatggtgtaaggaaatgagttgagcgtttcggcaacccaagctcctgcattttcttgtagaattcattagtggaagccatcatttcctcttctttcggcaacaacaccttaccagatagaacatgcgctacccacttggattgcagctctattgtgttgaagattggaccctgaacaccaacaaaacgaatttaaaattttcgatcccaaataccaactaagaaagaacattaaatcttcagctgagaaagtctaaaaagaattctaaccaacctttacaggtataccgatgaaggagagccccggagccaagcttggaggaaagacatggctatacaagggtccaacacggttttcatcaacagttacaactccatttgtttcgagaaatggataacgatatttgaatctgaaattgcataacatgtttaagtctccatcactatcaagcaaag

SEQ ID NO: 92864 - DNA, 877 bp, Cannabis sativa
ttaatagattggtaccattgtttataatttttaatatattggaggtatccatataattgttcgtgcctataattgttataaaccttgatgttcaatatactgcatttttgaaatactctaacttttttttttcatagctttaaattacattatttagaaatggtaaaattgttatgaaggaaattgtgtcaaggccagaattattatttctcattattgtactatacttacactttttgatccaaatttatgtccaaggccagaattaatgccttcatctctacaatgggaaagtacataagtataggtatttttattatttttgctatggacataattggactaaaacacatagtgtcaaaaagaaggtaaaattggttaattttattttcagaataatgtacttcacatattgttatggtaaaaaaatttcgaaaacctaatagtaatggcaaaagataacaacagtaataataatcaccataataatgaccatacagtaataataattggttccaccaaattccaaaaacttccacaagtcttaccctatagtaacttataaaatcaccaacattagtacaatttcaaatcacctaacagtagtatgatgcaaatatataacataactaaatataatttatgacctaaaacctaacttttgtaaccattgtactaaatacactacttgttacttgatgccagccttttagaatgacgggttttgggagacttgctcttcccagtccacatgttctcggacctgggcttcgctgtgctgaatcaggggtctcgaggagaccttgatggactacgtactggtaaagttatggatgttgatggaagaactttggttttggtcaatccaaattgcttc

SEQ ID NO: 92865 - DNA, 550 bp, Cannabis sativa
aaattaatgttgatcggtttggagtggactgtgtagctcgagatcatcatggcaccatagtagaagcttttaagaagggaaaggttgggtgtatccaacctaaaattgctgagatcatatcggcatcaaagaagctttgagttagattgcaactcatccttagctaggacaatgttgtgttagaaacagatagtttggtgtgtgtccaagttgtccaaagtaatatttttataccctcacagtttggtcttattgttcaagatgttagaaatttacttttggttttattttttgttgagttgtgttttgttaaacgatctgcaaacaagttgactcattgcttggcaagagactcttgtttcttgtataaagtactttaggacttctctactaataaacaaactatatacatttaatattttcaatatacaaaaaaaagtttgttcttcaattatttatataatcaaaaaattttcaagagtctatcacaacgtataatttataaatttatattccataaacaactatatgtattttttaaataataatt

SEQ ID NO: 92866 - DNA, 601 bp, Cannabis sativa
tcaagaaaaggatagcaattagtcattgtaataaccaaaatatttgattattattttctattacgttagtctagatacctcgatgtggaagtaataatttcataaagtatgttattttctttgatttgttaaggagtagttttttttaaatagtacaaatttgtgttatgttccatatagattttaattattaatacttatttactttatgacatcccataatagtgatttaagcccaaataaattgtccaatggactcaatatagcgaataaattaaaggaatataaatgattcacattagttggttaattaattattttagtgagttgtgtaattaataaatatggcatataagtatggttataacttaataagagatattggtggatatttaggatttattaaatgataagtaaaacacctatttgaatccaatgcataggtgttattatgctttgtagaggaagcttgcaggtgtgacatgagagataagaaacttttagttattatttaagtaggaatagagaattgtgagcttaaggcttagacgtttgacacctaagaaatgagttgaggattagttggagaatttatagtgta

SEQ ID NO: 92867 - DNA, 872 bp, Cannabis sativa
ttggtcggagtaggatgtaatgtgttttgttttgatttggcagtatgtttggtcgtattcgatcgtctatactagctagccagctgggtaacaaatatatgtactgactttgttttgtcatgtgtaattaaatttgccgaatgatcatatatactctagctatttttcttggtaaataatagtattgtttggatatttaatttgaagaaaaaaaatatatagagaaaagtattcccaccagatatttattagagatattgtgtgacaaaaccttttaaagtgtcggtaaaaatgagaaacaaaatagttacacaattacaatacatatatcttcacattcttggtataaactaattaatatattttgaatataattaaaaggttagtttagatttttgccctaaattttgatatatattgaatcatattttttgaacttttgagatcgttaaaaatttctcttgaactattgagattgttagatttactaataaaagtatgatgtggatgaaaagttcgggaacacaatttggtacaagttaatgttcaagaggcatgatttgatagatttcaaagtttaggggcacaatttagtatatggacaatcgctatattagtaaaattgaataaaattagataaaaatccttaaatataacaattttaatatttgaaagaaaatttttaacaacctgaaaaagttcagaaggtatgatttgatacatatcaaattgttcaaggagcaaaaattaagctaattaaaacaaatatagttaatatcattagttaaaagtaatttacatcataaatatcgtttgacttttagttttaaataaaaacctaagtttatttttttggcggtaataatgcctat

SEQ ID NO: 92868 - DNA, 694 bp, Cannabis sativa
aggcacatagtggaaaagtcatggttactgagttacttattgctgctattgaaagtaaggacctgagagataaagcctttgaactacgacctcttgtcttttgttaagaccaaattgaactaatacgagatgagtactcacttcctgagactatgttgttatcccaatttttgcccacctaatgtggcatgtctatgcggataatattagtgccacgtggtagtacaactcaccaacgagaagatcaagtcatctagtcagtgccctagccaacgcgaggtcccgtcacacaaacaagatgacgagtgataaactagccaactcaaggaggctggtcgaccacccttggtcagccctatgaccaaacagcttctggccagcacaaggccggccaggtgtcaacaaaacccttaaggaaaccatgaagaagcaccttgaggaagcaaaaggcaactgccctgagttgctcccaaaggtcctatggtcgcacaagactaccgagaagatgaccactaggcaaactccattcgctctagcctatggctgtgaggtgatgttgcctatagagctagtgccattgtctcacagaaagacatcctacgaccaagatacaaacgacatcctactggcaaaatcccttgacgaaatagaaggaaaaagagatcaagcaaacctaaagttgcaggcctaccag

SEQ ID NO: 92869 - DNA, 549 bp, Cannabis sativa
aatgctaaatgttatctaggcttcgtacctattatatttttcatttttagaaaaataagtttcagtaaagttatgatatctctctcgatatttttgatctattttcagcgatttttatattgttggaaagcttattcgatgatctacaatttttataaagaaactattcaccaatttagtgttattctatgtcaaaaattatcatctttctattgttgttataatttttttttctttatatgctcagaaaaagtacttccacttagaatataataactctctcaattctcattttccataagtttcatgaagaaaccttttgttaattcggagtgatattatgtcaaaagttagttttttttttctttttttttttctgcatcatgtgattcattttttgagtgttgtgctttaaaaactatttttgtaaaattgcaaaatctctctgaatataattctaatttcaaagttgttggtgttattagaaagggaattaaattttctaaaacttttatgaagatattatcctctaattttgaacttttcaat

SEQ ID NO: 92870 - DNA, 1321 bp, Cannabis sativa
  modified_base (245)..(247): a, c, t, g, unknown or other
acccatatggactagaggtggtgtcgccttttatgagaatttggagtattttctacagagtccataaattggaattttgcacatgactattaacgatgcaagagtgagacatgtggtctcaaatgagcattagtaagggtgtgcgtgttgtcaccggattgaactaaaggaatagcggttcaatgctacgacaactaaaattttatcaactttgtggtaattaggtaaaattcaagtcgaaagannntttacctaatgcacctaagcaagacttcttaaaagtgtatatttattcaatcaaagtgaggaaatattatattttgatataatatttgtttgattaaataaatgttataagtgtgtcacacattttaatctagtgggggattgttatattatttgataatgtaataagtatagattaaaatgtgataaatatattattatgtgaataatatatattaagtgtattataaataaatgtgtaacatataattttaacctatactttgtaacctacatgttgtaacttggaaaggagttacaatttattgtcacttagtaactcttgtattgatcacacataattagtgttataaaaggtttatttcacaatttgatttaaggaattcaaaactatgatgatatagttgttacaaaatagattaatactcatttatgtgagaaaaataaggtgtggtgtgtgaattctatgtgtgatcacctcacactataaaaaaaggtctttgatgctcatttggatagagaatttttctatcaaaaaaataatttgctagaaaactctaaggtttgataattcccaaaattatttccatgataattttcttagtgcttagagttatgaaaaaataaatgtgtaataccttgttcaaatgatgatgattctcactattctactctcaatgttgtaagtaagtgattttctttttctttttcatattatataatattatgtagcctaggtctcttttccttttatatatataaatatgtaatataattctgtgttgtaacatttatataattataatgttttaatctttcgtaatatattaattccattcatatatataaattctctaacaataatatatattgtgacagtgattattttaaaataggtgtgcttatttaagcttgtaaagtgattttattagggaaatttgatattatatgcttaaaattaatttatccactaaaaatatggtagcttacactatttttctcatctaattttacccctaaacaaataaaaaccaaacatctatctctctatctaggatactcacaccacatacac

SEQ ID NO: 92871 - DNA, 667 bp, Cannabis sativa
tattgaatcattttaaggtaattggttttagtagaatgacttttcaattttctaaattcatgtatgttgttattgtgcatccattagtataggctatcatatcggtcatggatttattgattttgattcttggtagagttgctgaaagtttgaaaaaccgtctgcatcttcattttaattagtgctacgtacttatacttatattttcttttctttcccaatgaatctagaaagattaataaacttcaaattatatgtgcagcttgataattctctctcaaaagagaaaacagacaccgataagaatatggcagtcatgttcaacattcttaggaagcatagaaaagtcgggcttgaaaacctaattttgaacaggaattcttttgcacaaacagtagagaatttatttgcactgtcatttcttgttaaagatgggcgtgctgaaattaaagtggatgagaaaggatgccattttgtttgtaagatcttaaatatttaccattcataaatttcattttttttatatatttaatgtaataaatgtgttcatctgatttttcagcgccaagaaatgcacctgctgccaatgcagttgcttcaggcgaggttgcttatagccattttgttttcagatttgatttcaaggactggaaggtaattagaaaag

SEQ ID NO: 92872 - DNA, 825 bp, Cannabis sativa
tttgaatttaaatattaatttaaatggtacttaatttacataaatattataatagatactaatgaaaaatgttaatataataataactattatttgtttgtgaataaaataattctttttttaaaaaaaaaaaaaaacaaattcttcaattccattaatatataatacttgtataataatattaacaaaaattctattaaaaaaactcaaaaaaaaaaaataaaaaataaaaaataaaaagtaaattaataaaaaccttaatatatataatatttatatacatgttttatcataagtttttttattatatacatgttttatcataagtttttttattaattttattattataaatattttaaatcattacacaatggtagatacgattttaaagtgataaatttttctaaatcttctaattgtaatttcacttggttggacaatattcccactataataactgatgttttcttagtcgattgactttcttataaaaaaaaggtaatctatatatgtatatatctatataaaggagaagtgtggagcagtgatctggcgttctaaaatcactctaaatagcattatctcttctctctttaattcacttatgttttcaattttgtattaaatggcattctaaaatcactctgaatagcattatttcttctctccttaattctattatatttttaattttatattaaatttaaataataatttaattgaaaaaacaaaaatagttaattatattaagcaatttttttaagtatatatattaactattttattaaaaaatagtatatataattcattaattaatataaa

SEQ ID NO: 92873 - DNA, 598 bp, Cannabis sativa
tttttataaaatactgtaaaaattttaaaaaaatctttaaatgtaaaactgtaaaaaatttacaaaaaataatgcattatgtaagcatccctaatttttaatatttgaattacttttcaacaataattatatgaaaaatatttataattattaaaatttgaatatttactatcatcataagtgttatattttcggattagtttatttatgctcacatatcaaatttatattttttgtgttatgctaaatttataacatcgtacatgtcgtgtttaaatttatattttttcgtgtaagatcatcctcacacctctcggacagtgtgaaaaaatctaacccttattcacaatactagaattatcaatgaaattagagataattaccataataagttgtgtaattgttattttaaaataaaaacttctatattctcattatcttacttccatcctcaaatcatgacaagtcattgcttgggagaatattatttgtaagctgatttggacttgttgaaatccttcacacatataggcaacaaccacaagaaagctgattttaaaccaaaccaaaaatcgtgcaaaccctaaactattctcca

SEQ ID NO: 92874 - DNA, 523 bp, Cannabis sativa
  modified_base (472)..(477): a, c, t, g, unknown or other
attttaatttatattgatagagttgtggaaaataattatcttgaattattatatacaatgtgatagtgtgtatacttattattaaataaaaaaaattaaaaaaaaaagaagaagaagaagaagagagaaagagcttatatatttgccctttaaaataaataacaagaaaaaaggaaaaaaaaatggcttatattaaaaatagaaatatttaatttatatgtgattatacatatattaatgcatttgattttttttttgttgaaatgataatgcatttgtatttatagattactaaatatgcattaacttattgaataataaaaactcacaaaaaaaaaacaaaataatattaagcacaaaaagacaaaataacttaaccaaaaccaaaaaaatatcacccatatttatatatatgttatagatttatatatattttagacttaatagaatttatacattaaatataatcatnnnnnnaatcatgtgaaccatgcaatattataaaagtgatttttgatctttt

SEQ ID NO: 92875 - DNA, 717 bp, Cannabis sativa
agttgagagtcctatcttcccaagagtgtcgttaaactttgtccaaaagacgatcttaagctctcaacaaccgagctccacttgtttagtccaatcttagatattactctcacctataccatcaaatggccaaataattatcatcattgcattctacattcaaaattaagtccaacgacatataatatgactatacttaaagtttggagttccaaaacctcacacaagcggtgcagattaactatcggtggcagtaaaaattggtgtactggaaacgtcaccaaaaataggggtagtatatatcaaaatgaccaccttgacgagtagatcacacccatgccaaccgtttctcaaaacagtacacgatattatcgaaaagtcgtcaaaaaggggaagagctacaaaaacgtcactagaaaaagtaggaaaaatggtttagtgtaggttgttctccttgacgagctgagtctagtggttaagacgactcgtcaaatggacaccagaggtggctggaaaatctgttcaaagtttgaacctccaaactttgacttgcgattccgggcttacggcagcaaacggagcggcaccgcttgagggttgaagtcgccgtcacttgggggttcgaatggtccagcgtgtggggctgggcggtggctgaagatggatcgctggagtcacgccagtgatgagattttgtgggttttatgttgtggttta

SEQ ID NO: 92876 - DNA, 724 bp, Cannabis sativa
atttttatattggtttacattataattagtaaacatctcatgcttttttaaaaaagaatctaaataatttaaaaaaagagaattcaaaatagttaattacatacgttgagaaaaagacacacttacagttacaaatgaatgtttaaattgtgttttggtacaataattttttctatatttttcgaaaacagatggagtggcttttataactccaatatccgttaggattgttcctataattcgtaatttatggttccaaaccctaattaatctagaccaaactatttaagaccagactaaatgaatttggtgtgaatggtttggtcaatctagaccgtttataattctatagttcggtcattgttttaaaattctcggtagaagtttaaactaaatcaatccgtataattcttttatacatacttaatatatatatatatatatagttcggtcattaatattggaaaacaactttagataaaaaattgatattaacttaacattattttgaaatttttttattgttatttatatattataaacttattaaaagtgaaaaaaattaccaaaaaattaataattacttaaaaaaaaattaataattacttaaaaaaaattacaacaactacaaatacaagtcatgattttgaaccatgataacaaataacagattaattagttatagcttcacttttctgtgtcttgacttgtaaccaattctgtt

SEQ ID NO: 92877 - DNA, 674 bp, Cannabis sativa
tttgccttgtagggagggaggtcttgtgcagtgactacattgggtagaggtggtagcgatttaccagccacaaccattggcaaagcattagggttgcgagaaattcaggtgtaggccttgtttctacaaacaaaacatagtttaatctatttacttcactgacagctaatgctagttttgtttcaaacttacaattttttttttgggtgtggagtaggattctagcgttgcacttttacactaagttactgtctttgctttggtcaaataagttaactataggaagcttattatttttaatctatttcaggtgtggaaggatgttgatggtgttttaacctgtgatcctaatatatacccgcatgcagaacctgtcccctatttaacatttgatgaggctgctgaacttgcatattttggtgctcaggtatcatcatattttgctggtggtactctagtgctgtttttatacttctctagaaatgccttgcaaactagcccttatcaatttttttttctttctaaacataagctgaatgttgttgccttgcaaactagtccaatttcggtgttttcaactggcattacatattgatgatgaaattattttatgatgcatcttttgttacaagtaatttaaccacattaggtttttattcatgtttgttagattc

SEQ ID NO: 92878 - DNA, 601 bp, Cannabis sativa
aaaaaaatgacaaaaaattatatttttaccgatttataattttttgctatatttttacaatttttttttaatgaaaatacatcgttttagtttttgttatttttttaaataaaaaaaaatgagcaataatagtgtttatcgagtgagcaatgtttatttggagttcatttctataacgatgaacgtatgaatgtttattggactacattcaaagtttttaagtctatccagattcgatctaattatatattggatgttagattctaccatccaatccgatctaattaatttcagtcatccaatcgatccaacatcaattggatattagattggattggttctatccgttggatgtattttatatatatatttattagtttaatttgagtttattctatattttagacctaataatttttgaatcagattggatccatccaatattttaggtcccatatgtattggattggatttgatccatctattcaaaaaaaatagtaaaattttaatattaatttttatatatacatatatattttacgtataataatataaaatctaattaatcattcaaatgaaatgaaaatactaattagttcga

SEQ ID NO: 92879 - DNA, 536 bp, Cannabis sativa
ttatattatatataataaaagctacattaagttcccaaaaccatatgtttgttaattaattccagcgttttaaggtgaatattattcaagtatatagatgtaaatcacttataagtactgttcaatattttatataatattagtatatttttatttcattaattcattatgtatatattctcaagcaaagtagaaatatatacatatttaatatgataaagactgataggtagtgcatgcttttgtttcctacgtatatacgtacgtatagaatgaaattttatataatttagctttccaaaataataatacactatatattttaattatagtatggatctcataagttttcaggaaatcaaaattatttatgcacaaataataaactcaaaaaatctatttctccaggatagaacatgcttcaaataatttatttttgtgtttggaattatggatatgttacaatttttttattgtggtttataatatatttgtaatttctaaaacacaatatgagttgttttgaatattttata

SEQ ID NO: 92880 - DNA, 896 bp, Cannabis sativa
ccactcattgccaattggttttgagctggaaccccatgattctcaacaatgattaaagcttttttttgagtagtgtgttaattgatgaaagatatttatgtataattagttgtgagtctcatatactatgtttatcattcttcataaattaacgcctatttacatttatttttaaatattcaaccaaagtagttagatagtgtttttgagacatgttgttaacgcagattttcgttaactatatttgagctaaagtagtgataaacttgcacagaaaataaaaactggtaaagaaaagattagaacacaaaggtttttacgtggttttgcagttaaaattcggcatagtacacgagtcaatcttattagatttctgatacaactctcaagcatttttctctaataattttttcgtctatttctcagtgtaactttctctatttataattacataataaggcaattaattacatagttgactgatatcttacaataattatcccctgaaatcgtggggtttgattacataccacgtaaaataaatgtggttaatatttgaaaatcacacagctgtgataggtccgctttaaccgggtcaaggtaaacgtgcattaaatatgttgtaaaccgtaacgttttaggatatctcgctgggaacacggtaacaataaccttgatagcgagctggaacttttcccatgtcttttcggggttaatgatgtaagcctcgtcatttccgcgcttgaagacataatgctctatctaaaaatcgcagttcttgatgacaaggtggacttcagcaatcaacatcatttgtatgtcagcttctgtctgagaaagctgactcgatggagctgtgaactccattgaaaggtgtctggagctgattaatgaag

SEQ ID NO: 92881 - DNA, 947 bp, Cannabis sativa
  modified_base (293)..(305): a, c, t, g, unknown or other
aaaatatccacgttattattgatattaaattgagaaaaacgtgtttaattgtaaattttccttaaatttaagggttttttcatatttacatttttaaagtagttttctttttattaatttttataaaaatttacatagcaactcaaataacaaccaacggaacaacttaaatcataatctaaattcacaaaacaactcacataacaactatcgaaactactcaaactatgaaaataaaaaataagattttttttatttttacacttcaaaatatatatttttttttttgtatnnnnnnnnnnnnntacatagaaactcctattgcaaccaaccctgcaaccactttaaaaacccaaaccataaatttgaaaaaaaaaaaaacttaaaaaaatagtatataaaataatttccttaaaaaaaatatatatattaaaaaaagttaaaatagtatcatgattcctaatatatattattttgaaaaattgccttatatcctatttttttaatttttttttttaaaaataaaaattcgagtttttaaaataattttttttgttggtttctatgttcgttgtaataagtatttctatataaaattctataaaaatacaaaaaaataaaaataaaacaaagtggttttgaagattaaaaataaaaaagcttaactctcttttccatcataattttttttttctcgaatccaatcctaatatctttccgatctctctaccatagtgttagtgtcaatgctaaaatgagttgatttatatatctcaaaagatatagaaaagctagcattttattaaaattcctcaactttaacagtactgattgaggcaattaggttaagctagcatactcgcatagagatgcattacactacataatacatatatttaacgtagcatacacatatatagatatagtgtaataaccgttacgttgca

SEQ ID NO: 92882 - DNA, 600 bp, Cannabis sativa
  modified_base (530)..(540): a, c, t, g, unknown or other
gcctctcagctgcaagagctaaaatcagagaaaaaaaaaattataacattattatatatatttaaaaataaaaattatataaataatttatataaaaaaatttaaatttaaatttaaaatacttaaaatatggtaaatatttgtaaccatatttttaattttattagtttaactttgaattaaaataaaaagaaaaattatgtagatataatacataaaaaaatttaaatttaaatttaaaaaacttaaaatattgtaaatatttttaatcatatttttaactttattggtttttaaattttaaaataaaattaagatattttatataaagaaattttaataaatacacataactcttatttctctcatatgagacatatacattctcatacactacaaaaaactattgtttttagtgacaaatttttagtcacaatataaattttttgtaactaaatgtgacgttttatcacaataaaaaattacttgtgactaaaactaaagcatttagttacaagttgttactaatnnnnnnnnnnncacaacaaattataatttttgtggctaatacttttagccatggaccttttagtcacaata

SEQ ID NO: 92883 - DNA, 590 bp, Cannabis sativa
ttcgcgcctcgttttttttttgtcatttggaagtttcatttggaagttatccgtcgagtaagtaattgataataagagtcatccatgtaggagagtcattcatcatctcgacatcttccgtttcacatatacttggctcgctcagcatctctaccggaactaagttcaattcatccaagtcattttgtgaggccagttctgctaaagcgtcggcgttggagttatgttctcttagaatttgttcaattttaaagtaatcgaatctttccaagttcttttgaactttctctaactacctcgccattttaagcctttgtcctgatattccccgaggacctggttcacaattagctgcaaatcactacgacagatgaggtttttgaattttaacgcctcagctatctttaagccggcgatcaaggcttcatattcagcctcgttgtttgatacgtcaaattggaacctcaaagcatagtgaaacttagccttctggtgatattaatattacccctgcacccgaaccctgtttgttaatgcaccatccacatataacttctagattcccgcgtctcgctggacaggtggaattt

SEQ ID NO: 92884 - DNA, 531 bp, Cannabis sativa
ttttaatggtataatcccctttttcttaaaaatgaaatagaaatcctttcgatttaatatctattaccataactatgtggttaattatgattaattatctgacacttatataaagtcataaatacttcttctatgacatgaaaatatatagacttgaattaagtatgatacggacttgaattaagtatgataatttccttttgccctacattgacatgataattgatgccaccgcagggcatgagttgatgagtttcatggatgctttttcgagttacaaccagattatgatgcatacacccgattgagaaaagacatctttcgtcaccgaaagaagaacttactgctacaaggttattccattcagactcaaaaatgctggagcaacttataaccagcgaatgatcaacagaatattctcccaacagttaggattaacaatgaaagccttcattgacgatatgctagtaaaatccaaggacaactcaaaccacgtcaaatatctccgagaatgtttccaaatcctcctag

SEQ ID NO: 92885 - DNA, 684 bp, Cannabis sativa
agcaagtaaaggcacgaaatttttgtgtggaaaatatggtcctaaggagagtatttctgagcacaaagacagcacgactggtgtgcttggaccaaacaaggaaggaccctatcaggtggttgattatctacaatcaggagcgtacaaactttggtggtatgacaaaaatatgaaactcgtctagtgaggtattggaatggggaacatttaagaaagtattatcagtaaaagtaccaagttctacaaccgctataagtataaaaccaaagaatacttacttttaagtaaatggccttctgagcagatcaaacccaagggttcagaagaaatgactaagtactcaggtcggatgaccacctttgaaattacgatttctttttaagtgcaatttgttttgtttaagtttagctaaagattgaagtagatcatataatgactatcatgtaagttaatacggtaatcaaaaaattccaaccaataaatgaataaagatgtctatttaaattctgattgtgtcaattttattagcaagttataaatttaccattaaatgtatacaaaggtctgctcgaatctaaaagactgaacagatgaaaaccatacttgtgaaatgtaagtgactaagagtcaaaactctgcttggtcacttgaggggcaactatacccatacaaagaattggtaaa

SEQ ID NO: 92886 - DNA, 917 bp, Cannabis sativa
gggatgaggacttggagagggagcgtttagctaacgaaagacgaatggaagagtgcttaagggagggagctcctttttacccccgggcttccccacaggttgtcgtcggtgtctgaggagggttgtttgagggtctattgtgatccctggttccctgtgcatactctgctggcaccatcccgaccgtgaacgcttctaactcctaagttttaggttttgttaaatattcgtcactttttgtgtgtaattttttggctgtactcgaccgttgtttaatatgtctttctatttcttttctctctcttttttttttttgtttctagttatatttatgtaagttgtatttgcaatccttgaataggctcgtgtttattactcttgttgtcttttcctatgtcttatgcctactttaagtaatgttgggggagttgtggctcctttaggtgtatttattgccaatcatttatacatacaattattcgtattcattccaagagttttttttttaaaaaaaaaaaatggggtgctttgggaagtgggatgacatatatactcttaggggtgtttttcgaaatttgagtgcacgtgctttagtaggcacttgtttttaaaacaaagtggtgactcttcgtttcttttttatggttattattttgcatgtaattttgtataaataggcttctcgttgagttccttttttatctagaatattcttcaactctcttttagttttctgggtcagttcaactgtgctcttcgtttgtccttcctgcattatgtcttccctacccaaaaatcagataccttactcaaaggagccttcctcctccaacattttctcaggactgcagcctttagatcctgcttttctttctttgaaccctttttctagctttcgtgatttcgagcccactaca

SEQ ID NO: 92887 - DNA, 584 bp, Cannabis sativa
cgagtatttttaagggaaatttttaattatatacttaattataaaataattaataaatataccgtcaatcatttaaatgatacattgagcggtaatgatgtactacatatataaataaatatatgatatatatattttttttttagttattgtcaaactcaaatggcacattgctttttttttttttttatcattttcacttttcttaattatgctgactaatctctctttttgatttatttatttattttattttataaatctatctccatttctattttttacaattaaaaaaaataacaactacatcatttatcatattgattaaaatataatattattacaatttacttattaagttgatcattttaatatgtggatagtgtataatttataccatcaccaaataagatatttaaaatataaattaatcatttagtttcttttataaattcttcaaataaaataataaaaattttactcaaataaaatcaaatatgtactatactaaaaatattttttttattaggactaatctatccagaaaatatttattttatattatttaagagttactagatgtt

SEQ ID NO: 92888 - DNA, 806 bp, Cannabis sativa
  modified_base (765)..(780): a, c, t, g, unknown or other
aaagaagagtttctctctaaaaataataggaagggttattgtctttaataaaaacccttgggtgaagtagttaattgcgaatgagatacaaccttatcgatcaacaagttgattaaagagtaaggttagtgcaagggggttgtatgtagagtaggttgtaggcagggtgggttatgtactcaactcctataaaaggaaggttgagaggacacataacacagatcagaagagaagaagagtttctctctaaaaatctcagttttcatcattgctccctattctcttcccttacacacaaccatcccgtctcatcaattctcttcctacacacaaccatcccatctcataaaaaactctttcatacacctccatctcgttcttaataattctccctaattaatgacacctcttataaaaactaggttgtctatttagcaagctcctataaaaaccaggctgcctatttagcaagctcctatagaaaccaggctgcctatttcgcaagctcttatagaaaccaggctgcctatttagcaagctcctataaaaaccaggctgcctatttagcaagctcctataaaaatcagactgcctatttagcaagctcctatagaaaccaagctgcctatttagcaagctcctataaaaaccaggttgcttatttcataacctttatgaaagccaaactgttcacactacctttcaacacatcagctcaccaaggttcttctacgaatcataagttcttgttggaaatattttacnnnnnnnnnnnnnnnntaccatgtatgtttcattaacatcct

SEQ ID NO: 92889 - DNA, 747 bp, Cannabis sativa
  modified_base (588)..(596): a, c, t, g, unknown or other
aatttagattgcatattaatgaaaataaaagatctatgattagtttctagtagttgcctaagtccttctagagaaataccctagtgaaaggaaaacttcaaaatgatggaatgattgtttacttagtgtaaactattactagattcaaggatgtcttgatcatgaacttaagaaaagctagaactattaactaagtttgcatgtttgatagttattataaagtgattaggggtggaccatcctatggtcagtaagataagaaagtatctgtttcaacaaatactacttttctaagaacttgactaaatttgagaacaaagtagaaaagtagaggagatattttcaattctaaagtgttcaatcatcttattatgtataagatggtcccactgttgctgttgtattgacacaaaccgttgaggtcaataccattaatgttcatggataaaatgccacggtacctcgtcgtagtggaagggtttcaaagaattcaccctattatgacttggaagacacttgataaaaatccattattaatttaaacaagtaatagatagtcagaataaggaactaagaagcaaagccaannnnnnnnnggttaaaaccattcatatggagtaaccaaaaagttttctattacaacgacaagaagggaaatttcgttaataagtatattcaatgaacttaacaaaacttctcaatcctagtatcatacgtttgagattatcttaacctatggcttgtggt

SEQ ID NO: 92890 - DNA, 510 bp, Cannabis sativa
cttggtacatgacttgtttaatgattgggatgctaatttaatccttagtattccgttatcttcaagtcgagaaagagatgtgcggttctgctgtttggaaaaaacagggcatttttcagttaaatcaacatacaagctattacaaatgcaaaaggaggcagaggctcaaccgaataactctgatttttggaattacatttggaaggtgcatgttcctcccaaagtaaaagatcttgtgtggcgtgcggcttcagattgtcttcctacaaaaaatgcgactgagatctcggcatgtgcaggttgataattattgcccaaggtgtgttcctcatcctgaaactccatattattgcttggtggagtgtcattttgctagtagctgctgggagcattctggaattaagaagaatattcaggggctatcttcttttacagggtggctggaggcaatgttcaaacaagtggagaaagctaaaagaaatgacattgttgtcttgtgttgggcgttat

SEQ ID NO: 92891 - DNA, 664 bp, Cannabis sativa
aggccagtttggcacatctgtgcttcgggaaaaacagttgtagttgtactgtgagaaaaaacagttgtagcaaaactgtagaaaaaagctgaattgagtgtttagtaaatataaattttaaagtgctatgaattttcaagattctattataataatgagaatgttataatctaatttattataattataatctatataaaaaaaatatgttgtataaattttttatatatttttaattattttttcctacattataaatttatacacatttgataaaataatttataataatataaattataattttataacttgtaatttatagaaaactctaagtttacgtggtttgttaatatatcaacataatatatttatcacattttaatttatacttgttatattatcaaataatataacataaactatggaaagattttcaaataagagatatatcattacgtcattactattgggaagacaaaacgaagacaatcagaaaaagtttgtaactctaattaaatataaatatgtagatggataaaggaaaatattttctaatcaagtttttatttatattctcaatttaagtgtaactcttttttttttcttttcttttcttttttttaataaaaaacatgcatagatagaaaataaatctcttatt

SEQ ID NO: 92892 - DNA, 797 bp, Cannabis sativa
tgtccaagtgccatttgccgtgaccaacccgagtgtggctggccgaccatcacgtttcggcctgctaactggagcctcaaccacagaagtctggccaagagagtagactcctactggacccaggggcggacccacattgtagcgagtgcccccccctgaaaaaaaaatcgagaaaaaaatgtatatgtattttaattagttacaacatatatttgtattaaaagatgatatttatagacataatagtaagcttggtgtaatggttaaggtagaagacaaatatattagagggtaaatgttcaaatcccactaactacactttatatttttctttttaaatttatttataccctccctgcttttacaaaaaaaaaattacgcccccctcactttaaattctgagtccgccactgttaaaaatattatatacgttagagggtaaaatttcaaatcccactaactacaatttatattttttctttttaaatttatttataccctccctgcttttaaattttgggtttgccataatagtaagtttggtgtaatggttaaggtagatgacaaatatgttagagggtaaaagttcaaatcccactgcttttaaatttatttataccctccctgcttttacaaaaaaaaattacgccccctcactttaaattttgggtccgacattgttaacattattatatacgttagctcataattgtaatttaaataactccagatatggaaagctatatcatataccatatatttgtattaaacgaaaccattacatatatgtagggatc

SEQ ID NO: 92893 - DNA, 836 bp, Cannabis sativa
aatataatttgtttggtcccaagtctattcttgaatagaagttctactgtagtaattatacagttacttctaaacacactttaattttttataaggaacgattcataaaactaggaagaataaatgggaatcacgggagctattccttctttttggaaaacaccaacatttaggctagacaatttagcccttctagctagccgatgaggtgaatacttatttatacaaaaataagactaaaagaatgagaaactaaatcaatataattaataaagagaaatacaattaaatatttatggtgataattaatttagtgatttggacatctattaatataatatttaataacaatatcttaattgttagacgtacaactaattaagtttttgcataattttactattatcttagaattaatatttacctaatagtttatggttctaaatagagtgataatttgtaattaatattattttcaatgatattattgattgtgacaaaaaaataaaatttaaattaaataattaatatgttgcgttgatttgtcacttaaattaatttattttttgtagcgaccgcaatatttaaatatgaattagtgagattataagtactaattttattattatcattatcattaatattagcgtttcatgtgaatgattatgttaaatgtaaaatatgctatttttatgattttagctcagcgacgatagaaaatgcaatggaggttattttagtcacttggggaaatataaagctttgtagtgatagagattatgtcatgtaagctcaaatgtttagtgttggcagggttgtggtattgaaccatttta

SEQ ID NO: 92894 - DNA, 1041 bp, Cannabis sativa
aaacttttagacacaatggcttgatggctactctagccttagccaaatcacactcaattctctccaacctattgttcttcttctttttcttcttcttgatggtctgctcaaatacatacaacataacactatatatatatatattcacatataagaataaaaaaataaaatcatcaaaatgatgctcactttttttgcagcaaaaagatgattactaatttccgtagtgttttgatgcatgaaactagttgagagaaaagagtagtgtggatacactttcggtggagttctatcataaataatggtgttcaaaacgttagaagtcataagaggaagagtagcagtagtgaaagccgtatgaatactattagttattttaatcttgtcgacgatctggaggagcaaagggacaaacagtcccaatagagaagagacgaagaggtagaagaatgggagagatgatatatatattagggttttcatattattttatatatacaaaaagtattagcggcggagtccgctgctattagtctttcccgccgctaattctaaaacaacaataaaaaaaaattaactgtaatagcggcggaaggtccactgataatatgttttatgtccgcggctaataatttttgaaatgaaaacccgcgaatttttccggttaatttttgaaattaaatcccctacactattagcggcgggctatccgccggtattaataaatgcccgtcgctaataaattttatatttatttttttaaaataataaataaatacacaataataccggcgggcccccacatccgccggtattaatgccattattaggggcggatgtggcccgccggtattgtgtccgccggtattaatgcaaattgttgtagtgaatatcggtcccttccaatgcataccccatgcatcaatccaagctttattactttaaccaatgccctgaaattaaggacataccatttatctaaggtgcaagtaaactatattgtagattatcgtattagttaaaccctgtgtattgataaat

SEQ ID NO: 92895 - DNA, 830 bp, Cannabis sativa
tcagaagaaacacagacaacaactactactttttcatttcttttctattgtcttctccactgctctctactgcctcgaactagggctaacttaccctcttctgattcatcgcttgcttttgtttttcttacccgaatctgaatctgaatctgtatctgtatctgtatccgaatcctttttatttttttgggaagaaacaaaatctcacacccgtgattttcctttttgacttctcccaaaaccatacataccctgtcccatcgttctcttccctcttcttcttctactcggtcactgcaccaccgttctccggcgaggccctcaaccctcaatcgtgcgccacctttttctctgttggaggtggtagcctcggtcgctctccgctgatggctcgtcccatggttggagaagaaagtctcgcccggcgctgctcgtggtcggagaagaacgtccagccgccaccattttctctctccacgactctagttccaccgatttagggtttttagtttttatttgtacaatttgttttttttttatctaaaattatttattaattgtttttgattttgtattaattgttttattttagattttaatataaatttattaaattaatttttatgtaaatattttttgtaaagcaaatttaatttttactttaatggttaatattaggtcactatttaatacaatgaaattgcattattttaaagggaaatttgataatttatgcttaaaaataaatggtacactaaaaatatgctagcatattttgcatcatgcaaaatatacttaaaccatttttcccttacaattttacccttaaa

SEQ ID NO: 92896 - DNA, 788 bp, Cannabis sativa
gggtgtagtaaaataaataaaaaaaagaagtttatctttctctttctctttctttttttgaaagtgggaagcgttgtattcaatgtttgtggggacattcttttggggaagtgattatgtgcctttattacttgagtcctagaaagattgaggtgtttaaggtaatttgaaccgaaaataatatcttttatcctaccttcaccttagcctaacaatacaagcttgataaagtcctattgatccttagttgagtctttgtctacattagtggagagggaagcattgagtgaacttatggaaacaaaatgttaggctttaggattgaggtcgagcttgttctaggaaaaattgagtttgttttgggaataactatgcattagctattagcagaaacacttgcattataattttatcacttcattaacacttgagtaaattagtcaaaggcattggcaagaggcataatcatcatcatcatcttcatcgtcatcatcgtcatcatcatcttccatcttcattttaataaagtttagagagcatttatcattgttaagttgtatgctaaataaagatctcctctctttgtctcgagtcttgagtgtcatttttttttttgtgagttgtgttttaagtcaattttctttgtcgtctgtcttttattcctctttgagtcatcactcgaggacgagtaatgttttaattttgagggtgtgataactcttgaataaagagttatttgtcacgtttttttagcttaatttgtgtgtgtattttacttatatttagtt

SEQ ID NO: 92897 - DNA, 512 bp, Cannabis sativa
  modified_base (247)..(253): a, c, t, g, unknown or other
gtcaaacttaaacattcatatatgtacatacgaaagaggagtaataaaaaagcaacatacataataataagggggaccgcgtaataattaatgatgatatgaattttcatgtgatgactgatctctccctgtagatgtggttttggctgggcttggagtcatgataataattacatgtagagaaatttaatatatatatatatatatattcaccaaccagagcaccaagagagagagagagagagannnnnnnagagagagagagagagggtgagatcgttttcgagtggcatatatatatgatatatgtgttattagtcgtcggaatctttggatgaatcagaaatcattttctgtatcatttggcttgtctcttcctcagacattttgtcttctttgctttgggattctgtgtatgcctcgaagaattctttgttctctttctctaattcattccacactgcacatcttaatctctaccaattaataattaatactactcacaaaacata

SEQ ID NO: 92898 - DNA, 512 bp, Cannabis sativa
ggtaaaagttacttttatcagcacaatagtgaactgtactggtaaaagtgatatttcttgtagtgaaagttatatatatttatagtgttcacatagttttttttcataaaattttttataaactaattataaaatgtgcaaaaatttaagttttttcttaattttttttgtatataaatatattgtaggaatattgtgcaattaccaaactgccctacactaacaaataaactaatcagttttaccaaggtcaatttcgacctttaccagaccctgacttttcaaagtcagcagggtcaatgcgacctcgttttggctttgaacaaaaccaagaagggattcgagaaccttctcattcaatccctcagctcaagctttgctcgaaaccctagcagagagtttctctctgagaaactcgaagctaaccctcaatcaacccagaaatcccagatcaaacacaaaccctagattagatctaacaagatctaatctatacacaaacacacacacaa

SEQ ID NO: 92899 - DNA, 1506 bp, Cannabis sativa
atatagatcacctattcactgagacgaagtaggtgagagaaagttcttgggtcccaaagctattcagagaacaagtgagtcagttgataaaatcagaacacaaatgctcgctgctcagagcagacagaagatgtgagagcaacacgtaggtctatgctaaatagatagtatatgcgatggcatcaatatttatttacattgagaatatattgtatattattgtttatactatcttgctgggctgggatcacaggtgctctactgtgaagaaaagggtaaatcagtctgtgatcagccatgagtttgagggcttagcggtagattgcacatatttaggccacactagaccatgcaggtcgggtctaccggctgctgcattttgtattctcaattttgtcacttaggtcgacatgtaaaaatttacttgtaatattttgtgaaaatttttatgggatctcgaaacataagaaatctttttgaatggttcttaaagtttaaatagttacaagttttatttttatttcattaataatttaaagtttaaattctgcttttaattttagtaatcacgagattaggttatgattatcgaaaattgtagcacgcctaattgtgagggcgttacagcttctgacccaaaggccaactagaagagggtatgtcctgttgccctttttttatggtgtgatgggcccacagtacctgtggtagttcgtcaacctatcttccttttaacaggtcaagttttttttctttatagagtctttgagggttttattgactgcttaaacttgcccattggcttgaggtcgcgagactaatcagaagcttttgatgattttgtttctctcgcaaaactcagtagttaggtcactatcaaaccctgtcctattgtctaacactattttaattagaattctaaacctgtacattatgtttttgaccacaaaagtctaagacttttttagaagtgatcgtaaccaatggctcaacttcggtccattttgtgaaaaaattgactgctacctctgcatattttacccctccttgccttgtggataaagacccgattaaatctattctccaaattacaaatgggtagggcgaggtcatcatacagtgctctgtcggtggaatcctcagaatatgtgagaacccttggcatttatcacatttttttacaaactcatgtgtatctttgttgattgttggccaatagtatccttgatggataattatctttgacaaaactttaccaaccatcatggtcgctgcaggaaaccttcatgaatttctttgatgatgttctcatcttctgttggtgatacacgtcaaagcaatggcattgaataacctcttcagtacaactttccttcgactattgtgtatctcgacacctgatacataagctttcttgcctcatttttgtctaacgaaagctcgcctttcacggggtaattgatgatggggtcatccaagtcggggtaacattaatcatttccacat

SEQ ID NO: 92900 - DNA, 789 bp, Cannabis sativa
tgtaaaattgacacttgattgaatgtgttggacaccaatatatctattctcttgaaaaatcatatgtttagttttatctccctttcagtgtgccctcattttagttgagcgatgcaagaatcttcatagaggactgtttctacttttttatttggtgttaatctacgtgttccctaaatatattgtttctgtaatctcaatcgtacacattctctacttgcttcatggattgcaagtttctcaatatgattaaaagttgtatcattaaaaactgtctagaaaacccatgcagtgagacaaaacttgagctaaaaaaacagtaatgcaatattacatatattatctttatacaaatgtctataattatttgcaagttgcctcgttaaaaaccttgcaggaaaaacttagcgggacaaaatctgagctaagaaaaaaagagggtaacatgtacatgtcttcccctcatgcacataatccaaaaattttgtgttgtgataatatatctcataagattattgtttataatatcatcacttttaaaatatcaccatatataaccaatgaccacatatttactataagtactcttcgggagtgtatgtgtggaaattctaaattatggatgagagtttctagaaacttcatattaatccaacttatcgaatcattcacgtgtgtgtatgaaatattgttcataccaaaatttaaaattttaagtaaatatgaacatattacattgataataataataataataataatgataatataaatttttatttgcgataa

SEQ ID NO: 92901 - DNA, 545 bp, Cannabis sativa
aaatattgtatttttgaaaaaattaaaatattaataagtggtttcttttttatttataaaattttaaaaatacatataacaaaaataaaattaaaaatataacgaagtatacgtgcaatatttcacgtaataattaacctagtataaggacataagggtatgaataagtattattaagaaaatttaaatttttatgttaattttttatttaatttaaaaaatctatcattttatattatatgagctgagattattagagaaaaaaaattatttagaaaaaaatgttgagtttgttttagatatattttatataaaacatttttttatgtaatataaaagaaatatttttttatttttttatttttttaattaagttagttaaattaagtattaacattaaaaatttaaatttatcttctattatttgttatgagatcaaaatctaaaaatttagtattttaaaattttaaatttataattaaatatttttaataataatatccaatgaaaagtgtctctccttaaaaaaaaaacattaaaaaaaa

SEQ ID NO: 92902 - DNA, 708 bp, Cannabis sativa
  modified_base (333)..(336): a, c, t, g, unknown or other
tatagtagattgggggtgaaaataaacaatggattttttggctaaatgggaaagggatttttttctctattgttactttgtcttggggttggtctctttagtttttatttattttataatattattttttttaaatttttcattgatactgtttagcactcagtgttcttagagcatcttcaacagtaatattcttttaagagtgtcaaaaatatttaacattacttaaaattataatattatattttatttcactttcacattattcttgacacttttttattctaaaatgttccaagagtaagcaactctaaaattattaaaataatattnnnntattatttaatatatattaaatattttttttactttaaaacagaataataataaataaataagactaagaagacataaagaatgtcattacatgatatttttttggtattttttttcactacaatggtaaacatctattaaaagatgtcaaaaatgtatatatgttaccaagtattctttaagggccgctttttttttattgacgtgacgaatgatgattgggtggaatgttagttggaggtggaggagtttatctcccttagccggtaattcttgtaatgggatttgttgggaattattttatcaggatctagacttactaccatgtatgttgtttaacatcctatatatgaattatctaaaacaatggaa

SEQ ID NO: 92903 - DNA, 1047 bp, Cannabis sativa
tataacaaatattttaattagctaagttatatatgttgattacttgaaatgttaatataatttttaaaatagagcatccaagatgttagagcatcaaatgcattcattggagtatatccaagaatattggtacgagaatgcccaaaacaacctaaaagcaaagaatgtagtttttatgtattgaaaaataacagtgacatcattgcacatacgaatcctagcaaatacttaaccgatataaaaatttaagttttaacaattaatttatcttatttattatattaacaaaaattctgatatatatactaataaaaatatttatttctttttacagtttgaggataagaagatatacgatgcaaaattgagttttcaccgttacagcgatagtggatagaataattgtttacgatgattcacgaagacttacaataattcacaaaggcttgcaatgatgcttgattctataagaatttcgttatccctatatctctctgtttaataagatacttatagacttttttcctttatttttttatgttcacttagataataatttgtgagtacttagactaattttaagatatttgtataatagatttatttagaataatgtatatatatacattgttatacccgaaattcagctaaattttagaaagtaacacgtgtcaatctcaaagaatatgaatcaaaaaatataatggtaattatatcattaaatataaaatagaataactcattaaatacagaataaatagagtatatttataactcgctgactgcacggtcttaagcgagatcagaatgtacaaactatcaattaacatattgacgagaagccatattgcatcaaaagacataatctcgagggagacatagagagcgcataacgaggcatctacctcgctatatgtaaagaggcattgacaaggtaaagtaattcttagaacacttagcatataatatacattataataactaactgtaataacttgaaggacatattgtccagtctgcaaggctgtaatatccagtttatataca

SEQ ID NO: 92904 - DNA, 680 bp, Cannabis sativa
tcgaaacctctgtcgtctaaaccaccgcctcaaggtcttcgccggctaaagacgttgatgtgttgagattgagagagcagaatgaattgaagtgtattctcattacactgaaaaggagccaaagctcagtatatatacagagtatatttacgagagaaaagatagaatctgttgataaatacagctgtacagtaaaacaaacttgtaacagaaataacagattcctaaactaactcctaactaacacccccctcccccgcaaactgagttgggatagtgaagccaaactcagtttggatcgaagaagttgaaatcgtggtgtggacagggctttagttaggatatcagcaacttgatcttgagctggagtgtgtttgacaagaagttggtgtcgaagaattctttctcgcacaaaatataaatccagttctatatgcttcgttcggttgtgaagaattggatttgcagacatcagcacagtgcttaaattgtcacaccatatagtaggaactggttgatgagaaacaccaacttcattaagcaaggactgaagccagatgatttcagcagtggcactggcaaggctccggtattcagcctcagtgcttgatctggaaacagttttctgtttcttcgaactccaggaaaccaagttggaaccaaggaacacacaaaaacca

SEQ ID NO: 92905 - DNA, 1149 bp, Cannabis sativa
atgtcaaatcttcaaagcaaaaaccacaacggcaagttctaaatcatgagttgggtatcgctgctcatattctttcaactgtcgggaggcataagtgatgacttggtcggtctacatcagtacacaccccagaccctgtctggatgcatcgcagtagactacaaacttttccttatcagatggtagggataataccagagttgtaaccaatctttgtttgacctcctaaatgcttgcttcacacttgtctgaccacaaaaatcgctaattctttttagtgagttcagttaagtgtgttgaaatcttagagaatccctctacaaactgacggtaataactagccagacccaagaaacttctaacttctattcgtgtcttcagtctcggccaatccctaacggattcaatctttccttgatccaccttgattccatctttactgacaatgtgtccaagaaaagacacctcagatagctaaaactcgcacttcttgaatttggcatacagtttatgttctcgtagtcattgtagaaccatctggagatgttgctcgtgcttctcttttgattgagagtacacaagaatgttgtcgataaatacaataacacaaatatcgagaaaatccttgaataccctattcatcagatccataaaagctgcaggagcattggttagtccaaaagacataacaaaaaattcataatgcccatacctagtgcagaaagcagtcttttgaatgtcctcctctcggattctgaactgatgatagcccgattagagatcaatctttgagaagaccgtcttccccaaaagctgatcaaaaacatcattgatcctaggtagaggatacttattcttgacagtcagtttatttaattcccggtagtcaatgcacattcgtaaagatctagctttcttcttaacaaataatacgggagctcaccagggtgacacactaggtcgtgtaaaccctaggtcaagcaacccctgaagctgaatttttaactctttaagttttgttggagcaattctgtaaggtgctttagaaattagctcttctctaggtgctagatcgatgatgaaatcaatttctctttgtggtggtaaacccagaagttcatcagcaaaaacatctaaaaattctcgcac

SEQ ID NO: 92906 - DNA, 891 bp, Cannabis sativa
acccaaacctgtttccaaagctctgtatgggatggctccagcagaacttaaggaggttaagttacagcttcaagggatgcttgacatttggtttacccgaccttgtgtatcgccctgggagctccgattctgtttgtgaaaaagaaagatggttcccacagaatgtgtatcgactattaggaattaaataagttaacaattaagaataagtacgcattacccaaaattggcaatttgtttgatcagcttcagggaaagacggtattttcaaagattgacctacgatcgggttatcatcaactcagaatctgggaagaagatacaccaaagtttgcattccgaatcagatatgggcactatgagtttctggtaatgtcatttgaatttattaatacacatgcggtctttatggatctcatgaatagggtactcaaggatttcctcgataactacgtcatagtgtttatcgatgacatccctgtatactctcagccaacagaggagcatgagcaatgagcatcatcttcaaatggtatagtagcgacttagggatcacaagttgtatgctggttgtcagaggtgtcttttgtaggacatgttgtcgggaagaatgggattatagttgatccaagcaagattgagtcagtgaagaactggccgaggtgaaaaacttgtgtcagaaatttgaagtttcctcggtttagtagggtattatcgacgtttcgtcaagggtttctctaaaatctctatggcactaaccgagttaactaagaaaaatcagcgattcatgtggacacacaaatgtgaagcaagttttcaggagttgaagcaacgtttgagaacagctccggtgttacctttgtcatcagatcgagaaaagtttgttgttta

SEQ ID NO: 92907 - DNA, 1435 bp, Cannabis sativa
aagtcataaatacaagggtgaacctaaaatgaaactagttataagaaaagttagtacaacagtatatttgtagctagagccaccttaacagtaatattagtattcaagtattcaacaatactatcatgaaaacctttcttttatttacaaaaaagaaagagactaagtattcaaatgtaacactctactttgataatagaggactcttgttgctgaaggattattaaatattgcaaagaattgaccattgcttttctatattctatattcttgacatcaataattgtaaaattttgttcaaaagggcttttttaagtgtttttatttcatgataaggttccaataaaacacaactacctagcactgaataatttactcccatttgaaaatagagatatcatatataattttcatcttcattatatcattccccctcttcatagacatacagcaattatgttctaaagtatcaataaaaacacagcactagttccttttatgttttgtttctttgctttttaatacttgctattaatcccttcttattttactcaaatgatcttgaagtttttcaatttgattctcggactgcaaaatgattagcagaaaacaaaatcaagtacaccaatatgctgtagtaattgtcagaaattagttaaaatgaataaatattagattagtttggccctgttgcatagccagaagaaaggagctctttgggtactctcctacgaggcctagagagaatagctctcttccaataccgtggtgctggacagccttaggtgaaaagaaataacaaagatgttttaaattgatttcagaaacaaaatgatgcagtacaactaattttctattcactaaacctccaaaaagaacataaaaattcaatcattgcaagtgttagcacaactttcacttgtttggtgcaatagttataagtgtttgtatcaacttattttcttacaagttattgttagcaaatgattaactaacctattccttttttttcttcttaatcaaagtcaatattatcctatcatactcaccaaacaagagcttaaccaaataaaaactgtatcttaaatatgatatatatatataaattgtcaatatagaaagaaaaaaaaatcctaaataacttaaggatttaagatattttaaaaaacatattatgtgcaaaccacaagtgaaagaaaaacaagcaacaagaataaaatcagtaaatgttaaaaagaaaatgtctatttctttaattttattctaaataacaataaagaagaagaaaagtaattgttaaaaagaaaatgtctatgaaactttgaatactagacatcaaagacatcaatttaggtgaagaaatgtaaaggttaaaccttttgctaatgttggaatgcaatagaaagccaatactctcagtcgctaatcaacagtt

SEQ ID NO: 92908 - DNA, 730 bp, Cannabis sativa
gaatattctgacctgctttcggagtctgtcatttgagggaccatcaccatgtaatgggtgtcacatactccacactggtctaccaatttggataataaaatgcaccaagcatccatcagcgtcttcagttcgtcttttgttaagagttccaatacttgaatcgaagacgaacagcttccacaactcaagatttgcctccatagcgatctaatgtttttgtcggtccaagaagatggccatgtatacgcactccatatccttccaagatggcatgaattggttcacgaacgagttccaagggacttcccagacaaagccagcatggtcattattagtcttccaagcgtcccaccaaccattcaatgatgaagcaaaccaagatggcacgacagtacacttacgtgggtacaactctgggaagaagtgttgccacctcctcatcatatggaaattcgcatccaaatgctacacaacacatacatataagtcagcatgagccaagaatgaacattaaaaaaaaaatcacaactgtaaataacaacaaataatacttagttaataaacttacatcgtcggagagccattctttcttcataagtagcctctgaaaccaagccacaccatgtacaccggtgaagacgtccctcggatacttgtttccgatggttcccactaaccaatttcgaaaactatgtagtagcttctcatcaacgggccgaagtgggtcaac

SEQ ID NO: 92909 - DNA, 619 bp, Cannabis sativa
agtaatataactcaaacttatagtagttatcccatctttcccacacaaccctgcatcaacatacattttccaaactacttaaaaatgagattatatcagttgtacgatagttttagttgtctgtagattttatatagttttttcccatgaagacctaattcatatgataaagatgaacaatggcagatcaatctaaatcttgagtaatcatgaactcttgttcatgttattagtttctttgactcactcgttaaggttttttttaaagaaaattaatgattcttacaacttctattttggaaatctaatagtgtgtatggcagggaacatgatctacaattatagaattctcactaacctaacagatcgaatgttagttccctctatgtattaattttagaactggaatgtagcgcacaaattttaatgggatctaaattatacttccactaataaattaatagtactaaaggataaagaaataattagaagggtaaaacgataatttgacaaaaactaattacgaaccgatacaaagagggctaatcactgaaattgattatatcaatggacactgcagtaaaacccagtaaacataattctataatgactaagagtt

SEQ ID NO: 92910 - DNA, 1514 bp, Cannabis sativa
ttggagtgaaaattaatgatgaagaccaggctataaacctgttgagttcacttcccaagatgtatgagcactttgttgatacaatcttgtatgtcaaagaaactctgaccatgatagaggttaagactgcattaaattctaaagaaatttagaagaagggagatgagaaagaaaagactaatggggaagcattactcattgttaaggggaaattttccaagagagaatacaagagaaaaaatcatcacaagtccaaaaggcacggagttgttgatgtagcagatagttatgagtcatttgatacacttgtagtgacaactgatgcacttgtgatgtctaaatcagattcaggtggagattggattttagatttagggtgttcatttcatatgacaccaaacaaataactatttaggactctttcagagagtgatgggggcacaattcttcttgggaacaacaaagcatgtgagatcaaatgtgtatgaacaatcttgttaaagaatcatgatggagtcatgaagaccttgcagcagatcaggtatgtcctagatctcaaaagaaatcttctctctattggtatatttgataatttggggtatgttgttaaagttgaggaatgtgtaataaaaactgcacaaggcactaaaactgtgatgagaggaaggtagagtaatggattgtatctcctggataaaaagataataacaggtagtgcaacacctattattaactcaactaagcacaatcaagtaaggctatgacacctcaggtcaaagcatgtaagtcagaggagacttgaggaaatgaacaagcaaggactattcaaattgaagctaataggatgacttgaattctgtgatgaatgtgttttggggaaggcttgcagattgaaatttagcatggcaaaatacaccaccacagaaaggttagcttatgtctatttagacttttgggggccatctaggattccaaccaaaggtggagcacactatttcatgagtgtaattgatgattacaacaagaaagtctgggtttatttgttgaaaagcaaatatgaggctctgaaaacctttaacacatggaagaggctgctagaaaaccaaactggaaacacactcaaggttctaaagaatgacaatggccttgagtactgttcaaatgagctcaagggattgtgtgccaacatgaaaatccaaaggcataaaactgtgattgaaactcctcaataaaattgtaacgccccactagattagatacgttacaatgttccgaaaatacagaaataaagaaatttcacgatctagctaccaaaatagaatggatttctaattattgtgcactcctttgctaaccaaagggtttattaaaaaatgtgaataattaattttttttaaattaacttaaattgaaataaatatatacaatacatattccgaaatctcgtttaaaaagttacaactcttttccaaaatacaggtatacaaaagttgtcgcttagagactatcaaaat

SEQ ID NO: 92911 - DNA, 879 bp, Cannabis sativa
  modified_base (45)..(54): a, c, t, g, unknown or other
aagttcatatttagggtgttagtcaacatacttgtgagtagatcnnnnnnnnnngtaaaataatttccaacacatttgcccccaaatccctgtgcggacgtctgtatggatagggactttaccagcaagattgacattgtcgagactatagttacctttgctaaataaaagtggtgcgtgtgttgaagcattttgtcttgattgtttgatcttgttacaatagagaaataattcatttatgggcctttataatgagttggtgaagtaagtgaggaaaaggggacccacatgtacataactagttttagggggaaaccccttttttgacttttatttttcactttcactttctctcactagaatttggctcgctccccttctctctaggtggctgaacctctaagcttcaatctccttgggatttttgcattatttaaacgatccaagcttcccatcttcgtcttcatcagaatctagttgcgagtaagctttctattccctctctttcacttgtcatgaatctgaccttcattgtgattcttggctctttaagtcacgaagaacacgaagaacacgaagaacacgaagaacatgtttgagttcttgaaaaatcatgtgttttgatccatgcacatgttggccggccaaggagactttatttgaagcctggccggccatgggtggctttcatggggtctggctgggcatgggactgtgtccctaggctggttagcctatgtctggaagtagggttcctggtcggcctctaagctgggtcttaaggtctagcctgcctctaggacctagaaccctggccggccaaggccagggctctcaagtagacaaccagttttctccctctttggaccacggttagag

SEQ ID NO: 92912 - DNA, 706 bp, Cannabis sativa
tttgttttattttattgctagttatgtgaaaaaaaaatattttttttcataaatattaaaaaataaccaatctaaaataactgatccaatctgcacttttacgattggattggaatggatttgagctattgtgcggattggattggatccaaaaaataaaattcgtacttagtgcggatcggatgcactataagcaaaatagtacagattgaattggatgaacacccctaaaattataagacatatataataaccccagcaaaaaataggcaaatgtaaaaactatactcaaataatgatttctctaaaagaaaaaaaatacaaattctctattagaaaaaagtgaaatatgcggtaaaagtggtataaaaaaggggaatttacaaaaataacataaaataggataaaatttacaaaaatgctgtgatgtggagtttttttatatttttactgtatcaaatttacaaaaatattgtgttcaaaattttaaaattataaaaattttgtatttcaataaaataaaataaaaaacttaaaaataaaaaataatcctagaacaaacaactataaaacaaaaaaaatatataaaataatcctagaacaaaaatatatcctccaatttgggtaaaagaggaagagggacagtgtggaagagaagttgaaggagagtggaagtagaagccatggttgagcttgattttccaaa

SEQ ID NO: 92913 - DNA, 904 bp, Cannabis sativa
actggcaaagtttgcttcagatgaggtggctactgaagctgctagaaaagaaaagtttattcaagggttggatgaatatattgcacgggatgtgatttttgcttctaaacaacctagggttgcttggacttatgcccagatagtcgaactggtcgtagtttctgtgggtgcagaagatcatatacgaaagaaaaatattgccagaagagattcatggaagcaaacatcaggtgttggttctggtaggggtactgatctcggtgaccggaagaaaaggcctagtaaatcatcagctgcaggcccaaacaaaaggttccagggtaacaggcttccgtcatggtgagaacaaaaactggcagactttctctaaatgcccgagatgtaaaaggcgccatcagggcgagtgtcaggccagggcctatttccattgtgggatagtaggtcatatgaagaggaatttcccacagctactacggctagagcaaaagaaggatgatacacctgctcccgcccgagtgttcgccctgactcaggctgaggctgatgctggtccttcaactgtgacatgtcagctttctgttgctgctactttattgactgttctaaattattctggtgcgatgcattcttatatttcaagtagaataattgagaagttgaatagacctagtgatgtgctttctagaggtttcaaaactttattgcctactggagaattggttatctctagcaggtgggttcgatcccttccagtatttgtggaaggaagggagttatcagttgatctcatagaattgaatctggaggattttgattttattttgaggatggattggcttgctaaatacaacgccaccattgattgcaaaagaaagacggtaacttttcaacctgagggcgagga

SEQ ID NO: 92914 - DNA, 980 bp, Cannabis sativa
ttcttcaacatcctaaagaaatgccaaaaattcgaatggtctgatgagtgcgaggaggcattcaaaaaactaaaagagaacatggctaaacacccgatcctatcaaaacccgttctcagagaagacttgttcctatacttggctatctctgagaatgcgattagcgcggccttagtacgggaagaggaaaaaactcagcatcccgtgtactatgttagaaaacgcatgatagggcagaaacatgatacccggtgatcgaaaaactagttttttgcctcctaatggcctcaagaaagctaagaccttagtttctggctcacccaatcaaagtattaaccaaccacccgcccgctccgacaagttctacaaaaaccagaggcgtccaggagacttttcaaatgggctatggagttaagccaatttgatctacattacataccacacacctccataaaagggcaagcgctagcagacttcatcacgaagtgccatgaggcagaggctaacacaagcatgcccacaccgcaagtcctagcgtggaaagtgtttgtggatggcgcctccaacaaaaatggatttggagcgagggtagcaatgatatccctaaacagactttgactctaggcagccctacagttcaaattcatagcttctaacaatgaggccgaatacgaggccttgatagcagggctgagattagcaaaagtcgtgggggctagaagagtagaagtcttcagtgattcacaacttgtagtgaaccaagtattgggggaataacaaacgcgcggagaaaaaatggccgcgtacgtagcagtagtccgagagttgctccacgagttcacggactacaaagtagaaagactccccaaaaaaaagaacgctcacgcagactgtttggctaagttagcctcagacagcaaaattgagaaactgggggtggtgcctgtggaacgcctttcggaaccaagcattaaagccaa

SEQ ID NO: 92915 - DNA, 504 bp, Cannabis sativa
  modified_base (141)..(141): a, c, t, g, unknown or other
agctttcaagaagctatgagaagtaaagatgctgaagcatggctgcaggccatccaagaagagatgcagtctcttaggaagaatagaacgtggattattgtgaagaaaccagagttctacaagctggtaggatgtaaatgncttttcaagcataaagaatgttcatggaatgagcctaccagattcaaggcaaggttagttgccaaagggttcactcagagggaaggtatcgattacaatgagattttctttccagtggttaagcaagcttcaatcagagccatgatggcaaaggcagaaagcatagacctagagattgaacatatggatgtaaggataactttcttacatgggtaattagaagaggatatctatatgcaacaacctgagggctttgacaatggaaacccaaatggggtatgtctactcaagaagtctctttatggcctgaagcatgcacctaggcaatggaacttgaggtttgacacctatatgtagaatatt

SEQ ID NO: 92916 - DNA, 816 bp, Cannabis sativa
ctgtaggttgcaatagctagagcttcccccaaaaatcgtttctctaatctggaacagaacaacaaacacctaactttgtttaacgggtttcgattcatccttttagcaacacaattttactgcaaggtctttattatggttctatgtctagtgattccttgttcttgacacaacttgtcaaactcagagttaacaaactccaatctattttccgtcctaaggttcttaacttttagatctgttttgttttccacctgagatttccaaatcttcaactgttctaggcattcattcttagttgctagcaaataagtccaagcacacctactataatcatcaactatataaataaaatattgcttacatgagtgagtaggcactttgtgtggcccccaaaaattagcatgtgttgtgataattgcaacatggaagtaaacgtatcgttttaacaagtaatacccacaaagagtgaggtcgatcccacgaggattgtagttaagtacgttaaaattaaattcttacttctatttggctaaataaaattttaagggaaaattaaaattagaaaaataagaaaaactgtgaaagtaagaagtaggtaaattaataagggaattaacaatgaataaaagttagggctttcaatttcaattgtatctattgattatggtttaacatgattgtattcctattaccgatttctatgcaatagcaggtttactaaatgtagtttatagtcttcttagatatataaacctcaattacgtgcaaaatttctactctcgtgataaattaaacatgtaacaggcattaaac

SEQ ID NO: 92917 - DNA, 1057 bp, Cannabis sativa
gagatagtgctgggtttacttcccaagccagtctttaacaatttcatctcgttcctcacttcctctttctgtatgaacacttgagatcttccattgaacccactgatgttcctcaccgggcgaccttgtaaatcatcccacagctcgcctccagctgttgacaggtcagtcgtgatccctacttgaagagcagtaagttgaatattgtcgttcaagtttctaactttagcagcagtagtactgaaatgacttaggtaagccttaagtgactcggctggttactgctttacgttagtaagcgaggatgctttaggtcgtctatctcttgctgcctgaaattgtttcttgaaatccttagacagctgttcccaagaggtaattgaatgatgggtaaacttattgaaccaactcctcgttgctccagtcagtgacgtggggaatacaatacacagtaaattattcgagacattgcaagctcgcattatggtattgaaatttttgaggtgggtgattgggttcgaagtcctgtcgtacaataagacgtgagggtttttaaatccctggggaagttcagagttcataatttctggatggaaaggcttgggttcttcatccaagtcataaccaggcagtatcccatatttcccatcttggtatctcctaaatttatcttccaactcaatgattcgtaattggattgaatcatcttgctttcgattaacattgagttgttggcgtaaatcaggtgcattctgatttaagcgctcacgtaaatcgtgttgtctttgattcaaatattcacgaagatctggaaatctttgttcatagttgctcatagaccttgtatctgagtaactctcaaattgacaactcatattactccttctctctcgatcattattacgatgagctttatctcctcctcgttcatgcctctctgatcgattgtgctctcgggatcttgaatgtcccgatctagaacttgccttgtcctgcacaggtcttctccttcggaaaaggttagatacacgttccccgctggggtatgtgtatgcct

SEQ ID NO: 92918 - DNA, 502 bp, Cannabis sativa
tctctcgactcgcccgcgactcaaaccgagtcaactcgctcaatgccaagcttcagttgaaactcaacaacatccataaatgcgatctccgaccagtggaaaccgagattcgaccagaagacctctcaacacccataatctccagcgtaagtcagggaagcagcgaatgctttgctcggatcggagtcggtactccgacaaatcagtgcgaaccttgctccgattgctaccaagaaactgatccgatattccaacccgaatcatcatcttcttacagtcctctcacctccgattcacgccaatgcgtcgccctcgaaacgttcgcctgtagaaacaacaggtgtttataccaggttgcttatggcgacggttcctacaccgttggtgatttcgtcgccgaaacgctgtcgtttggtaagtcaggttcaataaaaaaattgaaaaccctagatctagattaagagaaacagagagaggagatcgagagagagagagtgataga

SEQ ID NO: 92919 - DNA, 989 bp, Cannabis sativa
taattgattttatttaatcaattagaattttgaataagactatgtcttatttatgagttttcactaagcaatgacttatttaaaaagaaaaggaattttaggatttgtttattaattaagagactttaaaatgtctaattaataaataagttaaatgataattttatttgataattaattaaagttattaaatagatagaattgatatttatagagttagaattaaaagatggcatttaaaaagagaaaagataagttttaaataaaatggcaaaattgaaacccaataggcccactaaagaattcagccataagggtttaaataaggccaattttatctttttttttattccatttaaattctaaacctaaccctaatagatatcacataaatataaaattatagctcttattttatagcctaattgactctttgtcaggcaaatcaaaaaataaagagagctccttctattttcgaattcccttcttcttcttctcaataatttcaaaccttatagtgtatgagtgattgttcacataattcaagtcaatactcaagactgtgtggaagattgtgtagtgtttttatcatactccatggcagaaaagatcaagggttagagatctgaatagaatgagttatattattctgctgtcattaatgtaaggttttctataattttatatatttttaattcattattttatggaattcatatttagaatgttagattacagttttataatcaaacatacatgttaataaatctagatcctggtaaaatcttttctacacatttggcgttattccagttattaactactagtgttacttcctaacaacacagatatagttgtcaaatagtaaagaatccaataccctaagaggagtaaacatatagaaagaattttcacaatatcaagggttttataactaaggagatgtaatggtggagaaggttgtaactgaatacaacctgtcagatcct

SEQ ID NO: 92920 - DNA, 656 bp, Cannabis sativa
atactttatcctgaacacaaaattattaatatatataaatataaaattaataaaaggaaaactaaatatcaataataaataagattctaacctttgaatcatctaaagcctttactacaccactgtaagagggacttttcttacactttcaagttgtcctccatcggcgaattctcggcactgaattattaatgtgatctctaagctctacatacttgttagccactgctggaatacattcatacactaaaatctacacacacaaataagagaaatttttaataaggtatttcattcttgtactttacttaggaaaatttacttactgctaatggaagagggaagcctgaataggtgaacgtggacatcgtccgtgctttctcatgcactgatattgctttttcttttagtggctttcggagttgctttaacgtatactcataagaatgagttccccaagggaatttgttgaacatttccaaatcatcaaccaatcccaataattttagatcgatgttagcttgttttttgtctccatgcattaagactccagaggcgaacaagactgaagccatctttaatatttcattgttaacttcattcttcttccgtgattttttcttttggttttggtcagacaattgttttaatttggt

SEQ ID NO: 92921 - DNA, 796 bp, Cannabis sativa
tatttgaaagttatatcttataaattttctttcgatgatacaattttttccctccaaaccatcccctcttctataatggatgggagagtctaatttatagtcagccccttcctcttacacattcagcttcccccatgcaccctatgaccaatccctttcacctatcattacattgtcccctaagcaacctgccatgtctagaatcctaaattacactaaaaaagctcctttcattttgtacctcggatgaaccaaaatttgttcctattatgtaagcaggttaagccgtcattgtcccccctgacaccttctcagtaattttgccgatgtcatgaatgaaaggcggatgagcagagtcctgaggctgtgtgcacgggtgcagggctggctaggcacgtggggaagctgggcgcgcagggctggcatgcggggcaggctgggcgcacaaggaagactgggcgcgcgggtagggcgcgcgggcagcgtggagctccccttaatgactttaaatattacacttagtaatctttggggtcaacagtataatttaatacaatactatatttagtattttgactgttaggattttatgccctaaataaaaactatatcaatataatcttatttgttatcaatagaagattagaagtcatttatgtttatatgtatttttcatgattatggtttactatacaatttctgttaactccagaacatatatttatttacaattacagtggtgtcaacatagtagaaggtaattgtgattttacgcttcaaaagtttatgtcccatg

SEQ ID NO: 92922 - DNA, 655 bp, Cannabis sativa
cccaagaactttttgattaattatctttattttgtgtcaactatggatcgacgttaatctcatttaggttcaattagttcaaatataaatggtatttttaaaagttattaaaaaaaatatattttttacattaaaggtacttttttatttgggctcctaaaatgagtgggccttagatacggacctagcctgcctatgcctaaagccgaccctgaatttagttttagtcacaataaatttagtgataacaaattgtaatttttaaaattaatacatttagtcacatgtaataacataagaatgataatcgatttgtatttaaccataaattataaattttattgtgactagttaaaaagatttttgatagtgatataaatatctatatatataatgtgaattaataacatatattgcatatacaacatggatcaaaacataaaatagggattctcccttaatttatttgaaatacatatctaatgaacatcaactacaacaattgattaatacaagagaaaatcatgaaaataaaatacaacttaaaaaaaaggccccattaattgtcatgggtcttccctttttcacagataaatattacaattaaaaaaaattataataagagttagggttttttttagagttgatcaaaaga

SEQ ID NO: 92923 - DNA, 928 bp, Cannabis sativa
aattgaactatgattaatttagatcattggatctatcaacaagttaatcataacaatttaaatcaaataaataataggtttattaaaaaaagttttgaataaacaattaaattaacaaacatgaaacaaatatgaaaaattggttaacatatttttatttttaataaataaaatattattaaaaaaatatcatcatttgaattttaattaggtagttagaaaatattaaatctaacaaaattctaaaatatatcaatttaaattaaatatctaactaatttttaagtttctagcttatttaaataaatttaaatgaattaaataactaataagataatataatataatatcttaatttgaaaaattaagatatttttaatattatattttaatttttataatttaatgagaaatttttacaacaaaaatataaattggcttttttcttacacgtataccccacacgacctcatttgtgtttttacactttaagttgttttatttacgattttaccacttacacacattgtcacactcttcatgcaatagtagactatatacctgattgacacctatcaatccaatctttccctcccttttttccttctgtttttcattttcttttcagttttttttttaatttttttttttgccataactgatctccttccttacccatgatctaaacccattttgccactacccaaagatctttctgcgattttcttttctaacttcccttaattgatttgttgtaactgattgtgctttattttttcggtcttaacttatatatattcatggctaatactcgttcatcatcgtcccctactccattgcccaatttttttttttttgaaaatgagtgttatatctgtagcaaataagtccaaagaaaaatgctcagttgtagaagatgatgactccg

SEQ ID NO: 92924 - DNA, 805 bp, Cannabis sativa
tcagaccagcctacatagagaaaagctttagagtctgagccaagtaaagaagattaaaggaaactgtcaagaaagacttacccttgtccctcaagactcctcccatcagctgctccagggaagattcattgtctgcgccagccagctgctcactcacctcaggaaccaaccggttcatgtaatgggcgagcatctcctttcctttcttggcctctagatgcactggcaagggtggagtaggagcctgaatctcctcagatctactcttagccagctcggatccaccctttgaatgctcaggcctatccgagcttcctccccgagaatctttagacttagcaactttcggagtagaagggtccgcaacagctagctccttagaaagttcaataacctccctggttggtgccttttccttggaaggggtcgcctcaccgcccctagatttcttggccggaggagatgagcttgagcctcctccaactctcttcttcagagcatcgagcatcttctgagacatgtctacacggtacaaaaataacatggttagagaaaaaaagggcattagaagcataaaagcatgatagtcaaggagtttaaaaaaagatggaatatcctgcgaaacgatttgtccgagcaagactcaagagtccattatcacctgacaagtctcttatctccgccatgacggctttcccttttcctagcacgggagaggattgccgagcaggtgaactgggctccctaattcgaatggcatgttcaacgggccttggctgggccggaagtttcttcctccttttga

SEQ ID NO: 92925 - DNA, 881 bp, Cannabis sativa
tgaaaaactttaagaaaggtatacaggtaataataatctatggttgaaaattgttgcaatacaatttatatatttatattacttgagaagatgactaaattggtaattaatttatttgattcaaatatggaacaatttttattgtatgatttccttacacagcatatttatatttggtatagtatctgcttgaaaataaattgtatgttaggttaattaaattataagggactaattaagaaaatgaagatatataaaagggaaacaaaaattgtgtgtggctatatatagttaatttgtttcataaacatatgattttcttcttgttctagatattttcttaataagaaatgtccttattatcatttttgtttgatacttttatacaaaatacttaaagacatttttttttcattaatacatattttatatttatacggattatgattgatttttttatttattattttttaagaaaataacataaaaaaatataatgtaaatgtagtagtaatttgaaaactgcgtatacaaacaacataattgttaaaacaacctcaattgtttatatatttgttaaaagaaatttcgaactgtaaaaatattaaaaatattgtaaatttgtatttttataagtttttttttttgtctttttttttttttgatgattatgaaaaagaaaattcccttttttgtttcttccatgtgttgatacttaaggtcacgtttggataatgaaattagataagattgaattttgttaataaatgtagaaaaatgaaggagttaatgaccatttgccaacaataaattcatattgaataaattggataaatatggtttataaatttcttttgatgatgtgttaggtgtgtcaaagt

SEQ ID NO: 92926 - DNA, 1140 bp, Cannabis sativa
gatatgttgatgaatgaagataaggactactttgaggagagcttgatgaagaagtagccattactgggcgaactcctagaataattttaagtgttgtctttgcactatttgttttctcataaccctaactttttgatttctctgatattttgtttgtattattgttcttggttttgggtttggtgtggtgagattcggcgaagaaatttttaggttcattgtgttttgtcgagagtttaggggtgagcttttgggtttgagtggccttgtatttctgggtttgagttttaccgtgagtgagttttttcgggttgagtttttgaaccgtggctgagagaaccttagaaacctcacccttgtgtgcaactattgttagaggaaaagaaaataagagagaccattagaaccccaaccttagaaagaatcggcaacaagagtatgagaagaagaagagaaacattataaaacccaagaaatcattagaaccctaaccctaattttttttttttggagcgactatttgatagagaagaagtttaaaaagatttgaacttggaatagaaaagagtgattattgtaggaagaagagcttcaaggttagaaatattaccttatatatctagggttaagtgattagggcttcctttattttctttggttgaattgctatattaggccgagccaagttgaagtgtgaaaagagttttgttgtgttgtttggaagattgtgtgttgggccgaactagtagtgaatggagtgtaatatcccaaaaagatataataatatttaattgaacatattttattaaatatgtaaatatttggacattagagtagaattatgatctaacttaagctaattatgagttaattagtgaaatattgagtaaatgaataaataaaacataatttattaattgtggagattttatcagattatatgggtattttatatactatttttgaaataaaatattttcgggtttagcgatcgtagaaaatcgacgggttggtaagaaatattacgacaacaatggaatgtgatacattggaaatataccggactagtttagaaagttgagttgtcggtttaatcgggatagctagtgaattgtaacgtccccatttcaagcctccatt

SEQ ID NO: 92927 - DNA, 880 bp, Cannabis sativa
aaattattatattaaattataaggaaattacccatgtattatttttttaactttttttttcaaatttacggtttaagtttctaaagtgattacacaacgctagttgcaataggtgattctataaaattttttgttgcaattttagagatttttatgtagaatttcgtaaaaataaaaaaaaatatattttaaagtataaaactgaaaaaacccgtaaattatatacgactcaatatttaattataaattgttaggcatcaaatatccttttattatatctctttatatatttatatatacgcaatcctctctcttttatatatctatataaccatatttatttatatacacttctcccttctcttatataactataatctataatctataacatatatatataaagataaatgagttttttggttttggttcaactattttgtctttttgtggttcaatttttttctttttgtgactcaattttttctcttttaattttttggttttggttcaactattttgtctttttgtggttcaattattctttttctattttttttttttttgtgtgactcttctcataatattaatattttaaatttaaataatttaatatttatttttttaatcttttttttttttgacttaatatatttataaactttctacctttaaaaaaataatactttaaatttaaatttttaaacatttaatatttatttaataattaattttttctcttttaatttttgttcaactattttctctttttatggttcaattttttctctttttttttttttgtgtgactcttctcatagtattaatattttaaatttaaattatttaatctttatttttttaatcttattattttttt

SEQ ID NO: 92928 - DNA, 564 bp, Cannabis sativa
agtaattctctttttcaaatattacctacacctacgtggtataaaattagggtaaatagtattttggaccgtgtgttttgcaaaagttaccaattgaaccatctcttttgttaaatgacgaaataaatcctagatttttcaaaataataaaaatatgatcctgagctcaattaacaaaaacattaccatatacattttcatgtactaccatacataatttacaaacaaaatcattgtccttttttctctgaaaaaaaaaaatcagtccttttccataattttttaattaattatatattattggagtgatctcttcaatctacttttataatcttttagtcaatattcatgtaagaaaatacaagccaatatgtattttttaattttttttatgccggtgttcgttatacttacaacattatccctataaataattataaaaaaaatatcaccatataaatttataatttttttaatagtttacaatgttaaaatatcaaaaacgtttattttcgatactgtaaatcactcgaaattttctaaaatcttaccgagatgatattt

SEQ ID NO: 92929 - DNA, 645 bp, Cannabis sativa
ataaactacttctttaagatcttcaagccacttcttcacattgtcatctccaagttgtttctcctcggcatcattgagtagaacattagcagacttcaacattgtcttcaactttttgagatttgcttccttatttcctcgaaagaattcaaggacatctttagaagcaagcctatcaaagagaacattcatcaaacccgaaagaagagctcctcccaccactaattccgccatggtttcagatcttggaagagataacaagtgtatggatagagcttagaagttagaacaaaaggagccttggtttagagttgatgtaatattcaaaggtccaacgcttaaagataagatttttatggctaataatgaatgaacctaacaacaatgactttccttttctttttttttttttaataatactgccaatatattacatagtgatggctccaacaaagttttcatggttcaaacaagttaaagatatacactaaaaatatacaccataacaaatatacatttgtttcttcagtaagcaactcttgagacatctcaatcacaagttccttatcggcgcacctcataaactcgtttacttcatctctaatatcatatattttcccgaactcgaacaagtacataaaacac

SEQ ID NO: 92930 - DNA, 969 bp, Cannabis sativa
gtccaagttcgtgttcaagttcggtccgagtttagttcgtggttttggttagggtccgagttcgcatcccaatcctagtcttggtctgggcttcgtgtcccaagtctgagtctggttctttggtcttgggttcggccccggtgtccaggttcgggtcggagtaccgtgttccgatttgggtctgggttttgggtttaggtctgattcctggtctgagtctgggtccaggtccggatcctggtctgggtttaggtccaggttcgagttcgtgtcccaggtgcggttctaggtttgggtctaggtcagggtctcgttacaaatctagctttcgagtttcgatcctggtctgggtcggggttttggtccgggtgtcagtcttggtctgggtacacgacgtgtcaaggcccgactttaggtcacggtttgggtttggggctaggtcggagttcggttctaggtttaggtccacgtcctagtcacggtcctaatcttgttcgatagtcctggtcttacggttcttgtttaagctctattttcgggtcctaggttttggtcagcggccgtgtttgggtcctggtgtgagtcccaaatctagttcgggaccaagattggggtgtggttctaggtcctggcccaaagtttgtgtcccgagtctggttccatgtttgggtctgagttcgggtccaggttggacatcgagtgtaggtttgggttgggatctaggtacaggtttcggttcgggtctaggtcagggttggagtttgggtgctagttcggttacggttccaagtctaggtccaggtctgattacggttccaggtccaagtccaagtcgtggttccgaacctgttcctaagtcccagtctacttccagtgtcggttctaattttggctcacaaggtacgggttcgggtccaggttgcgatttggggctgggttgaggtctgcgtctagtttcgggtcccagtc

SEQ ID NO: 92931 - DNA, 896 bp, Cannabis sativa
acaaaatagaagatccaattagtaactagaagatccaattagtaacttttgcaataacttttgcaaaacacatggtctaaaatagtatttaccctaaaaaaatctcttttactgacaatattttagtcgcactaaaaaaaatttgcgtaaataaaagtgacttttagtcacaaaaaaaaagagttatttgtaactaaacataatatttagatataagctgtccctaatttagttttaatcaaaataagtattgtaactaaaaacatatttagtcacaacaaattgtaattttagtgattaatatttttagtcacaacgtagaaataataatttataattagtcacaattttttttacttttagtgaaaaattttgttgtgactaaaaataatttttttttgtaatgtcctatgtgtcaatatcgctattggtataagtaagtatcagattgtatataatttaatgtaataatttttaagaagtatcactaaccaatcacaaaataatatgtttagtgtccaataatttaagaagataattaattgctaattgatacttagttagtgagggaatggtcgggagatctacaaagcttctgaagcaattttgtaaatgtctcaactagtctagtacgacataatccaagaagtgacctcaattggaatacaaaatatttttataatatataaacatatatagtatatatatatatatatatatatatagtagtgcacatgcacacgttgatcatagtaaggaaaaatagtagcaggtaggggagtttgattcatccaaagcaagaaaatatatatagtgttatataggggtcaaaaacctactaccatacaagactttaagactttatatatatgtaataatgatcactttttaagtgc

SEQ ID NO: 92932 - DNA, 743 bp, Cannabis sativa
gatatcctacaggaaaattagcgtccaagaaaccaactcagtaaaccgaaattgcaccacaggcaagacaggtggaaaaaagttctaaacttgatgtagttgaagaatttgcaaataattatggcaattcacaaacaactagagtggttatccagcataaagggaaaaaaaatcatggtatggttgttcatacttgtcgatcttttcgaagttcattttaaccgtttcagctaacaatgttgtacatgaattatttaattcccacttcagtaccattttcttcaaaaccacctattattaaacatttgaatctattgaatctataataaatcatctaaattggtggaggtatttgaactagaataagagaaaaaggtgggacactgagaagacttgaacaagcatattatgaaaggccaaggaaaacacacccaacagtaaagataagcatttatcataataacactagttgcgttgaataaaagaccaactaaaaccattcaatgttcggccaataacaccgctcatgattagatgtgcatgcacctagggtagacagtaaacttgcatggatggataattttctatttttctaattcgaaatgtcatgcagtgaaggatgtatgaaaaagactttttgcattgcctcgaaatgtcgggagttttagttacatattcaaatccattattaaaggatgcattccaataaagtccacatgtcatcatcttaaatttgtagaacc

SEQ ID NO: 92933 - DNA, 939 bp, Cannabis sativa
  modified_base (419)..(439): a, c, t, g, unknown or other
ttctccttcttctgccatttttttttgcaaaaacatttaaaagcaatcaaaaagattcaatctattattaaattgattgaataaaaattaataaacttaaaaatattttttttcttcaatcacttctcctcctcctcctcagatctagtatatttgttcacttgaaatgagcctactccgatgtcaacctccctcagatctggttaagagagtcgtcgaacacccaagccgatgaacgactccctcgtactttgaaacctcctaaagcctggatctcgagcttcgatccgcttctctctcctagatcttgacgttcatggcgcctcagagcctcgatctggttgtttcctctctctctggcaaagttctctccttcacatccgatgaacatggctgatgggttgtttctttttttgaannnnnnnnnnnnnnnnnnnnntttttttttttttgtaatgaatttactgattttttttttaatagatatgactttggtttggttgggaaaagaagatgaaatagagggctaattagatggatttattttttagcataataagcacttagttgattggtgttctggtgttgatttttcaaaaatttgggtagaataagaagaaggaagaaagaaggagaagagacgagcaggggagggagagaacgattgagatttttttttgtttttattttatttaataaatctgattttttattattattttaaatttaaaataattttttattttaaataattatatgttctataatttttaattacaattatatatgtgtatcaataaactttcaacacgtggcttttttgtcagtatttaactgtgctgttaaattgggcatgaatggacaaacaagaattaggaccttcaggactattaccgctattttttgaggttgggaacttatctgtatcaaactcaactt

SEQ ID NO: 92934 - DNA, 1174 bp, Cannabis sativa
tttaattatgacattcttaacaagtttactattcataaaacatatcatttataaaataatttacaattagttacctaattctaaaacaaaaatcactacaacttacataaaactaatatttaccttgctcgccaggtaactttcatctagtatatttatatatctcaaagtcatgttattattaaattttattttaatataaattgagtttaaaatactattttgtaccattttaaaaaaaatataggatttgatttgtcattaaataaaataaagggtgtgatcgataatttttgtaatacagtaaaatagtatttatcctttgttgtacatatttttcaagcaattaatgaataggtttgatggcatgacacatgtgcaaaacaataaatgaacagaattctttagatcgtatattgaatggtcaagactatataaacgcctcgatgtacattatttgggtgtcatcattactttgattaaggcaactaacaaagatctcaaagtagtcttcacaaagaaggttatcttttacctcggatgatcaatattttgtagaagctaatgagaacaactctctactcaaaataccttcttatcgagaagaagaaatcatgtcttgcgtaaaaaatgatcaatattgatttggctattgagtctacttagaagaagcttgactagatctattattcttcatttaagctttccgagaagaagagctgaatatggttttgctcaattacaacacgttctgactaagtcaaagcaacaatttatttacattttcaaagatacaagcggttatttatattcctgtctattagaaaaagggattctttttttttattttaacctaaaattactcaaaataaacttttatactgatacaataaaaaataaacatttataagatttaatgtttactaaaatactatctttaaaatttcttatttacaaaaatacggtagtgacaaaaaaaaaaattgaaaatgatagtgattaggcgggcaagtgaaatacacgacttgggaaaagtgctcaaacaaattaatacatgcaagttattctacgtgtaaaattaattaacagggtatataatttatttttattggttttaacaaacactatggagactacttctataaaaactaattaattttataaaaatgtacac

SEQ ID NO: 92935 - DNA, 641 bp, Cannabis sativa
tcaacttgccattaaagaccaaagctttgaattcaaagctccaacttgcataaattcaacacaacaccattcaatcagctactcgaagttaaaatcaactcaaatgaaccctaaaattcgaatcctaaacatcccaaaccctaaaagccactaattctcaaaatcataaactcaaaccaagcaaaaacttaaaaactaaagaagggttctactagggcttaccttagcttgattctcccaagatttccttgctaaaaccaccacaaatcaggagcaattcccccttgttcttgttggattcgaacagagagaggaaggaaagaaaggtttccttcaattttaggttttctcttatttccttaattgattaaaatgaaaagagattaatcaatctgttgctgaaattgatttagctaggtgtcactaagctaggaaagccacctatccttcactaaaggaaatgactaaaatcccctcaaacttataacataagtatttttcaaaactaggtgtaaaattgtcaaattccataatctcgcttaatcccgatattttattttctctacaatatttcccactaagaaataaggttctatacttacccatgttatcaaactagcaatccatcgaattttccgttg

SEQ ID NO: 92936 - DNA, 582 bp, Cannabis sativa
  modified_base (291)..(292): a, c, t, g, unknown or other
aatctagtttagtggtattcagttcaattaactgtgggatcaacctcacctgtgtgagtttactacttgattacgtgcacttgcgtactgttcatatttctcgtaacagggggagaccagcactccttcaggcaaggaacaggggaagggaaactagtagcatgtaattctgcaaaagaaaatcgaatagaaatgcacttattcacatctaaagtgagattattatgaaccttctcgtttcgagtacgccagatggtgtcgaccacaagtgaggcatacaggaaaacctcnnccacatcaatccccttatgtttcaagtcccaaatgaatttgatccagtcccacatccggttaccagtgttacagatcggataaataccctaaggagaggatcgccagatatggaaagccacatcacaagtaagaaataaatattccgtagtttcctcctccctcccacaccaagggcatctcgcctcctcgatatgaaatcttttcctaattacagacctgacagagagggcgttggagagaatgcaccaccaaagtactttatgccgctctaaaactatactgttccaa

SEQ ID NO: 92937 - DNA, 1234 bp, Cannabis sativa
aaaataatttccaacacttggtatcatcgttggcttttgccacatgcattaatcagttatatttggacaaatgggcccatggtccatcctgacttcgtataactccatttgtgacattttgaatttttttagtaacggagcctctatgatccgtctaacatagggttctggatcttcctcctccaagttagagatggcgttgctttttttccttacaagcatggtaagggcagttatttgttcttccaaacgcttggtatcactatccggaagctcacgcatgcaaatcttgtctttaatatggttttaaagatcatttttgtgaggcctcgctctttggcctctgactttttcccgttttgtatttaggcagttacggagatctatagtggaccaactatcttcaggagaaattacctctattccctcgtcttggtttataaaattgctagggcggtctttccatcgttgaacgacaggccttggtaccagaccaccaggcctaacgttatggtcaaccttgactcgtgaattagaatggcgtcttagccttaaggcaggggtggccttcttttttcgcagaggttggttggctgcattttggttagtcctaagaacagtgggagtagtctttttttggggttcacctgtaacacctttccctttgtcctttgcaggagaagaaggttcgacatcaactgggtttaccttttttgtggggttattttccttaggggcaggccttctggagtgctctcctcaaaaatttccgcatgggccttgaatctagcctgtagccacgtgacgagagatgtcctcttgtgctactaatttttgctgaattattgcaagttcttcagccatttgatatacatcaggatctttcacataataatgtttatctttatcatacccatctttaatctcttcatcgtctttgttgtcatcatcatcatggttttttccctcagggtcttcttctcggtcattcgtcttgtcttcgtcgatggagttctcatcgacaaatttctcctgatgctgggcggctttcttgcctcgatagccaccaacttttaacgtttccttgtctctcacagtgctcggctgggcgtgcattggggcaggtggattaacatcctccatgacggtgtcatggccatgagtggtaggcttagtgacaacattttcggtagtcaccattagtacagatatattttggcttaaagtatttcct

SEQ ID NO: 92938 - DNA, 512 bp, Cannabis sativa
agttgtttgcttttctgtacagccatggaggtcagccacagttgttggttccatagagcttcatttcttggccatccatatgtggtacacaaggctggccacaactgtgctcaccatgctttttcttgctgtagtaagtctctttgaatgatggcaggctttcaacaattttgtgatgtcttctgctgttgttttccattgcaggaagtctttagtttgttgcagacagcttgaactatattcacatttaaaaaataaatgttcactagtctcttcttccttgccatacaggacacaagttgtgtcaattctttgatatctacttactctttctttggtatttagccttttccaaaacactagtcatagtatgaatctatgtttgggaataattaacctatcccaaaccagattacaccatggaagtttcggttgttcaagaaataagtcatgatatccctatttaacccgatatctctgttgtaggaagctatccatgtccattttctgct

SEQ ID NO: 92939 - DNA, 513 bp, Cannabis sativa
tgttgatttctctgatgtatcatttctttcaagctctcaattgggatcacccattcatgtgtaatctcaccttgtacaattgtttaatgggaattgcctcaatggctgaattttaaatttaatttttgtgtttgttttcaatctcatttttcactgctgttatctatttttgcttttaaaactttgatcattttgagttttttgttcttgattttggttactgtgatcgagttggatcacatcaaatggtatcaaagccgaggttcaattcaaggagatcaagaagggtttgattaaagtttcatagcagcaagattgaaatcaagatatggtaacaaccaagtatgaggttgataagtttacatgagctaatgacttcaacctttggataattaagatgagggccttgctggagcatcaaggcattgctgaagccattaatgtagatgctttgaaggcaattgaagatgcaaagaagaaacaagaaatcgagacaaaagcacattctgtcat

SEQ ID NO: 92940 - DNA, 546 bp, Cannabis sativa
tagtttcaattcaatcaaggataggtggcatatgaaacttggccatccatccaatcatatcatgaatcttgttttaaatcaaatgaatattaaaaattccaaaactgatgaacttcatttctgtgaggcttgccaatatggcaagtcacatgcacttccatttaaattaaaccatgacaaagccaagtatcctctcgagttaattcacactgacatttggggtcctgcacccattatgtcaaacaccaacttcaaattttatattcacttcatagatgactttagtaggtacacttggctttatcccttaaaagccaaatctgatgcttttcaagcattcactcaattcaagagccttgtagaaaaccaatttgacagaaaaataaaaaagctaaagtctgactatggtggtaagtatcaacctttttccaaattggttatagaaagtggtattgactttcagcactcttgtcctcacacctcagcccaaaatggaagggctgagagaaaacacaggcacattgttgaaatgggcctcactcttct

SEQ ID NO: 92941 - DNA, 855 bp, Cannabis sativa
atcattagctcgttgagtactttctcctcttcgagttgatcgactatgggttctggatcacctcaaagtcacacttgcttcttcacactctgttcctttctcctaagagcggttggtcgtatttctcctattagggtatgtacgagtcctcgctctatgggtttgggaagaacgttggtgatttctagcaggtgatctctgttcttccagttgagtcccaagatcctccttattttcatgagggaattctcgttcatcagttttccgttgtctcccatctggctgttcgtcctgattttaagggctgtctcattttccatgggttgtgcttcccgggccttttcctatctcctggttcatgagccacgaggtctgccccgtggtcttctcactccaggttcagtttgattttgagcattcgtcccctgtgccgccctggccgaggctgcctcacgttctagcttagcatttcgatgctgcgcttcttccaaatggcatctcaagcgttgactttccttttcataagttctttcttccacagattgggcacctccacgattgtgttcttcatcccttgatctggggttctgaccattcccacggctagttctcctcgagcgtgttgtccgtgtactaggaccaatgtcgggtagagttttccaggaacgcatggtccgcgtgctgtggccaccctcaggttgagccctcgtggaacgggaggtccttttggattgcgggtcggtagatcttctggagcccatgggctctttcccagaatgatgattggtttcctcatgtggggtgttaacattttctggattttcagcgatgaaggagatgatttttcttcaaaag

SEQ ID NO: 92942 - DNA, 530 bp, Cannabis sativa
ggtaaggtaagagtcgtcttgttaatataaagacctaacagtggtcttttttttttaagtctctaatctttatatataatgatataaagatttatatttctcttttgttcgaaaaaaaaaaaatatatatttctcttaataataaaacatatatttaattatttcaaaatttgaatcaatttatatttagctcaaaatttacaattgggctccaatacattaagactaaattaactttattttttataaaaaatataaaaagttaacaaatatatacattaagttttgattgaaattatataaaattcatttaaatatataaataaaatgtgaaaaattattaaagtattaatgaataataaaagtgtaaatgaaaaaatacttattttttataacaaaaaaaaaaatagtgtaggaaatttaattgtgtttttacaattctgccctacaccaacaaaacaaagctaatcaatttccaaggtcaatttcgacctttcactgttcaattgacttttcaaagtcagaacacc

SEQ ID NO: 92943 - DNA, 528 bp, Cannabis sativa
aaccttaattatatatattaattaatttcattgtatttataaagatatataattattaaagttgatttatatctttctccttcctttacaacataattatatgtaaccaattcactcaacttttttgtcattctttcctgaaaatcttggtgtaatagtgactatattcaatctatatatcaccacttatatacataaaaataatcattagaaaatattgctattattagtattatttttttgggtcataaatctagtatttatcaacctatatattttctaataatgtttgggacaaataattgatctaataaattattataatatatatagttgtatagatatccgaccagttaccttaaattaatatgtatgtgctcattaattaccttaaatattatagattaataattagctagattttaattatgattattacataaatgatcaaaccacgtacggctactactaattataattgttttagtcgttgtatatttagcgttagttaattattaggttaatttg

SEQ ID NO: 92944 - DNA, 855 bp, Cannabis sativa
aggttcctaattataaattaatttttctataattataagagtattatacatggtttatttaattatatatatagggtatctaagcatcagctagaaattaacaattttttttttctgaagattaaaaaagagtatttattaagccatttttgggaggaaaaaaaaagaatagagttgaattaaattttaaatgtgtcacaatcaaattaagtactcaatggcaaaaatgattccaatgaaatttccgccccaaaacataattataataaaataaaattagaagaataaaaaattccatttgaaataataatattgatgaaaaataatattaagtgatggacaataatattaagtgaattcttttagatatttgtcaagagaaagcaccgatcgaccgtttgggtttcgatttaacagaattgttactatcaactatcatgtctgggccacattattgttttgttctatatattacgtttaattaattaacatttttaattttttctttttggagaaaaaaattattaattagaattctctactgaatactaatcgatttattaaaacattttaatctaatttttattactatattttttcgaattcacacaaattcttacctgttttttaattttaatgcaattctaattttaaaagcatatatttttagcgtttccaacacaatactgatcgatgttgacaatccataatatttataattgtgaaaattttgataatcctcaacaatttatgtggacccaatattgagtcaagtctaaattttatatatgagcttatttctttcaaattgttcaactagttgtgttataatgtccatgcctaacttttgttcca

SEQ ID NO: 92945 - DNA, 783 bp, Cannabis sativa
taaaatagtaaatttacttatatgacattttgttatttctacgtaataaaaataattatttaatatatattactttaaatcttgtcaattttcttttttcagtctctcctctcttaagtcacatatttatactttatgttaagatattaattagagttgtggaaaagccaaaagatatatctgtttatgactttgttttttttttttttattttttttattttttcctattattgtttaaagaaaacattatgtaaagattattttattcattttataaaagtaaatatgtaatagtattgaacacaataaataacacttgagactcaagtggccataggagggtgtgtattagaagttttaggtttaagtcctaacttatgtatggttgtaatatataaacgtttaaattaaaaaaaaccacaacaaataataaaaagtagttttattagctcaataattattagtgatctctatatttgtctaattaagcattattcatggagattaaaaaatattctcatatttaagttttagctcatttcatggaagtttaattttatagtttttatataatttaaagatcgaactattttaatacatctagtaggagtgcagcatcaataataatgctaaacttaagcttatccctcacacaaacgattgctaaacactatattgggtggctttcaacatgactcaaatttttgtgggttaagatcacaaaaattaagtataggtcaaaagtaaatctataggaatgacacaaaataaaaaaataaat

SEQ ID NO: 92946 - DNA, 534 bp, Cannabis sativa
  modified_base (483)..(486): a, c, t, g, unknown or other
tttaaaaattataatattctatcttttttaaaacaattctaatattctattacttcaaaaaaaaaaaacataataaaaattattaaagatctcgataaaaatattaaattaattaaaaatattaattttactaaaaaaaatatttttaaactttatttaatttatcaatacgtattttaaaaaatcaaaccaaaattgttaaaaatctaataaataatttaaataaactaaatttttttgaagaagaaatcaaacttatttatatttataaactcataccttaacaaataaagaaaaataattaaaaattcaataaaaatataaagttattatttttaaaaaaagttattaattaaactaaaaaagtattatggttacttaaacaaatctacattttttgataaaaacaaatatattcaagtttgttcctgaaaaaaattgttttttaatatattttttacaaattaaatttttaatatctannnnaattttctaataaaaaataaataattttttatatcgcgtaattagttt

SEQ ID NO: 92947 - DNA, 548 bp, Cannabis sativa
tttgttgttttcatcttattaataatttattgtaatgtggggtaggttgatttcaccactcactcactataaaacatacccttcaaacctattttgggattattcaaatatatactatatatatagatattgtttctaataattttcaaagttaaaaagctatttctcttttaatcttagattagtttcaggatttgcctagatttaaggattgttcactttacttattccacaagtaaaccaaaatgagcaaacataagttcacatgtcaagataggtgaaagtccctttctttctttgtatgtttttgtttcttggcttgtaagtagtagttgagttgagttaagattagtgctatagaaagttgacttacaaagtgtccagctccaagtatccaatagaagtggaggttttggtatgatgacatgaaccctttggtgggcccacctttcccacaatacagaggaattctatccttgctcaaaaatgtttggagtccttcccacctaatttagtaagaaaaccactaattaacaccaactaatagt

SEQ ID NO: 92948 - DNA, 921 bp, Cannabis sativa
tatatgtttttaggacccgtaattaattttcctataattaatgcatatatacaaaaatttatttggtttaaactcttcccatggcactataaagagaaatatatgtgcaaagtaaaatataagaatgataaaaaatataaaatataaggttttatttatatattttttttttatttatataaaaaatacggtgtaatttaccgaacaacttaaatcataacttaattcaaattgcaacccaaattgcaacttatagaacaaccccaaatcgtaaaaatagaaagaaaacaaaaattgtaaagaaaaaaaaaagttacaaagagataaatggggtaattttcctaaaatgtaaaacacaattaaaaggtctttaattataattattcagataaaaaataataaatacagaaattgttcagtagagaagtaaattacattaaatctacgatatcaatggcaaaacaaatatttttaattaattacagtcaaatatttatattaattagattaattgcatttattaattacttaaattgcaaaagatttgatttgctcgatcagtacacaactactctctcccatggaaagcactataaatatatgtgcaaacatgaagaatatacaaagcaatattaagttgttacacaatattatatatagagagaatagatatacatatataattataattattcaaaaacaaaatggcaaagtcatttccactagtcgcaattgttgttattgcaatggctgtaaatgtttgttatgcagttgattacattgttggtgattcatctggatggaaacctggtgttgattacaatgcttgggccgactttcacagttcgggactcactcggtatgtatgtataatgatatgtgtacacataaactacacaaatataatacttgttttagtct

SEQ ID NO: 92949 - DNA, 679 bp, Cannabis sativa
  modified_base (565)..(568): a, c, t, g, unknown or other
tttttttttttttggtgtagtgatgttatgttattgattaaatttaagttaaagttgttttatggaaattttagttatgttctattttttttttttttttatgaatcagaaagttgtttaaaccacaaaaacttcttttacatcctaacaacacatcaaaaataagccagagagctccaagattctatacatatatatttgactatacatgatcttgtaacttgtgtatccaaatccaattccttattgtttaattttgcttagtaaaataataggaagtctacatctaatatcatatttaatacaccttaaaattacaggcaaggtcattactttttgtaatcaaaacacttcattcttattcctccataagtggtacatcaaagaaacaatcaccatagaaaatatctgcttctattgaatggagaataccttgatttagagacccctcgcatcagttgtcgaaattgacagctatgagtcttccaatttagccactgtttaatgacttctaaacatatgcactcaaaaaacaaatgagttacatgttgggttttgtgccctnnnnaaaactcatttcaatataatcggacttactaattaatataagatcaaaaatcgcatttcatgttacatggttcacatgatttatttcattattatgtttaatgtataaatt

SEQ ID NO: 92950 - DNA, 885 bp, Cannabis sativa
aaagggagaaagaaagagagataatagatagtagtttatagttgtctttaatatgaattaatataataacgaaagaaaattgtgatgatagaagagagaagaagaggagtatgttctggggtgagtcggtatttgggatttagttttaggttgggaagcttattcttacggtgatgatcatttgtctttgaaatgggtttatttagtttttggattcagttgattaaaactctaaaaaaaatcgatttcatgtttggttgctgagaaaataaaattagtactttctcgaagcacttcttcaatttttcttttttataagaaaattatatatgtacgaggcattttgcttcattgtgtagagtgcaattgatattattttgggtgtttcgggtatgagagatgtctattgcaggaaagaggaagaaaggtatgagagatgtctattgtagtgtatgtattattgtaagtattttattcttagtaacatccaaccgaatagtggttgctaagagtaagacttacaaagtatgaaataatggtaaaagctcatgaaataagaatgaccttgactctcgactaaaacgaagcaacgtcgaattctcttttcaatcgaataaacggttgctagaatagtttccattttagatgagttaactattttatttaatgaatgatatctttgactgccgcataatacgaagcactgtatcagtttgttggaaaccttaaaattatttaagatatgattgttttgtattttcacatgtctttccaacgtgttaaattgaatttgaattatgtatgaatttatattgaatcataatattttctattattaatattgtagtataatttcaaatcttcattgttggtctaacttaactt

SEQ ID NO: 92951 - DNA, 943 bp, Cannabis sativa
atttcagtgtaatttttagttcaaattttgttgattttgtttgataattgtttgtatttagcaattatatttttgggatttgtttgtgtattgagtttaatgtatgtattttttattttttactggctgtaaaattgataaattgttatgaaaaatgtatatttttttatgtgttataacaggtttttgaaaatgggaattattcattttacagttgttataatgctaaattttttatgttaatagtttgataggttcagtaattttagaattactaaatcttatttttaataaatatttttaattcaaaaatactcatttagtctaagttttaaaccgacactaaagaaaaaaaatatttatgtatactttaagtgtcgaatttaaaatgacaccaaaacttatttgtctcagtttataacagatacttaaaatctgactttttgtcactatggaataggtgtcagttctatgaaccgacattaaaggtataagtgccagtttaaaactgacaccaaatgtgcagtttgtagtagtgaatgatataactgtgtcttatttgacttggtcttcttctttgtaacatttagttctcgaggcacttaattgtaaagttttcaaaaaattcgtcaacctttagatacatgccttaggtacatactcctcaaataacacattatttgtatttctaaggtgataaataagagcaagcttaagtttattaagcctctcattgttaacaatgtcagcaccaggaatatttctaattgtcttgacaagctagcttagcatcctcgtgaatatattgttgattgtctttgcttttaacgttgtaaatatttatttactttgagaagaacatgctgttaaaaatattttaccaggatctagatttactactatgtatgtttcattaacatccttatatgaattctaaaacaat

SEQ ID NO: 92952 - DNA, 625 bp, Cannabis sativa
tgctctttgatcctctttttctaatcaacccaatgcaatagacacctttaactgaaaactcaccattcatagcatcctttcaaatgacagtatcatgttaaagctccttcactatcggaatttcattaattctcaagactatctcattaattttgagaaaagaaaggtttcactagcctcaactctgaagaaagaggtatgccactacagtttatcgaaggaaaaattattccaatgtaagatgagagaaaattgaataattttatcaaaaaaaattgtatgtattttaaattttattctattctacttatatttttatttccattttcattcctattcatatattttcattactcttaattaaatgccacctaaaagacattcaagtagtgaaaatagctctatgaaattatcaagcactattcattttagtccattgttttgtatataaaaaccacgtgtcttgtaaagtgagcatttggtctctatttatagagtttgagatcatcacctaatttttaaatgggtccctaaaaaccctacgaacggctgttactattcataaattgggttttatatatgtggcgatacattggccctagcttctggtggcaatttcacgttt

SEQ ID NO: 92953 - DNA, 898 bp, Cannabis sativa
aacattctcttagccttctctctaatcctctcgctccctctttactcaattttcctcaacgcctccacagctttggcttccttagccaatcctctgaacctcatgcttccatggctgagcaaacagtacaactcagttctcttgagtcgactcagagttcaacttgttcctcctaagtatatttacaaggctctctaccttaaaatatgagatggatttagaattttgagctttgagaaaacttaaaacatgggatctctatatttctttttttacaaaaatatgacataaaaaattcatataaatgtaaaaaaaaaattaaaaaaattcataaccccatggtattatttatttatgtcattaaaaagtaaactcttagaaccggttatattttaattataaccggtttgtgttattttgtattatttatttttattcattatgttatagaacaagtactatttttatctatatttgggacatctactacttattatttatttttgccataaaaaagtaaactcttagaacaggttatatttcaattataaccgatttgaattattttgtgttatttatttttattcattgtgttatagaaccggttctatttttatttatatctcaaacatctacttctggtgacttttccagtgacttttatagcgacagtgatttttctagtgacttttccagtgatgatgattttttcgacgactttttcggcaacaataactttttcggtgacttttcttgcaccaacaacttttttggcgccgataactctttcggtaacacttattaagttttatcaaatttatttattgttttacaaatatgagatttctatattttttataaaaatgtagcataaaaaaattcatataaatgtaaaaaa

SEQ ID NO: 92954 - DNA, 580 bp, Cannabis sativa
tctttatatctcttcttcttctttttttttatctattttatatattattttattacaaatataaatataacaattgagtaatcaacgttcatgataaatatttaatagaaatataactgaaaaattctcttttgtttttaaggccacccaactttgacaggaaaatgagttgctcaataagattaatttctatcataccaataagtaataattagtcatatgcttatcacatcataccaataagtaataattagcacatcatgtctatcaaatttatagttggtgccacagttttcaactctattattgctctatatgcataatatagctatatataccgtatgatatgattaatagaacatgcactagatagtagatatatatgaattatagcaatgctgctggtaaaagagagaaaaacttttgttttgagtccgaaaatatgtactctaacacttgtctatctttcaattttagctgatcggtaactttgaattcttcaaacaacacaaccttacgagctaatgtggatgatgaagttttacaatttaataatgcatttgttgttttacattttttt

SEQ ID NO: 92955 - DNA, 599 bp, Cannabis sativa
ttacaaatattgattccgattattcttcatttattctgttatatttatttttattccgattctgaatactgtgtaataaacatgccattaaaggttaactattttactcaaaaaataaataaataaataaataaaataataaaaatagaaggaatctactcaactattttttttctttccccttctatataaatttatgaatgccttaaattataaaatatataaggtaaaaagaaaactgtagcctatctgtaattttcctttcaatttcatttcatataaagaataaaagaaaactgtagcctttctgtaagaaggaatatagtctctctgtaatttctctttccataatatataaactataaagtgccttaatttaaaaaaaaaaaaaaaaatacaaataaggtaaaatagaaaactatggtgtgtctgtaatttttctttctgttttgtttcatattaagtgtcttaaaatgtagtttatatatggatttacataatagtataacagttttctctttaccttatttgcatttcacatttcaaaatatttattatgaaacggaaaaaaatagaaaaatacagacaaacaatagttt

SEQ ID NO: 92956 - DNA, 735 bp, Cannabis sativa
gtaattgcaggtgcatttgtgtttcgacatcgaatagttttagcttaatgtatttatatgatagtttaaagattttatataaatagctaattaattaagatttttgtctgataagtattaaattatatttttaaatttttaaagtggttaaaaattttactgaattattaaaattgttgaatttaaatatttttgtctaattttagtaaacaaaagtctaatatagattaaagttcgagatgtatgatttaatatatgtaaaagtttgatgggcataatttagtagatattaaagtttgggaaacatgatttagtacataaataattattaaatttgtaaaattgaataaaataaaaaaaagctattaaatctaataatttagaagaaatttttaatgattagaaaaatttataaagtgtgatttggtacatattaaaatttaggaagcaaaaattttaattagcttatattttacgagaaatttaaaaaaaaaaattaacctgtctaaaataaagttcaaatagtttattattatatgtgtatttttttttttttaattttcatgtgtgttaaattatttaaattattttttatattataaattattttcgaaattttttaaattttgttggagtacactattacttatatagaatagatattgaacacccctaaaatatactaatatttatttttaggctaattaggaattttgtcccctgaactttgacatg

SEQ ID NO: 92957 - DNA, 636 bp, Cannabis sativa
tcttaacgtaggccttggagtcttgaatcatggttggccagaaataatcttgccttaaaactttctttgataaactctacccagctgcatggttgtcgttgaatccatcatgtacctctaataaaagtcatgcaacttcttcttgtgtaacacatctgagtattggcatggagaaacctcttctatacataactccctcaataatgaggtattgtgcagcctttctcctcattttccaagcttcattcttgttatctgggagttccccattgttgagataggctgcttttagcgtcatccagtttagggatgtatcaatcatttcaatctccttcgtgcctgtgatactgggtttttctagaaattggatcgggatcagatttgctttatcatttatgttactcctcgcaagttgggctagtgcatcagcagttgtgttttcttctcttggaatttgcttgagagcatagcttttgaattgtgtgagcaggccatgtattttacttagatatgctatcatcttttccccccgagattcgtactacccagatacataatttaccactaactgtgagtcactgcagatctcaacgtgttcgacatacaattcccgttaggccagcaataagggcttca

SEQ ID NO: 92958 - DNA, 645 bp, Cannabis sativa
tggagcctcttggctgctgttcgttggagataatggtcagcagagagaagtgggggaagaagaaacactgcagcgacaagagggggaagaagaaagactatggcgtacgactctataagttagggtttcaagattgtaaacccttattataatatcttttattttttatttgtttaatattaaagcataatttcaactatgtacaactggttatttttttatcttttatttttttatttactttttttcctcaaaaaatattacagctgtttatttaattttttttttttttgaatttaagattatgatataagttgacgcgccaggtgagtcgggacatatttacccaatcgcgcatggcgcgtcactataaatcactatttttcaaattaataaaaattagaaaaaaaaaatagattttactctttagtgactatatttttagtgacgcgcattaaaagagactaccattgaatatttagagcctaattttgcatgtcactaaaaattactcctaactctttagtgacccacactttttgtgcaggtcactagataggagtgcaattctgactctatagtggagtcaggaggaattaataagatagaaaatttacttaataaatttcagatctagttattggg

SEQ ID NO: 92959 - DNA, 675 bp, Cannabis sativa
tctttttgtgcttagtactatttttttttttgtgaatttttatttttcaataaattaaatgtatatataataatcgataaatttaaatgcattaccattttaaaaaaaaaaatcaaatacattaatatttaataacatgtaaattaaatatctttatttttaatgtaattatttttttttaaagaggatatatatacgctttttttttattattattatcaaataataaattatacacgcaaccacattgtatataataattcaagataattatttttcacaattctattcatataaattaaaaggtcttatttgtttttttttttcttattatttatttttaaagggcacatatataagctctattttttttaataataagttatacacacaaccacattgtatataataattcaagataattatttttcataactctactaatcaatataaataaaaaagtcttatttttttatatttatttttttaaaaaaaaagacaaataaagtttttattcatataataataaattatgggctcgtttggaacgtagtattaggtcgtttgtatttgtaggaaataaaagcattcccaaaatgcccctacaccaagaccccaacgttcaaaaaaccgaggtcacaaatgacctttcctcttgtgcggatcaagaggatt

SEQ ID NO: 92960 - DNA, 504 bp, Cannabis sativa
ggggttgaaatttttttagcatatttattacacctatggtgtcggttattaggaaataaccaacgccatagagtatttacaacattcaaacttcatcttccccactccgttttcttccttccttcagcatgataagcagccaccatagcagaaccaaagaaacccacgaaaccctcaccaaccaccactaaaaattcctatatctccctcatttttacaccattttacccaattttctcttaaaatcttctattttcaataccttaaactatactgtaaaaaagtttggttttttatcctctatcactgtaaccgaacccattaaaaaaatatggtggtagaactccggctaccgattttggtgaagaaaacgttgaatctcaacgtccattaaggtgtcatatgatttctattcattttattaaggtgtcgtttggtaatacttttgttttctaattttttaatcacaaaatgaaagtaaaaaattttatttttaaaaatttt

SEQ ID NO: 92961 - DNA, 675 bp, Cannabis sativa
tacgacagaagaagttaagtgccccaaaatcccagcagagacatccaaagactggaggcagccaattcttaaatacttaaaagatgacaagttgtcgtcggaccccaaacatgcaagaaaaatcgtaatgagggcctcaaggtatccgctattccagaaccagctatataagagatcctaccacgggccatagttgaaatgcataagaaggcagaagggaaagttgattttaatagaggtccacgaaggagaatgcgggagccatttaaggggacaagtaaccgcccaaagagtacaaggacaagggtactattggccgatgatccaaaaagattcagcagatcactctcggaagcgtgaaaaatgctagaagcatgccccatccattctagcccccccgacaaagttgaccaccgtccaaagcccgtggccgttcatgaaatgggggatggatatagtaggtcccctaccaatagcgcctgcccagaaaacgtttatgctagccctcaccgactacttctcgaagtggattgaagccgactctttcgctcaagttaaggacagagaagtagaaggatttgtctggaaaaatatagtatgcaggtttggactaccccaggaaatcgtggcggataatggttctcaattcaccagccacaagttcagaaacttctg

SEQ ID NO: 92962 - DNA, 545 bp, Cannabis sativa
taaaatctcaactaaaaaaaatcacttgtctcattttttgtgtgtgtacctacctagaattgcaccttaattttgtaattttaaatttattaatttaaaaattaccttactataaaaaaatgatataaatctcatgttaaatattgaatttttggatttagttactaaagttattgttcaacataagtgatgacacgtgtctcatattatataataatgccaatttttttcatttattttttacatttaattactataatttttgtacaaaggacaaatttgtgtacaaattttaaattaaatatatgtatatttttgaaatgtacttgtaataagtttgattgtccatttatagttgtcactttgtttagtgcctaaatttattatattcataaacgataattattttctttttttagtatatttgtctgtaaataaaaattaaatagtattttacacttttttgtttcctataattttttttttaataataataataatatttatttacaaaaattgtcactatcttatagcattgtatacta

SEQ ID NO: 92963 - DNA, 703 bp, Cannabis sativa
acctaaggtaactaacttcacctccctttctttctattatgacttaaagatgttgtttgactttggtaagtagttttttaagagagtgatagtattagagaaatataaaaagctaattaaggtttttaccataaattttaacatatatcaaatcataccctttgaatttttttgaccgttaaatcatgcctctcgaactttgacgtgtactaaattatacccctaaattttcattcaggttagatttttttttactaaaattggaaaagtacttaaatccaacaatctcaataattaagggtatatttttaaacacattaaaaattcaaaaatataatttaatacatgtcaaaatttagaaacaaaaatcttaattagcaatataaaaaagtagtctttctcaattggtattagaaagtgatatgttacagaaaaagagaaattgattgtaacatttgtacagaaataaactttgaaaaatgatgttaatttgacatagtttgcaataatagtactttatttattgagcatttttgtgattcaggtggaagttgagtttttgatgagtttatttgaggaggtgataaagtcagaattggacaattttgcaaggtagtgtttcatactttttgtgttttgaaaattaattgagaagtataattgtattagtctcaatcagttgagtagcacttgctgctataga

SEQ ID NO: 92964 - DNA, 1049 bp, Cannabis sativa
tacaaggatatataaggtacaattttagaacttggaattggggcttaaggggtatccagttttgtggaaataggtaagagcttcacacacttgactcaccacatgtgtacgtcgtttgtttgtccgttcgatcaagctatctgagttgagctagttggtgtattgtgacagtttatttttttacaaaaaaattatttaataaaataattatttttattttatttgagaaacttgtttaattaaaactgaatataaatacttagtcgtatcagttgacacttggtgtcagcaattaggttgatattttgtcaacttgggctgatttcgatgatgttttcctagaactcttctaagcatcttctccgttttcaacaaagattaagattcaactatttttggggactaaaaggaactttcgaagggctataattgggacccagcgcccaggttgacatctggcactaggcccagcgcccaggttgacatattgtcaacctgagctctttccattcaagttctcgaaaaagtgttccaagcatttttttttttgtcatcgaaaataataaagattcaagaaaactcaaggaaaaaaccacaaacccgatcccttggaaacagggcccagcgctcaagttgacctggtgttgggcccagtgcccaggttaaaaatcaatctggtgcactggttttgatctctcaaataatgctaaatctaattcaactaattgtaaacaatctgactcaatactggtgatggggatacagattgcagaacacaactgcagggctgctagaagggcctaagcttctgcaaaaattggcgttgaggcacctgcaatactctttgaaaggccgactattctctggttatgatcattaaaaactgaagcacctaaaccagacttttgaaacttggaactaaaagttgcatccactttgagcttgaaactagattgagagcgagaaaagcttccttgggaccccactggggttgagatgcccggagtgaaggtgactttgcttccagaagattgggaattaagcagctg

SEQ ID NO: 92965 - DNA, 522 bp, Cannabis sativa
aattggattgaatcagttaacggatagacttaaagaaccacttacacaatgtgaggacttaaaaagccaccatactcatcttctaaaggttgaggaagatcccaatgaaagagagtagcatagggctttaaacctttggctatgagttcatctatgagatcattgtaatactttactcctttcttgttcacaccaccactcacttttccatctaatgttagttaaattaaacaaattgataattaattagctagttaatccaatattattattattgataaacaattatttattaattaattatagaatataattagtatacgtacttggtaacaatcttgaccatgagatagaaaatctataggcatccaaattcatttccttcataatccccacatcctcctatttatatatattattaattataagtttaacaaattaattactattattattaattaatttatcatagccataataatatacataattttttacgtaccttgtatcgatgatatgcat

SEQ ID NO: 92966 - DNA, 633 bp, Cannabis sativa
attgtgtgttgctacaacgcttgatgccgggggcattagaaagtttttcaagaaagaagttagggatattataattgagttgtgtgtatttttctagaaattgtgctgtaaaacattgaatgttacagacttgcaaatcatgcaaaaaagtattctggacattctttgcaaattagaaaccattttcccaccagcattttttgacataatggttcacttggtgatgcatttacctaaagaagcgatactttggggaccagtgcacttcaggtggatgtatccaattgaacgagccatgtctatgtacaaacaatatgtcaaaaatcattctcgacaggaaggatctatttgtgaaacttatgcagttaacgaagccttaattttttgttcaatgtacttccaggaagttgaaactcgatttaatcgtcaagattgaaatagtgatgtcctcctaaataagccagaaagggaattctctaaatttaagcatgttggacggccaattggtcagaggaccattgttgatttactaatgcaagataaattgaaggcagagtggtacattctcaacaattgtaatgatgtgaagaaatatatcatgtaagatactttttccttattcgatttagttct

SEQ ID NO: 92967 - DNA, 729 bp, Cannabis sativa
acctcatgtagacttgggagaagaatttgaattagccagacttagagaggttgcatgccaagtcggccaaactgaagaaccacacgatgttggtcgtgatgcatttgcacactaaagacgcaaatttctaagataaatggatgaccaggagtacattttctaatctcatcaggcggagctggaccgtcgtaacaaggaagctagtgacctgataaggcggttcaatgaaagaagtgtcaggagaggtcaggatctgattagagattctctcaaagggaaactcatcgaaaaattgggcagggtctacaggaaaacagtccaattaagctctttaggaacgagaacgaacttccccctgcctgaagacggacaagtcctgccacacagatctagtggcgggagtagccaaactctgacaccaggtggcatggcactactacaaaactcacatttagcgtcaattttaaagtgacacataaagaatttgcttcgattgtctaaactgacgctataaccacagatgcaaatattgagatttttgcttcattcattaaccggcgccaaaagttttttgcttcagttcataaccgaagcaaatagtaatgtactgacaccaaaaggtttttgcttccgtcataaaccgaagcaaaaaaaaaaaaaactgaaccgccaccaccaccacacctcatcaaaccaccacaaaaacccatcaccaacaacaaatattgc

SEQ ID NO: 92968 - DNA, 508 bp, Cannabis sativa
agttaattgcacttttgtatatgaatttacaagcagcttctttcaagcataaaacaaatgtgatgcttcttgagcatgacaaccagcccccatttccacatagcattaacatattctctaatcttcacaacttttgctcctgtttcttcatgcatttgagattcttttgtctagaatgaacacaaaatacaaatgaaaatgaagatcaagacagattcaatatgcaaatgaagatcaagtcctaaaaccatagagattagtattcaatcccctaattaaccacaactataaccgagaaattggtaacctgtaaaataaatttgggactaaccgagaaattggtaacctataaaataaatttgggacttgagagaattaataaacaaagaatagcaataggacaatcgtgatatcaaaaccaaaaaatatccacctaacctagatgagatctatagagagattcaaatagtattttagttagggaaatttacatacattactaactttt

SEQ ID NO: 92969 - DNA, 1199 bp, Cannabis sativa
agtttgggttcgggtccagattttggtctaggtctagatcaggctccgggtgtgggttggggtccttggtgtgggtccaggtctaggttcaactcccaagttttgaactcgatctgtgtttgggttcaattctaggtgtaggtcctgggttccgatctcagtctgtgttcgagttcaggtttaggtccaggtctatgtttgggtcttattctaggtctgggcctgagttcgggtcctaagttcaagtccgattttgggttcaattctgggtttaggttttgtcctggtttttgttcggggtaggttttggctccgggtctgggttcaactttggattcgtgggtccaggtcaggtcctggttcggaattgggtccctggtttaggtcccccatctaagtctgattcctaagtcctggtctgggtctaggttttggtttgggtcccgagtcttagtttgaggctaggtcccgatccgggcttgggtccaagtctcggtcacagtcttggtctaggttcgaattctggtccctatcagggtctagaacctggtctaggtcccggtgagtgtataggaccaggtcaggtccaggttgcggtacaagtttaggtcccaggtctcaggtcccagtcctagtcaaggtctcggtctaggtctcgtctgggtttgggttatggtttgggttcggttctggtctcaggtccgggtcctagtcatagtttcagttctaattcttgcaccgggtttggtttcgagtcagggtctaggtctaggttggggtcgtggtccgagtcttaatctgagtttaggtacgggtttttcggatcccgggctgggtctaagtttgagtttgggtcccaagttcgggtttgggtctacatttgggttctagtccaggtcccgtgtttcgatcccagtctgggtccttgtcggtattatgttctaggtctaagtttgtgtccatgtctaggtccaaatcccagtctcgatcaagggcttggtctgggtccgagatcaagtcccgagttcaagtttgggttcgggttcgagtctcagtcctagtctgggttcggtaccaagtccgggattgggtctaagctcgagttttggggcttggttatggtctaatttgggtccgagtcctgagttccgatctaggtctgggttccaaggcctaggtccaagtcccccatccaggtc

SEQ ID NO: 92970 - DNA, 718 bp, Cannabis sativa
taaatgtaaaagtattgagccatgggctacttcactcatcatcaattgattttgagataaaaatctcgtgattctcatcactcctcataggcatctcccaaatatattgctcaagtgattaccaaataaattaatatcattaccactacttgtcttctagcataagtatgaaagtatccatgaaatacattcttccacaaccatactgcaagctatttttgaaaaaagatgaaatattaaaagtaaaatgagttattaaaaattttcttaacagtgtgtttgatagaggggaaaattgggaggatggagagatatggaaatccattatatggttgaatagaatagattagtgctgtaagttcgtgtatgtcatgctagcctgactcatatttattcgtgttttttaaaaaataggacgtgtcatgctgtgccacagaaaaatatgagttgtactgtaccgaaccatgtcaatatttttaaaggtaggtccattattttcgtgcagtgctcggattcgtacagtactttgcttgtgtcgacctatatttcttaaacagaccaactcatcttcatattcgggcttgaattcatgttttacttttccatatttttttcataactattgaaatatatgtatatttgatagctttagttatatttatataattttttaataatattttacagataatcatataaaaaaattattaacatcatt

SEQ ID NO: 92971 - DNA, 624 bp, Cannabis sativa
cagtctgtggtatgttgagacggcatcttgtgctggttctgagatgcttgataaaaatccaaataatcttgggcctcttgttgaatgtgcattaagtttgaaacctgattcctgaagacggccgcattcctgctattccaacacttccataacatacagagaaataggttaaaagaatcagttgagaaattttgttgcatgtagataatatccaacatatgcaagtgttttaaatcctttaaagcagagctaaaagacgtacctggcaagccttcttcatgttcttacattcaaacaaagcatgttgtacagactcatagtaaaggtgacactggggacaaatgggagagttaagacacttcctaagatagagattttcagcagtaggaatagttttctaagtaagcctataaatgaagtgcctaatcttaggaggaatttgaagactccagagggatttccaccaacgcgtgagggaagccgtgtttgaagatgaaggttgtgtcgaacttagggacattttagccacatggtaacccgttttgatagaatagtgacctgagggagtgtgctgccaaaaatatgagtccctttgagtgatatcaggtgggggaagggatagaa

SEQ ID NO: 92972 - DNA, 822 bp, Cannabis sativa
cttattaattataaccttttattaaaatatttatagttaatttttttttaatatttgtaattattacacatattaatttattaaaaaaatagcagtaaaaatattttgtcttataaattttttgcagtcgtactgttttttagttgttaagtgtcaattaaacccatttactcgttaagtgctagctcaaaaatacatgacgatatatttttttagttcatttaatacatagtctaataatatgtcaccacgtatttctgagttggcacttaatggctaaaaaagagtacgactgcaataaaatcgtaagataaagtacttttgtcgttactatttgtgattatgatcatatgcataataattgtaaatgctaagggggttttgtcgcaaatatcttcttttattacaaattttttttaataaaataatactatcacaaactaaataaatgtcttgtaaaatcaaaacataatcagcgaaatagacatctcttttatttacgaattttgtaacaatttgacaatccgtctccatctcaatattatgatatccaagacgagagcgcaattacaacccaaccagcatagccatagctttggcgacgaacggagctaaaagacccaccgttgggctcgctgtagaaatattacaatttcttaatcaacatttacgtccaaaatcaaatactaaaatatttttttttttcaaatttttttcataatgatattcattttaattataatatcatttttgtaaaaattttaaaaaattcggaataatttgtagtaccgaaaatatagttagtgatattcatagtgatat

SEQ ID NO: 92973 - DNA, 502 bp, Cannabis sativa
aaaaataaattactattttcatgatattaatgagatatatttttatgctgaaaatatttaatttagatttaatttattatctttttttattgtaggaattgaaattattgtggtatttttgaaataaaggaattggagaaagaatatgtatttttacaaaaaaaaagcatcagattttcggaccccaaggagaagcccactcgcgcgcacagctcgaagcaccatccagccatccgtgcgaagatctggtggcccaaacgagcgcgtgtccctcatcgccagacaagggcgcgtgggcgctcgcctttctcctcatctccagccgtccgtgcacagatccaaagggccaggagggcacgtgtggttcacggccagagagaggcgcgtgagcgtctttctccccctacccagcctgccagcgccaccacgcatgggacctgcctgtcccccacaccagtagtatccttctctccaccaacccctcacacgacgacatgtggcc

SEQ ID NO: 92974 - DNA, 717 bp, Cannabis sativa
tttcgatcccagtctgggtcttggtccgagtcctagtttgtatccgtatccctatctaggtccaagtgtgtgtttgggatcgggtcccatctttaggtccaggtccaggtctcagtttgggtctgaggctaggtttgtgttcggttctaggtctgggtccgggtccttgtcacggtcctagtctctttcgagggtcctggatttgcgtttcttgttcaggttctaatttttggtcccaagtctaggtctgggttcaggtttcgttcatcgtctaggtttttgtcctagtctgagtccaagatgttgacaccgactactgatttattccaggccttgttacccgaatcctgagtctagatctggataactgtcacgggtctcggtgttgttttggttcaggtccgaggtcccatttttgagtttaggttcgggatcgagacttgggtgcagttctaggtcccgaccttggttctgtgtacctagtctggttctgtgcttgggtctgagttcaggttcgggttttggtcctgagtccaggtttgggttgggatccgggtccgcctcctaattcgagtccacgtctgatttggagtccaggtactggtctagttacggttttggatctagttcccatttgagttatgagtcaaagtccaagtccttcttccagtccccatcaacttcttgttttggttctaatttagggtcacagggtac

SEQ ID NO: 92975 - DNA, 609 bp, Cannabis sativa
agtggtggcgctgtggtggtcggagaacgggcagaagctggggttacaaagcgtagtgttggaaattccgtgaacgtgggaagcagtttggagaaaggacatggtgggattggtagttatgggaaggatagtggggttaaattggttacgggtcatagggatggactagagcaattgggcccaattaactctaatcagttgggctcctcaaatttgagccatactgttgggctgatggggtcaagtggtattaggttggaagataaccttgtatcttgacatgggtgatgataaggtagatggggaaaatgaattgaaaaaaaggaaaaatactagggggaattttagaggagctagaacgggataggcgcatctttaacaaagggaaacagggtgctggtgatattggggttcttggggagattgcagcttttgctaatggaccgacggagaatggggtggtggcaagaaagtcacatgtgggacaacaaaagaaagtttctatcaagaataaagctagaaatatgaccaaatcaaatccgacgaatggtgcaaaacagtctctattacaggaggttgtgggtgatggtacaatggctgtggtggggg

SEQ ID NO: 92976 - DNA, 603 bp, Cannabis sativa
  modified_base (219)..(221): a, c, t, g, unknown or other
  modified_base (372)..(375): a, c, t, g, unknown or other
taagactaggtgttatattttgtaaagtttttcagttcttattttattttttttaataattttgtacttatttattaccacttgcaactttttttttaattataaataattttcagttacaaaaataacttttttatttggattttattttgggtaattaccattttagattttgtattttgtaaaagttattaatttgactttctattttgttaaatnnnaaaatagatcctatattttttaaaattatacaaataggattctaaactgatttttttttttgttaaaataaaacttaagatgttatgacaaaactgattatattttctgtatctgtttgtgttaggaattgtcttaaagttagttatattnnnnaataaaattgttgaaaattgagctgagaattttatttttaccattttgaaaaatataggatttaatttatcatttaacaaaataaagagtctaactaataacttttacaaaacatagagttcaaaatagtatttacccttttatttttgacattctaaaatatttggaatattttgaaaagttatatataattttaaataattgcaatttatgaatataaaataaaaa

SEQ ID NO: 92977 - DNA, 584 bp, Cannabis sativa
tatttagaatgttattctaatagaatgtttttttttttaatcattttgataaaatgattatttttatttaaaatagaaagaatgataatttcactacaagataaaataatatttttttatttaatttttatacattttaaatttaatattttattatgttgtttactaaactgtgaaaaaaaatttcaccgtaatcggaatgctaaaatttgactaaattatcattattaaaaaatgtacttatttttcatttatagtttttatagtttttaggacgtattgtcttttaattttgtaattaataaaactaaaatagaaataaagtaagttagcaaaaagtaagttatttcttttaaaaattagaggagaatctttttctttttttgctctctaattttagtaggctccagtaacttatcccattgcaaagtttagtaaaacaaataaatgagaatcaatatcaaattctcattccgtttaagtccgtttaagtaaacattaaagtattgaaatattattctaatagagtgtcttttctatcattttggttaggggtgttcatctaattcaatctgtactatttt

SEQ ID NO: 92978 - DNA, 523 bp, Cannabis sativa
gaatttgtttcattcatgcctttatgtaatatgacttgatatataggtagtgcccaagttattccgaatcgatcctgtgcctcattttttgtctaaatcattttttacaccttgtattttgtggaaaaacaaaagtagaataaagttaatttcggggaaaaaatagttgatctttatctttttggccaataagccattggtgacaaaacttacaaaatagatcaaaatggactagaacataacaaatgcctcgagttttttttttaaataatgaatttgttaattaattgaaaatagattttaaaagaataaagtgttagtctcttcctagattttaaaagaataattgagtttgggttctcttgctggggctgctgctgactgggggtaaggtttttcctagtcaagtagaggatgcatcccgtgggttctttgtggttagttttgatggcttcgtggtgctcggtggttgggagttgtcggattaggggtggtgggaatgtttcaggcaggagtgggctgt

SEQ ID NO: 92979 - DNA, 515 bp, Cannabis sativa
aaaataaaatccaaactaagagttgttcatccatggctactgccttcttttttacaattgaaaaataaaacctcaagtatttaaaggaaggaagaaaatagaagaaagagaatagaaattcaaacaaatgaagcttgtgtcctctttcttctttttcaggtaatttcctctttttggctcttccttttcggtattttctttttctgcaattactcccctccaaaaatggcatctgaactcatgtgtagaaaaagtgctcgtgataagacacaagacacatccttaggatttttgaattcgaaggatggtgatgagcattggcgaactccaaatgcagaaacaattaaggtgaatactgatgccgcaatctttgaacaatctcaatgttttagttattcttttgtcgtccaaaattacacatgtagcttataagaagctagatcagtttgcactagaggaagcattcaactagaaattgttgaagcgattgggattcaagaagctctaagttggat

SEQ ID NO: 92980 - DNA, 1144 bp, Cannabis sativa
gagagtttaatttttcatacgggaattaaaatttgccttttcgtttcattgattgaaaaatattagtagaaagtttatggaatgagaattttgaatatgtgaaaatagaattgaaaatagcatttgagtcgagaatcaaagttcattgttaatctccttacaaaaaaaattattgttaatctgtaaagataatatgactagaagaagatggaaaaattcatttttatttcatttaatatgtatataatgttttttcttttttgaataatatgaatttattttaattaatttttattttttaaaattatcttttctaaaagaattattagtttggccaatactatatttacatgtgacattttattgatcaactaacagaacgttaaattgagtgttaagtttagaaattcgagaatatcaaatggaactataatggtgacatcaactttatatgatcgaaaaataaaaataatgcattatgaaaaaaattgattcataatctcacacatgtttcttgttctacataatctcacacttgcttttttttgttgctcaattcataatgtttgattcataataaattctttctataaaaaaacacttttcttatattatgcaaagtaaaaaaaaattcacacatatgtatagttatgaatatatatataaataattaaataattatttaatttaatattattaatttagtgtatatttattattatatgttttttaaaaaataattaatttaagatagatattttaaaaaaaaaattattaaaatagtgctaaaatattaatttgtaaatttatgctctaataaaatattaaaaaaattgagagaattaaggagaaaaaaaaataactttggagagattttagaccgccacatcaccgtctcatacttctcctttgtatatataatatagattgattgatattaaaattgtactaatttatgagagaagagaaaaataattttggagtaattttaaaatgtcatgttactgcctcatacttctcctttatataaattgattaatattttatatttaatttgtatttttaaggagataatttaaatttaaaatacttaaaatattgtagatatttttaatcatagttttaactttattggtttaacttt

SEQ ID NO: 92981 - DNA, 927 bp, Cannabis sativa
tgtatatatgtgagatatataatggctttggctgtagtcccgttgttaacaattcaagggatggtctcttaacaggtgttgggaaagctttggtctttgtaatattgtcatgtgtactattttgttaatatttattttattttggtttttaaaaataattgatacttgtaattgtaggttgtgtaaccggaagaaaaagacaaaaatttatgagggtatttttggagtttcaaatcacttaatgaagggtaagtttgtacttacacacaaattgaaaattttgtaatttttgtgcaatgcataaatttgacaacaacacatgttggtgaacaaacaacaaaatttggagacacttgcacatcaaattttgacaagttatcatatttaagatacaattacttttttgatgcatgcatctatttttctatgcatgcaactattaaactaatgagctctaaataataaaaaaaaaaaaattatttaacaccctaattacaagaaaactaatgattatttaaaatttaatattactaaaaagttataatttctcataatccatatataatgaacatggttacataaattaggttatccccacggccccaccccttccaaaaaattattaattaatattttttttcttataatcattggagaaagaagttataattaatctttacacaaaaaaaatcaatttattaactatttttaaattttaatgtcaaacacatactaccattgcaattaaacaattttagtcttcacttacaaacaaaaattgcttatttaaataaacgagtgcacattagattggtgctaagtaaatgcaaataaaccaccaaagaagaaactaccaaataaggtactttgaaatacatttataaagtgcaaaatgacttagttttttttttaatagaaaaagactta

SEQ ID NO: 92982 - DNA, 912 bp, Cannabis sativa
  modified_base (398)..(416): a, c, t, g, unknown or other
taatttatttttaaatctcaatttagcccaactttagtgaaaattctcaaacttgacataattagttttcaaattttaattgattaaatatatcaattaattgagtcattatggggactatgggcccatgaaatcaatctctcaatgatttgatctaaaatttaccgggtacatttcctcacttgttaattcctcgtgactccactatagacttcaaatatcactcttgattacatagaacattctatatttctaatatagatatactataattatctattatcttgacctgaacaatcaatgatcatctatagatggtcaacatcgagtggggaaacccctccatgcattttatcatttaaacatttagcttcttgtaaatgatatttcagtaaacnnnnnnnnnnnnnnnnnnnagtactccaccatttaactcgtttaccaagctcaaaataaaccatcattttacttttaaataatcatagaaactataaatgttcatatctatgattaacactcccaccaaattaaactatcgaactcccaatatgtaagtatgagctggaccgagaagtaaattggtaacgaataaatcaaagaactcatgtaacacaattagctcaaagcttaaccatctcaaaattgatatcaaatcgatctaatttcaactaagtgatattgacttagaaaagatatataacagtaagtttatgatatattttccactgtcaatatcagtctagtctgatgtaaactctatacatccaatacaagtttagtttgctaatgccttggaaaaaatatttcacttagtgtaagtaaactatatcgttggttatcacgtcactataaatcaagtgcactgacaaatcttgggacttaaatagcttgaagcacataatcacaattatt

SEQ ID NO: 92983 - DNA, 647 bp, Cannabis sativa
aaaaaaaataatcaaatgtatagaaaaaaatattaatttttgaatatttatataaagttgatcaattgaatatatatttatatataaatatataaaattaattaggtaggatattcaattgcccctacaaagagaaacaatattaatttttggacaaatcggtgagaatgaagaaatcttttacttgtagtatttttttgatgaaatataatatatattgtgtttacttgtagttaataaatataatattcacatagtttgtaaacattgtgggactctaacaaaatatatatttatatattacttagaagacatattataaaatagataaaatattaatagataaatagtaaaaaaaaatgttctcatctcatttgatttatttttctttataaattgagaaaaaaaataatgtttagcttaatttaaaataatttaatttgaatatttttttggactaataaaaatatagaattatatataaagaaaatcttaaaataaaattaactcataataaattatatattacataaaataaaaaaaaaacttataaaacaaatattgattaaataatttcttttaaaaagataaataatgaaatgtatattagataaaagataaaaaaaaaactataagatattaaaaat

SEQ ID NO: 92984 - DNA, 774 bp, Cannabis sativa
  modified_base (729)..(744): a, c, t, g, unknown or other
ggtaaaatatttccaacagagataacctaagccattttacagaattaagaagtaaaaaatataagccacaaacttaaaacttatctccaaaattgattagacacaagtaatgtaaccaatatttacatcaaaataattagagaaagaggataaacttcattccgtattaaattgcagcagaaccaaaagaggaaaatgaaacacaaaacgtaaatgagcaactgtaaccaaagcctacaactgatgcatgatcaaatactattaaaacacatattttcaagtgttcttcatacagtaagtgcccaacatattgtaagacagccaaagtggcaatgaaatggaaattgttgatagagaaggcatgtatagctatcatgtatatttttacaacacctagaatctccctaataaatataattttaacctcccaaggcattttcaaccaaaatgcaacgtaaaattcagaaaagctgtaccttaggaggaagaagacttcctgctttttcacatcccatagtgtctactggtgcatcttctgaggacctcatattgcgaatcccctcaaggacctactgctagttatcaggtgctacacctgtgtcaaattaaccgacttttagtcccacaaagagctaattttcttagaaatgcaaacaagtaaacaactaaggtttctatattttattattgtagccaagtacatatgaaaaggagagagagagagagagnnnnnnnnnnnnnnnnagagagagagagagagaaaaacacaatatg

SEQ ID NO: 92985 - DNA, 622 bp, Cannabis sativa
  modified_base (35)..(38): a, c, t, g, unknown or other
aaccagccaacacaacaagcctaaaacaacatatnnnngcataattcatccactgaaaacaacaacaaacactagcagcaactacagtaactaaaatcccaaaacatccataattcatttcttcaaaaataagaaatcaaagagggagctacaagagactttaccttggcttggatagacttgaaactagctagagatcacttagaattgctgaagaaaaactcaaaccataacagccctaggaatttcgagaaagagagagaaagggaaagagagagaaaatggcttcctttttttaagaattttctatttttccttcttttagtaaatgagatacaatttgattattaaatattacagcctacaaagtttaaagaaacttaatatatcacttaataaacttcacaaaaggacaaaatacaccatgggcaaaaagaccaaaatacccttgtcctcataaaaccattctaaatcactaaggggtattttgggaaattctaaaatctcgactaatcctgaaatttcaaatgtctaactatatcgccccgctatactaaaatactgagatgtgattctactaagccatacaccgcgttccaatgttgctgggcactgaacatgc

SEQ ID NO: 92986 - DNA, 998 bp, Cannabis sativa
catgaatgataattaaaaatataacttttgtctctaacaaaaaatataattgttgaagatgcttgttgagatagagagtgaatatggttaggatgttagttagtgacagttaatgacagctatagtttgttaataacagttgtacattctgttataaagattagttatgttttctgttgtaactagtcatatatatataccaactcttgtacataactaattcattcattgaataaagaaatcactttctctctttctcttctctctattttcattctctctgttcaactcaacttggtatcagagctgaaggtacactttccatggcggcctcctccgaaacaactcaacagtccatcgtccctacaacaatgttcgttcctccattacgactgaatcgaagcaactattttttttggagatcacaggtccttccagcgattcgggcacacgatcttgaaggagttcttctcaatcaaaatcggcctcaagcaaggattcgtcaacccccagaatcaacaacaatggtgagtaatcctgacttcaatcgttggatgcgtcttgatcaatttctcctttcctgactaatgtcaacaatatctgaatctatgattgggcatgtggttaactgtgccacttcatctgaaatctggactacccttgagcaattgtttggcactgcatcacgagcacgacaaattcatcttatgaatcaacttcagtccacaaagaaaggatctctggccattgatgaatacctattaaagatgaagaatcttgcagatggacttcgagctgcaggcaatcaaatttcagacgaacaattaatattgtatgttcttcctggtttgggaacagagtacgaagcagtggttgtcaatctaacttcaagagataatcttacacttgccgaagttcagtttatgcttcaaagccaggaaatccgtattgaagcgcatcaggctcatgctactatcgacttaaatggtgccacgaca

SEQ ID NO: 92987 - DNA, 742 bp, Cannabis sativa
  modified_base (686)..(698): a, c, t, g, unknown or other
gatgtctcaaaaccgcttcttcgtggtcaaatggtaacttttccatggattaaagatgaattatggctatatttccgttatgaaagacttctgttatgaatgtggagtaattggtcttgtctatgacaaatgcaatgtgtatctagagaaattagatgagggaatagattcagatcttggttatgggccctggatggagggttctccttctcctaaatcaccttatgatcgctatcgccaagatttctctaaggcaggtccctggtcttttgagacccgtcttgttcgaaatacaatctctcccattattcaacatctacgaaaaccaccactgctgccctctcttccaatagatcgtgagaaagggaaatcgataatggcttccagtacaactcaatctgagttttcttcctttgctccagcttttgctacactttcgtgtgatattgggaacaattctactaagggagactcctctgttgtcaaagtaatatctgaaaagagtgttactacaactgtctcaaactctgcactgaaggaaatgttacgccacttaaaagaacaatgaacaatgaacaatcactgtcctgagacttctggtgtcaaacttttttccgatatgggtgatcatagccaaagccctttcaagttgtcttccacgggtgaaactgttggaaattattttnnnnnnnnnnnnnatctactcacaagtatgttgagattaacaccctaaatatgaact

SEQ ID NO: 92988 - DNA, 706 bp, Cannabis sativa
accttcatggagatactcgtagaaacacatggtctccaacttgaaactccacatttttgcatttcagatttgcataactcttttgcctgttctgagaggcaagcatcatggctttaattttctcaattgattcattagtccgttgtacttattttggacctaactatttcctctctccagtatcatcccagtgaatgggagatctacactttctgccatataacagttcatagggagcattccctattgtgctttgataactcttattgtacgagaactctatcaatggcagatactctctccaggagccttcaaaatccaaaacacgggctcgtaacatatcctccagtatctgaattgtcctctcagattgtccatcaatttgaggatggaaggctatactaaacttcagtctggtacccatagcgcgttgcaaatctgccagaatttagaggtgaacttcggatctctatctaaaactatggattttcgcactccatgcaatcttactatctctttaacgtacaaatctgaatactgatccactaaaaaggttgtcttaactggtagaaaatgtgcagacttcgtgaatcggtctaccacaacccaaaattaaatccaacgaacccaaggttctaggtaacctaaccacgaagtccatcatgatatcttcccacttccactcaggtagggttaaaggctgcaa

SEQ ID NO: 92989 - DNA, 735 bp, Cannabis sativa
tagtcatcacaggtgctttttatcattaatcttaaaaaaaactaaaagttaattaggatttttgccccctgaactttgacatgtacaaaatcatacccccagaatttttttggccgctaaaaatttctcctgaactattgagattgttggatttaagaattatttgtctaatttcattcaatttttctaattcggtgattgtccatttactaaataatgatctccaaattttgatatctaccaaattatgccactcgaactttgacatgtgccaaatcataccccctaacctttcatctatgttagacgtttttttttactaaaattagacaaaagtccttaaatcaaataatctcaatagttcagggggaatttttacggtcttcaaaatttaagaggcatgattttgtatatgtcaaagttcagagggcaaaaatcttaattagcctaaaataaaagtgaaaaaagttttactaaatttcaatttagaaaatagtttatttttctaatttttccaaacttttgattccaataattaattcataatttttatttaaaagtttaaattagatagtcgttaaaaatataataaaaatgaaaaaatattcacaatcaatacataataaaacacttcatatctaaatttaggcccctacaaatttttatcaaataattcctttgattacatgaacttcccattttattcttgtttaatgataataaaaaaatcaaaag

SEQ ID NO: 92990 - DNA, 763 bp, Cannabis sativa
aaataaaaatttacttttatattttcaatacattgatatgtaacattgtattttattgtatgacattatgtattaaggttatttagaccatctcacaaaatttttaaaaatttaaataatttacaatatatatcaaaaatacaaaattgattattttaaatctcattttttatattatgaattattcaaaaatttatgaaaattagtatgatatcttttttttttaactaaaaactcactgtattattaattaaaagtgcaaatttgctaacaaaatagcatgaagatcagtcgggacaaatcccccactgaatcgacgacctgaaaaagaacaagaaacacgagctaaataattggtcgccttgttcatagatcgtttaacaaagataatagaggcattatgtaaagagaaaaatagacgtttacaataaaaaataatcagttcaaatggagaagacatttggagagtatgacgaattgcataaacaactacttaacaattaatttcaataacaacttgagaaagattctgatgtttgatccaactaacaacctatttgacttccacaacttctacgatagtcagttgtatacacaactaggcaacaactttaaattagcttcaatggtatttcttccatggtcacgtgctaatcaaccaatcctaagactatcattcccactaactgcagaagcatctacattgatcttaatcatgctcacacccaaaaaaaaaaaatcaatgctcgctactaatagcaga

SEQ ID NO: 92991 - DNA, 1006 bp, Cannabis sativa
actataaacattcaacaactgccacaacacatcatagacagtctccaagaagatctcctatgttgtaaagctgagaaagatgatgaagacctcatccgctgtaaatctgatgagcaatgaagacctcataagttgtaaatctaaggagatgatgaatgcctcctccactgcaaaaccgaggagatgttgaaggcctcatctgctattaaactgaggagatgaacaagaccaccttcgctgaaacacagccgagagaatgcaaaagagtttcaaggctacaacctaagagaagacaaagactacatctatattcacataaacacacattgtgacaagagagtcaatgctaagacaacaactaaagatcagagtaaatgttgacattccaatatcaacatgatttcacagtatcttaaattaaagggaatcactcaatgagtcatctaaactcttctcctttttaacttaaaattttgaatttcactattcaacagggaatgggaatttgaaatcctattctcagtgggaatagttgaagaatagaaaaaattgtctaagattgtaaaaattgatgcccaccttgtagttttgagagaaatgggcttagttcacgccattaagtcaacctcacacaagtgtaaagttgacttaaggggaaaatgtttacaccaaaagtagcctggatgatgcggacatctatttttgacacgtggaaagagagatgacatgcatatcggagttgagtagtctcgagtcataacaagtctacctaggagggggtccctagccctgtgcctagattgactttgagaaccctggaatggaagttaaaacttcaataacttgaatccaacccactatcttttagtattttgtactatgaagacatggagcaatcaaattcaagtgttaggagctgaaattacacaaacctacaccccagaagccaacctgggcacctagggtttcacccagcgcccaagttgacattcccaactaaggtttc

SEQ ID NO: 92992 - DNA, 767 bp, Cannabis sativa
ttccatgatgattttgcttcacaacgcagtaacaacgagctttacaagaaggccatgggagtacatagcagaaaatgttctacaagacttgcatccttggtttgaagattttaagagaaaaatggaggcctctcatcagaaccatgaaaaaatgactccaactataatcactagaattggaaaagttctttttcggaggttagtgtcattgataaatatattagagaattgtgaaaggcacaacttgtcagaacaagtattttgaagagaactgtcaaagattgtgatttttgtcaaataacataaaaattgaactacttttatcaatttttttttaactctaattagaattttgctcacaaattttgatatgtattaaataatactttatgaatttgtaaggccattaagaattccttaaattattagtggatttaaaattttttcaattttaataataaaaaaaatctaacatgaaaattgaaggaacataattatcacatgtcaaagttcgagaaatatgatttgatacatatacagtagagaaatttacatctagagccttaaggtggcttttaaaattatcaatattattgttttatttgtaccatttttaatttaattaaatcagatttctccttttttttttcttttgatttttttcaaaatccatcacgtcaatctcagtatcattacataataaataaaggtctagagtaagagtttatttttctctttattactaatatctctctcttttttttttt

SEQ ID NO: 92993 - DNA, 962 bp, Cannabis sativa
tgctccctcaattttctaatctattcaccttactgtcggatggtctcctgtatcgcgtcatacatctcttcctagttttgtggtaatggagggttcgcaccttcaccgccaatccccagccttgaaagctcgcggctacccccactaagtcgccttaggtgcatgatctaatacacatgcgaccataactttcaattatttagaacctcccaaaccataatcaatgtcaataagcatttccatgatacacacacatatcatccattatcatgccttttctaataactcacacattttaaataagcaggtaattcaattaatcaacaaataacctaatatttatctaacaattaacacttactaaaccatgagtcaaacgagtcttcacaaccaacgtacatatcaaaccagtcttcaggatctttaaaccttggttgctctgataccatgttgtaacgccctgtcgcacaggaatgccacgtgtatgcttttataaattaatttataattaacataccaattaaagaaaagtgtgacataattaaaaaaaaattgaataaattaaaaaaattgacttttcattcaaagtattactgaagtcggggatccccttgtttataaatttttacaacatgcttcaaaacatgtattacaaaatggggctatatttccaaaacataatcaaaagagtggatcgtgttcattggaagccgagacaccgcggttgatatgtacatcgttaggagaccttttgactcatggttgatccatttccccttccctttacctacaccacgaaacacccgtgagtcacaaagactcaacaagaaagtaagtaaaacacagccattatataacacgagatatcataacagtgcatagcatacaatttcatcattcacaataaatatttatgcaatacataatcgagcattacatgacaactatttgtctaataagac

SEQ ID NO: 92994 - DNA, 1566 bp, Cannabis sativa
cgaacaaaaatatggggcaaaactatccccataatttagacaataaagctataacgtcctcaaacaacatatcagaagagctggagatttagcttgtactgaaaaactacctgaaaggtctcaaaacaacaaccaaaaaataaattgtattagaatatttatcttcaaagaaaaataaatttatcaaaaaactaatttcttagactctaccgcttgattcaatcaagtaaaacataaactaatagaaaaacttaaaaataactagccaaaggtattaccctttggctagtagcaataaatcaattaaataattaaacacagatataaattattaatacattattgtttattattctcacgaaatatttttataaataaacatatatttataataaatcatataaaattgacaataaatatttatactataataaaaaaaaaagtatgtttattatattaaattgtttgttatctattacatttttattttaaaacatatatatttattttttaaaaaaaaaacttatatttataataaatcgtatattttataataaatatattataaaataaacataaagttataatagatcacattaaaatagatcataaacatttatattataataaaacaaatattggggttttttaattattatttttacactttaaagcagttttttttttatatttttacagaaattcacatggcaactcacataataactaacggaacaacctaaatcgcaaccaaaatccacatagtaacttatatagaaactaccagagtaacccaatccataaattaaaaaaaaaaatacaagttgaaaaataatatataaactaatttctcaaaaatatttaatatagttattgtgtaaaattatttattatttttcttatgttatattattattaaaatatttcaaaacattactaaaataaacatacgatattattatattataaacataaattataataatttaagcattaataattttattttattagtataataattttatataattttattttttgtttaaattactggttctttcttaagatcaactttttcatgagaaatgtacttcaactaatattaataattattatgagtatcaaataagcatttaaaggccacactttaattccctctcttaatctttaatctatatttaaaggatatgatttattatatataaatatatatttatagtaaatttagtaaatattacattcacttattgaaatattagtttttttatatgtatttttaaattgtttgagtttttataactaagtattttttcacattttttttatataatagttttgttgtacactaataaaagaagcctactttttaaccctaggctaattatttggaatccattcatttttatttctatttttatttgataatattattatactaggtaataaaattgcgttttgtacggtatagacactaatgtatgtatacatgatgctttatagtattacatattgaagaataatgaattacaataataatattaataattttgtagcgtgttattt

SEQ ID NO: 92995 - DNA, 1454 bp, Cannabis sativa
  modified_base (49)..(52): a, c, t, g, unknown or other
gtctttggcctcgcccaggtaatcaaaattttcctgagggttagccttnnnnaagtcataaaaaatctcgagaccggctgtctcaaaggcatgctctttctcttccagccttgccacctccgatttgtgcttctcgacctcagttgtaagctcctcctccttagtcttcttctcttattgcagtcgacggaagagagtccgaagaactcccatttcctcttgaaggctattcacttctgtcgacaaggtgccgatggtatcttcaagttggtcggaggcctcgaggtccttagtcaactggactattttcctctcagcattgaaaaacttcttgttgacttcaccgagctccattcaaatagctccgagttccaccctaccctcatcagcatccttcctggccaagtccacctccgccctaatggtgttggacatggcagcgttcttggaggcagtagatttagctctggaataggtgtaagccaacttcagaccagcctacacagagaaaaaacattagattatgaactaagtaaagaaggattaaaggagactttcaagaaagtcttacccttgtaaattccctcaagactcctcccatcagaagctctaggaaagatttgttgtcagcgccggccaactgctcactcacctcaggaaccaagcggttcatgtaatgagcgagcatctccttgcctttcttggcctctggatgcactggcaagggtggagtaggagctcgcatctgctcagatccgctcttggcgagctcgaatctgccttttgactgctcaggcctgtccgagattcctccccgagaatctttggacttagaaacttttggagtagaagggtatgcgacagttatctcctcaaaaagatcaataacctccccggccggtgccttttccttggatggggttgcctcatcgcccttagatttcttggctggaggagatgagcttgagcttcctccaactctcttcttcagagcatccaacatcctctgagatatgtctgcacagaaccaaagcaacatggttagaagaaaaaatgcatcagaagttgaaaagcatgatagtcaagaagtttaaaaccaagacggaatatcctggggagcaattgtcggagtatgactcaaaagcccatcatcaccccgaagcatatacataacatggtttatgaaaactttcaattatcctactcgacacataggaatgagtagctcctgagtcaaacaatatagtataagaacaaccatttatagataattgacctttcaccactgacggactagcatcagtgtcaacctaagtcatggtcaaaagtcgctctgggttctgagtggtattctttttcggctcctctttcttggcctgaggacaatctctgataaagtggcccaccatgccacactggaaacaagtcttggcctgacattcaccctgatggtg

SEQ ID NO: 92996 - DNA, 807 bp, Cannabis sativa
actagtggtcttactactaatcttcctcgatccactcatgttactttttctcactctctttccgttcgacttgacaaacacaactatcttccatggaaacatcaagtatttgcagcaatcaaaggaagtcgattacagcgatttctcgatccactactcactcctccaaagtttctctatgaagcaaatcggcattccaatacagttagccctgagtacgaagactaggagcagcaggatatactcgtctcttggctattatcgtccatgtttaagaaaattctcacacgaatggtagggtgtgatacggcatctcagatctggatcaccttgaaagaatactacacagctctgaacagagctaatattggacagtaccgtactctgcttcgaaatgccaaaatggaaggttccctgggtgattaccttctcaaaatcaaaagattagtcgatcttttagcatctattggccacatgatctctccttctgaacacattgaagcaatctttaacagcctcaccaatgactacaatgtgttcattacataagtcaacacaagaactgacaactatagtgttgctgaaattgaagccttactcatggcacaagaggttcgcctggaaaaaccagctcaagaactggatatctccaagcctaaagcaaatcttgctcataccaaaccattcactagtggtagaggtaccttttcttcaccttatctttccaattcaactaatcctggcttcaattatatgtcttgaggaaaccagatgcagaatagtagtatgcactactctgctcatcat

SEQ ID NO: 92997 - DNA, 582 bp, Cannabis sativa
  modified_base (150)..(153): a, c, t, g, unknown or other
  modified_base (428)..(435): a, c, t, g, unknown or other
tcaaaattaaccataaggctatttttgttagaaatcaaattttcaaaattcaaagccaactaatatctaaatctaattttaataaatttaaattgaaaatttggattctaaacaaaattctaccgaaaattggcttttgtttcaatgaannnngatttttgaatcaaaagatatcaagaaaacaagtttggtgcacattgcatactcctgcgcgcgcggaaggggagagatgaccgataaaaagggctgcgtgcagcctgtgttggccgaggtaggtcagcatgagcagcccttcagacacggccatgtccgagaatcctcagtcagcccgtgtctgaaggcgcatgctgtccgagagtctccaagccccgcgcgcgtgcacacgtgcatccaaaacaagatatttcatccaaattcaaaaaatcatnnnnnnnncataaaaaatccaaattaggttttgtaaaagccaaaatttattaattttccatctaatttccagtaaaaataattccagatcgaaataaaaaatatttttacaacatacattgcgatttctaaactatcattaaataagcacataaa

SEQ ID NO: 92998 - DNA, 1030 bp, Cannabis sativa
tgtatttttgttattttccaaatttttaattgtgaatttgttcatattaaatcataaagagacatgtagatagagttacgtacgtaaaaatactatttttgtttttagtgtttcataatagttgcattacagttgcataaatattttactaacatttattttgtttgattgaaactttcttctgatgcaatattcggccaaccaccagcaattatcctgaaactttagtacgattaaaattttcgttgtgtaagtaataatgtaagaaatattttagtaattaaatagaaaaagtataattattgttcatatatttttgtaaatatagtcccattgatattttcaatgtaataattcttttattatttgcatgataataatccgataatttcaacaaaattcattctctaacgagaaaacctggaagaacgcctaagttctcttcttcaatggaatttggaaaccctagaatttctccagacgcaaccaacgtatgatatgatcgttccatcatggatcaacctacaccctactcgtaccttccggagccagtcattcaaagcatattgaaacttctttctccaaaatacgcaattcgagcttctctgacctccaagctatggcgatcggcttggattacatctccggtctttgaatttgaagagaaatcgttaccttttaaacaagcagatttctacgactatgcacgacgctgtttggcagtttggtccgaccactgcgatgacagagtcaatatggaaaagctttccgtctactccgacgtaggcaccgacggtatattctttcctcgatttgttgaattggtatccattgcaacgaaccgtaatgttaaaatcatagaactccataactgctctgaagattatcatagtcatacgatcttgtctactgattctttatggtcgttaatttctgattgtaaatcgctcgacgttttgtctttgaaatcgtttcaattatcgcttgtgattacattaccagtattctcttctgtgaagaagcttgagtt

SEQ ID NO: 92999 - DNA, 617 bp, Cannabis sativa
gaacttgtgtattttgaatgtatagtttgaaaagtaaattttacaaagtttaaaaacgggatcccggaattcgtaaatattatattatattacaaatggcttagaattcatcatcatggccgaacctgtaaagcccatgaattagaattttgctattattttgtttccttaatgaaacaaacttatctttttttaataatgccatttttctgctttagttatttaaatactaattctaactatttaataattataaataattatcaaataaaattaatatttaaatatatttattaattagacccgccaaggtctcttaattaataaataaactttgaactttattttcttctcaattaagccatttcttggtgaaaattcacaaacaagacattatttaaaattctaattgattaattaaaactaattaattgagactacaaaataatatcatcccagttagtgtggggaccatgaccctacgtaatcaagcttacaatgagtagatctaaaatttactaagtaaattttataacttattaattcctcctgactctactatagatttagaattgaactcttaattacatagaacatactattaccaaaaatagatg

SEQ ID NO: 93000 - DNA, 1059 bp, Cannabis sativa
tctaaaatgacttgtggaagatacggtttcaatcgcacaattgatttggacagaagtttataaaggacattacaaaggcttataggtcgcagttgtgacatattgtttggttttttgacttttggtatgagtgtaattaaagtctggttgaagcttgaaggatcaccaccatcgtttagcacttttagtactaaactagtgactaaatcaccaacaatgttctaataattagagtaaaacatgatcaacatgccatcaagtccaagactaccatctgaattcatcgattttaaagcctcataaacatcagcagcagtaaaagggcgagtaatgtctctgttatcagcagctatgatagaacatgggactttggagaggacaaattgcatagcttcattatctacaccatcagtagtgtatatgccacaaaaataggcctgtacaacattggcaatagcagcttgtgaagtatgctcaacaccatgatcgtcaattagttttttaatggtgttattcttctttcagttgttagccttttgatgaaaaaactttgtattagagtcacccgatttcagccaatttatacgtgatctttgtttccaataatcctcttcttgtgccaagagtgatattttaacaatgtttgagttcctcaaaatgctcaaaagtggtatcatttgagttttgaagtgcaaaaactttgtcttgggtgttgtttatcttccttggaaactctccaaactttcttctatgccatgattaaagatgaaaggagcaggaggagagattatttgtaatctgtagtatgggatcaacagttgagttggtccaatttttgttgataatttccaaagcttcatcttcattcaaccatattttttcaaagcaaaatcgtgatctgaactgtgtgcgagtgtctggtgcgaacgggttaaagaaactagcatagctcgatgatcagatttaaagaaatccaggtgtgaaacctcattagctccaaactgatgaggccacacattattgatgaaggcatagttaaatctctctttaacattcgtt

SEQ ID NO: 93001 - DNA, 640 bp, Cannabis sativa
ttatgtatgacttttgcacaaaatttatgatattgtaggacagttctaattactaattaatgataataattactaattactaattaataattataatttatttttcccgtatactcactctcaagtgttgttattttacattaatagtatctagcactatttaaaaatgacattttgccattagttagtaataatttacaaatgagaaatgttaaagggaagtattagtgcttaataccctcctatgtgtcaatatcgttattgatccaattaagtatcgagtttcatatagtttaacataataatttttatagagtatcactaactaatcgcaatgcgatatgtggagaaggtgttattaggcaccactaatgcttaataacaatactctttacaaatatatcgcattaaaattatataaaatctatacttcattataataataacttgtaaatgatgggccttttagtattctagctacatcactctcgtttttggattctagctacaccaccaataccattagttgctcactctaatgtcataacaattgacaactcataacaagtgacaactcactataaaaatatgattagcctaacattatttgagataacacggttataaatttaataatatt

SEQ ID NO: 93002 - DNA, 647 bp, Cannabis sativa
gtcctcatcatgtgacagtacttccaactcgagcttcaaagattgggagataagcagcgaacatacaccttctccagaacccaaggtgcaacaccatttttatctcggtcagattgcaggtgaaagctaaggatgtattatgtgggagctcaagaaggggtggacgcgatatttgttgtccaattggacatacattgtttgatcggatatagttgacactatacccgtaggtcacccaagttttgctgctttaggtacgcctataaccacttttgttatgaccattgtcacgcatacaaatcaagctccgttcagggataggatgatggaatacaccaaacaaacagtacggagatcctctttgaatgatcctcatgtggctcagcttgccacaatgccgagtgctgagtaggcccaacctactactgaggaggaagacaattagggggatgccaaagtccaagaggtggaggatcagggcgaggtccagcctgatactccatctgaagccaaggaggagggagttgcttggggattgccctttgggggattcaatgaggaaggggaactcgtgtccgaggctggtgaggtcttagtggagggtgaagactattttacagaggaattcaccgaggctgttcctaaga

SEQ ID NO: 93003 - DNA, 582 bp, Cannabis sativa
tgcacttgcgtagtaattaataattttcgtaacactcataaagtgttgcaatacctcaaagcaacacctggacaaggtcttttttttccatccaacacttccccaactataacagcttttgtagagaccagcttatccccttccaatgttcaaatctcttttttctctgatgctgactggggaagttgtcaagatactcgacgatcagtttctggttattgcctattccttggcaaatctttagtttcatggaaatccaagaaacaacaaactgtgtcccgttcctctgctgaagcagaatatagggccatggcccatgctactgccgagctcacctggatcattgctcttctcaaagactttggaatcacactctccaccagcaacactctactgtgacaatacaactgcaatacacattagtgagaacccagtctaccacgaacgcaccaaacacgtggaaattgactgtcattttgtttgagagaaggtccagcaaggctccatcaaacttcttcatgtctcttcccaaaacaacttggctgacatcttcaccaaagccctccaaccaagccatttttc

SEQ ID NO: 93004 - DNA, 709 bp, Cannabis sativa
aagaaatggtagaaaagtatggaaaaatgttctcatgaaatataacatctctagatgtgtatatttgatgagattcaatatcaagtagaagattggctttcatgccggatggataaccaatgaaaatagaggcactgctccttggtgaaaatttgtgtcgtttagaatttaaagttgaaccataagataaacacccgaatgatctaagatgataataagtaggggtttttggtataagatttcaaaagatgtactactttttagtaaagcagaaggtgaacggttcattaaataggtagctatggcaattaggtgaggccaataaaccagtgggagatgagattggaattctaaggcacgagcaacatttagaatgtgctggtgtttcctctcaacaacagagttttgttgaggtctctcaacacacgaatggtaatgtattactcctttggatgcataaaagggtgaaaggtttagttctttggcgttatcagagcggacagccttgatattgtgggcaaattgagtggaaatcattgtaaaaaaatctggaatgatattttgtacttcagatttcattttcaacatgtatgtccatgtatgtcgggatttatcatcaacaatagttaagaagtgtctataaccttcagtactaattattggaaaaggaccccaaatatccatgtgaactaagtcaaatatatgagat

SEQ ID NO: 93005 - DNA, 592 bp, Cannabis sativa
tggttatctaatcctctagccacctagtatgattgataactctatggtatagagttatttcttatgcttttaaactgaaattattgtgagaaaagtagtgaaaatgtgtttgtttgtttaatttttaattagttttagtttcattttctatttagtaagctaacttttaaggtcttgtaaaaattattattttagttgtgtttttttaattaaatgttgcttatttgttgtgggaaagaagaattaacttgctagaaaaaaggaaatgatgcaaaggaaaagccaattcacgagataatggtcgtctgcacgagtggaaactgattatgatgccacatgtcgcgatctgctatgttggtaacgagaatgtcagagaatatggtgttggacaaaaatatagtttctttttggtagtgcacgcactccatggccctagcgtaggggacaaatccctaacatggtgggactatgtggggcgatattcggaggcttctggatgtctcttcaattgctcgtgtctggattaccccatgagagcatctgggtagatcatgatggacattttgccttgtgaaccaaatagcctttcccg

SEQ ID NO: 93006 - DNA, 2140 bp, Cannabis sativa
  modified_base (341)..(358): a, c, t, g, unknown or other
tatatggagaatcaccttcgggcgcccacacacaaattattattattaaattctttttagttaaattctcttaactattaatttacttgtacttaattttttaaatttaaaatttaatagtaaaattctctaaactactgatatattaacaaatttaaagtgacatctattttttaccgttaactgctaatataaattatttatgtataacttttgtacacgtgcacgtttatagtggtacatctaatgttattatttaaaaattataaaaaaatattccaaaaaatttataataatttttatttttttaatattctattttttatttttataattttatnnnnnnnnnnnnnnnnnnttgaaataataatattaggtgtactaatataaatatgctacgtgtacaagaataaatatgctacgtgtacaagaatgtacacgtaaaccgtctacgatgacagttaatcggatgacaccttacatttgctaacagtttagtagtttggacggtttcaccgttaaaatttaaacttaaaaatttaaatacaaataaaatgatatttggaagggtttaaccttgaaaaatacttattattattattttaaacaattattattattattattattattaaaaagttattaaaaaaagttatgcaaaagtatatccataaaccccactataaacaattgctagtcccacaaatatacatggctagcctataacatatacatatgttactttataattattttattaaaaaataattaatatcaaatggcactttctcaactcaaagcattagttgaccccagtttaagaaaagttgtggatatgctaaataagtaaatatatgaaaaataacgctcaattattattatacaaactcaattcttatttttttttctattataattattattatatgaataaataaacacattcttctaacttggtcatattttgaattttccttatccaagcttaatttaatagtatagttttcattttgaattcgttacttcatatatcatattcatagatgtattatgtcaattggagatattagacaaaaaaaataatttttttttttttagaaaaaaattaattgtgtatattttttttatgtatatagtggtaaaaaaatttgaaaaaaaaataataattgagtcttcttcctgagtaaaattttggtatagtatttataaacaataaattgggtcttttttttaaaaaaaaaaaatacatatatatattttttaataaaataatgacaaaacttttaaatagaatattttttaaaaataaattagttttctgaaaaaagttttgggctaggttgggtaagggcctaacttgccctacctttgggctaggctcttcattttgtaaagcgattgttttctcatttttccagcatttattttcaaccacacctaatagtaataatcataaaaacaaaagctaaaatctcacttttcaaacttcttttcaatccattcttagttctaatcaactgccaccacaagtgttttttcttatctcaattgaccatttaattacacttcattcatagaacttcttcactttttttaaaagcataaaaccctatacaaaatggcatacatgtctactactcactactcttgatagtaaaccacaaaagtttagtcctacctacaaatataaacattttttttgtgtaatttactcattttcatattaataataattaaaagaaatatcatttcctaataatttttgccaaaattagtgaagataattcattgaagtgcttttgaagtggtaaatacactcacaagttcatgggaaaattacaatggtttatttatagagaattgatggttaagttttgttagaaaaatgtagtaaaactctggtggctcattttcaatttgtgttgggccgattagcttggagagaggtgcccgggaaaacagaaagagttacattttttgggtaagaattattttaaattgaaaataaaaaaatgagtattatatttgtatccggtattattcaaaataaaattagaaactgacaaatatgaaacccgaatcaagaataatgggcctgtggaagcccaagcgttgatctcaaatgaagtttacaaataaa

SEQ ID NO: 93007 - DNA, 632 bp, Cannabis sativa
ataataataataaaggtaaatagcggtataaataccaaagttttaaatttgtaagcggcataaatttaatgtttatttttagcggcataagtactcaatatttattaaattttaatttttctttagtttggtcagtagagattccgttttgaatttattaaaggaacatttggaagtaattaatactaatgatctagaatttggaccttatttgtgacatgtttaagaaaataacagagtttgtactgaaaaaattagaaaaaaattacagttttctaaacattaagtatttttgccgctaaaaataaacattgagattatgtcacttacaaatttgaaactttaagtctatttacactaataataattgccatcataataactatttgtgtactatttaaaaaataataataacagcaataataataataattgtaatttttatattacatactaaaatttttaacttttttaatttttattgtggggcagaattttcttcaaaaatatagtgtaagttttatacagtctactgtgttaagttttcattgttgtttcacggttgttttttagttgttctactgttgttttaattattctgttttgcagttttatagttgttttataaaaag

SEQ ID NO: 93008 - DNA, 502 bp, Cannabis sativa
  modified_base (186)..(186): a, c, t, g, unknown or other
tcctccttagacttcttctcctcttccagccgacggaggacagcttgaagggatgtcctttcatcttgaaggctattcacttctgcaaataaattctcgatggtctcttcaagtcgatcagaagccttgagatctttagtcaaatcgattattttcttctgagcagtaaaaagcttcttattgacntcacccagctccatccgaacagctccaagttccaccctagcgtcatcagcgtccttcttgaccaagtccacctcctccctcatggtgttggacatagctgcattcttaaaatcagcagacttagctcgggtgtatgtgtaagccaactttagaccagcctgcgtagagaaaaaactttagaatccgagccaaataaagaagattaaaggaaactaacaagaaagacttacccttgtgaattcttaaagactcctcccatcagcagctccaaagaagagtcgttgttagcaccagctagttgctcactaacctcagg

SEQ ID NO: 93009 - DNA, 1233 bp, Cannabis sativa
gatttaacttttgtttgtttaagtgtgatcttgaagttggaattacagaggttaattcctatgtatcagagctaaatttcttacaaatcagggtttggttcttcgatcatcaagggagattcaaagatcacttgcttccgcaccaaacactcatcaagaattcatcaaggaattctacaagaacacagattgaaggaggatgtcgatggctaggtttgaactagagaggttcgatggttcgaatgatttcgcattatggcgagaaagtttgaagggtatacttgtgcaccaaaaggtggcaaaggtacttggagatgaaaagttgctggttgagaagaagctagaggaaattgcagagatggaggagatggcatactacaccatcatcatgtacctgtccaatggagttagaagaaagttaatccaagaaaagaccgcaaaaggattgtggaataaactagagcagctgtacatggcaccatcaatatcgagcaagattaatcttcttgaaagattatacgggtttagaatgaattcttctctttccttagatgataatattgataaatttaatgaaatagtttttggtttaattaccattgatcatcaggtagatgaagaaagtcaagcaatcatattgctcagataattgccaatggcatattaagaagtaaagcatcaatcaaatgtagaagggatgtgatcttgttagagggtgttcatgcggcattaaaagcaaaggactttgaaatgcaactcgagaaggagattaggaaagacgaagcctatcttgtaagaggaagaagtccaaagagaggatcatcaaggaacaaccaaccagtcaccatcaagaaagatcgatcgaagttaaagatcaaagacaatcgacaatgttatcaatgtggaaagattggccacattaaaaaattctgcagtcaattgaagatgcaatctggtttcagatcaaactatgatgacaagagatgtaacagaaaccaaaactagtactcaaaatcaaatgatcatggaaatcaaagaaaagactatgcaactgtggctgagagcagtggagatggaagttcagatggggaattattttctattttagaaaataataacagtaaagattggacccctgattcaggatgcacttatcatatgtgtaccaacttagaatctttctttgattatctagaaactaataatggtggtagagtactaatgggtaatgat

SEQ ID NO: 93010 - DNA, 588 bp, Cannabis sativa
cctggatgggttaaatacgaagatcagacatgacttgatgattactactgacgacaaaaccacttatgctaaaatggtggataaggcactacgagctgaggacgtagtgggatgcattatagagtgtggtgggactccggttgttgcggggctcctactccacctgcatcaggttttagcaggggaggtagtggttcggccattgatctgaaaagaaaggcatccactacaactagtggcccgggtccgaacaagaggttccgggggtaccagggtcgaggcaatcgccagagtggcactgaaacctaatacacttccccagagtgccccagttgtaaaaagcaccatctaggggagtgtaaagggcaggggtgctttcagtgtggcctgctagggtattacaagagggattttccgcagctcagaactaggtaccgaagactgcagcgaaacccactccagcaagggcgttttcgataactcgggctgatgtagaagctagcccctcagtggtagcaggtcagctcttggttaacaactcttatttctctgtgttttttcactctggggccactcactcttatgtgg

SEQ ID NO: 93011 - DNA, 691 bp, Cannabis sativa
cttttacatgtaccaaatcatatcttttagatttttttggccgttaaaaattcctctgaactattaagattgttagatttaagaatttttatccaattttagtaaaaaaattctaacatgatgaaagttcagggaccatgatttaacatatatcaaagttccatggacatgatttgatagatatcaaagtctagggaacataatttagtaaataaataatcactgaaacagtaaaattgactgaaattagacaaaaatccttaaatttaacaatctcaatagtttaggaagaatttttaacagccaaaaaaattcaaatggcttgatttgatacatgtcaaaattcgggaagaaaaaatcttaattagccatgaatatatttacttttcgtaaataaataaaatcacatatatatatcttttcagaactactagtaacattctttattatttttttttaaaaaaaaaatagtaacatgtttaaaatattttacatttaaaataacataaaaaaaaaaaaaaaaacacactataaaaatgtccaacaccataatagccataaataaaaatttcacatattcatatttaaaataaattatgtagaacttgtacttaattatacactaattgtaaagtccttttttttggcaagttagttgacaaaataaccgatttcttaccttgtttattcg

SEQ ID NO: 93012 - DNA, 1234 bp, Cannabis sativa
aactccttaatttattatatatgagctttaaaatttatacatatttatcatattttaaatagaatgtcccctcaaaaaaaaaaaaaaaatgggatgatatcatgggtagagtatttagttaatattatgaaaaatttacattagatcaaaaatttttaaaaaaattatgaaaacatatcaacacgatttttatttttttatttttattcttcgaacgtttttatttatcaaaatattttcttagtaaaaataataaatcgcttttagttgttttatagtttatttatagttgtattgttcatgaggttatttttctagttattttttattgttttatagttcatttatagttgatttataagtgtcatgggatttctttttcgttattttttttttttactttttgctgaacaaaatgtatttttaagattttaaaactttacaagtatatatttgtaattaaatattttaagctgtaaaattgtaaatgtaacataaaaaaaaatatatttttgaaaaattctcctaatattaataccataaaacatcactcactttctatttcaaatttacttattcaaattttctagtttatttcataaaataattttgaaaattaaacaaaccatcatatttttctcaatctacatacagtattcaaaaaacagttttagttaccaaaatctccaataattgtaaaattttatgcattgctggatattatctctaattttagctccgtccgtgtctaccaaactacttggaagagtttgtgaattgttaaaaaaataacaaatacaaagtaaaattcatttttatttatattatatgtatgttaaagatattacatactttaattattaaaattaaatacaattttggatacaaaatctgtttaacatatataatataatttttggattatgatgaacatcatgcgcaagaatatgttttattaataactatttgaaaattgtaattaaattcaaaatcgctatcgaaatctgacaaggagaagcatgacctatccaaaaaaaaaaaacattgaattggatatttttcatcatgggattgggttattggtccaaaaaaatcagcttatcattggattgagttcgaagccctcgatcaaacaattggttacagtgcatacacatcatgcttaccctactctcatctcattataatgggctatttacaaaaatatgggaaaaaaaatcaaagttttgataaa

SEQ ID NO: 93013 - DNA, 851 bp, Cannabis sativa
gtaatatacgtctcggatcatgccactggttagttttttgtccaccacttcctctagggcttcggcctttaccgagtcgagggggcatcttttctgttgaaccggtggcatgtccgggttgacgttaaggacgtgggttatgacgtgggggcttatgccggtcatgtcctcttgacgccacgtaaaaacatccgtggcagcccttagtgtctttattattttttctttttcctccggctttaggctttttcctagccggaggaccttggtggggtcgaggtcgcacaccgacacttcctcgatttcctcaatgggttctacaattttttcagatctcacacggggatccaactcatcttcttccgctattcctgggataatagcttcgcgaaccattacaacagctaggtgggcagtgacgttgtaacactgcctcgcctctccctggttccctcttatggttcctatccctgtcacctgagttgggaattttagacacaagtgcctaatcgatgtgactgcaccgaaatccaccagggccatccggccgaggattgcattgtaagctgttgggcagtccaccaccacaaatgtgcaatacttgaaagtgctttggggtgagtctgggcacaatgtgactgggagcctcacttttcccattgggataagtgttgttccattgaaccctgtgaccgcttggtgagagatcccggtccgtgaggcctattgctgtgaaggcttctttgaataataaattcacagaacttccgttgtcaactaagattctagccacaatcttgttggcaattggagtctctatgaccagggagtcatgatgagggaagcgcact

SEQ ID NO: 93014 - DNA, 765 bp, Cannabis sativa
tctaggcctataaatagccatataattaacatagccatataattaacttattttctcactcattcaaagaagccaaactaatctctcaaacattctccatttcgtcattacgtaccaaaattcatgccatagtctctttctcccattttgttattctcatttgtttcatctatagccaaaacttaaccccacaaacatcatatcatcatatactacctcaagctataaccatatacaaccataattatctcttatatacatagacaaggtcggccctgaaatatagtgggctatagggtaaaaattattttttgggcccttacttagaaaaaaaatggtatttttcaaaatcagcaaaaaaattgtataattttaaaagggcaaaatttttttttgggcccctggactaggtgggctctaggcacaggcctagcccgcctatgcccagggccggccctgtacatagatatatatatatatcctccatcacattggcatcacatcaccatcattttacgttcaagttttagtgctcaactaaatcttattggaagctaaggtatatcgttttataattttgggtttttagattgaaatttaaggtttcatatatatatatatatacctctataatgtattctaataaataagtatgaaattatggttttttgtaatacaattatttctcaagggtcactttcattgcaatcaaggctaggactccacattcgaggtaaggaaattaagtagaaaaacataagtttt

SEQ ID NO: 93015 - DNA, 576 bp, Cannabis sativa
ataaagcgaaaaccctttaaaatttcttgagggtcatatatgaataaccagaattaattttgaaatacatagtataatgcaaacccatcatttcaaaaaaaaaaaaattgaaaacttattaaaaaaaggtcctcgaccaaacctttttgatgaaagaggtgtcgaactattataacttcttgaccaaacctttttgaccgaagaggggtcaaattgttataacaccctgatcaaacctttctgacgagacagggatcaaacaactgtattttttggtttaaaacctttctgacaagaaaggaaaatcaaaaaaatatgattattgcataaagctgaatactaactgcccgcgctaagggaaagtattaaacaagacgtcaaagtgtcttgaaaaaatacttaaacctaacacgtgggtagaagatctaactactcatgtaagcaacaaaaatatatacaagatgacatgttcattagaaatatatttgagtttgctgaaaataagatcatttctgatgatcgcgaggtggaattaaagatggcttgcaggttgagggttgggaagataagccgctc

SEQ ID NO: 93016 - DNA, 888 bp, Cannabis sativa
ttattaaaataattaaccattaattgtagcttaattaattaaaagtattaatgcaaattatgtaaacacgtagtcctttcaaaaagaaattatgtaaaaaatactttaatcattaaaaatatatgaatctaattatattatttttgtcagatttctgggtccatagacaaagaatttaaggttcaggcaatttattttttgtttccataggcaaaaataatattattataattttcccaccgatttgactaaataaaaaaacatgtatagttattattgaaaaaataaaaggctcaataattattgatgatccattcttgttgtacttcatttaaaaaataaaaataatattgtctcctaaaagaattatgattattgttatgggttttttctataaggtataataaattggtcccaatattaaagtcgtctcacgtgtgaactcaaattaattgtttacaccgaaattgtttattaaatcgaatttttgtgtgaataattgtttattaaatcttttactattagtactgtcaataattagtgtttatttttttttttaaaaaaaaaaagctccaattattatatataggatattttgttgtaggctcattaattttgttttgtgtacataataagaataatttatggaccgtaaatcattaagattttatgacataatggataagtagaacaatttgattcaaaaataaaactgaaatttacatatatattgcagttagatattttcttctaacataaaaaaaaaaaacaatttgattcaaaaataaaattgaaatttttgactgaaaataaaagtatgttaaagcttattaacaatttgtagccatatttaatattttattggtttatataaatggagtgcttggg

SEQ ID NO: 93017 - DNA, 1072 bp, Cannabis sativa
ttagggcacaaagcccaacaaacccccacttgcactaacataaaacaggcagtacatttcaattaatcctagattcagtctatacttttcaaatgcagatacagttaaaattttattgaatggatctgctaagttgtcttcagtatcaactttttccacaagttcttcccctgttgccacatattccctgatgatgtggtatttcctctctatgtgtttgcttctcttgtggattcgaggctatttattgttggctatagcaccactgctatcacaaagtaaaacctgtggtttttccatttcaggaataataccaagtcttgtgaagaacttttgtagccagactagttccttagcagcctcagtggcagctatgtattcggcctccaaggtggagtctgatgttgcgggttgcttagcaattctccaaacaactgctccaccccaagagtaaataccatcctagatgtagacttcctatcatcaagacaagaatggaaatttgagttggtatagcctacgagatttaaagcaccacccttgtagactaacacataatgccttgtacttttgaaatattttagaagatgcttaactgtagtccaatgttcctcttttgggtttgtctgatacatgctcacaattcctactgcatagcaaatgtctggtctagtgcataacattgtatacattagacttccaactgctgaagtataaggaaatttctcatgtcctctatctcttggggatcagtgggacactgctccttagatagacagatactaggtttagaaggcatcactgcccctctggtgttagtcatcgagaatcgctctaccaccttatcaatgtaagctgcttgtgagagagcaagtgatctgttcttccaatttctaatgattatactgagaacataagtagtttcacccaaatctttcatttcaaattgagtgttgagtcattccttaatgtcagcaattttcttgatattgttaccaataatcaaaatgtcatcaacataaaagaccaggaatactaccacttgattgtccttgagttggtaaacacaagg

SEQ ID NO: 93018 - DNA, 505 bp, Cannabis sativa
attccgccgctaatacattgtttctcgctgctattactaaagaaaaaagattttaaataaaaaaattattattttttactattaccggcggaaagtgtactctgccggtaataacccttattattaggggcggatctattccgccggtaataagtccgcccctaataataatttttgttgtagtgggaccttattatctttggagttttcgatctcgcttttgtccatgtgccaaaatagtcatccttataagttgggcgacatgtcgcctgacatccagactacatgtcatctagagcaatagttcctctttttagcttctttggctcacgttttgcttctcgattttgacatatatctgattatcgtttatgtgcacaaaattcataatattatcgtgtttaaaactcaaaactgcattattataaaaaacacatcaaatatatataaaatttaagaaataaatactaattcatctaaaataatcagtaatgagtgtataatt

SEQ ID NO: 93019 - DNA, 552 bp, Cannabis sativa
tttttttaaaaaaaaaaatagatttttaattaaaaaattagaaagtaaaaacagttttataaaacgtgattttaaaaatatttttactttgctaattttaaaaataaaaatctaattaaaaaagtgttaccaaacgtaatcctaactattcttttcttttttaaaaaaaaattatataattttaatatttttttaggataataattttattaaaaatcttaactagggcatcatttcttttgtggactgtaggaacatttcttgtttttgatatataataagtattattggtactttttttttcttgttttatttttttttaaattaaataatttatgatattaaaaataacatttaaatattcagttacacgtacgcatactacttaatacgcgtggaaaacattattttaaattgtatgttttatataataaattatttaaaacaaattaaatgtttataaaatacttttttttttttggctaaatagtaatttttccccctgaactttgacatatactaaattatgccccctgaactttttttgccgtt

SEQ ID NO: 93020 - DNA, 825 bp, Cannabis sativa
gtagtaatatcttttgaactagattaaaatgcaagccaagccaaaccggctttcattgattatcaagagtacttaaaatataaaagaataatcacataaaacactattgtttatgaaaattttatatttttaggtttaattttttttatatatttttaccgttttttataaaaataacacgaaaataacaaaaaaactatacaaatataacaaaagaaataacattcaaacaatatcaaaacaacaacaaaaaataacaatacaaataataaaaaagaattaacaacaaattaataaaaatacaacttaaaaaaatcatattttctgtaaaaaaatcataaaaaatgtaaaaatatttaaaatttcgtacaaacatatttttgtaattattttgatgtatttgtaaaataatcccaaaaagaaacatatccttttgcgcttatacatagttcataagattaactaagttgtttcccaaataagattttatgtttgttaaaaagtgacttcttcctagttcctacataatagatgtgtaaaatttgtgtacacatacatcattactattgtaacaaatgtcaatctattgaggtagactggtagttattagtaatggtatgaaatatgaatacgtaatagattttttcgttttcttttaggaaaaaaagtatttatcttgtctaatgtctacaatattttcgtgtaatggaaacgtaaatgtgggatcaagctatgaacaaaagtgtatcactgtagaaattaaaacagtgttaaaagcaagattagcgctactcgtatatatttttattattgtttttaaatcac

SEQ ID NO: 93021 - DNA, 785 bp, Cannabis sativa
cacatttagcccatgacactttaacacccacctacaattactaaaatgatcactttattttgggccaaacttcaaatagcaacacaaccaatttgctactgtcaaaatatatttgtatattatgtataaaagtagataactaattccttacatgaataaagatgaagataatgcgagagtttcaactaaccagagtagaatgaaggcaagagcttcaaactgaaagcattgagatttagggcttggcttcaaaaatgtatatataaaaaaaaaggattaataccattttatacttagttttttgtaaaagttatcgattgtaccatctgttttattaaataataagataaatcctgcattttttaaaacattacaaatattatcctaagttcaatttttgacaattattttaatataaccaacttgaagactatttctagcacgaacagaggtagaaacgtaatcaattttgtcataaaacttctatattgagttattattatgttttatattaccaaaaaaaaaaaaaattagttcagggtactatttagtactattttaaaaaatataggattcaattgatcatataacaatatagaaagtttaataaataatttttacaaaatatgagatctaaaatcgtatttacctaataaaaaaatgaaataaaatgtaaccgtgagagagaaaagtaaattcttaaagcatctccatcgcgaatgctctaaaaaatatttgatgacatagatatatatatactagcaaaaagttacgtgcgaggcacg

SEQ ID NO: 93022 - DNA, 529 bp, Cannabis sativa
  modified_base (502)..(503): a, c, t, g, unknown or other
taaattagagaattcatcaattagttggcgtttggttggaatgaataaaaatataagaataggattgggaatgaaataaaatttaaaatgcataaaaaaattaataaaaaaatcattaaattttttctttgttacattagaatgattgtatttttaaaatgaaatagttattctaacaaaatggtagaaagggtgttaatatctcaatactttaaaatgcaaccaaacaaaagaatagaatgaaaattgtttcctttctattttatttcatttcatcacctctaaccaaatgcctttagtttagtttgattccattatatatagacaaatataattgcatatatatgtacaccactatatcataataataaataatgttataaaacaaatgtaaagctatggtagatacaatattttctaaattttagctcacaaaatgaccaaaatagaaacaaagtaataatcaaaaagttgctatttaatatatatatatatatggaannggtttcaatggttacatttttattgt

SEQ ID NO: 93023 - DNA, 505 bp, Cannabis sativa
agattgtaataatataatttttaaattaaaacgatcaaaattgtgatgggaatttttttttaaaataatagacaagagagagaaagagagggaataccaattaaaaaaaattaaaataaaaaccgctcatacatagtttacacgagtgaaaaaaattgacacaacttttgagagaaaagacttaagaaaataattatttatattttcagtataatgttattcactatatttgcatccttttaaatttgttcaattattttcataattaatttaaatactacttatataattaaaacttctcttttaaaaatgcttttaaaaataaataaataaatagaaaaaaaaaattacaaacaatggagacaaggagaaaataatttttgaaaaaattgacagagtaaagacaaaaatgaaagtttttttttttaagagaaaaaaataattaaaaatggcttacgtaggaaagagaatcaaaaagttaaaatcaaatggcttgtcattcggc

SEQ ID NO: 93024 - DNA, 787 bp, Cannabis sativa
ttgatgcatagcaagccagaaaatgaaatagtgttttggagcatttaaacgactccatacctgccttgtccattggatttttgagggagcttgcaccagcattttataaccggctgttatactatattgctgcagcatcttggactgttgactagctttgaattggtctttaagcttcattaaacacctccaataccagatggattggcttggagtttcataggcccaccaatcactatcatgaagatagacactattaatccacctcatccacaaactattttctttgtttgcaatagcccagatgtatttccccatagccgctttgttccaagaatctatatccttaaagccaatgccaccagatgcttttggttgacatataaaatcccaagcaattgcacctggcccgtgatactcagctttggcattccatagaaagttcctgcatatagcttcaatgttagacactattttttttgggcaatatcaagacttggcaccaataggaatgaatggccatcaagactgaatttattagaaccactctccccacaaaggagagatttctagaactccacactttgattctagctgtcattttctcgaccaggatctcacaatctttcccagatattcttttagcaccaattggaaatcccaggtaagtgaaaggtagtgattgatgctgaaagccagaaattgccatgatcctcctaacatgatcctcaggcatattacttgtgtacatggcaatttttgtggcatttggattcaatccagatgt

SEQ ID NO: 93025 - DNA, 617 bp, Cannabis sativa
aatcttgtactttaagtatggacatgttaaaaatgtaacaatatttttgtttactttcaagccaagagccatatagtattgtctttaattcacttcacttccaaaagtgattaatatgcatcatatgtatataaattatagcacattgttgtttcatgattggaattttatacaaatcaataatcaaaactaatctaccaacaaagcatcatggataatttatttaagctttcttttctttctttgttaatgataacggttgctgctgggaacatgctgctgtataatgacaacattcccatgtttgatgatgagctagaaagcctggacataattgaggaagaaaacgattttgatttctttgatatcccttcgtggacaagcgttcgtggtagcaagattcttgtgaatgtagatagctttggcgcagttggagacggcattgctgatgatacacaggtgatgctgaacaacaacacattgtataactaactgtacttttcatattttgttttatataaccaaatgcacttaactgctaagtagtctaagtagactggtgagaagatactggatgatgtcaaaagtatcattattcattataaagaatcatttat

SEQ ID NO: 93026 - DNA, 639 bp, Cannabis sativa
attatccacgtgtcattttttttattggtatatttaaattaatgttataaaaatttaatgacttggatcaatcaagaattgtcacgtgacaagtttacttaacaattaacagccaggtacttgcaaaagttctaaaattataacttaagtattattaccaccaaaaattaaatttaggtatttatttacaactgggagttaaacttagatatttatgtcgtaaattactcgttttttaatgaaaagtaaatcttttttcaaaacaatataatgaaaaaattaaaaaatgatgacattcaaggacagtcctaaaatttaatgggtcataagaaaaaattatttttaaacccttactaacaaaatatggtatttttcaaaattaattaaaaaaatatatatttttaaaaagggaaaaaattatttttgagttcctaaattaagtggactctaagcacaaacttaacctatccgtctatatctaagaccgggcctgtaaacattgtctaatagaatagtggcaacacccaaactaaatttactttgaactaaaaatagaaaaggaaaagagtcaacattaataatttgacttttctaagtggttcaaattcaaatataaaacacacaccactttgtcattat

SEQ ID NO: 93027 - DNA, 511 bp, Cannabis sativa
ctctaacaattattcacttttttgtgtatgtacaaaactaactatagcacgatgagcgttttagaaaatatagaaaaagagctataaatatatcttttacaaagacaacttaagttacaggatctctaattcggcattcaaatggtactgttgctgcagcattttcaaaaccagttgtaggttggttttgaatctcatgaaatggaggtattgtaatgtttcatagtctatgttgggcccttcaacttcaagagcctacactttaattgaaacggatgctcttcgggtttttaatgctttgtgcaaatcttcttctacaatttcttctttttaagatgtaattgttaatatttctggtcttttatcatttttccctaatgtaaatgtctctcatatcaaacgttcagtgaacatggctgctgatagtttgactaagtttgctttaagggtggatgaggcttgtttttagtcagattgtatacttctacctataagctctattattgtaaat

SEQ ID NO: 93028 - DNA, 1614 bp, Cannabis sativa
tgatttacttgattttgagtaactagttttgttttgattttgcatgtgaaaaattctgtgttattagctattatttgctttgtttttcttatatggtggtggaattttagatttttgatgggcacaatggaaatgcggctgcaatatatacaaaggagaatctgttgaatcatgttttgggtgcccttccccgcggcctagggcgggacgagtggctacaagctttacctcgagcattggttgcggggtttgtaaagacagacaaagaatttcagagcagaggtatgaatggactgtggtggagtttgcttctgttttagttttctggttttacttattcttcttgttgttattgttttcaggtgaaacttctggaactacagccacatttgtaatagtagacgggtggacggtgacagtggcatctgttggagattcgcgttgtattttagatactcaaggtggcgctgtttctactttaaccgttgatcataggctcgaagagaacatagaagagtatgttttcatttggtaatgaatcacttgttgttttgccttctgcaatagattgtctaattgtttgtggtgtttttttaggagagaacgcgttactgctagtggtggtgaagtcgggaggcttagcattgttggcggagcagaggtatggtccattttatattgtgtcagttggttttactacatgttatgatcatttggggattgagattttattgtctgttgattaaaatttacagattggtccgcttcgatgttggcctggaggtttatgtctttctagatcaattggagacatggatgttggcgagtttattgttccgataccatatgtcaaacaagtgaaggtaatcttttttcgggtcttaagctcgtggttgagcttgtcgagttaagataaactgacatcctttttcggtgttatagttatctcgtgcaggtgggaggcttataattgcttctgatggcatttgggatgctttatcttcggatatggctgcgaaatcttgccgtggtttgccagccgaacttgctgctagacaagttgtaaaggtaatttcaatgatttcgatattctattatttctccttaacaagtaaatctttgatggaatgcccttctaattactttcggtgtggatgatcctttaggaggctttaaggacaaggggtctaaaggatgatacaacctgcgtagttgttgacattattcctccagatgcaccggaacaaccttcaactcccccgaaaaagcagagcaggcttagagctctgtttaggaagaagtcccgtgactctgttagtaaactttcgaagaaactatcagctgttggaatcgttgaagaacttttcgaggagggctcagcaatgcttgcagaaaggttcccttttttgtatatgttattattatcgattcgagttctcatcatgagtgtagatgttttaccattttccacttgccttgcagactaggaaccgaggaaccaacgggacaatcaacaaccggaatattcatgtgtgctgtatgtcaagttgatcttgctccaagtgagggaatctcagttcatgccggctccatcttctccacgagcgccaagcc

SEQ ID NO: 93029 - DNA, 641 bp, Cannabis sativa
ttttttatattggtttctcaaaatttaattcatatttcgttttctactttggtacgaacgaacaagacacaatacttggcttctacgcaactttattttctataagagagcatctatttatatattcatatagaagattgcattagattttttcaagcttatactgatttacttatatttatataatcttaattaggacgacttctcacaggtcaagattcttcattctcttattttatttattattattattttccttttaaagtcaggaaggttgtccttctattgtttattttgttgattttctatcgtgaacgaatagatgataaacatttaatatgtaacactgaatgcatatatacatatttcatgtagtaatcgcgctactacattactatataacataacataaatatcattttacataactaaactatattagcacaacgagcacgaccccatgtatacatgtagtgtatatgttacatattaaatttacaaaccatattaaatttacaaaccgtccaactcgaataaacctttaaaaccaaaccgaataaatcgataaaaaatacaatctaaaataatacaataaaaatcgtccaataaatatattggatagtttataaattattctaaac

SEQ ID NO: 93030 - DNA, 679 bp, Cannabis sativa
gaagtaaaaatacatataattccgttactaaattcggtaacaaatcagttggaacaaactttaaattgaaacgccgatcaagatataaaatagaagccctagcaaaattatgaccaaccctatttattgatcgtttaacaaaataaactgaaacattagacaactgaactcacacaataaatttttacaatcttgaataatactattgaacaaaaataacattacaatagaacttcgtaaagcttgtgccaccgtgaggcaatcgatctccacatgcactcccgaccaacatttttctttgatccaactaagcgcctccttgacccctaaagactcagcaataacagggtcaatgacaccatggttgaacaaagaacacccctctaagaacagacctttgtcatctctagccaccaaatcgatcacatggctacgacctccttcaaagattgttgcgtccacattgaccttgattctattaactggtggaactgtccaatgctcagctctgtcacctgcctgaaaaccagaccccgatgactctaaactagagttttgagcatttctccattgatcaagatgacctttagcgtaagcaacaacattgtcagccgaaaagcacttaccattccaaacaagattgtttcgagcccctcaaacaacccaacaaatagtgaca

SEQ ID NO: 93031 - DNA, 1028 bp, Cannabis sativa
tgtttatgtcgagttatcttacttcccaccctttagttacaacaactgtcaagacaattctaattgttaaagctctaattatagaactaaaggtctcaccaaaatccattttgggtctctgatggaatcctttagcaaccaaccgagctttgaacctttgaaatgtgccatcagcattgtagtacttttccttgaagacccatttcttcccaacaatgttatagttaggtgaaggtggaaccaaattccaagttttttttatcaagactgtattttcatcagacattgcacttctccatccttcatgcttcaaagcttcaatgactaagttaggttctattatgctctctttctattttgtcttactaagatttactttcggtttaaagattcctaacttggttcttaataccatgagatgaataggccttggttcactacttatagtttcctaaatagtatctatttgagtgacatttgagttgtctaaagaatcagtacatctcaaatctacaccattggcaatgtcaagattgaggtcaacaaaaaaatgacctataaaatcaacatggctatgttgagaggattcatgagacttttctggttgtgttgcatatgaagtttcaagaatgcttgtatcaactagtgtattcctgacagatggttcagtttgtgagttagtgctagactaatttttgacagtaggcagagtaaaccaggaagtgcgagctgtgacatgaacattttttttttttactttgatgagtgtttaaaaacttcatctcttgagatgtataacctaccagtaaaacttaagcatttgtatcctttacgagactcattataccctgaattcacacatttagttaattggaattgaaacttgtgacttcagtaaggtcttagacagggatagcaagttgtatcaaaggttttaaggaaagagtaatctgatgattttaagtacagaacctcacatggtgtctcatgcaactacatttagtgacaatcttttaatcacaacataa

SEQ ID NO: 93032 - DNA, 602 bp, Cannabis sativa
gtgtatcctttctttttttggtatatagattgtgccaaatggaaacaatcaataacttatgattcagtatactgaagaaacaagccacaatattaaaaaataataaattaagagatctcaaatttcaagtaatgaattaaggagtaaaaataaataaataataacactaagtttaacgagttcgagccatgtacaatgctctacatacatctcggtcgaaataacaacagtcatatctttattgatattagtgtttataaggttacaagaatcttcacaaactattagagattataggaaaatgtttctctctctagtttaggttctctctctcaaccttatactatcacgattttcgaacatataaattttatatcaatatttagtaaccaaacttctaactttaagtttattctctattttacttaattttttatttacttgctcaataactaaagttgatttaagcatacaatatgaagcaaaattaacaaatcgaatcagaaactaaaacttgaaaaaaaaaaaaacaatgaaaattaaagagaaaaaacaaaataaaaaccataaaacaataaaaaaaaaataaagaaggaaaataa

SEQ ID NO: 93033 - DNA, 1544 bp, Cannabis sativa
cctagacccaaatcagaaccgaaccctgactccgacccaaacttgacctgaacctgtaccctgtgacttgaaactggaacccaaaccaaaatcggattgggacccagcaacagaatctagacccagacccaaaactgtaatcggaccaggacctagactcggagacagacccaccctaggattgggttccaaagatgaatctcaacccgaactggaactcaggatccaaacccagacttgaagacccaaacatggaataggactcgagacccagaattgggatcgagacccataactacacccaagactcggtcccaaacctagacagggaccgggggcatgaactgaaactagactgggactcgtgattatgataaagatcttgtcctcggatttgggaaccggggcttggacaagacccatagtctgcatcgtgatctgggactcggagaaggacatgaagtttgacaacgacctggacccaaacacagacttgggacccaaaaccaaaacatgaacctgaacgtgaccaggaccctagaacaggactgggactgtgaccagcacttggacatagacaaagacccagaactatactaaaattaagccccagaactgggcctcggaccaagtcttggacccgatcctagccctagacctagcccctgacctaaactctaattcagacattgacatgcacataaacccagacccagactcgaataccgacccaattttagattgggatcgaaacacaagacctagacccagactcaaatgcacacgaaaacttgaacctgggacctagacgccaagacccgaacttggacacagactaagatctggacccagacaaagattcaagaaacctgtaccaagactcggactacgactcggaccctgatcccaactaggatccagacctgagaccagaactgaattcaaacgataacccaaactcataccagaacgtaaaccgcgaccttgactaggactgggacctgagacttgggacccaaacctgaccgtgacccgtatcaggacatggacctgacctggtcctaaaccctcaccaggacttgagacccgtgaaatttgaaccgaaactagaagtagattaggacccaggaacaggactgaaaccaagacttggacctggaccaagaaccgtaaccggacctggacctagactcgaaatcgtaaaccgaccaggacccgaactcaaacccagacctagacccaaactgggacccagacccagaccaggaacccaggaactaaaccagaaccaaatagggacacgtgatagggatctagatttcggactcagaccaggacccgaacccgaaccaggacccaaacctggaccctaagccaaacccaggactcgaaattggaacatgaacaagaaccgcaaaactaggaccctcaaaaccggttaaccggttttggcagattccccgaactactcattttctcaattcttgcccattttagagccttagttgggtgtatccctgtttcctaacatagtgtagtcccta

SEQ ID NO: 93034 - DNA, 898 bp, Cannabis sativa
gttgccactgctccaaatatttcctgatcaaagtttctttcttcactaaaccattgataaatttgagaacaaacatttttagttttctgttcacaactacttcaaatcaagaaaatctagcttgtacaccattagatcagttaatagaacagagagagagagagagtaccaagagcaacgagatgacgttggttagttgcagcagaagaagcaatggaaaaacgctcagaaaatagagaattgagaaaagcctcactgcccataatgtcagcatcattaacatgcccatatcctcctaacaccccattaacggaggcctccacaccctttaatttttctcagaagcaaaacatcaaacacttgagctgcatatagaatatacccaaaactacaaggaagaacataaaaaataaaagagaagaagactcacttcccaatagccgacgccttggcgataccattcagtctttttggtggaatcaccaacttgatcgttccacatctcatcggcgttcttgaattggcggccgtgggaatctaagccgccaagctccatggatattggagctcttcttcgagttgtgctttttgtgacagtgttgaaagaattgagttgttgttgttgtggtattaatatcattggccaataatattttagcataattgcaaaaattaattaattcattattatattaaaaaattggttttagaagaagggtatttttgattttggaacaaatgttagagtagtttaacatttaagaaaacaaaataaataaatattatgggattttaagagttcttaggttaaatatggtacttttaaatttaatcaatttatataggtgccgtttggtaacacttttttaatcagttttctgtttttaaaagtgaaaaa

SEQ ID NO: 93035 - DNA, 581 bp, Cannabis sativa
  modified_base (39)..(58): a, c, t, g, unknown or other
taaaaatatttagcattttgtgaaatcgtatttttgtannnnnnnnnnnnnnnnnnnntgtatttgtaaaataatcccaataatattcatattaaatgattttgataatatatattaaacataagcgtttttggtattattattcctaattaataagaacaaaattttccgaatgaaaaggaatattatagctcttctatctatttcataatatgttctataaaaataatatagcctaatcctagtaatttaatttagtatatgacacttacgtaaacaatgacatataattaacgatttcataagattggatcaatagataaataataaaccatcctaaacatggctcttatatattttgcaacgtcactcgaagaacaatcatacaacttaatttggttaacaactctaaattaaactcaaaagagagccttccaagcatcatcaacatcaacttggaaaataaaaaaagaataatataattaaaagaagaaaaaaaatcaaagaaaagctaatcatatatatgacagaaattaaaggccggcagtatatcattccatgttgaagaaactcatatagta

SEQ ID NO: 93036 - DNA, 715 bp, Cannabis sativa
tgaaatacataccttataatggtcaaaatactctatctgcatatcaaaagaattaattaattaaaatatcaccttgtagtatggatacatacatatgaaattaatcacgcttaacaaatcaggaaaaaactataataaagttcttcgcaaaatgcattatgattagagaattgctaataattacacattctttagtgtgatatcgctattagtataattatgtatcggttttcacataatttaagaaaataacttttagataatatcgctaaccaattataggctccacctatagaaggtggtgggttgcccaataacaatgctattatgattagggtgacaattgggtcatcttaatctcttgagtcttaggtataacatgtaaatattaaattcaaaccactcgactcatttattaatcttcttaaaaattaaaattcaaacttaacctatttataaacgagttgacctgatccaacttgtgtaagctatttatataaataatcatatttaattttggttaaaatatcaactcatgtttatggtacttttatgacacagttatttaatatgtttatgtcttatttaactaatttaatacaatttatatataataaatataatattgcatattttttttttttgacaaagtgattaaaatcactcatgaatttacgacgcccacgtccgccaccggcgctggaacctcctcgaa

SEQ ID NO: 93037 - DNA, 665 bp, Cannabis sativa
gctgaaaatagggtttaaataattgattacactcgactcttttattttatacatgtgtgaaataaattatttgaatcttattttctgcatgttaattttttttttttaattttttaaaattttaaactctattatcttaaataataataaggtagactagtataaaagaattgaattaattttttatatatataaataaattatttggctcaataaatatatgacaatatcattaattttttattcttaactttgaaggtgccctcttatctgtcaaaaaaaagttttctattggcattaatagtaatcaacaccactatatgaggtgtcgtatgtatgtcatgtatatgattttatttgatattaaattacattaataatcctacatatttgtatcatgtagtattgaatatactttaaaaataccttatcaaaatattaattcacttatattagttgaaattattaatagtacagcctaatactaatacaagatgaccctttgcaaagattagtaatttctttataataattactaaattaaaatatgtggtacacgatacttaattatactaatagtaagagaaatgctaaaggacaccactggtgcctagcaccctcctacgtgtcaatatcgctattggtgcaattaagtatcgggtccc

SEQ ID NO: 93038 - DNA, 535 bp, Cannabis sativa
agagtggtctgccatttgtagagagactattgtaggatgagctgctcccagttttagcctttgaaaaattgatagaggcattaaattaaaactcgcccctaagtcacatagggcttttgtttccaccgaattcccaattgagcaagaaatattaaaaccacctagatcttcaagcttggatggtagtatcttctacaatattgcactgcactccttagtaagtgtcactgtctcatattcctctaacttccttttttttggctaaaatctccttcataaatttaaagtaagttggaatctgctcaagtgtccctgcaaaggaaatgttaatgtgcagtttcttgaatattattccaaggaattttgaaaattacttatccaactttttctttcagagtctttgtggataataaattttgatgtggtggtctatgctcactggtggtgtcttgtatttctttggcagatctacagtaagctgctcacctttagccttcttctccatttgtgtcattgcatgtgcctattgatcctg

SEQ ID NO: 93039 - DNA, 761 bp, Cannabis sativa
  modified_base (360)..(376): a, c, t, g, unknown or other
atgagttttatttagggcataaaacccaacaaaattgcatagtgaaaagatcatcgagaaataacattgactgagggagtggaacctcttgctttagacactcccaccatgaacatctgtattagttttcattggtatgaaattgttaaattagcaaaaaaaaaaaaaaaaagagtacgagtatagtagagaatggtgaatcgaattgtgtgttgtatttcatagaatagtatgtatttatatacaaagataggagactaaatggaaaactactaaatacaaataggaaactactaaatacaagttgccctaattttgtacaactattattctaacactctccctcaagctagagcatannnnnnnnnnnnnnnnngcttgttacaaagataatcaacccgcaccacattcaaagtctttgtaaaaatatttcctaattgttctctggtcttcacatatcttgtggagatcaaaccttgttgaattttctcacaaaaaaaaatgaaaatcaatctcaatgtgcttagttcgctcatggaacacgaaatttgaggcaatatgaagagcaacttgattatcttaccaaaatgttactggaatagaagtcttaaacccgaattcagtcaaaagcttataaatccatattacttcatacacaaattgtgctatagctctatattctgattcaacactggatctagacacaatattttatttcttactcttccaagagatcagattgcccccaacaaatacacaat

SEQ ID NO: 93040 - DNA, 586 bp, Cannabis sativa
aggtttaattttgtatggattatgttttatgaagtatttagactttatttaaggacgtttggagctgtttgggcgtttattgttgtgttaaagcaaagttttaactttagagctcaaactttgctctcacatggtgatttttgtttctaaggttgtttcagggtgttattgcttgaagtatgtttgttgtgtcctaattaggaggtctggaaagtttggtttgatttgggttggatttgagttgtttaggagggaatttgtgttttctgcactgaagcgatcaaccgattcagtgggacctgtaggaatcgaaattttggttggtccccaggcaaaccccacagaaccagtcttctagttggggaattggtctaccggttggggcattttagggcaccctagattttcccattcctatgatatttatggtatttacatgttatctatcaatagggaaacttttagtttcgattttcagtcaccaaacagctgtttagcacattacacctcagttttacgaatattgtgatttaggggtctgtaaatcgtcgatcagctgttgcactcaggttgacgggcacacctg

SEQ ID NO: 93041 - DNA, 3638 bp, Cannabis sativa
ttccaataattttttttttttttattttactttaatggatacccgatgggttctccataaccgatgagtatcctcctactccgaatctgttggttattagacggggatggaagtataaataagtagcggggatgagggcagaaattgcattccccgtacattaaccgcccaatttccatctgtgccgttaaagtggaggtcttactcgtttcagaaaaaaaaaaaaaaaaaaaagtgtgttggccttacttttttctttcatcaattttcttcaaaaataattttctaagacatatatggagtatacctatcactggctacaaagtaaccttatcattttttttaaaaaaaaaataataatatagctggctaaaacatatatggagcacctataactggctacaagtaaccttaccaaaatataaatcatggattcctaaaaaatatataaaaatcatgggatatctaaattcataattagatacgtaattatcaaaatattctaaatctaaatatcaatgttgaaatccaccatcaaagaattctaaaaccaaataacatatatctaagtaactccatattaaattaaattatacaacataactgtatagtatatatctaagtaattacaagcaattatttgattaaaacttaaaaaataatgccgccaacttaccaagtataaattcatatttaaatgcatactgataaaaaatattttgatatataacatagaaattcaaattcagagtcgtatatagaattctaaatcaaaaataatttttttttttattttttttagaagaaaataaaaaataacttgataatgaatcaaagtataattacataacaaaaaaaatcatgtgtattttttttttttttggttaattaggatttttatcttttaacatgtaacaaatcatgtctcttaaactttttttatggttaaaaattttcattgaactattgagattgttggatttaagtattttgtccaatttcattcaattttactagttcattaattgtttatgtactaaattatgctccccagacttcgatatttaccaagtcatgccccttgaactttgacatgtaccaaattatatcccttgaactttcatacatgttagagtttccttactgaaattggacaaaagttcttaaatctaacaatctcaatagttcaggatgaatttttaaagactttaaaagtttagagggcgtgatttggtacatgtcaaagtttggggggcaaaaatcctaattagcctttttttttaagtggagagtgacccactaagttatagcgagcaagggaaggggtcacttccgttccaaaaccaagtgtaatctaacccaatggacatctgcactaggttgtgtgccgctgtattccttagtctgttagtgtgggataaggaaacagttgggaaggaagagaacacttctttaagagactccacaagagctccatattttgtgaggatgacttcttgtgcttggacatcccgaatgaggttcaagaagtctatctcaacctggtgtataatgagttggcagtctttacaccaatttagagcttgaagtgatgcccaagcctctgctattattggggccatcaaacaaatgttgctttttgccatggctactattacttgaccggatgagtttagagcaaagctcctacacctatcctttcatttctagaagatacagctccatctatattgagtttatattattgtccttctgtggggcctaccagacacgaattttgtttgaggtttggtctaaggtacttggacagttcttctactggggactactgatagatactggtgaaatctttagcttcttgataaattgtgagaggtgttaacgctgacttttgttaactaaaataaaatagcctttacgtaataaattatctacagaaatatatataagtaataaatgatcaaataacaccagatattttacgtgatttcgtagttaaaatctatatattccacgagtccttattattagggatatttattgagtacagattacaatctcagaattagaataataatattttctctctcaattttgtcatcccttttcctctagaatctgcccctatttataggaatataggttgacagttattctttttgagtttgatccaaagtatatcagttcatgaaacgtggataattcccacgttccatttaatcacatgtggattaatgtctaataactactcaactactttttactcttatcctttagacgattattactgagttggaaggttgtatcttgcttgatttgagttatcctccttgtccttcttaataagaaaaaaatgctaagtgttgggaagtatttcccctcgtcatattcttttattggcatttaacaatgcgaggtgatcttctcgcttggtgtaatgcaaggcaattatgttgtcacattcattctgctcaagtcaatgaatatccccttcttgtctgtatattctgaggcatgcatataactcgtctatctcagcttaatagttattatccttgtctcatttttgactatatagtcaatgagttttgaatattatctatcaaacctctatgtaataataacgagttatttaatatgtaattattggtgtaatactattatatcctttgagttgattcatattcattccgttagacatgtgtcagcttctggagtacagccaaatttcggatataataattgccccttaaaaagtactttttaattaaaaagatttttttaaatgattacaaaggtattttcatcttaacctatttttgaaaaatcgcatgctttggattttagttgttcagaacttcgaggcacatcattagcattaaattctctgacttttctcttttgcaatgttcccatccattagattagatttctcttgatagaacgattatcagtaattgggtataaaaactaggacttacaatcaattacaccattttagtatttcaaaccttcaaatcttctctataaatcccggttgtttcctcattagaatttgcatgccctcattgcccttcacatatttcttgcatatctcaatcgatttcaaccatcattctagagatcttcaaaattcaatctgacgaatttcagaatctcaatcatcaagttttcctctgcccaggaattccaaccaaaacagtaagtgatatactctcatcttcttaattgtttcctttcctaaactcatgatctcgctttcttgattgatatattttttatcttgctgtttggttatttttaggtaattttattttggtagtttgaatagttttagggttttaaggaaaagtttaggttattcaattcataaattcttaggttaaattattagattttccagaaactgggataacattttttcacaaacatgacccaatcttttctagaaattaccatcccaaaattcttaaaagctgattgtcctaaaaattttgcctttccctttgaatccaaaacttttgttcctaaaactattcttgcgataaactatgacaagattagagatcatctaataaaaaccaatcaggaatggtagttcaattgagtgggatcgctaaacatagatatggaatcta

SEQ ID NO: 93042 - DNA, 747 bp, Cannabis sativa
aacacatcgcctgcaatcataattaaacactttctctaacacataaacagagagtagttctctcttattatttattaattaatagtgatttattctataaataattaagtttaactcttatgaataaataattaaatttatttaattgttaaatgttaagtaaattatcatttgactgtctctcattggtctagattataaattttttttatcgctaaaaattaaacttaaaaatttatttacaaccgagagttaaacttaaatatttatactacaatcgcatacgattaagattatttatagtttacttattcagagtcataagtaattctttataaaatttataataattaattaattgtgctgaaaattaattttataattttgttgtgtttatgataagaaagagtaatttgcggtataaatatttaaactaaattatattttcgaaatttatactagtacttgatcgttaagtgttaaattaatagttacgtgacagttcatgattaataaaaaaatgacacttgaatgaaatgacggaagttttagaaatataatttaaatattattactataaaaaaattaattaataagaaaatgacaattggatagtgatttgactatctacaaaaattttaaaactataatttaaataatactataaacattaaacttaaatatttatctataatcaaaaattatttacactacaaattactttaaaacaatgtttaaacttacttt

SEQ ID NO: 93043 - DNA, 566 bp, Cannabis sativa
ggcgcccatacaccaaaccataaccctcactgaatcaggatcgatcttgataaagtatgactaaccgcaaatcacgcctatactcagtactataatcatactgatgtggtaccaattaattcatactatctgatagcctagcatatatctgttggcatcttggtgcatctctatgtacacctcaccgatgccctgatatgctaatctgagggctatagatttgtctattctgacggcaactaacatgcacgctaaacatgtataaacatatgcaaaatattatactaatattaccttgattgcgaattccggtgtgccggccaacctgactggaacaactgctcagcgaattacaagctcctaaataacatcaatcacagcactagtacgtgacacgctaaatcactttccgggcacttaaacttgaaactaaaagtttccctatcgataaataacattgcaataccctaaatatctcaaaaataggaaaaactagggttaccaaaattggcccagccggtagaccggttccccaactggagttctggttctgtggggtttcttgg

SEQ ID NO: 93044 - DNA, 549 bp, Cannabis sativa
tcacttgtgtgagtttactacttgattacgtacacttgcgtattgttcttaattttcgtaacaatccaacttgataaacgtcccgacaaaacctcccaagcgttccacaacagaggccgatttgaaaccggtttgtaagccatgtatctgaacccacatatcaaggatattgatgaccaccttcttaggatcttcagccctttgtaaccttcgaaagatgaactgttgacgattgaaggtccacgggctaccctcaatgaccctttccaaatcaatctcgtgataaaactgaaataggtaccgattagactcaatttctttaacatagactcctctcccaggctgccacaaggacgccataacaagtctcatggcttcaaaatcaattggtcgggcagtaagaaaccgaccaacaatacagagatgatcatggccatcttgatcatccggcacaaggaagtcaacacccaaatcaccatcatcttcaccttcaatactagtatccgcacatctgtcctcaagatcacgcatagccacactcgacgaagc

SEQ ID NO: 93045 - DNA, 520 bp, Cannabis sativa
tagaagcctcgacttccacccttcaattctgttaaggacttttttcaccaggtaattcttcttgtgggattccttctctgttcgaaacaaaggaagacccaagtacgtggcatcttgcttcattttacacattttcaataagttagcaattttgtctgcccgtttctttggtactccttttgagaagaataccgttgatttctggaagttcactgcttgtccggaccattcacaatacatttgtaagcagccaagaaaagcttcagcttccttttccgaagcatggccaaacaacattacgtcatccgcgaacatgagatgggtgatcggttgcgcctccctagcgactttaaaccctcttatttttcctttcacgtttgcatccgatattaggcgagatagaagatccgcagccaaaatgaataaggctggtgaaaggggatccccttgtctcaggccgcattggggtaagattgttccctgtttcgaatcgttgatgatcaaattcatcttcttgatt

SEQ ID NO: 93046 - DNA, 595 bp, Cannabis sativa
tatttggacaccaaaaactaacaatgaaaaaaataaaaaataaagatcggtttaaacgggttaaccagaccaaaccgacaaaaatcattgggcgagttacactttttttatttttttcattggataggttacaattagatatttgcaacccgacatttatattgagttgataaaaatacactataacccgaccaaaccgatcgatgtacactcctattatagacccatctttatatgcaatgttgcctacaaatgtatttcaaagatcactactctttgattgaagcccctccttccctccattatcttgccatgccaaacagcattcgtcaaggattatctcattattaagaacactattgttgtaagggaaattgtcccttctatgagcaagaaaaaagaaaaaaaaaagctttgtgatgataaagctagacatggagagatcatatgataagatggattgggactttatgattgaagttttgacgggattaggattcactgaccctttccttacatgggttcggcgatgtgtcgaggttaagaacatgagtttgctcatcaatagctcaattcaatgagatattcaaccatc

SEQ ID NO: 93047 - DNA, 519 bp, Cannabis sativa
tttttgtagtttttcttagttttacatgcttttttttttttaatttttcttttattaaaaactagggaattaatccgcacttcgcgcggtcttttataataattataatattttttttgtagttaaatttatatatcaaataagtgatgcaataaaaaatataatattatgttataaacattataaaaattacaaatatgaaataataatctttctcttaaaattaaactatttcattctaaactctatcactcacatagtaataataaaataaaaagaaccacataatttaaagatttttctttatttattgtgttaatattatgcctgtcaccgtcactgtttccaccgataccattatagtcactattatggccactaccaatcttctaatattcatcgttgatattatcactatattttccatcatctatataatttaaagtatcattcaatactgttgcccctgatttcgcccaaaatacgtggatcaaccggatgatgacacgtggatgggaa

SEQ ID NO: 93048 - DNA, 859 bp, Cannabis sativa
gaatattcttatcaattttataatatcattatatatatttaaaagtaaaaattaaaataaaaagaaaatttatgtagatattttatataaagaaatttaaatttaaaatgttataaatatttttaaccatattttaactttattattatttagtttaaattttaaattgaaatgattgtaataaggaattgattgcttttatggtaaaccgattcacacacttttttcgtaaagtttgagaataaataatatttatatccaaatttacgaatccagcctatatatagacacactcaaattttttcattgcaaaagttaccaattagaccatctgttttattaaatgacaaaatagattcttatttttcaaattgtacaaataggaccctgaattgactttttgtcaaaataaaacttaataataatctgatctaaagatgttatgacaaatctggttacattttctgtatctgttcgtattaaaaattatcttaaagttagttatattaaaaagtaaaattgttgaaaattgagttcaggtcttatttttactattttggaaaatatagagtctattttgtcatttaacaaacagaagatccaattggtaacttttgcaaaatatatggtccaaaatagtatttatacattaaaaaaatatatagtcaattaaaaaaaaaataaatatatattgcatttaacaacacttgattgaatcttattaaaaaaaaaactaattatacgtgcattgcacgtaacatcaatctaatagtcgcaaaagcttccatgttacctaattaattaaataaatgtaataaaacaaaaccgacaaacaaaccaccaaagaaaataaatgtta

SEQ ID NO: 93049 - DNA, 1315 bp, Cannabis sativa
tgcattggattctttgaagcaaaaaagggatttgaggcaagggtggatccaatgtcccctttgctttttgtcttgggaatggaatatctaagccgaatcatgagcaagattggaaggaaagaagaattcggatatcatgagagaattgcagaattgaagctaaaccaccttagttttgcggatgatgtacttttgttttgtagaggtgactttaaaagtatctatttgttgatgcaagggctcaaattattcacaaacacctacggtttaacaccaaacaagggtaagtctgctgttttttgcagtggaatggaggaaagagagattaaaagggtgctagacatgactggattctcgaggcaggatgcaccattcaagtatttgggagttcccatctgtgcaaggagaattgcagcctctgattgtgtcacacttgctcaaaaaatgacaaaaaaaaataataaaggtatggtcaactagaaatctgtcatatgttgggagattggtgttggtcaattctgtgcttagtacaattcacatgtattggagtcaaatcatggtccttcctaaaaaagtcattagagaaatagaaggagtatgtaggtctttcttgtggacaggaaagagtataatggaaggagctggagctattggttgggaaaagttgtgctacccgaaaaagaaggtggtcttggcctattgaacattgctcaatggaatatagttgccatgtttaaacacatatgggctgtggccaataaaaaggataatctttggtgaaatgggtgcattgtgtatatatataaaaaatataattggtgggagtataaagctccccaaggtagtagttggtattggaggaaagtggtgtctattaaagacttagtgaaacaaactttgaaccatgaagaattctcgaaggaagagtataaggtagcagcaggctataaaactctgattcaagaacatggaagggtggactggtgcaatgaggtctgggctagaatgaacaccccgaagcacagctttctcatctggttagccatacagcagagactgaaaactaaagatcgattgtgcaggttcagagtaattgactctccagtttgcagcttctgcaataatgcagatgaaacaatagaacacttgtttttcaggtgtgttttttcccagcaatgtttgatgcaagtgaagaactagcttcaatggaaggctcgagctgatactctgcaggtagtgctcaaaacaattcttcgttgaattcactcttagaacttagaattgcactctcacacttatatagagcatattatat

SEQ ID NO: 93050 - DNA, 551 bp, Cannabis sativa
cctcatcctcatttcggtcctgctcgttgcccttcttatatgcaagctgtccatttgtatttaggtgagcaaaactatatataatatatacatataactcatagattttgtgttactaattacatctctcataatctatatggatatgattttatttagaatgaattatatatactgtttcttacaaatcatcatataataataataataataatattttgaaggagagaaatggaagtatgtgtgtggagtatttgtgcaacagagcttgtgtggatgtgggattacctataccattacagcagccaccagtatcaggtctcttactatattttctctttccttactttctattctattcatcaaaaacccttgactgaatatgcccccatagaactaaagaagaccatatttaatgttgtatatatatgccaataatcaatcctacttgcccaattatgacaccattataattaatttgtacaaaagaaaagcatggactttgagatttcataatgcattgcattgcctttattctccctattagatta

SEQ ID NO: 93051 - DNA, 1413 bp, Cannabis sativa
ttaatatgtggataccaattagatagtttatgatttgatgaggggccaacttagaaattattaataaatattaccaactgttgtaacagttggtaatataagaagtattgatccccatttttcatcgtatcgtcatttttcaaagttcctgaagtaccatcatcaggaaaataaagtttcaaaggttttgatgcgaaattggaagatcatacacttcttcaagcgattcaatggactctgttactcttccgctattccttaatcttattgtttgattctcatgaattaattagggctaaattaagttttacagtattcttaacatgtggtatcaagagcatccctaaattagttcttgagaaatatatggtataatgatcttctatgaaaatatatatttgcagtcatatatatatatgtttggattaaatttgctaataacttgttgaatactaatattggtttaagtttttgaggttataatcgttatatatgcgattaataaagaaaaagaaataaaaagctgctattatgcgatttgcgatttggttattttctgcttctgcctgagtgattgttgaatatatgtgtatatatttttttagttatatcaatattgcatgtcattgaattgggtgaaagttgtttctatttcaactattttcagcataatgtatatatagtatatattggttttgttttatttgatcctattgtacacagtttaatatatatcttattactatgtttataataataacatagtacaatacattttttttttctgtttaagaaaaaataaaaataatatattaacaataaatttttaattatggttttaaatttattaattaagaatatttaatatttttagttgaattaattgaaacaaaatatcaccaaagtgatctcttttgtgtaaattgattcagttaaaatattaagataattgtgtgtatgtaattaataaatttattaattaacccaaaggtgagttaatatttggttgaattttatgtatatttgtggtaataaatgtgtaaccattataaggtatttcgtgtgaataatatgttagtctaaagattgtatattgtttgacataatttattgtcaatgtttgatcactacaacgagagtaccgcttacaattaatattactgtccaaagacttaatattaatggtgtgtttggtatcttggtgatgggattaaccataatttaaatttagttttatttggattctaatatgagcatgttatttatgtaattgtattgttcttttcagctgttgctactgtatctgctaaccttcatttggtaccggtccttaatggcaataactttaaggattggaatgaattttttttattgttcttggctggatggatcttgaccttgcattaaggatgg

SEQ ID NO: 93052 - DNA, 907 bp, Cannabis sativa
catggagagaatggatagaggcaatgatgatgacttccaatacggaccttggatgaaaggttctaaactcccaacaaagaccgttatcgcaccgacttttctaaggccaatgcctggccgttcctcacacgattggcaagaaacacacttacttcctcactgcccattcccccttcccgtgcccctccacagccaagaattctccaccatggtgaatcttcacacaccattcctacacaactttcacaccacggccacgccaatattcacacccctgaccacatcttgcaatctttagcaaataccagcctccaatctccttcccctccacaaattgcactaaatactgcccatatatcttcatctcattcactccctcaatctgctctgcctgcctcttgtgtcactaatatcctacccacccctgatgctctcaaccacataaatcacctttctcaagacaaagcatctcacgtctccaacaccacctctactgccattaataccacttctactacaacttctacacactctgttgctgacctttcaaatgtctatatgcatgacattgactatgtatccaacactcttatgccaagtaatgtttttgctacttacccgccatcttacaacactcctttcacatctcagactccacctccacttcatacaccaatgccacatgcacctattttccattctatcaacacctgtgctactactgctatggatcaagagaatatctccccaaatgtcattcctaaacgacctagtgaatcaatgtcagtgagaaaaatgctcaagcggagtcgtgttttaaatggtgcctcagcatctttttcggaggctgctgatcatgtgactgatgtttctgtgaccacggattctacagccactttctttcctt

SEQ ID NO: 93053 - DNA, 719 bp, Cannabis sativa
  modified_base (68)..(74): a, c, t, g, unknown or other
atactcttcattctctctattcagcatcattatttttttatatatataaatttatcaatcgttatatnnnnnnnttcaagatagtgacgattacaagtgagatacaaggataacaacaattttgaatttagtgacaagtgagatacaatgatgacaacaatttcaaatttgatgaatttcatatagatttatcaattgttatatttttttttcttaactctatttttaatataagcttaatcacacaaaaatgatatttatccaattactaaaattctatcatgtgctgaatctaatttaatttatatatactttgaaaactgactttatagaaatatatgtctattaaattaattaataattatcatttattaagttcaaaataattagaaaaattaagactctaaaatattaatttatttttcttttgttattaagagttaaaaaataaaaaagtttttttatttttacactttaaaacagtttttttttttacatttttacgaaattctacatagaaatccttattgcaattcgcgctgcaacctaaattgcaataaaaaacgtatagaaacccttattgcaattagcgctgcaaccaatttagaaactcaaactgtaaatttaaaaaaaaagttcaaaaaaaatagtagatggggtaattccccaaaaataaaacaaaacgcacacgaaagcgcggtttattttttagttaagta

SEQ ID NO: 93054 - DNA, 702 bp, Cannabis sativa
gcaagcttgcatttcggtaaagcaaattaggttgcttctcaacggggcagtagttgggaaattcaagccggagaggggcattagacaaggggatccgctatccccgaccctgttcatcattgtcgcggaaaccttgtcaagactactccgactaaaggaagaaaaggggcggattaagggatttcaaatgggcagacaaggagtgaaggtaaaccaccttatgttcgctgatgacgtcatgctctttggccaagcgactatgaaagaggcaaaggctttccgagagtgtctagacttgtattgccaatggtcgggtcagaagattaacattcagaagtcttctatttacttctccaaaggtttgcaacgggacaaagtacaagcaatctcacagtattggggaatgaggaaaatgaccaccgacacgatatatctcggacttcctcttttcagatcatcaaaagaacggaagattataaaccaatagtggataaagtactcaaccgagtccaaggatggaaggccaaaatgctatcctgtgcggggagggccagcctcatcaaatcagtgggcactacgctagccaattatgttgcgtcctcagatgtcctaccaaaacccacggcccaccgaattgacaaaacacttagagacttttggtggggtgactcaaaggacaaaagagtgatacacccggtagct

SEQ ID NO: 93055 - DNA, 1050 bp, Cannabis sativa
ctaatcacatatatattcaaaaaaaaatattgtaaaaacataatcaaatatggaagatatgaaaaaaaaaaaatactaaaaataagcatatctcaaattttccataatttttaacaaaatgatatacagtgtcacgtactgggtgagatgcaaagatatcatcagttacacagagtagggagctcttctaaaatagacactattttagcaaccttctattcgatcgaaatatgaatttaacattgtccaatattggactggttgcaagtttaatcttattttataagctactaccattgtttcatatttgtaaaccatactctaagcagtctctatttgggtgagcgttaataagaatataaaatttacaaaaataattaactttcgaggtcatacgttgttaaattgtctaatggatgaccatctattggggatgaataccattaaaaataacaatcttgcaagaccaacaatggagatcgaatatctcatactaataaagctcatattttaagatagtatttttattcaattatttattttgataatttattttaatatattaattaaaattactaacttagaaatacaataattataaaattaactttctatccaaagtataaattttaatttatattaataaaaattattaatttaaatagttctgaaaataaataaattatttttcaatcttaaatatatatttttaatttttttttaaaaaaaaatctattaaaattacttaatttaggtgaatctgaaattaataaattaatttctacccaaataaaaatattttcaaaaaaaaaattaacattttaatattttataaattaactatcaaaattaatttttaatattaaagtattaatttctatcaaaataaatgtatgtaaaattactaatttaactgattctaaagttaattaaaattaatttataattaagtattatttttttttatttctttttaagagaaattgcaatgtataaatataatattacaaaaaaaaaaaaaataataaaaaaaaacaaaataaataaaaa

SEQ ID NO: 93056 - DNA, 692 bp, Cannabis sativa
taaatctaataaaaaaccagtcaaagcatctaatggtcggaaccgatccaatccaataaatccattaaatcggattggatgactcaattcgattggattggatcggataacaaaattcaatatcatataaataattggatttgatcggttgggtgctaataaaattgtcaatatgtatttaataaatattatttttagcggttttattatgagatcatgagaattaagttggactaaactaatgtttattatgtgtgttggattattaagttttaaattatatttttttttctttttaatgaaatcaactttaatggtagctaaaatagattggatgaatccagttaaatctaataaaaaaccagtcaatgcatctaatggttggaaccgatccaatccactaatttcattggatcggattggatgactcaattcgattggattggatcggatgctaaaattcaatatcatattaataattggattggattggttgggtgcaaatccattggatgtgattcaataaacacccctacattggtgcacatgagagagactttgttggcataagtctgatggtagtataggattttgggacctttttatgtttaacaaagttttgttggccaaacaagcttgacaactatattctactaaggagtctcttcctgctagagttatgaaaggactct

SEQ ID NO: 93057 - DNA, 871 bp, Cannabis sativa
tacaaattagtggaaggtctaaattttgatattgggggttttattagggacaaaaagtgaaatttccctttgcatttctagtagtagtaaaattgaagtgaagtcgaatcgaaaatttttaaatctaacaattttaataatttaggagaatttttaaaacgaaacatagtttagtatatgtgtgaatgtttggggccaaaattctaattagtaattactataattaaatgaaagttacaatcattttgctgaaaacccctctaatttacccatatttacgaaaatgtccctttcttctccgtgagagaaccagaaaaactcagttcactcacttctctaaaccctattataaacccaagaaagattcgaactttccaaccattgaaatcaaactctctccgacgagtctctggaagctatccaatgtccgctaatgtccgccgaatcgagaagaatttccaggtacactctccccaaatcatagcctctgaaagcctcaattttttggatcagtttttacctttctcatcgtccgattccaactcttcgagctcgctcaacgctaaagaacggcgtaaaatagctgttgggttatctaagatagttaaagtccgtaaaagtcatctattaaaagctttttctagagagttttccccattggtacttgttcgattaatggagcttttgggttgtcgagaaactgcatttgcattctttaaacttgcatttagagactattctgagaaaagtgtgagatcttgctgtgttgttgctcataatttagctgcaaggaatctaagattctatgcccaagatgtgatttcttgtgttattgctagaattggtgttagtagaagtagagaagttagag

SEQ ID NO: 93058 - DNA, 824 bp, Cannabis sativa
ttagggggcaaaattgctaattgataaagacacatcatcatttaaacagaataataggatagaacctaacagaaggactaaatttatgtaaatgtaatagtttaggggattcttaacaatccatatattttaggagccaaaaaatattatcaaaagttcaggggagaaaattactaattattctttcttttttcgtttttccttacctggattaaagattcttttgtgagtaatttttaaaatttactctccgtactttttttattttcttacattattttaagttaatttctataatttattttaaatcagtttggaagcaaacacactttttcattgatttccattgtacttcttgcaacaactatagataaggcttatgttaaactcctaatttgccttatgtagagcatttagaatgacaaaaataaagtgtttcatggtggaacaaaacgtgttgcctctgctcttgcaacacaagctataagttatttggataaatatcgatcagtaaattaaagatgcaagaagaaccacaatcctcatttgtcacaccagcaacgcacgcgcagcacctgcaacattgcaccagcagcaatcatcatgacatgtgatgcaccagcaagatcacccacgacatgctgtgtcaattgaacaaggctcaccacactagtaagttaaggcagcccctgcaacattacaccagcatcacccattaggataagtgttggatcagtaagttcacccacctgtgtcaaccgaacaaggcttatcacaacatgctactactagttacaacataaggccaatgaatggtataccgt

SEQ ID NO: 93059 - DNA, 2938 bp, Cannabis sativa
  modified_base (2525)..(2556): a, c, t, g, unknown or other
ttttaaaaataaatatgtaatttaaatttaaattaaataaaataatatacaaatttataaatatataatttaaataaattatataaaattaaaaaaaattgaaaaacgcttatatatggcgtcggttcctacaccacttatggcgtcggttattagctaggaaccgacgccataggggtatatatggcgttggtttttgaaaaccctttagcgtcgcccagatcggcgttggtagcgaattttgccgaaatcgacgctgaaagggcttaaaaaccgcctctaaagggggtttttgtagtagtgaacttccatcccagagttcctcgagtcaacttgggcgcagggctagggtctcttcccaagtcggttgctatgactcgggtctactcaactccgttacgtcatccttcttgccacatgtcaaatattgacgtctacgtcaccagaaaatttttcttggttaacatcgtaatctttgagagtttgtgatgattcttgtaaccttgtaaacactaatatcaataaagataaggttgttgttgttccaactaagatatagagcatcgcacattgcttgaactcattaattaaaccggttattatttttttttttattttacagcttaatttattatttgaattttgagatctcttaatttattatttcttgattatgttgtttgtttgttgagccagtgtactaaatcgagtgtactaaatcgtaagtcattgactatttttgttttgcacaccagtacataacataatgaatccgtgtttgacaaaaaaaaaattgtctcttacaaattaacttcgaagtatatactttggcttctaatattgaaaaaaatatttgatcaacctaacctttaatctaatgattgttgggtgaatggaaagcatactaaagtaaagtagaagaatcgctatgtatgtgtgtgtggcgagaagttaatagccacacaaaatttatgtgtcttccatatgattcagcacataattattataatagaacttgcaaagagatagacttgggaaaaccagcccaatataaaactcgacagaagagtattaatattacgaagaaaagtttgtagtcattttcttcattttgttttttggaaggcaacacatcaatttagaaatgtgtgagtgaaaaaaagaaagaatgaaacacgttgaaacaatttctaaaatattgtcattattataaaatttaattaaaaaattttatactaccctttatattatcttcggcaagttgttcctccatgctattattatatgttttgactctaatattatcttaatgacattgacttagatctacatcttttagctattaaataagcccattctgcattaatattcaacacaaattatcgctgttaattaaaatttttactagttaatcttcacacccggagataaatgcagattttttttttttgaaaagtgatattaatgatacttataatattatttttataaataattaaaaattttaaatagtttaaattatccataacagaattctttatatttcaatttatctcaagtgtttaaatttttttaaatctatttaagtattattaattatttgaaaattttataaaatttacaaaaataatgttataactataataaatatcgtcataaaattttttctgaaaaaaatatatagagatatatttttaaattgggaaattcacaagagattcacgatgactcctcttctatatataaagctttattttatatatatatatatatatatatatatagtatatagacctcccgtttatatgtatttatagtttcatttttctatcttgattaggaaagaaaagaagagcctgattgacacctttttattataatttaccaaccaaattaacaaggtactagttagtagtactcgtccattaaaaggtcaacttaatagtatgacataacaaaagtaggattagaaaaaatataaatatttttatatatttgtacgtacgtaagcattttatatgatctactaacccatgccatgccatgctttcattttatttctttttcttttgttttttttttaatatgatgacagccattttctactaaagaatatagttttattttttgggcttggaaaagtccagaatgaattgtatagctaacaaaattaaaaacaaatgaaataacatcatgctttagatcaacttgaagctctacggcactcctctaatttcttaatcaattatgtcaccttcgattgtctatgccaacccaaatgacaactttcacaaaccaaattgtgcgcaggcaccaagtacatttttaatatatcattttaatatgcatacacaattaaccaaataataacaaatatatattttaatcctagagtattttatgtgtgtgtagaactataagtctgcgaattaatctacatcgcaaaactctatttgagtgtctatgtgggtaggctggtcatgtctcgggaagtcatgatctcgattattattattattattatnnnnnnnnnnnnnnnnnnnnnnnnnnnnnnnnttattattattattattatgtactttaatgtattttctaaaaacatcattataatgatctcgtaaaaaattatatttgaaatattgttttggaaaaatatttggtgcacacccttaaaaagccatttggatgcaccctctaatattaattttattggcccaaatttaattgttgatgtttcttattgtagaccagtcactactacaaaaaactcctttagaggcggtttttaagccctttcagcgtcggttttctcgaaattcgctcccgacgttgatcagggcgacgctaaagggtttttaggaaccaacaccatatgtacccctatggcttcggttattggctaggaaccgacgctataggggtacatatggcgtcggtt

SEQ ID NO: 93060 - DNA, 1075 bp, Cannabis sativa
tttgcctattattttatcttttttaatctatataattaaatcctaaaccctagttgaaatactataaaagtaacatgatgcttattctcactcaacctctctcaactaaattaaatctagttttctaactgacaactagtagatgagaaactccttttcatagtgatttcgaacctttttgttgttcttcatcatattcgaaccttagtgatagagtaccattctcacacatagtaagttaaatactcaatcatagtgcagaagacagtggttaaccaaactaaggagaatgagatcaagactcagatcgtgttattactttgtgacaaaaaggaacaaagattaaaaatctgatcggaaataatcatattattcagctaccatacaaacgacaattcgttatgaaagtatacaaataattcaatccatacaaacgacaaaatacatttagataatgaaaattccaccaccaatacttattatcaacatgcataaaattgagatagtgatcaattgaagagagagcatttgctgccgaccatgatccacttaatcgggttgttactggaagatcatatatatatatatatacctggccaaattatcatcattataattactaccacatatatttttaaatcattaacatatatggataaatataacacatatacatatacgtattaataaatctataaagatagagagacagtcagctgttgttagaccctcattagaaattgaccccaaaaatatatagcacatgtatgtataaagattagatagctccttcctctacctacatcacacgtttattgtcacccatattgggggcctttcctagaagaagggtccaacttgatgtttttgggtttgtcctgtttcgtaccacgctatgtgtttatttagttcttacctcttaagaatattattatagcaatggtcccactgtaccaattgcggcttcttttcataagataaagttgagattaaacacaatcttcaactagttttttctttatcccattttccaacggttggaggtattttaattaagaaatgttaaaaggggtat

SEQ ID NO: 93061 - DNA, 631 bp, Cannabis sativa
ttttttaatttttatattttcaaataattttttttttttttttttgtattttttatagaaatacacataaaaactcatatagcaactaacaaagtaaattaaattacaaccaaaattcacacaacaactaaaatgaaaactacttgaacaactatcgaaccaacaaaaaccgtaatttttttttttttttgaaaaaattaacaaataatatatggggtatgtataataatagaattttaatttatttcacaaatttaatgtatggaaataatcaaaatatggattaaaaaaataattaaatattttataatattttttaataaattttaatcaaactgataacattgattgatgtaaatattttacaaaatgaattcaaggaaattggtgataaacacatgtagctaattatgagttaattataggcatatgggaggcaaagttgtatgtatcacatgagaaataaattaaaggttatagcatgggtgatgggtgttcttgccaatttgcttggatctcactctcttacacttacagacagtactactctttttacactacttcagtaggttgcttccaatttacgtccatcttaacataattacaaacatgttgaaaacacacataaagt

SEQ ID NO: 93062 - DNA, 892 bp, Cannabis sativa
tgttgagataaatttacttgatctatccaacaataaattttctggtcctattccagaaaacataggagattccctacataacatgatattcttctctctttctaccaaccagatagatggacaaatcccgaattcaattggcaacttccaatcttccatgagtgtccttgatctctcaaataataagttaataggaaaaattcccctaagctttggaaatttgtcaaacctagttgcattggacctcagtaagaataatttgtctggtacaattcctaactctttgggtcaactaagttctctccaaacattgcacttaagtgacaacaagctttctggaagcatcccatcatgttttcgaaaattgtcaagtttggagacacttgatcttggtaacaacagattagcgggaaacataccacattggcttgggaaaaggttgaagaatttaaggattctaaaattaagatccaatgcttttcatggagagcttccatccttgctatcaaatttaagctcattacaagtgctagacttggctgataatgggctcaatgggagcattcctactagctatggatatttcaaaggcatgattcacgttcaattggataactttcatctatcctatggccctacttacaagagcaagtattatgaagaaagcatggttttgaatgtaaaaggccaagaactaaagtacacaaggattctttctcttgttgttagcttagacctttctgccaataatttgagtggagaacttccttcaagtttgacaacaaatttgttgggtttggtgaatctgaatttgtctaacaatcacatccacggttccattccagaggatatttcaaagttggagcagttgctatctcttgatctttcaagc

SEQ ID NO: 93063 - DNA, 632 bp, Cannabis sativa
  modified_base (205)..(217): a, c, t, g, unknown or other
tacactttatatcctttttatattattctcttttatttttaccctcttttttaaaatctattatttttacctctttttttttaaacattgtaccacttttttccctgtcacttctagatactctctatatgtgactctcttatgtcagggtattttgagtacaatatatataaaaagaggtatatttcaattaaatataaaattnnnnnnnnnnnnnattaattgattaataaaagttgtatttttcaacttagcccctatttataagggattttttcaaaaatatcattttttatgttttatttacgtacaatattacggcctaaaatttttatttacaaaaatacacttttctcaacaaaaagtaaatagacaacgataaattaactataaaacaaccaaaatagtgtcatgacaactataaaacaaaacaaaaacaacagtttattatttataataaaaaagtattttgtaaataaaaaatttcaaaacgtaaaaaaaaaatataaattatgttaacatatttttgttattttttataaatttttagtgtgttatgtaaattttaaatttataaattacatatacatatacattattactatcaatgataaaatataattaatgtatta

SEQ ID NO: 93064 - DNA, 1536 bp, Cannabis sativa
  modified_base (194)..(197): a, c, t, g, unknown or other
  modified_base (450)..(451): a, c, t, g, unknown or other
  modified_base (552)..(555): a, c, t, g, unknown or other
attggaaaaatgacttgagaaaataagatgaaaaatgagatgaaaaatggaaaaattgcaaagtggggcccacaatccttcgcctgccacatgggaagggttttaccactttattgtttcattatttgaatgctaattaaatctaacctaaccttaagtggtttcctagaaataggtagtgatggctaaagggnnnngatgatgcatctcattccttcagttaaaattttgaggctcctctcctatacaaaactgaaacccgatctctctcttcctctcttcaattcaaaccctagagttattagagtaagtgtccacacatatcaagtggtactcaatcatagtgtgtaaggctgtgaagaattcattttcaagagaaggagattcggactcagatcttggtaatactctgctaccgaaaggatacaagggttaaagatctgagtgganngagacattatattccactgcaaccacttatatgtgtttatttcatatcgttgtagaagttcatgtttaggatgttaataacatacttattagtaaatctannnnctggtaaaataattctaacagaaccgactccgggtatctgctcgcaagatacagtccgaatcggatacctcgtatgcttgttcaagacgaagcaataagcaacccgcatagaatgacaaacacttagcaaattcagctttcgcatcaagagtcatcaagaaaatctctataacttagggatcagattctagagatatggcaagctgtccaaatcccaggatcagtgtattctgtatttactatgcaatttttctacttatatgaattgtaacgagaagggcaatacttcctctttaagctcatggccctataaatagtgacgcatattcactgggcaaagggtcgcaatcattttagttgagagatattgtctaagaattgatattcggagatattattgtaagagctataagaaaaggaacctttctccttgttcttgagttaatacaaatgacgaggattaggctattaccgaacttctcgggattaaacctttataaaattcctgtatctttatattgctttactatattttactcgttataaactacttgttgcttcgccaacaacattgtggctagaatactgatcgacaatgggagttctgtgaatttatttaaaaaagccttcacggcgataggcctcacggactgggatctatcaccaagcagttcccagctcatgggattcaatggaaccacgcttatcccaatgggaaaagtgaggttgccagttaccctgtgtccggacacaccccagggcacttttaaatactgcacattcgtggtggtagactgcccaaattcttacaacgcaatcctcggccgactggccctagtggactttggcgcagttatgtcaatcgggcacttgggtctgcaattccctactcaggaagctggagtagggaccgtgaggggtaatcaaggagaggccatgcaatgttacaatgttgcagcccacttaccaatattgatggtc

SEQ ID NO: 93065 - DNA, 1465 bp, Cannabis sativa
aagttagattttagccactacaaatgtacgctggtaaactttgacctctttgccagtgcagtttgcaaacgtttaccagcgtacatttaagattacatagaaacttggaggtgctatgatcaggttgattacatagaaactagtttaaaattgattatattaaaaaaaaaatcaaaaattgaactcagggtattattttgaataataaaaatttaaattgtggtttaactaaatagatagtgcagtaaataaattttacaaaatacatgatctaaaattatttttattcttactcaaatataaagataaaataatttagggcataaatatatgattggaggtcaattacacaaaatattaaaaacaatgcataggtgcttaatgagatttttaaataaataaataaataaataaaatcatctccattatttctctttaagttcaaagttcaaacagacagttatgtgcatctcaaatgcaaactttgcatatgagacttggacatccatctcaagctattttgaataaaattttacacatttgaattttgtgatgctgccaacttggcaagctccatcattttactttattcaaaatccatctacaattactcaacctagaacacttgttcaacagaccattgggagtcctatcaatactgtccaacacacaacaaagctttatactacagtcatactacctttacctctagtttcatctagttctcttcaccactcaaaccagatcaaaatctagtattaaaaaaccaagggttctaatatcaagcattgatgaactataatacatgatccttagtgccatatcactgtaaatgaatgtggtacaaaataaatgggttttgagaaccaagttgaaagttgatggcactaaacaatgctggttgccaaagggtttcaacgaaacaaacccctggaatagattactttgatacttttcagacatgttgtgaagtccttagccataaagatcatgtttactttggtagttacacatggttgggaaatttagcaattggacattaataatgttttttaatatgaaacctccatgaatttgtttggatggaataacctaagaagtttgaggattcagaacatcctacacatgtttgcaagcttaaaaaggcattgtatggcttaaagcaagctccctacgattggtatgacaagctcaagttatagtcttattgtcatgggattcttaattcagtgtgtctaatagttctctattcttttgccacaagaatgggaattcacttctgattcgtaactggtgcaaattcaagtgatgttaacctaggtcttgtagtgttcaaaccaaccactcttttcaccttagaagcatgtttagatgttgattggacatgtagtcttgatgattgaaagtctaaaaacttggtggaaatcttattacataggattctagaaaacagaaggtagttgct

SEQ ID NO: 93066 - DNA, 663 bp, Cannabis sativa
tttgggtaaaagaataagataattaacacacaacaaaacaatacacacaaactcgaaggtataatcgcatattcatacataaaaactcaggcgagtctcgcgtcttcctattctgcaaaagaaaattcttaaacctaacctaattcagcgataaatctctctccgttccaaccacgtctcgcgctgttaacatttatcggccttcgcttcatctttatacatgatcattgattgttgctcccgccgtcattgaaagtacagagagcacggtaatgttttctgggttttctttagtttaaattttggatgaaattgatgaattatattgtcactatttggtgctcttcatcctctattgaaacatgcatcgccctatttgattgtttgggtgtttattgaggctattgattgttaagcaagagctattgatgagaaagttttaggtgattccatttaaagataaagagttattaaagctgtcaaattgtgatagaaagtcatcaggcttagcagctggtaaaactttttatcacgaccactatatgctttctagagactctctctcatctctcagattttttttttctcttcacttcaatttcagatctatttcaaatcagaatataaaatcgagacaacaaattggttttagagacagatttt

SEQ ID NO: 93067 - DNA, 1454 bp, Cannabis sativa
aaacaaatgatgaagttgaagagggagagtggtgaaactttttgggcaaattttaaatatgagaaggtccctactgttttatctgtggcatcagggggcgaaaaagaagtgccctcgagtgtatactacacttgcccacttgttggtttagccatatgataactttatgcgtgctacgccataaaagtcttcacatatgagtatagttaggtggctacggtcaactccagtggtggtgggggagaagggtgttggtgtttatgggggcgacgaaggtcgtgtggtggatggagcaggggtgtcggctggagatggtgatgtaagtgggggatacttcatcaatggggtacgaaataagggtaaggttgtggtgggcagagcagtttcaggtgataggaatgagggtgttggcaattagttggttgttgacgaaaggtcgtcacatgaaggtgttcttgatctggtggagatggaaaaacaaaagttaggtgttgagggggatgggccgattgtagttgttggtgaggtgatggatcatgatgttattgagggttcaaaaaatattcgaggggcgggacctatagtgcaggctcgcctgacgcaatgagtacgttatattggaattgatgtgcacttgggaacctacggacgacccaatttctcatggatcttattatccaaaagagacccaaatttattctttatgttagatgatttgtagtaaggaggttgttgagagatccaggggtcgtattggttatgaggggtgtttttctgttgatgctcatgagcatagcggtagtattgctatgttctagaaggctactgaggaggctactgtactgggctattcaaaagaccatatcgatataatcgttgtggttgggggtatggaggcttggaggcttacaagtttgtatggtgagccgaataggaggtttagacaggatataggaggagtgttcttaattttttttttctaaaacagagaaagagtgttaaaataacataagaaaaattgtgaaagtaaaataatcatattctagtaaaagttaaaataaattaattaagatttttttacaaaatgtgattaatgaaaaaaatagtatttaatagtttgagtgtgaatagtaagaatatgtatatagagaaaaagaaatattataagtgtttgtatttttttacaaaaaataataaaatgggtgtgctcttaatgggtattacccataaatgggtatttaagtattgaccattagatttaatcaaatggatgatatttatagttattaattatttttcaaaaattaatattatttattttgacctattacctgatgacatgacagtttattttatttttcaaacccatttttttatgtgtgaacctcattctttgtattcctaattgaatgaaataactaaaaaaattaatttctaaattaatttgtaatgtt

SEQ ID NO: 93068 - DNA, 1760 bp, Cannabis sativa
tttttttttttttcaaatggagtacaatttaaaaggaattgcaaactaaaaatataggtattttctttaaaaaaaaaaacatgagtattttgttttatttattagagaaatcaaacacttaagatggaggagataaatgagaaattttttgagggagattcaagtgttgggctgacctttctagaagtcaaaagaattagtgggtcgaagaataatgtgggctttactgccaaaaataacacttgttcaagaagtgtggatatacttgactgtgtgaaagttgttataggggactttttgatcgatgtaaataactcgaatggggcgggtactggtttccagtcctgccaaaaattatgaatgtgctaagttagaattgtcgggggcttgggaactaacggagtattcaattcctaagagaaattgtttctcaagagagacccattgtatttttctttgtgaaactaagtgtcataaatcaaaagttgagggactggcaagattattaaagttcgaaggggtttttgtggtggaggctttgggtcatgtgggtgggcttgctcttttatggaaaaataagaaggaagggtctttgttgggcttttcaaataaccatgttaatttagttgtttcttctcctcctaatagagataggagattaactggtcttcatggagaaccagatcgtaataggcgccaaaacacttggaatctacttcgcactttgtccaaccaatcggagttgcgttggtgtgttattggggatgttaataatacaattcgtcatgaagataaacgtggtggtagacaataacctcaatggttgataaatggcttcaatgctactattcgacaatgtgggcttactaacctcgaacttcaaggacattcctacacttgggagaaaggtcggggatccaatactttggtggaggtgcgcctagatagagctttggtctcgcattcatggagcatggctttccctgatgctaccttcaccaatcttgaatactctacttcggaccattccccaatctttcttgaaccgaaagtggcgaacaattttacacctagttgtcactttcgatttaagaatacttggttgaaagatccgttatgccttgagattgtgaaggactgctgggagcaacatcagttgcagaatttcggtgtcaaactttctttgtgtgttgagaagttgtctcagtggggaaaagaaatcacatgcactttgaagcatcatattaaatgtcataaatctgatttgaaatttctacactccaaacgtggcagtgcttcggtccagcagtatcaagatattaaaaagaagttgtctgaagctcttgaccggcgggaatagtagttacttccataaggttgctacaaccaggagcaacaatcaaattattcagttgcgtgatgaagctagagattggttttcatgggaaacgggactgttcgaagtcgtgttcaactacttccaagggttgtttcatacagcaggtacgtcttgtagagaggttgtagactgtgttgatttgattgtacccgactctatcaattctgagttgtgcaagccaattacggacgaagaaatgaaaaaagtgcctttccaaatgcatctggataagagcccaggtctgcatggtatgacactggcattttatcacaagtgttggaatattatgggatgtggtgttaccagcagtgtgggtaagttttttgagaatgattgtagtgccgcaaatgtcattttgatt

SEQ ID NO: 93069 - DNA, 859 bp, Cannabis sativa
tttcattttagtttttttggaatcaatcattcggtattttgatttaggttgttgcaataaagagttgcattgtttaaatggagttggttgcattgtactgtaatttaggtatttttggaatctgttagttgatttggttggattttgattttttagggattggataaatggagatggtttgagcaatatttggttgaaaagtctgtgttgtcaatttctatatttaaaacttgtttgtcatctatatttgttgttgcatttgtggaaacgaatgattagtttaaaaatagttaataattattaatgttaagtacttttaaaatttattatgattttgattcatacacaacagtgattaaaaccttaatttaaccccactgttagtgttataatcatgccttcaacatatatgttaaagatcaagtggaattgggtagagaagacatcctaggaagttaactgctacggtatattaataaaggtagttcaaaaatttgttggcttaacaagcttcaacaaagcatgccccaataactacttctccttgcctagataagacatttgtttttcattttatttgaaatcattttgtataaaatcaagaaatcatatcatttccatactgattaattttgaaacaaatgtgccaatagcataaagtttgagtcaagaaaaactatagatgaatgtatatgtacaaatgatgaagtgttttaccttctcagtccttctgggacccaattaacccattaaaattggagacttaaatagaatatttctatttttgctttctgttttcttacttttagaaaagcttgtaaaattgtttggtaaggaattagttgttgggttttatgcc

SEQ ID NO: 93070 - DNA, 1009 bp, Cannabis sativa
agtgtttggtcaggatatcaaacattaaacaagcaaatatgccaactaggagtactcaacagattaaagaataaaaatattcgacgaaaagtcaaaacttagtagtttaaaattttcacgagttagggcaaaaaatttcatgaagcttagtataagcaagatgaaagacaggcattatgcagtttaaaaagcaagcattatgaacaatgaagttgcatgaatcgttacaaaggaaaattggagagtttctaaacttatggtttcctacatatcttctacagcaaagttaaagttgcattcagaaaataaatgtgcaaagtaaacgtaaaagaaatcgataacttactcaaggatcaaacgtctgagttcaggttacgccaaactgaacaaacagttcttgtgaaaactcttcagcaaacttgaagctaaaaacctctcttttcgctctgaacttgcttagcaaagaaggttagtgaaactgagtttgtgaacaaatgctcaatggtatttataggcaaacaacgaaaagcgaatatgggaaataaaaagcaatcaagtgcaaccgtcaaatgtggtgagaaaaaagcaaatttcgaagcattaattgcgtcagagcatttattagcctaaaatcgaagggatgcccagtcagcctaacatcaaatttcaaacaggtgcgcctgacacgtgtcacccatctaaatgcaaagacagctcagatgaagcctacacgcaacttcgaaagtctcgtacagacttggggggcaaatgttatcccaattttcgcactctgatgtggcattactcgatggtaacacgtggaatcgactccaggtatctgctcgcaagatacaggccgaacaggacactttgtacattcgctcagatgaagttttatagaccgagcagtgggctatccacacacaacgccaacactaagcgaattcagctttcgcatcgtgagtcatcaaggaaatccttataactttgggatcagattacagagata

SEQ ID NO: 93071 - DNA, 811 bp, Cannabis sativa
attcaaaggctaataggacggaactcggtcatcctagagggttgtttaacctttggaataaggcatataagagtctcgttaatggagctgcaatccgagttgttgttgaggatgtcaaggcaggcagcagttaaatccgggcctattaaatcccagtttttttggaaaaaaggcccggtagtccatcctttcccggggcttttaagggatgaatttggaataaggtagactttatttcttcacttgaaaaaggttctagtaatgctcggttttcagctgaagtgattcggcaaggaacacatcctctaagttcttcgcttatctcggatcccccattagattgcgagaatagttgttgaaagtagctgatggcaatatcagccaagtctttttcagaagtgcgccatcgaccttggctgtcatacaaccccaaaatggtattctttttcctcctagctgacgctttaaagtggaaaaattttgtgtttcgatccccatgtttcaaccaaagtgcacgacttctttgtctccaatacatctcccttttttcttccacgcaattgagatccttctccaatttttgacgagctaaccaatccgttaaattaggcgaattggaaagccaatcaatcttctcttttaactccttggatctagcaaagttaactttttttgtgtcaagttccactcaaagaggctcctgccacacttttgtatgagatggttcagattttcaagaggtttacccggtactttatgttgggttttatgccctaaataaaactctgtttcaatgaaatccagattattc

SEQ ID NO: 93072 - DNA, 599 bp, Cannabis sativa
tcgatgtattaatataaccgaactttaccaattaagtgtggcttgctttcatccatgctctacaacttataatgggtgcatttcatttgctttataaacaacattaataacatcatcaattagtttttttttttttttttttaattacgaaatgtaataaaaatcttcaagagccggccccttcaataaacatagtgctctccattattccttcttcaactccatccatcaaaagaagctatatatatatagaacttcaacttgctaaattaattaggacaaatttaattagataatttttcttattttaatatatatatattaaaattatctaagtcatatttatatatatatatatatatgtctagaaatgatcaattttcaatttcaaaaggtttgatgtatggcataccactcatcaccatatatcttatcatatactcctatattctactttctccaccacactttcacattaacaaattgaaaattttgtacaagtggttaattgtaacaataattgtaagaattttaatttggttagtgaatttttatccaggtttgatagattcaaggcgtctgtgtaattgtaaatcttg

SEQ ID NO: 93073 - DNA, 848 bp, Cannabis sativa
cactccaatgtcaccaccaatttttttaatttcatacaagtccaaattaccaaaatgcttaaggtcataaagtaactcttcttgggctttaagaaaatgagctaaagccctttcctctccacgttgaagctcggccccactagcaacattcacgtggtgtaaagaccgcatatggttaataccttgaattattaaataattaagatttatgtatgagattaattaataattatgaaatgtatattttggaaatatatttaatatatcatatatgtttttatgctattttacatttaattacctaatttctgtgttgtgtttggaagctgtggaaagcggcgttggggcctttagagagtcttattttatattttgatgtacgttatttgttcggggtatttcgctaagtattgagttttcggggtttggttgtttttgaccatttcacccttgggatgctataattattttatttaaatggaggggtaagaaggtcttttgtcaagacttcttttgtcttatttggtttatttttggctgagaaatgttataattttaatggtttcttttagtcaaatgaatagttagtctttgaccttcaagaaagaaccaaaaagagccattacctttatcaccaagtcctctccttctctcttttctttcgaacaaacaaggaatcagctgggaattgtttttctcaactcaattcaacaagttttaggtgggttggaagctttaattggaggtctataattcaaccttgcttttggactttcttttttagtaaagttaggtttgatgcttgtttagttaggaattaggggctgtatgttttaaattcaagtggg

SEQ ID NO: 93074 - DNA, 773 bp, Cannabis sativa
  modified_base (376)..(380): a, c, t, g, unknown or other
atgttaggaaattgttgtgctttaatccatagagtttcttttacagtttggaaacatagtcgggatgtgttctatcctcaaatcctcttggctgcaccatgtgtatttctcgatccagttctttatgtagaaaggcgttcttcacatccatctgtcatagcctccaatctttactggctacaagtgctaacagaactcgcactgttgtaatcttagcaactgagctaaatgtctcatcataatctagcccatactattgagagaatcctcgagctactaactgagccttgtatttttcaattgaaccatcgagacgagtttttatcctgtatacccatttgcatcaaatgagtttcacttccttcggctttggcannnnntcccaagtctgattctttgctagcacgcttatttcttctttcatagtttctagtcacttggagttctagtatgcctcttcatatgactctggcgctctgaacttttcttcttcagttacaacaacattagcatatttgggattcgactttcgcattcttgttgatctctgaagttgtggacttactgcatctggttgactatcttctactctttgatgcacacctgtttgccatggattctgaagtgcctcatccttagtgttttcttcttcatctatatctcgagttagaggtaactcaacaatttgctccccaattttttcacaaattgttttccatttctttagaatttggtaatgcttcattttacgatgaccaccatgatgatgcctc

SEQ ID NO: 93075 - DNA, 1098 bp, Cannabis sativa
  modified_base (657)..(658): a, c, t, g, unknown or other
  modified_base (1035)..(1048): a, c, t, g, unknown or other
tcgagtttaagacttctattccagcaaaattgtggtgtgataatcaagctgctcttcatattgcctcaaatcccgtgttccacgagcgaactaagaacaatgagattgattgtcattttgttcctgagaaaattcaacaaggtctgatctccacaggatatgtgaagaccggagaacaactaggagatatttttacaaaggctttgaatggggtgtgggttgattatctttgaacaggctgggcatgattaacatctatgctccaacttgagggggagtgttagactattagttgtaaagaaattagggtaacttgtattttaatagcttcatattttgtaattagtagtttcccgtttagtctcctaactttgtatattaatatgtactattctatacacaattcgattcactattttctacaccacccattaatatatactcatatcaataccttataaatttctacttattaacgcatcccttcctcttgataatctctggaacaactactaattctgcatcctaatatgaatctttcttgcgtactttgtcctcactcatacgctttccgagatgactccccgaaagatttcccatttagagattaccccaagttaagtatatttaattccaaagtaagctcatggtgggttnncagaaagtagatgcttctttgtcattcctaattttatttcttgctttcattgtttcgttaataaaacttaatttcgatcactcccttcattaacctcttgcaattcctcatcggttttgttcacttgaacttgaggaattcccatcttattatcaacttaaatcttgttcatgtccacttattttaacttgtatcaatttcccttgaattgatacaacttttaatatttcccaatcatttacggttaaccacggttataaagtaagttgtttaaacctatacagtagaggcaacacttctcataccaggtcacaacaactaaactgaaaaatatccatttctcgaattctcaactaataacaattaatcaaagatcnnnnnnnnnnnnnnaagtttcttttctgtgtttggtagaaatcttgataatcttttcaaacaca

SEQ ID NO: 93076 - DNA, 548 bp, Cannabis sativa
ttgatgttggtttgccaagcttgtcgctactctgaaagagtatggtttcttgcaatgttgattattcactctatacttttactaagggtgcaattcaaataaatattttggtatatgtcaacgatctaattatttttagaaataattctattgctttaacattgtttaaggcttatttgagcacttgtttccatatgaaagatcttgggttctttagtactttctggtctcgaggtggcgcatagtttagagggtatcttcctttgttaatgaaagtattctcttgccattatctctgagagtggtttattgggtaccaagcctgtctcctttccaattgaacaaaatcattagctagtagcactaggggtgagcaaaaaaaccaataaaccaaccaaaccgagtacaccgactgtccgaacactgaaaaaattaacaccaaaaaaactgaaaaaattgccttcgattaaaatcgcctttgcatggtcggttttagtgtcaatggcaaaccgaccgaacatatatattatacactatacatatataat

SEQ ID NO: 93077 - DNA, 675 bp, Cannabis sativa
aacagtaaataggccaccaagtcaattaaactttaacactagccctgggccattttcggtatggggcatagattcaattggtgaattgtcaaaaggaaaaggaggagtaaagtatgacgtagtcattgtggactacttcacgaaatgggtcgagtctaaggctcttgtaaccataacgacttcaaaattacacgagtttgtctatagtgttatcatttgcaggttttgcgtcccttacaaaactaatttctgacaatggtaagcaatttgattgcaaggagatacgccaactatgtgatgacctagggattcaaaaagctttttcaacagtcgcatatcctcaaagtaattggcaaactgaaggagtcaacaaaattatcaaacatattataaatggtatgctcgaagaaaataaaggtacatggcaaaaataacttccacaagttgtatggtcatataatacaactcctcgctcaacgactggtgaaaccccattctcactttcgtatggatgcgaagccatggtaccagtcgagattacagctggatctttgagaatagacatctttaatattgacagcaatacagaaaatcagttgatacaactcgatttcctagaagaaaagcgagatcaggctcatttgaaaagtgtagcctatcaacaatgaatagctc

SEQ ID NO: 93078 - DNA, 589 bp, Cannabis sativa
  modified_base (26)..(54): a, c, t, g, unknown or other
ttgactagcaacgagctgcacagtannnnnnnnnnnnnnnnnnnnnnnnnnnnntagttagggtgttacattttggctcgacaaagtgctccatagtaggagtggttcgtcgctgggaaatatcagcgttcagcgatgaattggcacccccgttgggttgagaatttacattcccgttttgagatagtgcagattcgagctctgccttaattttgtttagcttggtcctgatgttgatgtaaggaaagtgaatggtgggttttcttgttgatagaatctggcattcagttaacaaatcgttaaggatataaagcttttctttaaatgaagactgaccctgttttctcacaggttgggttgagctgaggctgagaagtttttcaagagaattatgtatttgtcagaatttgttgtgcatcgggattttggaactgttactactctcctttccatcgaggctccttttgagtttatcgaacaggtactcttcgataaccccttccatgaaaatatgaaacacaaaacacttcaacaacctctcctttatctagaacttcactgaaaatagatttagactaaatagtagtag

SEQ ID NO: 93079 - DNA, 722 bp, Cannabis sativa
tcttggtataattaaacaccattttctattttttagcataatatatcaaatttcccttttttttatataaattgttcgtgtatatacatgcatacatcgaaagatcattccttattttttgcgttcctacattatatatttgaattattttgatattggaatttggatgatgagatttttttaattttagatttcagatctcacattctatgatatattttttataaatttttattattgtgagttctttataaaatttttaagttttaatccttctatatattcttatactggtattttaatttgatatctcatatttgttgttcttctctatagagacattgtttattacttttttcttttaaaaaaaaaaatcttaatatctttatatatatcaattttaattttttcttctctataacttttgataataaatttggtattgtatggtaagttctctacatattttttctatttgtagggtgtgtttttttagatttcttttttttttttttttaacttttaatcatttcatctctactattatttaattatgtcacttatttgtttttctactctatattgtatatagtaagattttttttaattatttttttaagatttcgaatctgtcttattatatcataagttttctagaaatttttatatttgtgagttctttcaaggttttcaatttttaatctcttcgtccctatatcgtt

SEQ ID NO: 93080 - DNA, 518 bp, Cannabis sativa
  modified_base (182)..(188): a, c, t, g, unknown or other
ttgcccgttggataacatctccttgaggggaggtaaggacgattcctaggccactccccttgctattgcttgatccatctactgctagcatccatggcgagtttgtttgcttgtttaagcataataattccttttctacttgtacctgtccaacacaagaaaagtcagcaataaaatctacnnnnnnntgtgacttaatggctgtcctcagttgatatgttatgtcaaattcactgagctcaacagcccatttggtcatgcgtagagaaagttccggtttgtgtagaatgctacggagtgggtattgggttagcaccactatatgatgacactggaaatagagcctgagcttacgccctgctgtgacaagcgctaaggccaatttttcaagctgagtgtatcttgtttcagtatctagcaatgtcttcgaaacatagtaatttggttgttgctttccttcatcttctcgaactagtgcagtgctgaccgctggtttgaaactgccagatacatgtaca

SEQ ID NO: 93081 - DNA, 641 bp, Cannabis sativa
ctataaaaaaaaaatattctatgtgattacgaatatgaaggttaactaaaaaattataattagcactactctcattgaaattatattattagagtatacaatacaatacaaaatataatatggtaattgttctaagtaaatagctcaagaagtaagaaatctcatatcaaaaagtccaattaatgtccttgcattcacacacaaattaacctaagaaatcctaaaactaactcgctaagcatttacacaaattcaaaataccatgctcaaatgtatgacatcattagaacataaagtccgaaccctagaaacaggcgtatcctaacataagaaggcctacaagggcaatacttgaaatggcaatctacaaaaaaacaccgatattcggattcgctaaaataaaagtgatatccaaaaggaattactaaatagcttaaaagatagatatgactgctctagatgggccaatattgaataaacgagtatctcttctaaatggaaatagattttcttcgaaaaggagttttttttgaatgttgcaaacaactgcaatccatacatacatacacataaacttccctataaagatcaaatttggtttcacgtaggaacagtaattagaaagaaaagaaaaaaagaaa

SEQ ID NO: 93082 - DNA, 1624 bp, Cannabis sativa
gcttttggaggaaattttggcacttgaagataccacaaaaagtaaaaaaaaaaaaaaaattgtggcgtgctcttacacgctgtctacccacaaatatcaaattggaacaaaggcatgtcccctcttagaaacatgtcaagcgtgtaacgatggccgagagactacttttcattgcttatcgaatgctctttcgctaaactctgtttgtctaaggttctgagtaacttttgtcaggatggatggcttcattttcctggttggtttatgagttttcgcaactctcatactgccgaaatcattagtcaagtttcaatggtattttgggcgatttggaaagctagaaatgtccatgtttggaatggtaaaactgctatagtggatagggtagtttcgggtgcaactacttatcttgatagttggattttagctcaacaaaatggtgtttcacactaggggacctcgagttcttttgctggtgcaagtgagttttggacgaaacctcagtatggtgctgtcaagattaattacgatgctgccttgtttactgctgaaaatcgttttggttttggatggctggtgcaagatcatgacactcgtttgttgaaagctgcaacaaagagcatgattggttgtgtcgatcttcaaatgacagaagttattggcctcaaggaagctcttagctggatcaaaggaaaaattaaagatgatacatcttagtctctctataagacagggactgtttatgttgaataggactgcttagttcttgtgcaagctttgtctaatttggaagcagtattttctccttttggtttaataatttcagattgtaaacatttgcttcaaactcactctaatgttgttattacttttgttaaacggttcgataacaaagcgattcactggttggctcgctattcatgtttttctcatgatcgtcttttcattgcgaagattgttcctaatgggttaaaggccattattggcccattgctaatgaaatccattcagtttattttcaaaataataataataaataaataaataaataaataaatggagtacaaataaaatttcttaaatcgaatactataccgttttaagacttatgatttatgaatagtccaattgcgaaagttagtcgtcatcttcagagaaagagtagattcagtcttttcaatccgatctagacacagacagagagagagagagtactaagagaatggcgtctttcgactcgttcagcaacgacggagaagaccagacccaccaacacccacccaccacagccggacccttcgatgacgacagctacatgagctacgactcgtcgtttaacccacctaacgacgacttttcccacaacgacccacttccgcaagacgacgacgtctccgaccacggctacggcttcggtatgccttcctccaaccccgacttctcatcgcccttcgaatctgccatgcccgtctccaatggcaacggcgacgatcatgacgacattttcgctccagaggatggccccgttctgcctcctccggaagagatgcacgaggaaggcttcgctcgccgcgaatggcgccggtaagtcttatttctgttccatttctttccgatctgattt

SEQ ID NO: 93083 - DNA, 509 bp, Cannabis sativa
aaaaaaaaaaaaaaactaattttacatcattatcatcgtcatcccagattacatctccatctctctcattttttattttctccaattttatttgtgggacagagaaatggaacagatatttttaattaattaaatgcactttaaattttttttatctacatttaaataaaaaaccattataactttgttatttttttttttcaattgtatttcatagaacaaatagatgattgaaactcttgctctcttacacctatgttatattgatttcaaattgtattaatgttattaagtttgctaaatagtataaaatacaattggaagaagaagctattttttttttacaaagctttaagtttgttgaacattgttggcattaatattttcatataggttgtcaatgactcctgaaaaaaaaaagtgtaaacagagttcatcaaggaagaagagagacaatagaggaaaattatttttttataaataaatttgtatttattaaaaattattaa

SEQ ID NO: 93084 - DNA, 1472 bp, Cannabis sativa
aataaaagaaaaatgaaaaacgatattggccgtcatatagccataatttaattaaaaaaaataaaaaaaaaattgttccaacctccaaagagttgggatgggaccataggagagtcgggagtgatgggttggagaaattgaggttaaagccttattcctttctcttgtgttctccgatgttcttctctatacgtcccaagtccaagtcttttccattacttcaccatttcactttcagatggttctctaccccaaccgccatagctccttcggaggactatctccctaccttcttccgttccaccttcaacttcaacgacaccgattacgagctcgctttggtctcagccctcaaggcttgctcctccatctctgccgtcttccaaggtcagcaaatccattctcgtgttcttaagtctggacttggtttcaactcctttattactaatagtttgatcagtatgtatgccaaatgtgggttcattgccgatgctcgttccttgtttgattcttctcctacattggatactgtctcttgtaatataatgatttctgggtatattaaatctggccacttggacgatgcccgccatgtttttgatattatgcctcacaagggttgtatctcctacacaaccatgatcatgggtcttactcgaaatgactgctgggctgaagctattgaagttttcaaggacatgaagtccgctggtgttgtcccaaatgatgtgactatggtgagtgttctctcagcatgctcccatataggtgggatttgggattgtcgaatgatccatgcactgctaatcaaactgcacctacttgggtctgtatttgtttcgacaaatttgttgaacttttattgtgtttgttcgagtgttggggatgcaagaagtttgtttgatgaaatgtctgagcctaatatagtttcttggaatgtaatgctaaatgggtattcaaaagcaggacttgttgatctagccagagaattgtttgagaaagttcctgataaagatgttgtgtcttggggaacgatgattgatggttttgtgcaagtagaaaggttgagtgaagctctaatgatgtgccgtgcaatgcttcgtactggattacgagctaatgatgttatgattgttgacttagtttcagcttgcgggcgatttacagcaatttatgaaggtctggtttttcatggcatgattgtgaaggaaggtcttgattgttatgactttattcaggcaactattataaacttttattcagcttgtggcagaacaagccttgcacgtttgcagttagaaattggcatcacagatcatgtcccgtcttggaacgctctcgttgcagggtacataaaaaatagaaagattgaccaggcaaggcgattattcgatgagatgcccaaaagagatgttttctcgtggagtgccatgatttctggttacacacagaatgagcagcctgatttggct

SEQ ID NO: 93085 - DNA, 587 bp, Cannabis sativa
cctccaaataatactactcgtgtctctaaaaatatattgaacaatgggtttgttcctaccttggagctttcatcctaccataaccaccatttcgatgatcaacaacatcatcctaataaaaatcatgatgaggtcccaatcaatgggtcttctcagcatggttttggtcatttcatggctacatctacttcttctggccctctctatgggatttcaacacccactaatagccatgtctcttttgaatctgcttaatcattgttattctcatcacttgtctatccttttcaatcccaaaacaaaaatggggtcctgcatggtttagctcgcagtggtaccaccactgctgagtcataattctatgggtattaggccttcgtggcttcttctcccgcgtagcccagtaccttaaacttttgaaattttgcattggccaaaacagtggctgatgaccacttctcatgcatgaccacaactgtttctgcaccagctgctggtggtcaaaaggaattacgaaaaagatcctcatcatatgttgttgttggccatgatctgaagaagaaaaaaaggtctcatatgaatcgaaa

SEQ ID NO: 93086 - DNA, 698 bp, Cannabis sativa
tgtatgttcttgaatgaggtgaattggaattcaccacaaaaatatttatagttaaatttatttagtatttatcaatgactaatatttattgaaaaatgttccatttatatatatatttatattgtagaggagtgctatcgcgaacctttaattataatctcttatgcaattttcgtgcttgaaaacacatttaatttttttttttaatttttttcaattttttgtatagttgtattttttatagttataatacaacagtatcttggtaaaattttgcaaaattttaaataatttacattgtcaaaaatatgtttgaaatttttttaacacgcctgataaattggaatattagaaaatctattttcggtactgtaaactatttgaaatttttcaaaaatttattgggagatattgtaactataacgaatactgctatgaaaaaattaaaaaaaatattttgacatatgatttcaagtaaaaattaactatgagattataattaaaactcctccttttaatattgaggaaatgtgtgttttttgtactagtgtgaataaaaagcatttataattatacttcgaataaaaacagttgcaattaggaaaaataatttattgtgatacattatatattttaaaatagatagagaatgtactggaatgatccttgaagtgtattatagaattattttataatat

SEQ ID NO: 93087 - DNA, 596 bp, Cannabis sativa
ttttcagttcttgtatggaacaggagtcctatgtgtctcaggaccaacctccatgtcttcccaaagaagatctgacaatttcattgttaactctccaactcttcctgttacaatataataaaaactttgttactctaatttattcattaagacaaattacaattatgagaaaatagctaagagactatattagagttagttttacactcttaaagtgttaaaataaaataccatatataaaatgaatgaattactcatttcattatcaattggttttgaagtagaacttcatctaccttaatctcgaattctaaccactttaagtaaaatgttattttgcctaagtagtagatagagtaattggaaaaaaaaaatattttttttagggatattacctaagttaatttttatagtaatgataataccaaaataattaatacttaactattcaaattatacatttttttgggctaaaagtactaaaattattatgataatagcacttaagtatccaagttattcatctaatttaacaccacttagatagatcacttaagtatcacaaaaataacttggttacttaagctctataagca

SEQ ID NO: 93088 - DNA, 1309 bp, Cannabis sativa
ttatttattttagtaatgaatatacatatatattagtggaaatacattgacatatatgtatattgatttgatttatatataaataaagatagaaataaaatataattgaagattaagaaacaatagtcttttttcaatttttttttatgaaatatttaattttttatcattaaaaaaaaacaaccgtccattccgcactattacggattgaattggatttaaagttaaactattagtgcggattgaatgttgttcgatcaaaaaagtacagattggatcggatgaacactcctagaccagaacattcaaagtgaacccttggtgattttcagaagacgacacagcatattctttaacaggtactcggcaaaatcataagaatgatacatttataacacatttgcagctttaattcgcaaacactcaattagctgctatcagtgatagaataaacctagggtttctctgcaaccatagctttggctttcagccagttctacagcaagcttacatccagttttttatcttcttaaaaaaatattggagcaaactacatcatataggtttgcatgttattgtaaccaaaactacaactgtagttgaccgaagaagaaaaagcaatataaaaaatgacacaaaacaggcttacaatgattctaacataacaagaagcatcttacgcattcatcaaaaatttggggaaacaaaatattcaactaccaatttggaagaaatataacttggttcagcttgagacaagtcctccccaagttactgaataaaatttaaggcaaactcaggtctagtaacaaagcgctatcaaagagtgaacaaaagacaaaacttgttaaccgaacagttctgtaaattcaaagacatcatgacctaaatagtaataaaaccctacaccttgatagcgtacttcctcatggggaagtagacttccctcttcttttccctttcagtcttcaaagacaactgaaatgaaaaaacagacacattgtgataatattagatcaagaaagagaagatagattggtaattttttttaaaataaaaaaaggacaaacacagaatacacaacccaacaagcactatttcactttaattgctaacaataaaagaaatggccacatcaacccaatgtaaaaaaggatgaatatgacacatcaaagcttacatgagcagtggtaatatgcagtaaaactaattaaatgattgcaatacttgtctcttcaataaaagtgaaacctaatggatgtagtggctattgcaaattcgagaaacattggtaaattaaatggagttt

SEQ ID NO: 93089 - DNA, 856 bp, Cannabis sativa
tctccaatgaagtggaagctccaagacatgatttactaataataacatattattatcatcatcataatcattaactaataatgatggattgctttgctccatcgtcatcgtcgctgcataattttcaagacatttggttgaggaaaccctagcttcttccaaaatactttcgccttttttgccatagaatgaagcttcgtataaagccaatactccaattatatctttgctactccttcttgccttgaacttgcttgtaatctcatccttaaacacattgaaaatttctgcaataataaatatcattaataataatattaatagagcacttacatcgtatattttaaaataggattctttaaaatatttgaaaagtaaaactaaagaaaaaaattacattagatgctgtaaagtttttcttaatatttgaaagtttctttagaatttaatattcatactctatatatttacagatcctatttattgttttaaatatattttattaattattttaggttttaatattttcttttatatggggatatctaatgatgtattatttttaaaaaagctgatatatatttttatgatgtattttgaataggcatgtcaaaaagatccatttagttagagcgggttagagttccgatccaatggataacctctgatccgaaacattcagatacttattggatcttggatcagatttgctccgccccacctaatttttttttggatcggatctgatccgacccgatttcaatttattctttttaaaaaaacttaattcaagactcagaccccagactcggatcccttggcagctggacctggacccagacccgaacccggaccc

SEQ ID NO: 93090 - DNA, 556 bp, Cannabis sativa
tgtttcgctcatctgagcagagaactaagaagaatgagaagagtcgtgtgagcgtgtgtggagggggtttatatatatatatggtgagttagggaccatttttggcgccaaatgaagttttaccatttccaaattcacggtttttccctcgatatactttttaactgttatggcggcaaaagttctaggtaaattgggtaagtaattttgccacgtgtcaatcatcgagtggcttctcttacattgaacgccattttcgaaattattggagcatttccaacaacttatcaaatttagtattacactattattaaattcaaatttgaccttaaaaaaaattatactccaaccacaacattaaaaattaaagtaaaaaaattaatatcatgttatttaattaaaattatcataattgttatatttaattaataatttaaataaacttactaataagattagcaaaattcaataaattaaaatatcatattgcaataacataaatattaggggttttttcattaatgtacaacaaaaataaatatattacaaaaaatgt

SEQ ID NO: 93091 - DNA, 643 bp, Cannabis sativa
accacggtcttcacattggcttcaatcatcacttgaatttagttggttactcagatgcagactgggcatgttccctgatgacagaagatcaattacaggatattgtgtttatcttggagaaacactagttgcttggtcatcaaagaaacaagcagttgtctctagatcgagcaccgaatcagaatatagagctcttgctcatgttgcatctgagattacgtgggttgaatcactcctcagagaactcaatttcaagcttccaagtactcctgtcacatggtgtgataatcaaaccgctagttccttagcatcaaattcggtgtatcacgcaagaacaaaacatatagaaattgacatacatttcgttcatgataaggtgctgaagaaataattagaaatttgctacattcccccatcagatcaagtagtcgactgtctaactaagggattagcacattcaagatttcagtatctgatcgacaaactcgaagtgagaacttcaccctttcgtttgaggggtggtgtcaggaatggtgtataaacagaggagatgggcctactgattatggcagcagcacctaatcattgcccatgattaggggtcctctcctttattctagaatatttcctttgtttaaagttt

SEQ ID NO: 93092 - DNA, 736 bp, Cannabis sativa
taaacatgatgacactaaaaaaaaaaagaaatcataataaaaacaattattcaaaattaaaaaacataaaatccctttaaaaaaaattatattctcttctttacatatttgttataaaggggtgattcagaagcatccttgctgatggtctcttggaaggattaagattggtgcatttcaatataaaatcaatagcttcgttggaaatattgtagtatagattattgttccaatttaggtttttggttaacatgaataaaaccatgacaccaattgcccaaatgtccgaatactgtccttgtactccgtcttcacctcgacactctggagctaaatatgctttagtacctctaacccgagttgtcgagttgtcaaccatctttgccaatccaaaatcagaaattttagccacaaagaaataatattcttctcttatctctttgactaataatacgttctgaggttttagatcacagtgtacaaaccccttctcatgaatataatcaacacctctcaaaatctgttgaagaaactgtttgacttgtttagattcgttgtaaaggggagaagctaagatgaaatcaaacagtgtccccccaatagcgtattccaagaatacattgtaatgcacttcctctttaccattaatactcttaagagtagtatcatgaccgcagcacttaatgatgtaagggcaatcatcgaaatactcaataaatcttttttcgttttctaa

SEQ ID NO: 93093 - DNA, 727 bp, Cannabis sativa
taggatgttaatcaacatacttgagagtagatctaagatcctggtaaaataatttccaacacattggatggcagttaagcatattttgaaatacttgaagaggacaaggaattatgttttggtgtacaagggtggtgttttgaatcccttaggctataccgactcaaatttccaagcttgtcttgatgacaagaagtctacatttgggatggtattcactcttgagagaggagcagttgtttgaagaagtgtcaagcaatccataatatttgactctaccatggaggccgaatacatagctactgctgaggctgctaagggactggtctggctaagaaagttcttcataaagcttgttgtcattccaggcatggaagaaccactggtgtaactttgtgacaacactagtgctattacaaatgataaaagcctcgaagctagaagaagagtagacacactgtgagaaaataccacatcatcagagaatatgtggcatgaagagacgtgctggtagaaaaggttgatactgaatacaacctagcttacccatttactaagacattgatagagacttcatttgaaaagcacagagagaatttgtgattagttgaaatatactgattatttcattacttgtttaatataatgcttggttcatatttttgtttcatttgtttgatatataaattcttttaaatccttatcacattgttattcatgattattg

SEQ ID NO: 93094 - DNA, 530 bp, Cannabis sativa
  modified_base (99)..(104): a, c, t, g, unknown or other
  modified_base (462)..(478): a, c, t, g, unknown or other
cattgctagaaattcatgaaatgtctcacacatttcaaatttctttgcataaggtaaaatctagagtaatcgttttaagaatataacaaaaactcatannnnnncctgaatgtacatccatattcgataattgatgatcctaccttcaatggatataggcatattttctttttgcaaataatgatcttgtcaaaaccattatgaacaagatgcaaaagccatagatatcttaaatgaggttgtggtgttttgatgagttagatctagttacaataaagagttcttagaatagtttaagtggatcctgctcacagaacacaaaactcatattccatacataaacatacagtttagatccactgacagaaaatggatgttaataacttgtgaaagtataaatgtattgatcaatctattctggaaactaaaattgaaaattctatttggaatctaaaatttaannnnnnnnnnnnnnnnntataccaaatatacaatgagtaattattctatcttggaccatcactactaat

SEQ ID NO: 93095 - DNA, 557 bp, Cannabis sativa
taactccttgcatatcaatagtagaagtatcattaacagcctcaatgttttgcggaggatgtgaagaagtttctccgtgtaatatccatttagtgtacccttctgtaaatccatcacatatcaaatgttcatatgcaattgatcgagtgacagggttaagaaggccacactttacacaaggacatacaatttttccttcatagcttccatttttgaatgcgaaatcaagaaataaatttactcctttttgatatgaatcactcactctagattgcttcatccaactcttatccataatttatcttatgattttttttgtcaatacctatcaaaatccatttaatttatttaaaaaatatataaaacaaatatatagagaagaaggaagcttgaattaatagctagtgataatatatttgaaaacatatatatctttatttcgaaatctatagcaataataattttaaaccttgaatcaataatacaataatttcaaacaaataaaggaaggtggatgaaatttcacccattatttttaaagacaaataataataata

SEQ ID NO: 93096 - DNA, 611 bp, Cannabis sativa
  modified_base (251)..(252): a, c, t, g, unknown or other
ctctctctctctctctcgtcttgttagcgtgaatggaaaagggtgagaagtgatgactagccatcaagacaaaggattaggttaatgtaaaaaatagtattattttgatttttttaataaggtgttatttttttattatttgtattgggctacttttaaaatgggcttgattagaatgagagtaggctcatgatcaagatattgagtgagggattttttgaatctggctttaataaattgagtgaagtganntaatatatgtacatatctacatgtaaaaagtttgatgtatatatttcagtgagggcttaagcctacatatgggctaaagtcccttcgtccctgctgcttgcaactagcccaagctggaaaggtgcattgcccccaactggagcttcaagatgtacatatttttgaagagtgacaagcttctgtctgatgaggaattctatctcgtctcgcaactaattacaatcatttgtgtcatgatcgtaattgtcatgataacaacaaaatttattcatgtctctcttccctaactctttcaagagaataagtttgcggtatgacactattgattgtggtcttatagatctcatctcttggagcca

SEQ ID NO: 93097 - DNA, 587 bp, Cannabis sativa
aattatcctcacacacttacataactaagacataatttcaaacataataataaatttgtattctttgtagatggatgtgtaagtttgaagaaaagtttggacaaaattttgattagagaagaatgaaatttatcgtgaagtgattagggtaaaattggtagaatgattgaaaaaagaagtaaacagaatagattttaaatacgagggtaaaatttaaaggcatcaaatgaaaagaagtatgtagtgtaattttctctattttttttcgtgttttggattgattttcattgttgccagtttaacttttatgttttgttgattatcatgttgtgacattgttcacgacatttatcgatatctctttcaaataacaatatgtaaaagttgtgcattttattgatgttttcacgacatgtaacgacatctagttgcgacatgtcttcgattgttttttagtagtttaacgatatcactaaaatatcattattagtatcgctttgatacctatccgataccaacactaagttttcaatctccacaatcgcttcccttaactactgcaggaaatacttccaagagttgtgatt

SEQ ID NO: 93098 - DNA, 603 bp, Cannabis sativa
cataggttcctatttcaccatatactgcgtgtagccagtgacggactcagaaattttattttgtgggagcttatttatcattcaaaaatatttatacctatattataattattcttactagatttatttaattttatgggtttttttttacgattttgatctataattatcaaatttaaaaaattacatttaaattttaaaaagacaatatttttgctagtgggggctatagcccccaaactaatacacttgggtccgtccctgcgtgtagcacctgatattgttgtataaagtacattgtgcaataagttcttcgacatcttacaattcaactactcaatccaatcctagacatttggccactaattgcttcctagcctttgtccaaaggcgcataactctccataagaatgagcatgagaagaagagatgagaataactctcaagttctaactcacaaacaaggcaaagaggggaatcagttctcatttgtctcctaatgagcttgtctttcctcaaaaggtaaccatttaaagcttcatgaattgatgctttgggccaaatgagagcaccacacggcacccacataagcaacacgatcat

SEQ ID NO: 93099 - DNA, 624 bp, Cannabis sativa
tctttaagtattcaccactctaggtaaatactcacatatttacaaatgtgtacttttactttgctcgaatactccctaatttcctctgacaacacttaatattctatattatttgtggttcatctatgatatacaatgtgaataataataataataataataattaaaaaaaaatcttatatcataaaagtggaatccttattttgtagggatttgaattcatttgccaaataacgataagccatcgtcctaccatgcacacatgtttttcgttcaaaattagtggaaaagctatgctaattattgatgattaatttgagatgaacatgttccgggcttgtccattccactttttttaaatttattcaagttaacattgatcttcaaaattcacttgtattattgtgacttttagaagttgataatttctctccaaattttaaagggaataattacaaaaacagttacttgcaaagaaaaagtaaaaggaaaaaagaaaagaaaagaaaagaagacaaataatttcagatcaatgttttttaaaaaaataaaaaaaaataaaaaattatctattccaataatttttttaataatcaatctaaaaaaaaagttgacactgatgtc

SEQ ID NO: 93100 - DNA, 1030 bp, Cannabis sativa
taaaaactattacattaaatcacaaaaattgctcaaataacaacatgtaggccagtgataattcatatatacccaaaaaatatattactttataaatacttattgaacagggttaaaaaaaagtgtactgaaatgaaaagaaggttgggtttgagattttgagcagttattaatgggtatcagtcaaaaggcagcatgtgctggctaaaaagcacatggagcccaatgcctgcttcataaactgatgtctctttgtcagttgtcacctcaaagagatctggtcatctcttttgcagcatcactcatccggcgacttctattttgttttcttctgatattcttcttcttcctcttccctcttccaaaaaaaaaaaaccaaattacactgttttgtctgtccattaatttactgcccacttcaaattgttttctttctcaatgcaattgtttggttttcatagtaaaacttgtatcagttaaagttacagtcaaataaaacccttgctttgcatttatatcataagagaaccgacgtcttatttgaaactttgtgtttatattagatggatatgtgcatgtataacatagaaggctgaagtagagtaattactataaagcaagagtcaaaattaacaagcatagatagatgaggaaaaaaggtaggagaggagtaggcatttttgagaataaaagattcgttgtttttaacgagacaggcctttggcgtgccctttcttggaaatggaagaagaaaatgtgtggggaagcacgctttgtacacctatatttatatggaatttacaaattatatacttgtgtgcttcatatatatatgattaattgtatggaccacattcaataactattagttctagacaacttgtcctcttccttctttatatatattttctcgcctaattaataagctttctcttcttttcaactgccaaaagattagccaattaacccacccgttcccatggagagagagcgggttgttcattctgaaaagaaaaatcccgattgaatt

SEQ ID NO: 93101 - DNA, 754 bp, Cannabis sativa
ataaagagatattttggtccaattcttttttttatgtatatatatggattcataaaattttaaatatttttacggtttataaatttttatttacacaaatgatagattattaatttttcattttttttattgtaatcttatattattttttagatgtttttatatttatataatttttatatgacaccttgaaattgaaaaaaaaaaattgcaaaaatgtaataaaaaattattaccataaaaatattaaatatttgccaaaagtaataatttatgtaagtttcgcttatgtaaaaataatgtattggtattggattttggactcctaaaatttaaaggcgactctaaggatgtgacaccattaaatttatatagataaatactattttggatcctgtgttttacgaaagtgaccaattggatcctctattttgttaaatgacaaaataaactctgtattttctaaaatggtacaaataggatcctgaattgattttttgtcgtaataaaatttaataataaaccgatctaaatgtgttatgacaaaactgtttaaattttttgtatctgttcgtattagcaattgtcttcaagttggttatataaaaaaaaaattgtcaaaaattaagctcagagtcttatttttaccattttgaaaaatacatggtccattggatggatcaagagtaccatatgaatccaaaaaaggatatttggaaaatgatttggaaaggagagattcattcaaggcttt

SEQ ID NO: 93102 - DNA, 538 bp, Cannabis sativa
ttttacttaaataaaagcctaaataattttttttttttttatatatgaatggtgtaatggtgattacattgtaaaggcattacaatgttttggttaggattaggattatatgccaaaccaaacataagctcaattgagcaaaaatgtcaaatgtttgaaagtagtaccctaaactacagctctgttaatggttactaactctgtttttctttgcttgataaaggcatatatgtgtttgcaagtacatattattcccattgaatctttgaacatgttaataggttaaacattattgagatcaatagtattttacaggttcgagaccttgatttttctataaaagtgattggttctgaaatagttcgtgatgatgatagcctagcaatgagttcatgcaatgttcacctctcacctgaacaaagaaaacaggtctttcttgcccattttttttctcaatcattcttttaatttggttatgttattttctatcctaccctacaatgttagctttatttgatacaatttgtttgattgtggt

SEQ ID NO: 93103 - DNA, 652 bp, Cannabis sativa
taaagtgagtcatgactgctttgtttcacaaagatacagtatgcaactgggatacaaaatgttgtttaatcatgaggacaaagttccttggtgcaaatttgtctgggacaatattagttttgccaaaaacacaagttcatcatcttgtggttagtcttgtggggaagaataagtagtacaaaagagagaattggaaagtttgatgtaaatatcgatatatgaaatgcttgcattatggagaagaaaatgagactattgagcacttgttccttgaatatatatacagcaggaagtgtttggaggccataaaacaatggttgcattggaatgttaaaaccaggaagttgaatcagctgctgaaatggatttctcgaacaaaaacagtgactcatgtgcgtaaaaggatgatgttaaccatcattgcagccttgatttatcatctttggagagtaaggaatgatgcattatggcatcaaaagatttggcagattaaacaaactgtaaacataattcaagctgagagtaaacttagaatagctgtggtaacagagatcgatgatgttaggctatttttagcctaagttttggatcacatttatgtgcatttttagctgtgttgggacggaattacgcttgttttctatgttttcag

SEQ ID NO: 93104 - DNA, 1145 bp, Cannabis sativa
aaaaaaaaaaaaaaaaaaagctggtggctgcatataaaagcatacgagagataatcattacattgtcttcaataatttgtgggtgtgtttaaatcaaataacatcttaattgtagttgtaatttgaatatgtaataataaaaacccatgtgttacataaaacatgtggtttagttttgtgtcatttaaatatatattatgatgttgacataattaatattaataataaattaatccactagtatatactagttattgtttattagttagttttgtgcttttgttatagattttgggtcaacttggtaaaaataagaagtgtcatgaattaatttgtctaattataaaaaagcatttaaagtaattgtgtgtgtgatacattacaaaagtccaccaactacatttgtcatttaataaatttattattgctactaaataaatatgcgtacgtatatttgcatttttttaatattaaaaaaaaaatcaacacggcaaaactttttgaaaggagaaaatctaaaaaaggatagaactgttcctccacaaataaagaaatgaataaaatctacatgatatttatatgtgtatgtatagtgttttggatgtttgatttgagaatttaattaattaattgaggccatttcaaagatttgtccacaaacaatgggttcccatatcatatattattattattatataaaatataaaagaagttgaaaagaaatggataagaataaaataagtggaaggacctgttatgtaattatgctccaaaaattattgagaggaaatttgaaaagaatgaagaggtggagtgtgtttgtcaaaccactactaagtagcttcgaagaaatattaaatagagggtttatgcacctttgatatatcccatgtcgtttcctgttgcttattattctcttccattgttactttcaaccacaccaatggttaccctttaattaataaattacaaaactaagttacaccataatatacttgtacatttatgaaaacactcaaatagaaatagttgaaatatttttgtgaactattaagggaaaatttgatttttcatatttttgtgaaatagaagttttatttgaatgggaacgatgaggtatgatggttgtctgatgttcagaatgt

SEQ ID NO: 93105 - DNA, 708 bp, Cannabis sativa
aaaattagacatatagtcatatatgaaatatatatataaattcattatttattataaacggtccggtccggtttaaccattaattatttattatgaacggcaaccgaaccattaccccgtaaacggtccggattgaccaaaccaccaaaaacggtttctccgattacgatttacagtggttcggattgtcgtggtccggatttaaaccgcggtttttcggtttatatgaacagccctaatgcaatggcttaaagacttcatttaacattcactacatagtgtttggcttcgaacactcttggtgcattttactagtggtatctctcctaaagttctgtccaaatctttgcatcattatcaaggtacatcacactatcagcaatcttactcgaaatggcatgtaaaatctaagaaatcacctagctattacatcgaaaccatacatcggttcaggtaatcgcgacaaacttgatcttgtttcttgctgtaagagccacaatcatggatcgcctccatgagctgtaattctcacagccagtcagaatcttgggaacaagattcacaattgattgatctccactcgaaatgaagtaaggacttctaggatcttctccaagtggtcgatcattggtttccaggacagagaatctgttggcagtctgagattcatctccctagtttgctgtgcttcgagtattggctcctcca

SEQ ID NO: 93106 - DNA, 620 bp, Cannabis sativa
cacatattaacaattcaaaaccgcaaaccgcaccacgcgatttagaaaaaattcaaactgcgaccgcaccgcaaagaatttcaaaccgtatttttttgacggtgtagtgcggtgcgagcagttttagcgatttgagtagtttgatgaacacccttaatgagaaccaaaacttttcaccatgcagtttgatagcaaaccatatgttttatacgggtattacaaagtgctctagagtagacacttactggttttacgtaaatatgacatatgacctccgttcaacaacggtatttttattcaggttaactgaaatggaaatgagataagataattataaagatatatatatttatatatgcatgtgttatacatattagattgtatgaattatatactaccaaccttgttacggtagaggtaccgagtgtatgtggtacattatattattaaggggtatgacatagtactacccacactagtacgagatgagcacagagtgtatagggtaaaacaaataattgtactctaagtgagagcaaaccctaccaacactaaaattagaaagatacttagtgcatgtggtatagagaacgtacttctgttacgggtttggaactcat

SEQ ID NO: 93107 - DNA, 529 bp, Cannabis sativa
gtccagcttttttatttgttgattggatcgatttctgcaaaataaatgattctacaatttttacatgatatatatacaacttttgtgcttatgaaaataaacatttttttctccttctatgtaggtgaatattgcactaaatttgaataaatatgtatttagctaggtattatgtttataaaataataaagtttcaatatattagattatctacaagtacggtttaacatcaggcgggttggtcagattttgaagtaccgggctcagtcatgggtttagtgcaaaaaaaaaagagcacccaaacgtccccgtaatacctagttggttgagttcatgagtggctagatttactgtttatttatttattttatttttttaattgcaatcttaattaaataaagaagtatgaaattaataaatagaaaaataaaatcccaaacttttttctctttctcatttagtaatgttccaccacccccttcaccatcactctctttatctccttctttttgttttttttttgtttttt

SEQ ID NO: 93108 - DNA, 676 bp, Cannabis sativa
aatatagttgtttacattgtgaatgaaatcataagcaaacataaatattaatttcgaatgtaaaagtacaaggcatttaagataaggaaaaagctaagtggtttgcaaacttctctttacaaaaatgctaccaggagcagaccattaagccatttgcctaaacaaagaatacaaggttcattataaaggacaggaaagctcgagaaaggttggctccaagcaaaaggactcgacctcatgtactgactcagtaagatgtccctctacgatcctcgctgcaaagatctcattctctacagtagggacttcctcgcataagaagatcccatttcctcgcatcagaagatcttttttcctcgcatcaaaagatcccatttcctgcagtagagacctcattccctgctgctgagacctcattcccagccttaggaaatttatcaacaccagtgattggcaggctcaaatatttccttgtgtaagctttggtcttgagccgtttgggttctttagtggaatccatgacctcatcaacttgggttaccttcttcttggatttcttgttagctcggggaggacttttgaacatgctctcaaaatctacgtccatgcctgtatagacaaagataaaagatcaatgaagcaacagtggcaaaaaaaacgaattcagatcagacca

SEQ ID NO: 93109 - DNA, 771 bp, Cannabis sativa
ataaaaaatatattttaagtttcatgctgatgtgtgctttgttgaggatcaggagaccagtcatatttttttgaaggagaaccatgtgaatggtatgtatatatttgattcttatcaagtttagctccttccatcttattcatgtcctagtcctgttcaatcagagctctctctttccagtcaaaataatggtcactcttttatcaacaacaacattgagtctcggtgtcaacaacgcttttattgtaacacttttaatacaaacttgttttgtgattttgacttgtggtataatgtttttggataccctttagaaaatgttgtcaaagctgtactcgaatcttgtaatcaatccattcaattcaataaagattctaaatctctttgttcaacctgctacttagggaaaatcacaactttcctttcccatagttatccaatactgaatatattgcccctttacaactttttgttttagatctttgggtccttcccataccttgactttcaatggctacaaacattacatacatttcatagatgtctactcaaggttcacttggctttatcttattaacagtaaatccgatgctctaaaaatgttccaaaacttgaaaattaaagctaaacttcaattaggggctaaaatggaggttttcaaactcactcagggtgagtataaatcctttaccaaatatctgaaccaattagccatcattcataaacacccatgtcccactacacatgagtagaatggctaggatttataaa

SEQ ID NO: 93110 - DNA, 562 bp, Cannabis sativa
tattacgtggaggcatgggaaggaagttcttctgcttaaaaattaccatatttttctttcatttccatgcatctccttcattcttcccatgtaactttcctttatttgttcttttttttttaatatcaattctgaggtatatgttttctagaggtcacaattcatctcctcactttacacacaacatgaatcctattactgaaataaaagaactccctcctaatgctctttcgtaccttaatgatttgcgaaataaattattatttggagcactctctttctaattcaaaggatgttaatcgagaacagactatggaatgtaatgatcatatacgtcaactagatggcctaactgatcgtgttgaagagctgtgttcgagaacattgtttctcaaaaacgaactactgcatgaatcgactattatttttaaaaaagatgccgagatgaagcatgtctttatcgagcatgacgaaaacgtgcatgtcctttgcaatcaatttaataagaatgtggagatgttaaagactgaaatctaagtatggtttcgtcaatatttggatg

SEQ ID NO: 93111 - DNA, 821 bp, Cannabis sativa
tgttaggaagccaacttcgacccccgacggaaaaccacgcgacaaaactaaggagtcgagttcacgccgcgtgaggaccgacggacaactcgacctaacatccagataagaactacccagagcatgttttttctttttggccttcttcaacgggggaattgctagagtaaccccttcggacggggctgcctggccactaacgcccgcctcgcctccagaacgagaacggggaataacggagacgctgcctaaacactcgacttatgggtcgtcgggaacttcaacgttttcagtctccataggaggagtatcagaaactaacaatgattcgacgaatccaggagcaatactcgaggaaagagaatcagaagttgaaggagagacacctggacaatccgtattcgacattacaccacagctaaaacgacaatcgggatccaaagcctacccaataaaaaagaggaagagagaaaggctaatcctaagaagaaaactgcccttacgaaacgaggaaatgccaggactaaaagggggaaatcggagaatagggtagaagaaaggggaagatcccagaagaaaaatgggagggaagacaacggaaggatggaaatccaaaaatatacacggtaattaaaacaaaacctataaaaggggtaaaaatgaacgagaagaaggcaaggatgaaaggaggatataaaaaaaagggagggagaaataaaaatggataaaaaaaagaaataaaacttaagttaaatagagaagcataatatatatacctgaagacagcaagatctagcacagagaagttgaaacgagcaaca

SEQ ID NO: 93112 - DNA, 507 bp, Cannabis sativa
aaatataatatattaaagttatctttctcgtttagtaaatataaaatacgggcgttacataagacatgggtcacggccctcacattaaaattcgtactcttatagtacagtagaaagaatattattttgaccaataattacacaaattcaatgaaagtttccttcataaaaattataggaaattcaattatccttccaatgatatgatgatcattaaaaatggattaaaactgaaagagttatgatatttttacccaaactgaaagagtaatgatacaaactttcggcattgaagaattcagaagtagaagataatattttcatgaaagttttaggaaataaaattatctttccaatgataccacaatctttgaaattggaattatattcagagagatattgcaattttatgaaaacagttttgcaagaacaagattcaagaagcgaatcacatgatacagaagaaaactaactttttgacatagtatgactctgagttaacaaaaa

SEQ ID NO: 93113 - DNA, 1747 bp, Cannabis sativa
ttagatttgaaaaataataggtgtataaccaaatagcatatgctcattaaatatagttgacttaaggttgtattttgtaatagtataaaacaagattgtacaaaactaatagtagattaaaaacaaattaaattttgaaataatgatgaagaatgaaatgaatcaagtatacctgcagtggcagaactataagtggtgtatccagcattgacactacggctactggtgataatcgtctttctcaagccatctcccatgagcataatgttattattactaataccaacctcaatattttccctatatatacctgttttcacgtgaataacaaatctagtaccaactctcctcctcgccgcagcgtttagggccccctgaactgtccggtaatgtccagaaccgtctttagccaccacaaggttcgcctttatcgccgacggcgaggccttcaacaaccgccgtctttcagtctccgaaagccaactaggaaattcctgatcatgatcatcatcattgacttggtgggcttctttgttgtccacaagcccagcgtttatggccaaaccgttgcttataagctcagtaacattgtagctggaagcaatgggcattatgaaatcggttacgttcagctctaacgacccggctcgacacgtgtcaatgtttgttagagctgtgcttagccaagtttgggcatcgaagtccgtacaagatctctttttggtgtttagtccttcgagagtgcggttgagttggaaaatggtgtcgtcgtagagctttaagcaatcggcccatgcagacttttgtggtttgctctcgcaatttgggcctaattgaaacgcatgtcgtctggcttctaaggctctgtcaatggcaatttcaacaagaatctttcgaaaatcggaccgctgtttcggtggctcaaaactgtggtggccgtgagacatgaagtacttgcatggtcccgggtgcggggtttcgtcgcaccactgggttaggctgctgttttggtcacttgttgatagaactgtgggaataatcaaacaaaaaatttgtactaaacatattactacaactagaatgatatttttcaaggtcatatttttgttttgctattgtgaccttgtaataataataataatagaatggctaataatttttggatttgctctaagggtcatgttactcatatcctaggctagttccccttatgtaaggaaatgaatagagaaaagggtttgattggctggccttaagcttattgttttataattatttgacttgttatataaaatatgaatggaagtttataatataagattgccaaactagaatatgggcccatgttagtttgatcagcacttaatatcgtttactaagcatatatatcaaaaatcaaacatcaaataaaagtttctttgcgtaaataatatattagagtgcaatgatttaaggattcaaatgaataattataggttcatattatgatatggttttataatgatacatgtataacatagtataagaatttcttaatatataaggttttaattaagggtagtgtaaaaatgattagattgttaattgacatgtgctaagtgttatgggtcaaatgtgggacggtgtttgcgggaaggaaaaaccacatcccacgattatgaatgtgatgatgatgtcatttttgatagcttgactttttcaagtaccaattgcttaacacttgagacactaatcaagtttttcaact

SEQ ID NO: 93114 - DNA, 1902 bp, Cannabis sativa
cgggtcaaaactactaaaatgccctgactcaccaagggggtcttaacatgttataaatcatataaattctcacatattaaattatataataatataattccacaataataagtaattaactagtttgggttttgctaatccattctcttaatcctagggtattacagaacctctaggcttcaatctactggggatttttgcattatttgaaagatctaagctccccatctttgtcttcatcagaatctagttgcgggtaagctttctattcactctctttcacttaatttgaatgatttttccatgaatggatgaacataaattcttattttgaacatgcgttgattcctacattagattgtaatccattcagtattttcatttgcgtgatagacttaagatgaacaatatgtgatttatagatgaaaaagaactgaatttgactttcgttgtgatccttggctctttgagtcacgaagaacatgtttgagctcttaaaaaatcacgtgttttcatccatgcatatgttggccagccaaggagtctttgtttgaagcctggccagccatggatggctttcatggggtctggcaggccatggggactgtgtccctaggctggccaacctatgcctagaactagggttcctggccggcctctaagctgggtctttgggtctgactaacctctaggacctggaaccctggtcggccaaggccacggctccaagcaggcacctaattttctccctctttggaccgtagttagggtctaatggtggccttggaggcatatacaaatgtggccttattagtggttcctcttgaaaactctatataaggctagattataagtccattatggtcaattgtacaacattggacttgttgattgccttagtaattgagtctaagatgatacttggtcgttgatcgaccttgaaccctttgtttaacctggaagatgccgttaagtgttgttgacttgaatatatttgtagctttgtcaagttgctcacctccccttatttcttccatgtaggtaatgctcggtgttgaaatggggaggtgacagttgtataggtcttctgttcacctcgaatttttggcaaggataaaatagactttgtgcaaggcactcccatatgatcctcatgtggccatggtggccacaaggggtcaaattacagtggaggaggagcctgctcggcttagaaatagagtgccctaaagaattagctcttccatttaaacccaaaacccatgaacctcaatacttacttgaagtaaatgatgtaaagattagggaccatttaataaaaaccaatcatgacgaagttgctagtcgctataggcaatttctccaataaatattcaagggaaaatgacatttcttgcgagatgcagcctggcctgaacccccatatttatcttctattcctttggctaaacccttacttttacctagagtcacaatttctttttcaccatgtgacctggattttaaaattatgtcttccaaccccgtaagtcaaagactcccaaggatcctaatgtcacttttgaggcttagctcattgagtcaagaataagagctatactggactatgttggtggtgttttaaggacttgtggcatcaaccaaaagtgagggtgtcatattagatctgttgcacccagtgaatttagttgctatccaccagaacgaattatccgtgaggaatgctgggaggccagtggtgaaaccagtggtgaaaccagtggcgaggccagtactagtagcttgggtggtataggtgcttagagccatgagcatatcagggctggagcaattctccccatgagagattattttaaagagttcatcaacttttggatggtatcatgttgttttgagtgttgt

SEQ ID NO: 93115 - DNA, 1100 bp, Cannabis sativa
tgataggctacaagagttatattttcttttcatgtagtttaggtttaatctatatattattatgttgagatccttgaggattatgactcatattgattaaatcaatttttattaaaatccacttccgctttcaactctgatatggaccattaaaactaacacttggttccttggagttggccaccactccattgttgtgatagtagagtactagtgtttttctatttctggaactacttccaaatcagtgtagaatttcttcaaccaaactgcttccttagctgtttaacaagctactatatattcaacttccatggttgaatctacaatactggtttagttaatgcttctccagactacagatccaccaccaagagtgaatattgacccagatgtcgaattttaactatttttgtcagattgaaaaccataattagtatatccaatagaatttaactcttctcctgaatgtacaagaatgagatctctcgttctccaaaaatacatgagaatgtgctcacaactatccagtgttccaaacctagattagattggtaacgataaataatctcaacagcatagcatatctcaagccttgtacacaacattgcatacatcaagcttcaaacttcttatgcataagggtactttctgatgtcctccatctcatgatgtgtctttggacattgatccttgcatagagtaatttcatgtctggacgataactgtcctttctttgaattctccattgagaatctttcgagcaccttatctatataagttgtttgagaaatttctaatgttctctactttctatctctatagattttaatgttgagaatatagcttgcttctctcaaatcatttatttagaattgtttggctaaccactttcttacatctgataacctttctacattgttgtaaataaatacaatgtcatcaacataaagaactaggaataccactacattatctataatgtatgtgtatacataggctttgtcttcattttgttcaaagtcatactctttaatagtcttattaaaggttatattccaagatctggaggcttacttcaatccataaatagatttaag

SEQ ID NO: 93116 - DNA, 527 bp, Cannabis sativa
aaataaaatttctaatattttaatatgtgtttagataaatgatgatgttgtaattataacgaacaccactataaaaaatatatttcaatttttaaatacgaaagttaactaagagattataataagagaacgataataacactcctcaaattcaaaatataaaaataaaataattaaatatataatttattaattatttgttaaatcatatatgggtttggatttggatactataataatattctatgcaatataagttgacgagaagatgaagtagtgctaatacatttagtatacataaaaattatttagaaatacaaatagatagatagatcgaaaaaaaacatatttaatatatatgaataattaatatattaattatatgatgaaattatttttatatataagggtcaatggaattgaaagctatatatgtctcacttggtgtatgagaatcgtatatattgactgctgacaataaataaagacatcaagctagctactattctttatatatatatatatat

SEQ ID NO: 93117 - DNA, 670 bp, Cannabis sativa
acctcgttgtgcaagtaaacgtgacgaaaaatctttaatgagtatctgatgaattgattaaatatatttcttattaataaaaacatgctctcaacaatatcctatatatttatatatacatggtggaggttttagttgatacaataatttatactttatttctttataagttttaattaaaattaattatatttaaaatcaaattactaataattaattaatcttttataattcattactaagtaaacatcttctagtaattaatttttttacttaattaattattaaaatttaaaatatttaatatttgtaataatttttttttataatttaaaattattatacgcataatcttactcaataaaaaatagtaagaatgacctttaattagaagtaattctacactcaatcttatttttaatactttaaaatgtcaaattagtatgtcagtttcaaattaatccaagtcatttagttgtttttttaatttaaaaattaaataaaaaataatttaaagcctaataatatttataaaatcaaagataagttaattttttttttctatttctcatttctcgtcgcgttcaaaaaaatatttgaaacaagtgagacaaaattacatagtaaaacgatcaccaagaaacatcattgattgaggaagtggagcctc

SEQ ID NO: 93118 - DNA, 567 bp, Cannabis sativa
tcccaataagagcattgataaccacactcgaatcattctccacaataataaaattagccttaagatctaagccgtttcaaccgccaagcagctggctgccgcttcaccgcacagcgcatcaacaaagtctagcatggctgttgtaattcgaagaaccctgccaagatgatctctggccaccacagccgaacacatactatccatccccactttgatatcacaattaagcttgatccactccggtgggggaggcctccagtcccgctgcggggacagactgggggggagggaaaatggtagcatgcatatctgcaaaatagtgacaaatagaatcaatacatctgctaacatcaactggactatatattattgtgtacattatcattacgtatcctccagatggtgtcaacagtaatcgaagcatagagaaaaacatcatccgcatttacactcttgtgcttaaggtcccaaatgaattttacccagtcccaaggttgaataccagcattgcagactggataaataccccagggggaagatcgccaaaggtggaaagccacctcacaa

SEQ ID NO: 93119 - DNA, 888 bp, Cannabis sativa
  modified_base (152)..(153): a, c, t, g, unknown or other
ggaaatgggaatggcaatggcaaatgggccaaggtatgggaatgggaatgtgaatagcaatgagaatgggaatagaaatatgaatgggttagggaatgggaattgtaatgggaatgggaatggaaatgtgaatgggaatgggaatgggaatnngaatgggaataggaatgggaatataggaatgcgaatgcaaatgggaatgggaatgggaattggaataggaatgggaatgggaatgggaatacgagtgggccggggaatgggaatgggaatgcgaagggtatgggaatgggaattgcaatggaaatgggaatggagatggggatgggaatgggaatgggaaagggaatgggaatgggaataagaatggaaatcggaatgggaatgggagtgggaatgcatcgaggaataggaatgggaattggaattggggtttgggctttggggtttagggtttgggtgttgggatttaggtttagggtttagagttgttgttggggttggggtttgggggttagagattagggtttggggtagggttgggggtaggggttggggtaggggtttgggatcaggggttcaggggttagggttcagggttcagggtttagggtttaggggaatgagaatgagaattgaataaaataaaatttaaagtgcattaaaaagatgataaaaatcattaaaatttttctcatgttacatgataattgttgttccttccatttcgaaatagaatattcattccaccaaaatggtggaaagggcattctatttggattacattccaagactttaaaaagatactgaacaaaagaatggaataaaaattatttctatccattccatttcattacctctaacaaaatgccacctaagggtctgtgt

SEQ ID NO: 93120 - DNA, 1490 bp, Cannabis sativa
aaaaccttgtgtgtttttacttttttgcactgtttgtttttctggtttattttggagctacaaaattgtcttctgtagctacataaaaactgtttcagtaccatttttattattttgcatttaattaaacatttaattaaataataaaactgagaatattaaaatacgaaatttcacagagaaaataaaacaatgatagtttagggtttgataaagaaattatgtactgagtatgagctatagtattgtaataggtttaggttaacgaataataatactaaaaaaattattaaatcaacaaatatctaattttaaattttaattttaagccctctatcttgtaactttagagctcaattttgacctaagaaaattatgaattatgatataacaatttctacaaaaattttagatctttgaattatatttctaacgccactaaaatcacctcaatcggagttataaagctttagatatggttattttactaagatattttctaaacctgcgaatttctccaaacctgcaaatttctccaaacctacgaatttcttaacaaaattccataattatgttatttcctactacttatacaattaaataaacccactaaataaattataaaatcctaatggacattcatattgggctttaattaaataattacttatcttgtacaaatatcataatattttacattcgcagttaatacaactttaactataactactctaagcaataatctcaactcactataacaattaaaatcaataagataattaatctcgtgcaattaatatctaaaaaataaatactattttattctagatattacattcatttataacatccccgcttcaagcctccattgggcccttacaaaccaacacaagtatttctaatgtgttttgtcctcactcgcacgcttcctgagaaaacttttcaagaggtcacccatcttgaaattaccccaagttaagcacgcttaactatggagttctgtcatgatgggctaccaaaaaaataagatgcaccttgttgatatagacagtacaaatccatttaagccctcttcaattgtgtagtcccatacttacatagtctcagaatgatcatacttaatcctccccaagcgatgtgggattgtacagcttaccaggtgtttccccttacgaatcacgggactactgactgtcacaataacccccttatagggttcgacgtcctcgtcgaccacacttctagctgggtcaaggctctgatatcatttgtaacgttcccacttcaaaccttcattgggcccttacacccgtggaataatagctcttatatccaagtatgtcattttagctacttctttgaatgacgactaactgtacaaaccaatacgagtatttctagcgtgctttgtcctcactcgcacgctttctgggagagcttcctaggaggtcacccatcctgtaatcatcccaggtcaagcacgcttaact

SEQ ID NO: 93121 - DNA, 632 bp, Cannabis sativa
cttctatagattgccattaaaaaatgctccagcatgttattaaagtaagttgcttgcactagagtaagtaaattaccaggcatatcacaagtcataggtatagataatcttaaacctttaacattaggatcaagaagttttgttgagtctattgaatagacttaattaacaagacttcctttcttgtccttgtaatagaaaatttttggttactccatatgaatggttttaacaatagctcttttggctttacttcttagtttcttattctgacaatacattattttttaaactaataatggagtttcatcacaagtgtcttccaagtcataacaggctgagttctttgaaaccctctcactacgacaaggtaccatgaatttttgtctaagatcactaaatgttatgaacctcttcagttgtgtcaaggcaacagaggcagtgggaccatcttatacaaaataagatgacagaacacttttgaatcaagaaaaaaaattgtctcctctattttgatactttgttttctgacagacattttcttagaaaagtagtatttgttgaaacaaacactttcttttcttaatgacaatgggatggtccacccctaatcacatagaatagctatcaaa

SEQ ID NO: 93122 - DNA, 1912 bp, Cannabis sativa
aaaaatgagagggcgaaatatgaataaatttgttttgggttggcaaataacaaataattatatatacatttcacatatttagttatataaaagtatatataaattagggtaaataacgacataaatattcaaagttttaaatttgtatgtgcgtaaacttaatatttatttttagtagcataaatatctaacatttataaaactataatttttttctatttcgtcattacagattctgtcattatgttaaacaggatacatataaggcttaaattctgtatcattggctctagacatcaacgtgtagtgttagttatttatgaatatcttttaataaattcaaaacgaaatttttactgataaaattagagaaaaatttcaattttacaaacattgagtatttatgccgctaaagataaatattaaatttatgaggcttaaaatttaaaactctggtacttatgtttgttatttatttattttgtcttaggaagggttacagctcctctaaatatgattgtgtgactattatatatacataataagtaattgtttaaattttatttttaataattttattaaaataataatttcaaccagatgctttaaaaaaaattaacttaaaaactcttggacatcaaaatatactacatattttccttcttttatatagtaatttattgttattttcctgagtgaaaaaaaatgaatacattaatattattcagatgggattaaatatttatttttctagaaggattaaatatgtttattataaaaataaggataagtatttcttaaaaagaataaataaataaaagtgaaagaataattaaatatgattgggagccggaagccgaggtgaggattagagaggatcattgtttgtgggctacaatttagaagaataagaaaaatgtctggctgaacaaagcccagatggtgtcacgtgcgttcatgatccctgtggcccagaattgtacacgtaggatggactgactgttttagttgagggagtacagtcaaaccttagataaatatctttcgttacagccgataaaaccccttaacacgtaacgttccccaagtcaaatattcgagtatatcacgtgcctcgttagtttttatcaatttttcttttttgaaggggtgtttttatgataaaatctaaagctgtttttttcagtaataaaaagatctttttttaagttttagataagaaaagagaaaagcatcatcactgatgataagatttgataaataatgaaaatcgaccaatttaaaattaaaaaatgtggttatattaataccagtttttattctttaacttattaatttttctacggttaaaggactagattttgtctatctaattttattgggtaatatggtttataaaattacataatttaaaatgtaatccttacctggaaggaactaaccctctctaataaaagttttaagaaatgtaatgatgagaatattaaatatatatatatatatattattaaccttttgggtatttgaggtttttacctattcataataaaactgttctcttattaaaagaaaaaaagtttaagaaaaaaatatatatatttgactaaaaaaacaaattattagcatatacagagctattaaactttttttcatataaagaaaagatcttgttgttataaatcaagacattttttttaaatgcaagacaattcatttataaaaacgaaaagattggtggaggaatttcttcttattaaccgatatcttcatccaatggtgttagagtagagtatgtttgcttagtcatagttagcaacaatattgacatctcttcttctaataacagtaggaataaaaatcacaatgaacacatgaaattaaatcctgaaaacaggatattaaaaaaaaaaaa

SEQ ID NO: 93123 - DNA, 587 bp, Cannabis sativa
ttttttttaatatcaataattacttgctgactatattggctctctcaacaacagaggctgagtacatagcttgtactgaagctgtaaaagaagctttgtggctaaagggaattacctgtgattttggtttaagtcagagacaaatacatgtacacattgacagccaaagtgtcttacacttaagtagaaatcaaatgtttcatgagcataccaaacacattgatgtgcggctacattttattagagaggtaattacaaatgggaagatcaagctggacaagatttcaactacagaaaacccctcagacatgctgaccaaggctgtcacaacaacaaaattcaagcattgcttgaagtaacttggaattctagggtagaccctgtcctaagattgataaatgtatttatttttggatgtatgtttactatttttctttaactgtctttgtctttcctactgtactatcgatcaaggtggaaattatagttagttatgaccgttagtaaagttaagacagttagttttgttagctctagtttgtcgatttttagttggttaggtatagttagtttcaagtgtcaaaacc

SEQ ID NO: 93124 - DNA, 692 bp, Cannabis sativa
ctgaggaattacataagacccctacttttattaactaaatcacaattcacaataatatatcccttttataaaagctttatttcagttaatttgtactctacacatgctgatgttgttatttttataacgctcaccaaataagcagtcaaatcccaaaaagttgggaaacacacattttttttttaggtagggcagcaaagcgaacaataatcttaatatttattaatttatgtatgtatcatgtatgtcatcccatacgtaaacgtaaattaaactgatcacttattatatattaatatgaaagccagtacagaatcagattgattcaggtatttatctatatataaatatagttatataatatgacgatgatgtcatgatgatgtatttcgtgctggccaaaatgtattcatgttcaaccacgtttggaatgaaaaatagggtaatatatttgaaaaggctattttggagggagggaccatgtactaaatgtttcattttcttctgtcatatatatacatatatgggccttaaatagccttacattacactcttttgcgtaacgtaaaggacactcaataaggccctcaatcccatgtcatgggaagggaccaaaacaacactagataatttattttgtaagttgaaatgggtaaaagaaaagctattaatactccccttatttggttgca

SEQ ID NO: 93125 - DNA, 940 bp, Cannabis sativa
tggcgtccctatggggtatggcgttacaaagaaactatgaggatgttgatttaaaagctaataaaagacaattatcagtctttaaaaatattggtcatcctattagaagtggaacagatatgaattttcttccatcaaatgattggctccaacttcgtctttatgtattgaaaaattataaagaagttcaatctttcatcaagtaagtatatatatatattattgatttcttatgagatatttataattataaagtaagtaatatttgtcaacctgtatttttaagcaaggaatttagagaaaaatatgagagagaaatgtgaagaaacattcaataaaaagtttcgagaatggtttgagaatagagtatgccttatatatcataatttgtttataaacttaggttttatcatgtacaagcactaattatttctcataatataaattaagttatggagttgcgatgtactagaaaagttaatgatgaattattttcactagcccaaggaccttctcatatagttaatttttataatgggtatctcatttatagttttagctagttatcataccaaaagctattcaagtagaaagaatactcaaaataaaggtgttgttgtgaaagtagagcataattctagtacttgtgactattatggtgttttgctagagataatagaactctattacagtggagatttaagggttgtattgtttaagagtgataggtgggatgtcaatgtgctaaaggaattgttgttaatacacatggatttgttggtgtgaatacaaaacggttattgaaaactaatgaaccatttgtattagcatgtcaatgtgaataaatttactttgtaagagatgttaaaaatttggatcggcttgtaattgtgaagattgaacctagggatttctataatattccaatcaaagaagttga

SEQ ID NO: 93126 - DNA, 565 bp, Cannabis sativa
gataattatgtataattgaggaaattatattattttataattaatatttttgctaataacgtatgaaaaagatatttataaaatattatataattttgtattatttataaaagaaatattatactcaaaattttattcgtaataaattaattaatttttctttaaaaaattattaaaatcgcgcgaagcgtaagtaaattttcatcagtatactttaaggtataaatttcatatctacataatttattaaagttcatctttttaagtaaacatttcatataaaaaatttgatcactaacatttttatataaatcttttattttcagtttataaaaatagataatattttgcgacccattttacagttgttatctagctatattgacatttatagagaagaaattcaaacgaaaccacaaaacaaactgaaaaaaaattcataaacagtagataaaatatttcttttattgaaaaaataatctaaatattctttgaaaaataattgcatcatcaattacaagtccagtttatatattaaagcaaaaattgttatcttttattttat

SEQ ID NO: 93127 - DNA, 669 bp, Cannabis sativa
taaataaaatattttatgcttctatatccactaatatttatatatttatataaaaaaaaaatcacaaaagaattaatatgaggtggcattataaagtattttttatctattttatttgaatttcagtaaatttagttcatttgactcatagtaagtttttttttcctttatgaaaatttcacattatgagttattgtttacttaatcttgcctaattggttataattttttagttatttattttgagccataaaatcaaaatttataatttaaaagtcgactaatattgtttttaatagtacatctataaatttataatttatttattagcaatatctgtaatttttaaaagtggactaagaatatttttcaatagtatacatatatattattattatttcgggattttttttaatttttaatatttttttgttagaatttttaatatttgtccaaaaatcacaatctttcgatatattttaaaaataatattttcaattacaatactattactttatttataaaattaatgttatactttaaattatattactcgatgcataaaaatatatattcatataatatttacataaaaaaattataaaaactggacaacaccgcgcgaagcgcggcttagtttcctagtatgagtatattcccttcctttta

SEQ ID NO: 93128 - DNA, 606 bp, Cannabis sativa
ttttttttttttctttttgtcattttattttgttatttgttatcttttttgtttttttagtttttatgctttcgaggatcaatatcgttgtctttttcatggttgctcgctctctaggtgttctcttacccaattcttttcaaatttctatatttttaaacattgaggacactgtttgattttagttggaggtggtaaacctattcaagcattgtaatttgtattttgtcattttaaaatttttatggccaaaatttcataagttactcagttattcttgtaaaatgttatttttatgccaattttcactatcttttctttttttacttagaattttattagaattataaatgcacatgccaaactttatggtaagatagttgttagcacatatcaaaacctctttgattaacaatggctagcacagtacttaagaaaacatcataatgtgtcttagcttgtagggtgttacactgcacttgaagttatcatttttctcaacaaatagcacttggataggctctaattgtagagttaatctataacatattaatagactcaaactgtgctattttgcataaagcactatatctttcaactttattt

SEQ ID NO: 93129 - DNA, 702 bp, Cannabis sativa
tgaccccgacccggaaccagactcgggcccagtcctagcgctgggcctggaccttagactagcaggacccgaacccggacccagacccagtgccgaagtcggactcagaccccaaacccagacccgaaccccgatcccaaactcgacttaattaaaattaacaaataaaaataaaaataaaatttacaaaaacacttttgttttttatttttaaaattaaaaaaaaaataggttgtagaacacatttttattttttaaaactaaaaattttacttttatttctgtgaataaaaaaaattaaaaataaaattattaacaaacctcatttacgttatatatttttcaatatactttagttataaagaaacaatgggagctaaatacattttttttttaaaaaaaaaaattatatatatttttatatatgtaacgttatgttacttttgtactttagattacaatatattatgttataatttattatgaagaattaaaacttagtacgtacatacaaatgatgataaatcatgtaggtactttaagatacctaacattcataacttagtgtggataaggatggttcacacgaaatttccaattaataatctattagttgataaaaaaacattatatatatacgtaaacattatatatatatatttatatatatgtacgtagaaaggaattattttggttttaagg

SEQ ID NO: 93130 - DNA, 563 bp, Cannabis sativa
tggtaggattacacattaaatacagaatacactaatcaagggatttggacagcttgtcatatctctgtaatatgatcccataattatagggattgcttctgtgaattacgatgcaagcattgaagttgctaagtgttggcacgctgcccggactgtctattgcccggctaagaaggctccgtccttgcagatatttgcaatgctttgttcggcatatctcttttgagcagatatgtgaagtcgattccacgtgtcattagtatgtggtgccacatcagagtaccaaaattgagataacaagaggaataaatgaagagataaaggacatccatgtcctaaccctcttgttcgaatcacgcgacctttagggcgcacattgattaagaaagtgtactctaggatcgtcacacaatccatgataaccctaacccaaccctcagcaaagctaaactatcacatcatactggctaagaacctccattccaccctgtcatatgctttactcttgtcaagcttgagtgccataaatcctcttctctcgttatttcttttaaacagtgagt

SEQ ID NO: 93131 - DNA, 671 bp, Cannabis sativa
  modified_base (636)..(636): a, c, t, g, unknown or other
gtgttcaatcttccccaaaacacaagccaaagaataaacttgtgcttgggaatgatgaatctatcccaaacagtcttggactaagaaatcttatccctgctttcaaaaagaagttgataggtgtgttgaattgtatgtctttgctgcaaaaaaccagcagcatccactttctgcttcagcttgttcttcacccctacaatctttttccatgaccaaaaacaatccaatggtgggtcataatcccaccaactaccatgtttcaaatatacattatgaatccacttaacaaataggcaatctttcttacttgctatgtcccaaacataccttcccatggctgcaatattccattctctgatgtttcgaaatcctagacctcctgcagatttggtttgacaaatattgtcccaagcaaccaagcctagacttgaggtctcttgtgtgcctttccataagaaggatctgcatacagcttcaatgtctttcagcaatttctttggtaaaatagagatttgagcccaataagtatgaatggccaacagaacagaattaatcaatgttgttctccccatataggacatgttcctagaactccacatcagaatccttcctgtcattttttcaagaagctcctgncattctcctctagatagccttttagagcaaatagg

SEQ ID NO: 93132 - DNA, 525 bp, Cannabis sativa
tttattttaattcaataagactagtgattttcctggcccaattttaagggttaggcttctcttttgggctttgggcttttatttctcaacatatatcattattttttaaaattattttataataccaaaagtaacaaaaaatttaagtttttatgggtttcttttcgtggattattatttttcttttacaaaaaacaagactattattgttttgttattttaaaaaagtgttatttgctctaacgttatattatatttctgtaacgtaaaaataacgttatttaccaactaaaaaacatttatactgcaaaaatgtaaaaaaaaaaaaaaatcctaccaaaaaagtacaattttagatactttgttaaaattttccttatttttcttttctactgacttctcttttgggcttttgacttcgaatggagttgtccaactcctctactcccagtagaaggaggaaggagggggtcatttgcctctttcagtttcttacaaattaaaactttatatattagtttttaa

SEQ ID NO: 93133 - DNA, 946 bp, Cannabis sativa
  modified_base (164)..(167): a, c, t, g, unknown or other
  modified_base (723)..(724): a, c, t, g, unknown or other
aagacattattgtaattgagatatattaagttatttttgtaattattttatattacatgtatatttttgaaaaaatccctataattaaatgcatttctataataaatgcaatttgaattaagtacattaattaaactctttgcttatatataaatatatatatnnnnatatatatattatatatatatgcttataaagaagtattattatcaactttctattataatttctatactcgaaaatgaatgcatgctgaaatttttttaaaaaaataaaaattcataacagtgttcgttaaagttacaatattatctatgtaattttttgaaaaaaaaaattgaatagtttacagtgtcaaaaataaatttaaaattttttaaacactttaccacaggaaatatcaagaactcagtattgtaaacgattcagaattttttaaaaatttacaagataatattataacaataataaatatcgctataaaaaaaattttaaaaagcattttagcatataatttctatgaaattgtaataagattataataaaaaattgtaactaccacttttcatcccactaaattaaataaacatagctctttattcctacaaaataattgctatcaaccaaatacaaaaaatcgttttcattgatagcttttgttttttcaaaagtagctagtggtgtcaaatatgcttgcaactagtaatatatatatatatatanntatatataaatatatatagaaataaataaatatttatagtagtggggggccaaaattactacgtacagattgattaaaatatgtgtatatatagtcgtgaagattagtagacaactaacatttcatcaagggcgcgtttggaaagccacctgagaattggaattggatgtaattggaggtaattacacagtttaacgtgtttgtgtggccacgtaattacat

SEQ ID NO: 93134 - DNA, 545 bp, Cannabis sativa
actaactaaaaaatatttctaaatactaactaataaacaaaagaaaatcctctattcaaaaaaaaaaaaaaaaaaaaaaagaacaaaacaaaagaaaatcctacatttttcaatctatatatataaatctccctaccccaactaattactagaaaatatttttaactaaataataattaaaaaaaatatctatataaaaaaaatattcccaaaccaacaaactacaaaattatctctaattaaatcaaataaaagtttcaaaaaaattaataattaaattatttatctatcttttttctccaccctttctattttttaaaattatctttaattaataatattataatgagtcattaaaaaaaaatacatataataaggtatacttagtatttttcggttagcagtgattaataactatttaattttccattcaaaaaaaaaaaaataactatttaattttaactttattttatgtgtaattaaccacaactcatcatttaaaaaaaaaaaattagttaaaggtcacaatttttttaattgttaat

SEQ ID NO: 93135 - DNA, 553 bp, Cannabis sativa
  modified_base (32)..(37): a, c, t, g, unknown or other
  modified_base (382)..(386): a, c, t, g, unknown or other
agtagattttgatattattctaggaatggatnnnnnntctaaatactcagccagtattgactgcaagaggaagatggtaatcttccaaccgcaaagagaagaatcatttgtttttgtcggtgtagtccggggatctcggatcccggtgatttcggccctgtcagctagggaactactgcgtggcggttgtttagggtttctggccatggtggtggacaccactcggccagacaccatttggccagaggacatcaaagtggttcaggaatttttagatgtttttcccaaagaacttccgggtttaccacctcagcgagagattgatttggcacccggagtggaaccggtttcctaagttccttatagaatggctccagctgannnnnaagaattgaaaattcagcttcaagggttacttgacatagggtttattcggcctagcgtgtctccctggggagctccagtgttgttcgtcaagaagaaggatgggtctatgagaatgtgcatcgagtatcgagagttaaacaatctaacagtgaagaataaatatcca

SEQ ID NO: 93136 - DNA, 507 bp, Cannabis sativa
tgttagaatattagttgtagaaaattggggttacttgtatttagtagtttcccatttagtctcctagctttgtatataaatgtatactattttatggaatacaacatacaattcaattcaccattctctacaaggaaatattgaagtattattggtgagcaagtttgtattatggttaaggacttcttctcctctggggccctaaacaatcagcttaattatacttttatctatttaatccccaacatccttaatgatgctcattttaagtaattctgtcctataagcctgtgtaattttgggtacaagatcatctctcgtattttgacgaatcgtttaaaaggggtgatagatcgtctagtttctcctttccaatcagcctttattctgaggtgttggataggtgaatgttctcttttggctcaagaggtgcttcattctataaaaaataagagaggaaaagtcagggctatggcaatcaagatggacatgaataaggcgtatgac

SEQ ID NO: 93137 - DNA, 1148 bp, Cannabis sativa
  modified_base (577)..(578): a, c, t, g, unknown or other
tacttatgctcggtatgtcaccacgaaaaaaccctacaacggtttcattctatgccataacctaacaggaaaccctacaatagtttcattctatgccataacctggcaagaaaccttacgacagttttattctatggcataacctggctattttcatatcactgacgctcatacctacgctcgatacatgtccaggagtatcgcatcacctaatcaggtgagcttgtacctgcactcagtactcatatgtcactgacacccatacctacgctcagtacgtcgctaggaatattgcatcaccttttttttgaagaaaagcgtgcatatattaaaataaaaatagttagaccttgcggtcattacaaaatataatatcggacatagaggatagcggcacggagccaaacctctgttgggaaaaagcccacttagccacattatgggccagaaaattacattgtctactaacatgttcaaacatacaaccaataaaaaaggggaaggtgtttttacaaaatgagacatagttctcaagctcccaacgggactccctcccattaagagcgttgatcaccannctcgaatcactctccaaaataagaaacttaacaccacgagctttagcctcctctaaggccaaacagcaagccaccgcttccccacagagagcattagaaaactccatcttagatgtagtaacccagatcaccttgccaacgtgatcccttgcgaccactgctgcacacatgctatccaaccccactctgatgtcacagttcagcatcaaccaatcctgcgggggggacgccaagattccatcagagataggatggggaaagggagcaagtaagcatgatgatctacaaaagaaaaccgaatagtgtcaatgcatttaagaatatccactggacagttattgtgtaccttatcattccgagtctgccagatcgtgtcaataataagcgaagcatatagaaaagcttcatgctcattaatgcctttatttttcaggtcccataagaatttaacctagtcccacattcttataccagtatcacagatggggaatataccccagggagttgaccgccataagtgaaaggcaaaattacaagataggaatagatgctccatagtttcaacttccg

SEQ ID NO: 93138 - DNA, 555 bp, Cannabis sativa
attgatttttcaattattaaaaaggagcattatagaggtctttttttttttttaaagagtgaggtcttttctttctctgttttagagccattttttttttaatatacgcggtatatctttgtcttttgaataatgaagataaaattataataataataacccaatatattagacttattatttttcggatcgaatggaattcatcaaatattttaagttcagtatgtattaaattagacttgatctatctaatttaaaaaaaaaatgagtaaaattttaatattaatttttatatatacatataaattttacgtataacaatacaaaatacaattatcatctaaaataaataaaaaataataattagcttgattagattattagatttttagacatctcatccaacatccgatccgatccaattagatatttgaaaataatattcaatccgatctgatcaaaattgaatatctaatatttgacgatcagttgtcattggatcagtcggttctcattggattgagtcgattcgcacaataaattataacatcttca

SEQ ID NO: 93139 - DNA, 860 bp, Cannabis sativa
tttttctcccccttggtctgtgagccgcgaggtttgccttatgaatctatcttcccaaggtcaggttgattttgggtaccatcttcccgcgccacctttactgcagctatttcacgctccaactcggcattacgctggttaacttcctccgaacgacgcctaagatggcggttttctaattccacgattggtatgtatctagttggatcgtaggcgccatcctcatcaacctggttagggtgtggctgattgttgctcatccaaggtccgtcaagccaggggccccaatactggatcttcctggggcttgcattatattcatgcgatgactcaatagatctctaaggactcaaaggttcttttccgagacgatgattgattccttcttgaggattattatctttggtttcatccatcatttttatgtcagtgggctttttctgagcttttttcaaagaggctctcaatgaaagtaccaaactgttaacgcagattttcgttaaccaaattttagcctcacggtaataattctacatagagaaaataaaagctatagaaaaataaaatatgaacacagggttttttacctggttttgcagttaaaattctgcacagtccacgagtcaatcttattcagatttctgagtatttttcagggcctcttttatatgagttttttcatcccccttcttgatcttgtttgccaccatttataatttcatagtggacagtaatttaccatagttggcaataatcgttacagcgattattccctcaaatcaggggatttgattacaaatcaagctaaataaatgaggtttttacacagctgtgactatcccacttttattgggccgaga

SEQ ID NO: 93140 - DNA, 568 bp, Cannabis sativa
  modified_base (27)..(36): a, c, t, g, unknown or other
aaatttgtttattttattattttaatnnnnnnnnnntataagattagaaaatgatattaaaaatatctaattggttattttctaattattttaaattattagatatttaatttaatttaataaaataatttaaattaaacctagatatttaaaattaatttgaattttagattttgaaaaagtatttaaggttgtttcaacaaccttaaatttttaaaattgaattggctagttaaatgttaatttaattatataagtaataaatatcttatttcacatattgttacatagatattgtttgtttatttaaattgcttattcaaaagaaattttcttttaacaaacttattatttatatgatctaaattgctatgattaatttgttgacagatccaataatctgattttaatcatagtccaattgtcaacagatcatataaataatttgtaacaggtaaattttataatttctttcatctgtgataaacctaaaaaacatgatagggatcatccaaatcagtttgacttgtgtgagcctatatgtttgcttttgggcttagatgcatat

SEQ ID NO: 93141 - DNA, 765 bp, Cannabis sativa
agctagcaacatttgaattgaggtatgttttactgctggtgagaatatctctatataatctataccttctttctgtgtaaagtcccttgccaccagtctagccttaaatctagctgagtcacaccctagaattgtgtctttaagtttataaacccacttgttgctaattattctcttatcttttgattttctcactgaatccaggttctattctttactagtgagtccatttcattgtccattgttgttccccacttcctactgtcagttgagttcatagcctccctatatgatcttggttcattatcactcatttctacaacattcaaagtagaatgaacaataccaacaccaccaaatatgattggaggttttgacactctcttgactctgtccctaaccaggttgtagtgctgcaactataatgacatcttacttttattacgagaattaatagataattagggcttaaatttagaattagacttttgaatattatttatgtaattgtggagatatatttgaattctaggtgagctaatattgttatatgtgaaatattatgattttcatattttatgctggtaacagtgaaatgcaatgtatggcctatagagtcattttatttttgttttgtactttagaaataacagggtgagttagttagacatttggaatgtcaagagttaacatggttatagtttaagaccattttacccctttatgtgtattggttacatatgtaagaaagggtaattaagtctt

SEQ ID NO: 93142 - DNA, 713 bp, Cannabis sativa
ttttttggaatattttataattattttaataagacctcataactccactaactcatttttaagttcagaaaagtgtccataaaatcaaggcatctctctctagtttccctttaagaaattagagtatcagaagttagacatttgtatgtaatccatcccgtgagaaataaaactcgtagtaggcgtagctcaattactttcacgatacaaggagtgaactactataaatcgtcaactatttaaaaaacgtgttttctattaaaaataataaatacaattttgtctagtaaacactctcatttggattatctattagagcatcactaatggtaatattttggagaatgcttggtaaggtggaaaatttaggtggcaaaatatatggatgctataccattagagataaaggaatgctattctttaaatttgcattgatgctatattttttttatacaataaaaaatttaaggtggaatatacatacatatatataatagtttaataaagtaaaaatatgttgtatatataataatgagtcagatcataattataatatttttaaaaggtactgtaatatcaaagtatctttataagtaaatatgccaaaaataatgtcaaaaaaattaaataaaatattatatatttaaatgatgtgtagatacagatcatcttgctaccattagagatgctagtagatgccatactgtgctagg

SEQ ID NO: 93143 - DNA, 991 bp, Cannabis sativa
taacctagacccgaaatctgaagttggacccaaccccgtacccgaaacctgcacaggatccagaccaggacaggaacctagaaacgaacccataccaagacaaaaccaaaacttagaccaaaacaaggggcccaaactaagacccagacccagaataagacccaaactcgaacacagaccgggatcagaatcaggacttagacccgaaactaaacccgaactcaaatcgatataaaaacctgggactcagacctgaacctggacccagacccagccccctaaccaacacccagagctcgatccggacctagaccgagattcggacccgaacccaaactcggaccaagactccaaccctgacctaacatcgaacccaaactcgaactcgaaatcagaattggaactggaaccggactaagaataggacaacgaccacgacaaggacccaaacctgaacccaaacccaaatgaaaacccagaaagagacccaaactcgaaccgcaacgaggacccaaaccgaaacctagactgggacccaaatcttgaccaaaactgggagctggacccagaatcatgatagggacttcggcaacggaactaggaccgggagctaagacccgatacaagactcggacatgaacctaggtaccagctcgtaactcggcacccaaaatggaaccagatcaggattcgaatttgaacccgaggcttggaccgaacccgtagtcggtgtctggatttgagacccagccccagacctgaacctagaccaggaccctgacctgaacccagacgaggaccgaacctagtccctgacccaaacttggaaccgaacccgtaccctatgacccgaaattggaaccgaaaccggacgtagatcaggaccgaggaacaggaccgaaccaggacttggacctggacctggaagcttaaccagacctcgacctagacctagaaccataacctgactaggactcagactcaaaccctg

SEQ ID NO: 93144 - DNA, 635 bp, Cannabis sativa
cgtatttatagaagctttaatttttatacttatcctaattgttggttcaatttatgcatggcgaaaaggaacatttgaatgatcttagttcttgaatattcatatgacaataataaaaaaaaaagattgaaacatttatgaatttcgttattgagtttcccttagttgatcgaacaacccaaaattcagttatttcaatttcattaagcgacctttcaacttggtcaagactctccaatttatggccgcttctctatggtaccagttgttgctttattgaatttgcttcattaataagtttacgacacatgtttgtggggccacactaaccctaactattattcgaagcaattcatgggcaactcctattgaagttgccctaacatttcacttctttataacgttattttatatactaaatatatgtttccaaatttgaaacaaatgtaattggaaatgaatttatattcaaactagattgtgtatacttattcatatttaaatacaataatttggcaatagttactataaagattcaaagtactaataattaaatattaaacaattattgtttgagaagcttaattattttggatataacacacttgaataaaggcactctaattaacattaag

SEQ ID NO: 93145 - DNA, 574 bp, Cannabis sativa
aatcaaactcaaactcaaacgaaactgaattcaaatacataaatgaaatacatgatatacatgatataatatatagttcaatgaaataatattacatgcaggataaaaataattgaaattaatttgaatgtatcacaaaatggaatcattcaactctacattccagtaatatcaataaacaaccaacaaattttaagtggaaattagactctatgccctttttatatcgttttcttttatttttactctcttttttaaattctatcatttttacctctttttttaaactaccaattttatctctgtcactttaagatactttctatgcgactcctttatgtcaggatattttacacagtacatataaaaaaaaagagatatttcaattaaataaaaattaaaagtaaatttaattaattgattaaaaaatagacatttttcaagttaccccaaattttaattgatcatatgatgattcttacgtactacattgcatgcacgttgatccaaaaacgctttatatataaatatataagctaattaggattttcaccccctgaactttgacatgtac

SEQ ID NO: 93146 - DNA, 678 bp, Cannabis sativa
  modified_base (586)..(587): a, c, t, g, unknown or other
cttctcatatcgaaatcacgatatcgcattagtggtgtagatatacaaactagatagtgacacaatcactatagagtagttagtaattccagaaaacattatggctaatctagtgatattttgagtcttagtactctttctcatatcgaaatcactaatcgatagtggtgcagatatacaaaactcaaaagtgagacaatcactatagtgtagttaatggctctgagaaacatagtcgttaatctagtgtatttagagtctcagtactccttctcatatcaaaatcacgatatcgcattagtggtggagatatacaaactcgatagtgacacaatcactacagcatagtaggggtgttcaacaaaatttataaaccgcccaacctgaataaaccgcccaaaccaaaccgaataaatcgacaaaaaatacaacgtgaaataatacaatgaaaatccaaatcgcccaatgaatatattgggtggtttataaattattccaaactgcccaatcaacccgaataaactgaattaaaccgattaatatatgtttttaattgacatatttaattccatttttggcatatttnnttgacaaaaatattttattattctttgtatatttcggctggcatttattgatatggtttccatatttgtgtaaatctaaacttggaaggaa

SEQ ID NO: 93147 - DNA, 849 bp, Cannabis sativa
ggtatatgtaatcaaacttgtctcgtgtatagaaacacaggttcatcaaactgtctcgatcctttatctttatttgtccacatatagagtttcttaccatattatggccaatagtatatcattaataataacagcggaagcaacaagatgagggataaacccacttgtcccataatttaaaaaaaaaaaaaaaaaaaccttgtctaatggcagcttaaaacttcaatatatgtagctttatttacttatcaacaataatagctaggagagacatacatattaaactagatattctcaataaaaccttcgagataatcatcttctcttatatgattaaagtccaagattatcaaatgcaatgtctcatattgtctcataatattaaaactcccttaaatagccttaaatgtaaatcattattcagtcacaacattcatgaggatattcagaataaaatgatttgatccattgaatctcagtatcttgagagttgctgggaaagactagtctcatatggtctctttagaaaacatctaacatggttgtgaatatggaattatgtttgtgattatattagtccatacaagattctaatatctctcccacttggacaaatataatcaacaaacaccatattaaactccatcatgcaataggcggttaaataaattatgtatgatatcatatcgataggatatgtatactacacataatttagtctaggagacatttaaatataataacaaccattaaaccaagctgcatgcagtacaacaattaagaccatatatcagtcttattgtgtacttgtcactttgaaaaacaatgtatgatatcatattgatagga

SEQ ID NO: 93148 - DNA, 899 bp, Cannabis sativa
caaccttattaaaaatacgagaaatccaactaacaacacaatcaccattatccaacaaaacacaaagcttagagagagaaaaatgtagattccagcacggagattttcctgcaatcaaagccttgaccatctaaacattatccgtgtagaaatctacacctccaaactgcagctccaaagccaaatcagcacaaaaaatcagaggctccatttcaccatgaaagacgccctgaaccacaactttcttcgcgccacaagccaagaccgaacctaggaatcgaaaaacaccattactcccgccccaacatcattcgccaaagtaaaatccacataatccctcactctgccaggcctaggaaggccacagcgcacctaaaactaagtcatcattaagaagacgtgtgtctaaataaatattagtcacaaatttaaaatttattgcgactcaacttattgataactaaaatgagtaatgatacgtgcacacatgaatcacgcagaaatataatacacttatatggtaagtcatttttaataagtgagacccaaatttataaataaaaataattagttgaagtggtttgccacttatatgtgtgttacatttgtgtgggcacatatcattattttttgttgagactaaaagtgatatttaattataaaaaatttattttgtgactaaaaataattgtaaataaccgatatataattatttttagtggtggtagctggtaatatttcttaagtataatatatatttgtaaatatatattttatccactagatatttgttggttaccaataaaaaatgtaaatttttaaattaaatctatattattacgaaagtattaatctttggttgctttgtaattttaatttagtatgtatacattttacat

SEQ ID NO: 93149 - DNA, 2428 bp, Cannabis sativa
tttatgatataatatggttgtatcattattttactctttagtgctttctttctattgtgctattatgcatagtgatattgcgttttccactgttgataaattttgttattttgttttatttctcttttctcattcataaaacaattattaggtcgtgtttagctttttttttttatatacgattagttatcgattctagataacagttaaatgttaaagagatctgtaaatttcataacattagggtattaaggtttggatgccaatagatgtaatatttgtgtgcctatgaagggtgatatatctatttatgatttaccattacttgtgtctattaatagggtaatatatctatgtaaccaataaaataatgatgtggagtaatttagaatttatattttatttattaataattaatacttaataaataaaaaacaaaggagtgctaattgcaagattataacctctatatttatggcagtatttgttatagacaatattttacttttcatgcggtgataaaatcacacatgattaataaagcagtaattcatagtcggcggcattcatagtcggcggcagtactttctcgaactaggatagctcattgtctaatcgaagggcatgttttgtcaaaccatgcgctatagaatttttatctcgagcagacaaaactgtccctgaaaatttagacaataaaactatagcgagatcaaacaacacccatcacattgaaaaacacattctcaatataaaaatttagcaaaactgaaaaacatcacaataccaaaccaaaaaatatagttatattagaataacattcttcaaaatgaaaattaaaaaattaaacttagaattaaacacaccacccataacactagctcaacaatactaaaactaaaaaaccaaacataatatctgagtaaaactagccaaaggtattaccctttggctagtaacaacaaactagcacccaaattggagactgttgaaaatcaatatcaaacagattataattaaaattaaacttatcgataaattctcttgtaagtgtaggccctccacaaagcaacctacaaaaacaaccaaaaataaaactgtattaccacacaatataatgaaaaaagataaagtcagagaatgatggtaaacaaattcatctttaaaggtaaggacttaaaagacttgaaatacttatatgttaaaagaaaaaaagttgttgaagtagagatcatgagcacaaaatggattacttctcttgccaattgactataatacaaaattaccctaaactaaaagggaacaagccacaaaaatagcacaaatgccataaaagacacataaactgaaaaatgcatcaaaatcattaaacttgtgtggacacataaatactcaaaacatctaataaactattagaatagctagtaaaaagtaacaaatcaaataataataatatatatatataaaaaaaaaaatacaaatgaagaaaataaaaccttgttatagacaatattattttgtaagtttttgaaaaattacagtataaaaaacaattagaagttttatgaatacgtgtggtaaattggaatattaaaaattttattttgatattgtaaattattcaatttttttaaaaaaatttaaaggttgtaatattataattataacatagattactataaaaaaatatgagaaatgctaaaggacatttatagtgcctaacaccttgtaatattactattggtacaatttaatattaagtctcacttattataatttaataaaaattttgagaactactaactaattataagacgttatgtgataaaggtgcgaaacatcttagtgtctcataacattactcaaaatatattctaacatttattttcggggttcataacacccttctaaaaaaatctaatttcttttaattaattgttaagaaaaaaattaaattttatattatagcaataacatattaactatgttaacataagaaaaaataatagaataattttttttttatatatatgcaatttaatacttattttattttatgggattttttaatttttacattttaaagtttttttttttttggtattttgtattttgtattttgaggaatatctacataataattttttttttttttgaaaggactacataataacttacatagcaatcagaaaagtttaaattgcaacccaaataataattatggagcaattcaaattgtaaaaaaaaaatagtatataaaataatttaataataataattaaaaaatactaaccatttataggatgctatttaatatttgtaatattgctctttttattaaaattaatggtttttaatatccaaatcaatagttaatagttaactttgcaacatacctaaataataaattaaaagagaaaactttgag

SEQ ID NO: 93150 - DNA, 576 bp, Cannabis sativa
aatatatattatgtgtatttttttaaggaagaaaaacaatgttattgtagaattttaccttatgatttttttttttacaaaaattcactttaactataaaaattattgcaaataacattctttcagttagattctcctcatttgtttaaatagtttattgatgtaattataatgtaacgctaatatggcgtaattcaagaacttttacttgatgaaagctatgaagggagtatggaggtccaaggtcccctcaatttttttttttatgcttttacctcttcacatatacttttttaccttcatttttgtttataaaaaaagtaaatacataattataaaaatatggatatatattcttagagttaatatttatgtctattacttataatttcaatttcaaataacttgttaaatttactcttatactgcaattatacgtgtcactcatgtcgcctatttattctaaaaagaattactatatttggagtgttgcgttattaagtttagggtgcgaaataccatctcaaaaaatgcattccaagtagcggctagcggtttttaatatattattaaatt

SEQ ID NO: 93151 - DNA, 859 bp, Cannabis sativa
ctcaagcttcgtcttctctatctctggtgatcctcttttccgttctgcacattgattccgcacaatggttacagaagaagatctaaccagaactcctgcaactattttcgatcttggcgattcctatactaatcaaagtcttcgaatcgctgctgccaagaatccattggaagaccctgccagtcctttctttcttcaccacggagataatcctggaaacgccctggtatctcaacctcttatagggtaagaaaactacgtcgcatggagcagggcgatgcaactcgcgatctctgtgaaaaacaagatcagatttctcgatggttccattcctaaaccccctatttctgaacagaatcttcataatgcttagtatcgtaataataacattgtcatatcttggattttaaattctgtttctaaagagatttcatctagtattctttatgatgaaagttcctcggctatatggaatgacttgaggatccgttttcaccagaaaaatggtcctcatatatacaatttaagaaaagatctaatgaatcttaagcaggaaaaccaaagcattagcatgtatttcactaggctcaaaactgtttgggaggagctaacaaattacagacctacatgtacatgcaacggttgtacatgtggaggagtcaagaagcttcaagatcatcatcacatggagtataccatgtcgttcttgatgagtctctcggattcgtactcccaagtctgagggagcatactcgtcatggaccctttacccgaagtcaatagggtgtttcatcttgttactcaagaagagcatcaaagaggaactggaactaactcgaacaatgccaattctgccatg

SEQ ID NO: 93152 - DNA, 519 bp, Cannabis sativa
ttaggcttaaaaatccctgccttagctctagtaatcatcgggtgagaaggagctgtaggcacgatttcttcagaaggatcaagggaaccagcattgacattaccaggtgagtgtcccgagtaaacaacatcactcagattatcagtagaaccacctggactgtgtgcatctgcaggtaactcatcgaagaaaccagatgaagtagcagaagttgagttaacccgagttacctggttttgatcattaggatctgtctgaactgtaacatcttctccagggacttgagacattgtatcagatgagttgcccttctctgaactgctggacacagactggtttagagactgaaacagaacagaccaagaaggcacactaacacatacagactgttcaggtctgtaattatttagaaagctggttttgaatggaaaatcctcctcattgaatataacattcctggatatatagattcttcccgtggaactaaggcatttgtaacctttatgagcatcactatat

SEQ ID NO: 93153 - DNA, 1963 bp, Cannabis sativa
ttaattatggttttattgtttagtttattttatatattgttcatagttttcatttttttttaaattccttcatagaaaatatggaaaataataaacactctacgcgatcaaacaccaattttgcttcaatggaagaatgcaccaattttgcctagagaacatacgaaggaaagaattttccaaatatttttatacaggattatgtattatctaaaagcaaaatatgaattacacaaataatcaaattacaaaagttcaaaaatgtaaagacaattttgtcctttaaattttgacaagtactaaattatgctccttgaacttttaagtctgaaatattgagattattagatttaaagacttttatttaatttcattcaataattcaaggaaaatttttaacggtcttaacagttaagggggtatgatatggtacttgtcaaagttcgagagacaaaaatcttaattggtcaaatgtaaataatcttatcaatgttttgaatccataattagaatgttaattatagcaaatgactttaaatcacagcactatgtaagtaaacgtccttattttaaaacttgtagagaaatgaccattttatactatttattatttatattattttttggtacataaaaaaaatcaataattttttttatatattttttaaaattagaaacaaattacctaaagattatggtatatttatattagttttgtaaaaatattttttattttaaagttatgtcaatttcgctaatttttatgagttgttgtaggttgttggtatatagattttattgtacaatatatttttgttttgttgtataatatattattattcttagatggtatttattttttattttgctatgtataataatggtataattttgttagcataataaaaatattttaatgcatgtatataattttattggcatgctacatatatttaattatatttttatatattttaattgcatgatatattatttattttaaataatatttaattagtttctattttattatatacaacggtggtatataatattgatgccatggtatatattttaattgtggtacataattttgttagtatagtatacatatatatatttgtaatatacatatatatatatttattattattattgttagtatatatgttttggtaaatggtatatgtattttttgttatacggtatatcattttttaaaataatatttaagttttactttctattgtacttttgttgacatgatataattgtattagcatgctatatatttttatttttatttaatattatatatatttctactgcaaggtatatgttttttgatatataatatataaatcttattgtaagtatggtataattattttatggtggtacataatttttttttaaatggtatatacaattttttttaataatattatattattttgtttcatttttcattgtaggtatatatgttttgttgtatggtgtatggtttttgttgtgtatactatatcatttatttaagataatatttaatttttattttattatatatgatgactatgtataaattttttggtataatagtggtatatataattttgttagcacaatatttaaatttttgaatattaatttagtattgttataatttctttgtgatttataattttattactacagtatattaatttttagtaatacgatataacaaatactgttatatacatttaatgatttaatatatttatttatttttattataatatattaatatgtaatattaaaaaaattatacaacttaatttaattatcatatattcttttaagaaataatatgtaataaatatatttttataatttttattaagtaaattaagaaaaggaacatatactaatttagtttctaaatgctcaatcctcacctacctaaaacaacaaaataatcatt

SEQ ID NO: 93154 - DNA, 800 bp, Cannabis sativa
cttaacttgagtagcaagtataaaagggtcatctttgtaccttcaccactcacgttgatactagtgacattattctgagtgattgttttcttcctacatggatcagtattaaaacatttacactaaaataatgtcactgaatacacaccagtaaaagttaccatcaatacatcttttagcgtcccataataattaaatccttctattcccaccacagagactctactattttgtgtggtatgcttcttatcacgttcagctaccataaaacaaataccattcactacaacatcttcataatatgctactaagtgatctgattcagatgctaaagctagaaacccttcatcattctccaatgatccaagcttgtgtaagtcatatatcgaaatgaacaaaattatattagaatgaataataagtaatcatgatgataatgaatgtttatgagagtctcatatcaccttcttatgaaaccatcgctgaaaatatttttttttgtgtagaacgttatgatctccatctggatatttaagctttatctcttctaagtgttcactgtaattcaaatgatatttctatgttatataagactatttagaatgagaataaattttaattattaaaaaaggaacttgctctaaatatagtttaatttcatgtgaattatgaaccacttagccttttcacgagtcttacggtctagaggcatgatattttctattttaaggggatcacattgtgagtgaaagacggtaagaattctagaatcacatttatcttcattgcgatcaagtcgg

SEQ ID NO: 93155 - DNA, 536 bp, Cannabis sativa
gagtcctcatgtcatactctaattaccaggtggcttcttcaaccttactgttcctccagagcaccttaactagaggaatggtcttgttttgaagaaccttttcttttttgtctagggtctatacatgttgctcttcataggataagtctgattgcagttcaggggcttcataactcaagatatgagtcgggtccgaaacatatttcctcatcatagaatatgaaatacatcatgaacagccgacaatgctgttggtaaggccagcccataggctacctgcccgaccttctcaagtatctaaaatggcccaatgaacctagggctcaacttaccctttttcccgaagcgcctaataccctttattggtgaaccccgcaggaaaacatgttcccctgcctgaaatgtgacatctctgcgcttcggatcagcataacttttctacatactttgagaagcaaccattcgagtcttgatcttaccaataactatattgatcctttgaactcattctggacccaagtacttcctttctccag

SEQ ID NO: 93156 - DNA, 631 bp, Cannabis sativa
ataattttacaaccaaaaattttttattataaaaatacgcttgtaaaattttaaaattacaaaaataaattttgatcaaataaaaaaaattaaaaaacactaaaaaatcaacctcacaataactatataaataaaactataaaaaaaaaaccaatcaaaaaattcaacctcattatatataaactatgtaaaaaaataatttaattaattgtttttgtaattttttttaaaattttttctaatatatataattaggaaataaaaaactaccataatgatacttaatttttttttttatattcaattcttaattagtgcttcttgaatatatatatgattgagaacattgatttataaaatattttatcatcatatccacaccagatccttccagaagctaaaattatatgtaacatataaccaaaatcaataggatttaattttgttaataaaatataattaataactttatgtatatattttaaaaaattataatatgatgttataatcaataaatagtcgttaaatcataatatgtcagtactgtaattaatattaaataataataaatatcattatcatatacactttttgatttaataaaaaatagtattaattaattaactctact

SEQ ID NO: 93157 - DNA, 545 bp, Cannabis sativa
ctctatttgctattatatataataaatatcgtgtagtttttaaagctgcaaaaatcaatgacaaatttttgtataatagcaaataatttatatatacctagctagtagccatttgagaaataaaagttacttatgtgttaatattattatttgtaattaagtattgtgttttatataatttaatataatacttttagagattattattagctaatcgcaaaacgacacaaaaaatgttaaagtttataattataggttattaagctagctagctattttaattttgaaaatttttgtagtagatttttaaatggtcgttttgttataagatttttttatttattttagtatcttaaaaattattttagttaaatttttttatgatagctatattaggaaaacttgcaaatttttataaaattacgaataatttacaagaacaaaaataaaatttaaacaagatgtatataagaaaagcacacgcatacaatatctaaattttgttttgataaaaagtgggtatgttgatattcttgagttagccc

SEQ ID NO: 93158 - DNA, 1123 bp, Cannabis sativa
gggtttcgaggcttgggggttttgggtttcggggttttaggtcttgggatttttggtcgagagattggggagaggaggaggtccgttggtggctccgacactgcacaaggggtttgggatgcgccgacgttagggttggctagggtttgctatggtttttaagtgaagaagaagaagaagaaaagaaaaaggaaagggaaaaaaagaaagaaaaaaaataaaaaaataacttttaaatttttataatttttaaattattttttcttaaaaaaaaaaagaaaaaggaaaaaaaatattttgatttttttttctgattctttaatttttttaaaatatttataattattttttaaaactaatattacgcggaccactaaaaatttgccacgtgcacaagtgtgtacacgtggacagtccaccgtgacacttaactgtgatttttggacggaggtgtacatagcaaaacggaaccagggtttaggtagttatgccgccaaaatttcggtttttgtagttaattgttacaaaccgtaaagttcaggtagtttagccgccaatatcttttttttattctatttttatgtttagttgcctatgaaagtatcaaaatatgttttttactagtttagtagaataactattcaatttaaaaatgagaaaagaaaagtcatatgcttactatcgtatttatattaagagtaatttgcgctaaaaatatctaagtttaactctcaattacagataaatacataagtttaattaatttttagcagtaataatatctaagttataattctgaaacttctataggtacatgaatgttaagtattaagtagattgctacgtggtcatccctgattggtctaagtcattaaatttttatttattttttttttttttttgaaaagtagtttaattgttattaaagtaataattttaatgttttggtgtagtgttaatactaggagatgaacctttcatttcttaacttgacacgacactttatatactattttaatgcattttttttattagtttatattttatatatatatatatttatatactattattaataattttttttttattttggggatgagcttaaggagcacaaggaaga

SEQ ID NO: 93159 - DNA, 612 bp, Cannabis sativa
  modified_base (245)..(256): a, c, t, g, unknown or other
aagttgagagaattttgctatagtttctctacactaaaaattacacacaaataatagaaatgagctcctatttatagagtctcaaaaaggattaagatgtaaaataaaaatagttttgggttacaaagtaataataacaacaataataataaaattaataacaataataataataaaaaaggatggcagcttttgatttctgaagctatggttccactctaatcattatgtattattattattannnnnnnnnnnnttattattattattattgtgttgttgattgataaaagcttcggtgatttaatgtttcaattaattgacttttatgcaggtatgggagcatgggagctagcgtgtggcagggctgcaattgggaagagaatatttgggagcaggtgagccaataaggatgcgccatgtggcgcacgagttggaagggtaattggtgccaggcaggcgcttatgtgggagcagcgagaatgaatgccgaggtgccaattggcgctgacgaggcagtggtggcccacggctaactgggctgctagagagagtggcttgggcctgggctgctcctttttgggcttcttctttccttctttacaattttgc

SEQ ID NO: 93160 - DNA, 578 bp, Cannabis sativa
tcatcttaacgattttatatctttgttaattatttatttattaatttgttaattaagatagatttactactggtataaatacatatttattataattatttattatgatggattttgtatcaaataaagtcaaattttatttctttttacaaataataatatgagtaatgaatgttagttttgtcaaaggaaaaattaaaataattaatcttaatttgacacgtttggtctaaattaaccaattcattctattattgaagttcttcattaatcattacacacatagattgataaagagacaaatttaacagaaatattaaagactattaaatagtattttaagtttattttactatttagtttatattttcaaagtaaatattgagctttgtttggagggaaatactgaacttttttaagtttaaatcaattctaggaaatttgagtataatcaattctaggattataggtttcaaatttctaagtatatacttagaaatttgaaacctataatcctttcaacaagaaaaatggtataagacacttatgatcagtgtataatatcgttattagtacaa

SEQ ID NO: 93161 - DNA, 520 bp, Cannabis sativa
tattctagaaggctcactggtgttataatcctcatctcgaactagacattcagagggatagcatatgaatttcccctcagcaacagacctaatgcgacatccctgctcattcctaattttgcattaccttaaaacgtccccaacataatgtccaatggacctaattttgaactctattaattcagcctccaaagtgacagcagtattctgaggggtcttggatttacaagccttttgagacattatctcaaaatctaagtcacctagtgaaaaagaaatagtgaccaaaggtaaaaatatgggccttgctaagggtatattaactaaattcgagggtttcggccaagcaacttctcgcaaacactgatgcctaccctacataacttcttgtaaaaatttcctataacggcaagaggtttcatattgactagatttaacgaggcgatctctaattttctcatcatttatttcaagaatggtttgaggtcttccaattttaggcttaaattctatggcagaa

SEQ ID NO: 93162 - DNA, 814 bp, Cannabis sativa
tgcacttttgaagagattggactgcggtttgtgcaacgcatggtggcttcgctcttttcctaatgttaaaatgtcagttcttgattggtgtaattcttatcataaagctctgttggtgggttactggaattcaaaaatcgataataagtgtggtatgattaaaagaaatactagatttcactttgaaatggaaaaaattaatataatttaagtacttaatgttataaacttaataagttatcaaaaaataaattaagtacttaactgatgcaaacataatattttagatattttcgttgttaaaaaaataatttgagtacttaaatattacaaacgtaataatttaagtattttcgccacaaatatcccaatatattataaatattttttcatataaaaaattatgagattagcactcttaaagtacttcctaaatgatttcttttatcttattctttattttgttataatttagtttaatttttgaaatgttatcttattttgtatccataaaaataaaatttaagtttaccattttttttttaaaaaaaaaaatcttatgtgtttagtagaaagaagagagagtatgatgaatagagaaattggaaaagatggaaaggagatgggaataagagaataattgttctcctttgtgttgtttggtattaggtataaagtgagaatgatggaaaaagaattaattaataaagctacaatattatctttttgaatatcaatatttattacattttaaataataattttgtaatttgcacaatttattttgtttttttctcctctcattttctctcta

SEQ ID NO: 93163 - DNA, 918 bp, Cannabis sativa
atcagcgtcggtagcgaattttgcgaaaaccgacgctgaaagggcttaaaaaccgcctttaaagggtgtttttgtagtagtggtgttgattccattattgaacagaataagagaacttttccaaatacttgaagtttgggtcaaagtaaaaagtttcgtggaaatcagggcaaagggagacgtcagacttactcctaccttgagtatccgccctgtaaaaagcatcaccctggggtgtgtaatcggagagcttgttttcagtgtggatgagttggacacctcaagaaaaattgccctcagttgaaaaagtaggaacctaagctggaagccaagtctactccggcacgcgtctttgctatcacccaagctaacgctgcaaccggtccttcggtagttataggccaacttcttatcaacggctacacttatactattttatttgattttggagctacacactcttatgttgcatcaaggaaacttagtcagttgggtatgcctaatgatgtctttgaaatggggtttggaaccctgctatataacggggagttgataatctctagaaaatggattagatccgtactaatcagaatgaaaggcaaagaactaagtgctgacctagtggagttacctttggctaagtttgatatcatgctcggaatggatgttctgtccaaatattctgctagcattgactgcaaacataaaatggtaatttttcaactggagaacgaggaaccatttgtttatgctggatcagttcaaggttctcttgtcccaagaattacatctttgaaggctagggatttactacgcagtggatgggtaggatttctagcagttgtgattgattttggtaggcccgtgatactcggacgcgaggaggtcaaagtcgttaaggaattcctggatgtgttt

SEQ ID NO: 93164 - DNA, 569 bp, Cannabis sativa
tttttttttgtttcatattttctttttttgtttctgtttgttagtgaaagattaagaacattagttcatctgatgaggagaggcaaaagttgcaattggaagacttatttttagattaatctattgatgatcgtgataccactaagcagacattcgagagtggttcatcttctaaaaaaattgattcagaggacatagaaatgttaaaatctaagttggaattggtcatttccagtcaagaatccttggctgaagattttatatatttgaggtgttttgttgaccttaatttcaagcctatcatgactgtgatcaaagatattcaagaaaaagttaatgtcatttatgatagacctactattgaggtatttattttcacaatttttttttcatattttttctcatgttattgttagttgttttcctgttttatttcaattgcaatactgtttttgaaccaaggtaagtcatctaaagaatttgtcacccaagattctgatgatgatgattaggggtgttcattggatcacatccaatgtttttaaacctatccaaatccgatccaatta

SEQ ID NO: 93165 - DNA, 512 bp, Cannabis sativa
taaaatatagagatatgggagatataacactgaatcttctaatggtgtcttatgctcctagccttccttttatgctctaaattggtctatattttcgaacgaaatcaaagcttgcctttctgccctctttaaataatgaaaaaaaaaatcaagtttctcaaaatccacaaggctacaaccttgcttaaaagtcgcgaccttccaagcaagtttctacttttaaatttcttcgctaattttggttttctagtttctattttcttctagcaaccaaagcaatgatgcagccttccttgctaagttgcggccttgataagcatagtttttttcttccgttttcactttatttttggaaagtgcccattcttcactttaaaccacgatttttttgaattgaaaatacaatctttgacccatttgaggtagcaaaaaatccaactaagcttctaaaaattttctttcttctcaaaattatccaattttatcttaaaaatacttgaagaacacccaaa

SEQ ID NO: 93166 - DNA, 765 bp, Cannabis sativa
ctttaacttcattctggataatctcacttctaagttgcagggttggaaagcgaagaccttgtttaaggcagggcaggctacccttatcaaatttatgggcctgtccttgtatgctatgcaaacaaccaaactctctaatcgtatcgtcaccaaaattgatggtttggtgcgtaatttctggtggtactttgaaaaaggcaaccatgggcttcacctaaaagcttgggataagctttgcccacccacatctcttgggggccttggttttcagaaaactagagagatgaaccaggcttttctggcgaaatgggggtggaacattcttaatggatctcagtctctgtgttgccagattttggcagctaaataccttaaagggaagcatttccttaactatagctataaagattcagattcttggttttggaaaaatattgttaaagccaagtcaatattaaggaagggtgcctataaattggtgtcagatggtatgaatactagtatctagggggaaccttggataccgcataccaaagatttttgttcgaaaccaagtggatcttttgatactaattttagcagggtggcagatcttttttcaattagtggtggttgggatatccataagttgaattgcttatttgatcgagagacgatttctgcaatcttaaaaggaggtaacccctctggctagggtaatgataaatggatttggactcttgaaaataatggtcatttcttgtgcaaatcagcctacctatctca

SEQ ID NO: 93167 - DNA, 804 bp, Cannabis sativa
atccgatccgatcacaattggatatccaatgtttggtggtcggttataattggatcgatcggttctcattggattggttcgatttatgcacacccctacttattctatttcacatgtaacttttctttttgccaattctctttgatataagctcatttatcaagtgcatgctcactttatatattatacatatgtcgtaaaattattttatagtctccatacaaattaagttgatctaacagttgaaagtcaaagtacatcaaatcgaacctatggtctccataaaaattgagttgatttaacggttaaaaatcaaagtacaacaaaccgagtctatagtacgtttcattgtaatcaaagtacataaaaatgatttagtttttggcaaacaattgtgaattcttatatcttgttattgtggtattttttggtgttttcaggtatttcaattttataagctgataccttaacacttttagttggacttaattgaactctttcgtgcagaattccaattaaagagatttgttcagattcgttgtctttggtcacagctattaacaaaggaagagtgttctttaataagatgggtgtactgcttgaagatgtcatagttttattgtctaaactttcgggggcaattttgtcccatatggcttgggataagagttctgccgcgtatgatttagcaaagcatgtcattcggttagacaatgaactatcttaattcgagtaagtgctgtcgccgattgtggattactgttttgttaatcattaatacataaagaaaaaatgaatgaaaga

SEQ ID NO: 93168 - DNA, 629 bp, Cannabis sativa
aaaggtcatttattatattatttttaaaatagaactttaatcttcagtaaaaattgatatagggcgatttgctactatttctcaaaaacaatactaaatttttgctatggagaagaggctaaagtactaggcttctctattaatcacattgatgtcaatattcatagccatgacaaaccagtgtggcgactaactggttgctatggagaaccaaaccgcaacaaccgtgacaagacttggaatttattgagggagttagctggaaaatacgatcttccttggtgcgtcattggtgacttaaacaatgtggcaaatcaagatgataaaagaggaggaaattcttaccccgagtggcttattaatggtttcaatggtgcacttgctgaatgtaatttatatgattttgatctcactggttatccttacacttgggagaagggtagaggcacacctaattggatagaaatccgtcttgacagagcccttatgaaccaaagatggatggatttatttacttcagcaaaactctttaatttggaatggtccagctctgatcattgcccgatactgctggtcccttttactgaagattatactgctgcaaagaaaagcttcaggttcgagaatgc

SEQ ID NO: 93169 - DNA, 961 bp, Cannabis sativa
  modified_base (210)..(210): a, c, t, g, unknown or other
  modified_base (767)..(770): a, c, t, g, unknown or other
ttatatagatattttatataaagaaattttaatttaaatttaaaatacttaaaatattatagatatttttaatcataattttaaatttattggtttatctttgaattaaaataaaaaaaaattatgtaaatgttttatatgaagaaatttaaatttaaaatattataaatattataatattttaaccatatttttaactttattattatntattttatattttaaattgaaatatttgtactaaaaatttgattactttccattttagttatggtaaaccgattaacacaccatatttttcgaaaagtttgagaataaaaaacctttatatcaaatttacgaatacagtttatatataagcacactcaaatttgattatatgagtttttgttaagaatatagtaaattacaatatatacattatcagatacgttacctaattaagaaaattttaaaaattttaaaaatatgtatatataattatatccaaatgacactccaatgtagcaataactattttttttttccttaaagatcaaaatctcaaactccatttgaaaattaaaaaaaaaatacattacctaatttaaaaaaattaaacatacatgtattgcacttaatattacctaattgaacctaattaaaaaaaaattaattatacgtgtattgcacgtaacatcaacctaggtatcttttacaatacgtttcattaaaagtatatatatatatgtatttctttttgatagaaatatatatatttatatatnnnnatatatatatatatatgcacaaattatgaaatattgtgtgtttctttttaaacagaacgtttaagacattattagagtaaacattttattacttggcaaacaacatattatatgcattagaaaatacatttttataaagaatggtagaatattcttcatccaagaattaattatttacatgtattgaatat

SEQ ID NO: 93170 - DNA, 528 bp, Cannabis sativa
tatatatatataaatatatgaaatcttacactatgttgaatgatgcagtgtgacgtaattaagcatttgtacaagagtaatttcttacaccttcaaagcacaatttctttttgacattttttagtccaaagaatcattttacgatagtacgaattaacaaaatttgctctcagcttattctaatgaagggattttctcaataggtttaaaggtttcaaatcactatatatctatattgttaaaggtttatatatagagcatgatttgaatattaaaagttgatattgtttgtagatattgtctcacatgaaataaattgtagaatattgatcaaatcatgaatatataaaaacatagactattcgattaccaattggttttaaaatagaacccatattcttaacaagtagagtagtaatattaaggtaccaaaaatatcaaaaaccattccatctttaacttaattttttttaatttcttcctttttctatataagctttttttttttttttttattttaagcgttta

SEQ ID NO: 93171 - DNA, 518 bp, Cannabis sativa
gatattctttcccattattactatcaataattgcaccaccacccatttttaattgatttgatcgcttcaacttaattagatttatttttaatgactacggattaatgaattattatgaaactaagtttattaaaatatatgagagaaagctctagagagaaacagtatatagtaggaatggagtggattaggttttgctttatgtatatatatatagagagtcagtgattgagtctatcttaccccaaaaataatagtattattaatcatacgaaaatacatatattaattttattaaaatattttttgcagggcttatcatggcatgcatttattattattactacttttgttaccatcttcttcatcctaatttctattattaggacagtattattgttgtagctatttgcgtatttttatatgtatatagtaatagcaggtctttattttttatatatatatctatatatctataaaggagaagtatgaggcggtcacatgacattctaaaatca

SEQ ID NO: 93172 - DNA, 1242 bp, Cannabis sativa
  modified_base (1211)..(1216): a, c, t, g, unknown or other
cctcctgggcctcttagaagactcggtctcaaccatcttacccttctgcttgcgctcgagggcagccgcaatctcgccctcatcctcctcgacttccccttcctcgtctatcaagactattgtgcctaaaggggcactagacgaggacctcccaggggtcaccagttgggatgaggtcggaggtagagaagcgtccggactataggcctcagcgagggtcgccaggagatcttccattggcttggctgctgcaacaaagaaataaataaagtgttaaaataactatgagaaggcatgcgcccaacaacaaagcgataaagctaatcctaccctgactctctaattcaaccctaacaaagtcttgaactacagtgctggcttcgtcatccccaagaaatctgtctgaggggagaaaccagctggaagacaagtgggctgaatgatccagggaaatgggtgtaggaggtccagagcccatctgggatcgacccaaaaaatggaccaagtgggaaaaatagaagtctttggcatgatccccccaccgggtggaaggcatcctaaacttataaaggcgctcatcaaatcctatgggcctacattgggtatactctcggacagaggggacatggtgaattattaaatgagacttaccggaacctgaagtactggcatctggagcaccagtgttaggaaccgggaccgaaggcttaggcctggaaggcctccgatccgtgcccgcttccaggcgaagggtcctcccagctgcagcctgggccttgatataagctagctcctgctccctcctaaagatgtatttctggtaccggtcctccgtcgaggtgattatatccacccggagagccctttccgtagcatgagtcctgacgtttgggcagatgaccttggaaaggttaaagtcatcgaccgactgattctcggatatcagcttggccttctgacaattgtccgtcgtgaccaagtccccaacgttgagggcctttttgtcgtaagtagagaaagtcttggcccgcttgaggaacaattgagtaggtgcggtcctcaggtagggaaggatcttgaccactctgtaagaagctgcgggaagtccatggcttggaagccaaaggaaaagaagaagcggtggcggtactccttgatatgtttttaaaaattataagggactgggccctcattcaaaggatgggaccgannnnnntaaaaaccatctttaaacttgtcccc

SEQ ID NO: 93173 - DNA, 922 bp, Cannabis sativa
  modified_base (525)..(525): a, c, t, g, unknown or other
ttgtagttcctggagactttgcttttgcaaatacaacatctgcagcgataggctttgaatctgatccagcaaccttcaaatttacagcatcaagatagtttggaacactagattttacaaatttagtgattccagaacttccaatatcatctgatccaatgccagcaaaacctctttgacctgcattctgagctttttcaaaaatagaagatccaggattaagcatttggacatttttcttgaaatttccaagttccttctttaaaagagtaatttttttttcatctttaatacgaaaaaaattagtctcatcataatcttttatttttaattcaaaaatttcaatttgatgagaccgtttttttattcattttagtcaatactctattttcataattaacttgtatctactttttatacatgactttgtatgattcagcaagagtctcttcacaaatttcaaaatcattagagtcaaattcttctttttcagtggtattattcaaacataccagtctggctttnacgtgtgaatcacacaacacattagtcataacaaaagttagagcaacattctcagaatcttcttcatcactctcagtttcatcatcactccaagtgtcattaaaacttttcttattctttttcaaagtagtgttaacacactcagattaaatatgcccaaatccttcacatttcatgcactgaattccctttttattagtcatagagggtttaacagatttatttccttttaaaaacttcgagttatttttcttattacccatatttttcatatatttttgaaaattcttggttaataaagcaatttcatcatcacattcattattagagcttttaagttcaacaaattttaaagcgatacttttacctttactagcaatggatttgggtttgtact

SEQ ID NO: 93174 - DNA, 564 bp, Cannabis sativa
tccagcgttgaagagcagccccacgctccctaattctttccttaagatccgtagcctgttcaattggatctttcttaagccaagccgattgcactacctccatacactcttcgtcctccgcccaagcattctcaaaatggaatctcgatcgccatctcaccgtgccttgcattttggatagtggatcctttcttgtaactagaatcgggcaatggttcgagttaacgcgatcaagatgtttgacaattgcgtgtgggaacatctcaaaccagtccgaatttccacaaacccgatctaacctttcaaaaatcagattgttctttcgcccattgcaccatgtaaattcacttccttcaaactcaatctcccttaagtggcagtaatcaagagccttcctaaaattactaatgagatagcttggtttagatgaacctcccattttttcatgttggctcaagatttcattaaagtcgcctccaattacccacggcccaacatacatcctgctcagtctcctcagtagcttccacgaattagttctttgagtcgggtccggatcgccat

SEQ ID NO: 93175 - DNA, 506 bp, Cannabis sativa
  modified_base (420)..(442): a, c, t, g, unknown or other
gatcagaagatgaaaattcaagattattaagagatacctcattataaatatccaaccagctttgtgtaaccacagccctgtcgagacgaatttcaacagcacgtgaagaacctctgcttcgttcccaggtgaacgggtagcccctgagatccaagtcgataagattacagtcacgaacagcagaattgaaaccagtaatcaaggaggaggggtatggccggcctcctttcttgtcttcattgctcagaatattgttaaaatcacctattatgcaccagggtaaagttgattcagccgccaagtctcgaagtagagtccatgtccgatgcctgagatttcggtttggctccccatacaatcctgacagacgccaaggttccataccaggaagatgaacttgttggtattatatttatccannnnnnnnnnnnnnnnnnnnnnnatgttgatttaacaacctaatattgaacttctaaaacgatgaactaaacacataaaagttaaga

SEQ ID NO: 93176 - DNA, 891 bp, Cannabis sativa
actagtccttgtgtgtggtgaaagattcagaagactacggtgtgagtttttcgtcatccaagaatacaacatacgaaaataaacaaggataccctcataggcttcaaaaattgaattttctttttgtttattttttttagatttaatatatgtactggtgatcttgaggatgtgatacgatgataatgaggcaatattattctgttgtgtacttaatttaatactataaaactaacaattggtggcgaaccgattccataatatatattaaatgttgtgttgttttatacaattatatatatgtatgatatgtatatgaatgcatggttatgataatattattgtacgtgagatggtgaattgttaaatatatggtaaaaattggatatagattttgcttttatttttttcaaaaacattgtaagctactattgaggcatacaaatttttatgtaaatttttttgtacataaaaatattacgatgtaatactcatcgcatgtgaattcggtttttattaagtaaaattgaaaataataataaaaaaatccatttttgcatgtaattttattgttttcatactaaaattcacaattgaaaaccttttgcaactttcttccccttcaacatcagaaagctttcttctcctttctttgatgacaatttaggtgcaaattagtcttctttttcggaaactttcaactgttaaccacttccgaaacatctcactctatttctagtggtacaagggcagggctggctctgggcataagagagctaggcccgcgcttagggctcacttattttaggggcccaaatcaaaaaagggaattttttataaatatggaatttcttaaaagcattttgaaaaatatggacatttaatgaaaaa

SEQ ID NO: 93177 - DNA, 955 bp, Cannabis sativa
tattaacttaagaaaagagaagaagagaatgctgaaaatcctctgacgaatgcctccagtattgaactcggtctctaaaattcgtactcctttttctgcccttaattcccttctaattggttcccgaaatcaattgaaatttactccttatatagtcaatgagggactaaaaagatagaaaaaaagctcatgctgaaaatcctattcagctttgaattaggaagccacactaagcccacgtagagaaaaaatctttttctgctttggaataggggcggcccgtgtgcatttttcacacgtgggggactgatttccaatatgttggccgcaacatgcccattcttgggccacgccccgtgtgttccatgcccacatgttcaacgcgtacaatctttttttctaggtacgatctcaatttttcacagtgatattttatgcgtcttttatcttctttttttttcatctttttcccttgatatttttctaatcttctattttaaatatgcaaaaataaaagataacaagcgtaaaattgctccaaacacgagtacaactaaattaaaaatatactaaaattaatattaaaaacaacctaacactattcaggttaaaatgcagataacaaaaccatatttgcttctctagtcataagttaaatacaaaaaaaaatgggagtaagctattaccaaaataatagggttgaacctctataacatatcgtttcttagttttgcttactattgattatactatttcaatgtcattgatttcttctcgctttcaagactcagtgttgttgcccaatagcgaggtcaacacaatgtttgagccatttgcactaagacggaccagaaaactgataccacagttggaatgtcaaccttggcgttgggtgaaaatctaggcacctgggttaacttctggggtgttgtttcgtctctctctctctctctct

SEQ ID NO: 93178 - DNA, 1395 bp, Cannabis sativa
aagctttctaattaatttctatttgttaaagcccccagcttgacatttttttccctttttttcttttctttttttttttaaaggttactatagtattaaaagtccaaaaagttatttaaactttctcattgatcacctttattttataagttggaatcggtaataaataatcatatatataagccattctttcaactaaatcaactacttgatagttacattgtatatatataatctccgccaaagaatccacaaaaaaactaaaaaatttatagagcataatctgcacgaggattcctcttagtaacatctttttatatattaatttttatatacttaatttttttttttttaatttctttaaatttaatctttttgcaaatttaaaatattacttaaatattatctaattctaactaaattaatcaatttactttgaaattttactattatatatatggtatatataatgattatataattaatatttaacagtaatatttaattagtgtattaaatttaaaaaaaaaataaacttcaaacaaattttaccacaaaaggaaataaaaaaattaaatatataaaattaaaacatacaaaaatttcgctcaatctgcaccgcccaactttttggtcaaaagacattgaaatttgatactcattttaaagcagtacttgcttatatatacataaacaaaataaaagctatcatgaccaaaaacacttttttttaattgttcatgggaaaatcaaaattaaattcccaaatttgtgagtccaatgttttctttttgtcataataatattcaatgctgaaaacgtgatgagagtttgggtggggtgtaggtgccagaatgtgtgttagacaagagatcagcagcctataacaaaggcagagtgttcatccatggagctaatgagatcacagcaaaagcatataaaaaacagtttcaaatggacttggctgggttcctcacatcaagatcaaaggagatgaagagaggtgggtccatgttccttgtctgcttagggaggacctcactggaccccacagaccaaggtggggctggcctactttttgggacccactttcaggatgcttgggatgatcttatccaagaggtaattattatatcgaaaacattctgattgtatcattgtgtgtcaacagtgtcttattaccattttctcttctggcagaccaaaaacctataatatgtataacaaaactgatgaaaaaataaaagcaagagaaaaaaggggagggggagggggggaaaatgattaggtgttgttggttttacaaaaacttattatgaaattctactggtcatgattgaaattgattgattctagccattagatacactctctaaaatgaatctagcccttcat

SEQ ID NO: 93179 - DNA, 778 bp, Cannabis sativa
aaaataaataataaaaatttatatttttctttttttttctcttttctttttctactttttgaagaaaggggtctcgcaatcgaaagaagaagaagaagaagaaaataaaggaagaaagatggggggcggggggaaggaaggaacaacattttttgtaatttatttttatttttaaagtaatttttattatataaatagttaaatcactaaaaatttaccacagctactgaaggttccagaataaaaaaaaaaacacaagaatgaaaggaacaaaattttttgtaatttatttttaaatttttaaagtaatttttattatatttaaatagttaaactactacaaattggccatgtatacatcagggtatattgtggcacataacaaagttttttgaacgaaaggcagagaggttgtacaagaaaaaaaaaaaggaaaggaaggaacaaaattgtttgtaatttatttttatttttaaattttaaagtaacttttattatattcaaatagttaaactactaaaaatttgtcacgtgtacatcagttactaaggttccaaaagaaggaaaaaaaatgaaaaagaatggaacacaatttttttgtaatttatttttatttttaatttttaaagtaatttttatgtatttaaatagttaagccactacaaatttgtcacgtgtacatcagggtttactgtggcacataacaaagctttttaaacgaaagggagaagtgaggtttggagggttttattataaaagatttatgtagttaaatgtc

SEQ ID NO: 93180 - DNA, 670 bp, Cannabis sativa
gagagagctttggcttctgtgatcagcggcttaaggagttgtacgcgatgctctcgaaaattcaaagttctgctgtgacgtctacggctcttaatgaggaagctgccattcaactagaaattgtggagatggaggaaaaaatggagaggatttggaaacaaaaatctcgtgaactctgggttaaacagggggattataactcaaaatttttccactctgccattattattcaaaggagaaggaaccatatttgggctataaattactatgacgatcactggctccgtagtcgcaaaaaaattggaagctatttcaccactaacttcaaaaaactcttcgaaagatctaatcctgctattggaaacgagttttacgagttgtttgagcacaaggtttcagctctggaaaacgaagccttatgcaagattcctactgatgctgaagtcaagaacgcggtgtggaatttgcatcccttaaaaagcccagggcctgatggtttccctggaatattctaccgtacttattggaacatagttggcaaagatgtgtgcaccatggttcaagatttcttcaaatcgggaaattttgtcaaggatcttaaccacacctttctgtgtctgataccgaagagagagagcccttcaactttcgagcaattccggcccatcag

SEQ ID NO: 93181 - DNA, 650 bp, Cannabis sativa
tacatattgtctcatcacaattgtatacttttgataattagataaataaaattgcttatgatttagaaatttagggaggaagacttagttgatagtattgtactatcaaattgcggtaaaaactatggatcaatcagatacgcatatataattattatatattattatagtgttctatattatatacaaattgatcttgggttaatttttttttttctaacatgtagtatcagatttccaattgtatataatttaggacctataatttgtataactattaatatatatatatgttaattttctctaattacatattaatttcgttattattttatgttgaattttttgttgtttgatcttaaaattttagtagttttattctttgttaaatttatgttaatatattacatgcttaaaattattagaattttatgattaaactcttagagtttatgtgttttaattatgaaatccaatttgagcttttatattatattcattattgactaaaattgattatgaatatctctttaataattattttacaatatttctacccatttaatttctgaattggacaagatcaaaattaccatagtcggatttattttagttcataatgtttagatgtatttcattagatctaccta

SEQ ID NO: 93182 - DNA, 648 bp, Cannabis sativa
agggcacaaaacccaacatatatcgccaaattcttagataattactctcgatatttactttatacaagaaatgtgaaatgtgagaaatttcatgaatttctaaaaatggtgaaaactagttaggtaagtcgttaacatcttgcaaactgatagggtggagaaatatttgattatgcaattcaaatattattaagttaaacttcaaattgtatccaaacttacctcctcagaactttagaatcacatagtgataaaaatggtaaggtctatgattagttactagcagttgtcagagtccttcaataaatataccttagagatagaaaacgacattctaaatgtcctcccatctaagtctgatcataagacaaccttggatcctacaatcatgaacttaagaaaagctataattgctaattaagttttgcatgtttattggctattctgaagtgattagggtgagctatttatggttgttaaaataaggaagtgtttgtttctataaatactacttttctaagaacatgactatatccggaaataaagtaacaaagtagatgagatactatttgatttgaacccataagtgttccatcatcttctgtaatttctgaagataatcccacggcctctgctatatcgtcgcga

SEQ ID NO: 93183 - DNA, 1419 bp, Cannabis sativa
tcactaatttagtttttagtcccaacaaagtattgtgactagaaatacatttaatcataaaaaattgtaatttttgtgaataatacctgatcaccacaaaaatattacttttagttacaataaaattaatttttgacaaattaaagtaataaaagttgtaactaattataaattgtcattcttacattaatgtgactaaaaagtttgtggctaaaagtattagtcacaaaaattaaatttgttatgactaaatgtatttttagtcatactacttgttgtgactaaaactaaattagtaacaacttgtaactataaatattatgtttagtcacaagtaatttttttgttgtgacaaaaagtcacatttagtccaaaaaaatttgttttgacaaaaagtttttactaaaaatggaaatggtctttttttgtagtgtttttagccacggatcttttagttataacatagagataataatttataattagtcacaactttttttacttttagtcaaaaaatttattgtgcctaaaaataagattttttgtagtgaatatgtcgctgcgtatttttgagctaacacttaacgcctaaaaaagagtacgactgcaacaaaaatcgtaaaaaaagtacttttgctgtcacttttttcattagagtcatatgtgttacaattataaacgttaagttttcgttgcaaatagataaaaatttaaattaaataattaaatgtaatatttagggaagcactactagtggctaggctagtatggtagtttgttgaaaatggtggggattgtatttcctttgttccttatattacgtgtctaattaatttttaaatttttaatttcacataattaatgtatattaatttatgtacaactgactttaattatattcttactatttacaaagaatattttttatttaaatattttcatcctatatataataggcattttttaattatttataagttggtttagatcagtgggagattcaggatttaagttgaggggcagactttttttttaagtgagggagggcgtaccattttttctacatgatataacatattaaaaattaataaaaatttatatttttatagtattaaatatagtttaagtaaaaaaaaagttgacttcaatgattgaagtactaaatacaaattttattaatagagattaaaaaaaattaaaatactaaaaggtaaatatgctcttattgggatttgatcccatgaccttccctatctataacataaaacataactattagaaaaagcttgtatcgtgtttagaaatatcacttttaattagaaattgttataaaataatatataatagatgagaagaaagaagaagaagagagaaagagaaagtgaatgagaatttctcagttgtttattccaatggggt

SEQ ID NO: 93184 - DNA, 594 bp, Cannabis sativa
gaccggaaaaggggaaggcccaaatattttaaacatccctcacgataatctattcccaatccttccttgatatctctacgcatgttcgtcggcgtgtttttactgaagaaaattgtcgtcttgagcttgttaacctgttggccagaccaagagcataatttttctaagcagttccagaatccatttgcctctgttaagttcgctctacccaccaggattaagtcgtccgcaaagaaaatatgggatagaacaggaccgcccctgctgagtttaacaccttttatggttccccagtcgagggcatcatggattaatcttgaaagaacatcagccgcccagatgaaaaggtaaggggagagcgggtctccctatcgaagcccacaagagggattgattttgcctacagggcccccattaagacagatattgagagaagtagtagaaatacattgagagatccaatgacagaattttagagggataccataacactccatgacatggtcaatgaatttccagctcaacctgtcataggctttaacaaggtcaatttttatagcaaagaaaccctccttacccttctttctgttaaac

SEQ ID NO: 93185 - DNA, 529 bp, Cannabis sativa
ctgtacgtactttatgaataatattttgtataatctttttttctttttgagaaattctttatatatataccatctcattctttcttatatacatatatctatgcttccctccattaactacttccggttgcttatatataaacgaaaaaacttggccattatatttccttaccgtcaccaatccatgattaatatatcaaactccttcttgagaaagtaacacaaccgctgtccgatcatccacgacatggaccgtcaagatgatcatgatgaaggaagtcctactcataatcaataatctgttgatgatatgaacttggtaaactactattggccaaaccctaaccctaaccctaaccacatttggcagcatgaacccaacttcctcaaccctcctcctgctccggcgaccggaccgaatacactactccaacaagatcatcatcaacctgttgatcatagctcagtggagaacttctgggaagacactatttggctgcagcctgaacccaacttcctcaacccttct

SEQ ID NO: 93186 - DNA, 536 bp, Cannabis sativa
ttttttttattaatattatatttattatattatatattattacataaaaaaaaaaaaaaaaatttaatttcaaattttttttctttcttcctaaccttcaccttcgaacaatatcccagaccccaccttcgaaaccctacccagaaaccactcccatcgcccgaccacccctccgtcttcctcccatcgcccgaccacccctccgtcttcctcgccacaacccgaccaccgcaccccatagccagaaccccaaccgaaccccattcgccctcattcacagaacctaaccccaccgcacctcccagtccgacgaacccagctcctctccgcccattgctccgatttccccacagccgaaccccattcgaccaccaccccagccagacccgacttttccctaacccgacccttccctctctttggccaccatccctcctccgcacactcaccaccgcccttctccggctgctccagtagtccgaaaccaccatttttagttggtgactgttgagtgggaggagcttccactttgtgcc

SEQ ID NO: 93187 - DNA, 528 bp, Cannabis sativa
  modified_base (208)..(209): a, c, t, g, unknown or other
aaatattcccattcccaacaactggccttagagccatggtaattgtttactttcatgaaatattgttttaaaacgatgaatattctttgtatgttgatttggatgtgttcatgttggtttatgtgattattcaatgattgaacgtgatttacgaaacttttccatgaaaataattttattttcgttctgaaaatattttatttggatnncttgtgaaaaattaagcaattttcattttttcagaactcgattccgataaaaattgaaaaagttatgaaagtttgaaaattgggtgcacatgcctcaatcgcacgcacacgagtccttcggacaaggtgataccccgcgcgtatgtttgggaaaatcgtgtctgaagacactcgagctcacccgttcagacatgctgcactcgcctaggaccctgcatcacgccgaaagacagcctgcaggcgccggggtttgccgcacatcaaagtattccctctcccacacacgcatgggctgctagcagcctgtctaggctgcacg

SEQ ID NO: 93188 - DNA, 843 bp, Cannabis sativa
aatttttgaaaatttagagcgtgttttctctctcaaaatttgcgctccttggtgtttagagattgcccactcatatcatagcaatactcatcatagtgagaggaagactctatggttcaatttttattagaaagagaatctagatttagatcttgattatactctctaacatgaaggatcaagggttagagatctgaacggaatgagttatattattctgctgcaactacagtaaggatttcttaatcccttatgtgtttattgattgttttagaaattttatatttaggatgttagattattgtcatataatcaacatacatattaataaatcaagatcttaataaaataagtttccaatagcaatttctctaagaaatactaatcgattggagcaagaacaggagaaggtgaggaaaaccttttggaattcgaattggagcaagcaactgatacgaaattgtgtagtaagctaaaatctctcatagtctctttatttaccttctaaattttttttctaatatatttacccaaaaataagatcaaaaatcttttttcacatttttattaaaagtgagattaaaatataaattcttatcgtaaatatttattaaaagaatcactataaatacacataaaaaagcaaaaataattcaccatcatattattaaaaaaatatttagataattacacaaacaaacaaatcatcatatccatacacataacaatttatataattgtatttaatacataaaattgcaccataaatatttatttatttatttatttattttctttctttattgcacttgaaaaaataaattgacatagcaaaacaataaa

SEQ ID NO: 93189 - DNA, 617 bp, Cannabis sativa
aatttaggttttttatgaattagttatcatttttttaatttggatgaaaatatctgaaaccgagcacacaaaaggccctgtctgaatttttccgctcctgaccaaggtttgccccccatacaggctgcttgcagcctctccctcgcccatgtgcagcctcatgtgcgcacgcggagtatgcaatgcatactcccctagtgtaatattgttttggtgatatctgttgattcaaaaattattttaaattgaaacaaaattcaaattttggcagaagtttgtgtagaatctgaattttcagttaaaaatctaattatcataataaaattaatttttatttatttttaattaattaaaattagttttagatattagtagcctctgaatttgaaaatttgaattttccacaaaaatagctttatggttaattttgaaattttgattattttatttattttacttattttaatgataagatcagatattacttatttttctattaaaatttgaatgatctttttttgatataaaaatattattaatattataaataatctagtttaaatttcaaaattcgctaaccatattatattttcataatttattatttttgaaatata

SEQ ID NO: 93190 - DNA, 668 bp, Cannabis sativa
ggagatgatcctaaagcaagtttggcactacgttatcaagatttgtcaagatcctacactcatattgtaacaaaagcatcagtaactgaaaaagcctataaacttgctagagatggttttaaacgactttcagatgatgtggatgcttgtttggaagaagataccgttggaagaaaagaagagaatcataataacagtggaatcaatacaacaataaaaggtataaaaacaaataataagagaattcgtggtagttcttctacacgtccaaagaatgctcttgagaagatgcgtaaaaaaactaaagtttctaaaaaacaagtacttattcttatttttttacctttatgttttcaattctataattttataatattaaatgttatatattttatcttacaggtttcacaagtctttaacaataatgatcaagtcaataattatatgccactttgtcaaccagattttttattcccgactacattatataatcctaacgatgtaatatattatatgttttatttaaatttttttttatcaacaactaattttatatatacttatatctttttattttttacagattaatatggcacctgaaaattcaaacatacaaataagcatgactgaattacttttacagatatattgactttatttattaataa

SEQ ID NO: 93191 - DNA, 656 bp, Cannabis sativa
gatgtgaaggatgccctttggactaggagccctaaaaaatttattctaaaacctcatgaggacatgacagaaggttgggtcaccactccccttattttcaattatggggaaagtggtaagggttccttagttgagaaaaagagggaacctgcatcgacattaacaggttcaagacgaaataagcagatccgaaggaattatggtagaggtgaacgtctgggttattcttatctagagtgctcacgttgtaagaaacaacatcttggagaatgcaaccagaaaacatgcttctattgtggcatggttgggcattttaagaaaaaatgccctcaggcaaagaaagataagcagaagctagaagcaaagcttgtacctgctcagatgtttactgtcattcaaatcgatgttgtagccaatccttctgtggtaataggttagcttattgtcaataactcctattttactgtgttatttgactctagggctacacattcatatgtggcaacacgggtaattaatcttttgggtaggccttgtgactttgttgaaagagggtttggaaccctactgcctagtggggaattggttgtccttaaaaggaaaattaggtcaatgccagtcagaatggaatgtagggaattgagtgctgatttagt

SEQ ID NO: 93192 - DNA, 638 bp, Cannabis sativa
  modified_base (37)..(40): a, c, t, g, unknown or other
tagggtgttaataaacatacttgttagtagatctaannnnctggtaaaataaatttcaacaatgacttcatacccataggccaaaaaaaggagtatggtcaaatgttgtttttcagttgtgcggtaagatcacattacttcaggtagttcttcaggccaattctgtttagcttggtccaggagcttcttaggtgtatctataagagtttggtagacaacttccactttctcatttgcttgtgggtaagcgatttgaaaaactcttaatgattcagtacctttcacagaaattggtaaagagatcactatcatgatagactcgattgacgcacttgcttccatattattacaccagcttattggagttctctgtattgagaacttgaactcatttagtaaagcttgtattcatgatatctcggttgccacatgagctaaaactttatgttctgattcaatattgctagagcgagataccaccgattgcttgtatgaggaccacgaaaatcacctaggtagacacaataattagccacactcttcctgtcatttgagaaacacacccagctagcatcagaataaccaattataggcaacaactcagagtattttatgtgcagattatgatgaattgtgcc

SEQ ID NO: 93193 - DNA, 561 bp, Cannabis sativa
agaatgaattgctgaagcaatgctacaacaactggtagtattgggttaaaaaaaatatatctataaactgggagtatgaaaggaaaagagacatgtgggtgaaacatgcgctgcaaaccaacgtgcgcaaagttatccccggatatccaaattttccagattagattcttgcgccttggcatccgattgatggtgaagagaggggctctgttggtgaagagtctgattcttgaggaagttttcttctttccttaacctatttgattactgtagatatgtgtgatagttctggttgtttagtttaaatgttgttagttatgtgttgttgttgttgttgttgttgttatatgtgtttttgtttacattgtttatttttattgttgtttctagttgtttgtgtagtaatattgtgtagttaaagtcatgttagtgatgttatgtggtcatgttatgttatgttgtgttagcttgtaactgagaagtatgtgtcattttgctttagcactgctcgatgatgaaaaatattaatttttttttatttgtgatgtgccctgatttttg

SEQ ID NO: 93194 - DNA, 783 bp, Cannabis sativa
tctaaatcaaaatgcgcaactaaggccataataattatgaatgaatctttagtggaaacatgtgagaagatttcagtgtaatcaataccatctctttcagtaaagccttttgagtgcattggatacccaataaaacaacaacgaactgttctcgaatctaactttttcaaattaggatcataaatccttacttcagttggataaccccatacacgaagatgattcagactaggttttctcccagtccacaactcaaaaggggttttgggaacagatttacttggaacatgatttaaaatataagttttagtcataagtgcttcactccataaaaactttggaagatttgacttctaacatatccatgagagtgtgatttctcctttcagcaacgccattttgctcaagtgaacctgacatagtgtattgagaaactatacaattttcttgaaaatattcagcaaaaggtctaatgtgtagtccatattctaaataacgaccataatattctcctccacgatctgaaagagcaactatgatgactgttgcccctgatttttcccagaatacgtggaccaaccggatgatgacacgtggatgggaaggggttagcatttaaataaaacagctaagtcttcttaaagcaaaggattaccttagacatgcctcccggagaaggcatgtaagtctcatatgctcccggagagcaagatggcaacaaagcatctccgggtggtgtcacattccatctgatgagtcatctcgcatttaatgccgcatggg

SEQ ID NO: 93195 - DNA, 1417 bp, Cannabis sativa
tttgactttcttagcatactttccagcctttttccgtttgtccatagcccgaatctaaaaccataacaaacaatcaaatgaaactaatgttttagaatcggcgagttttagttgcaacatattctcaagaacttgttataacacaagtccaagacgaagaactagatttcatagaactttgatgaactcatcaaccaacctggttcggtgatatgtaaaatggattttcatatagtgttggtcctccaatgctgccaccaaatattttgattggattcaagcaaaaccgtggaccaacctcgacaagggtcatgttttccaaaccccttctagctattttgtccgattcattatgaggaactgatatctgaaagcaccgggagaatataaattttgtcagatgcaatttaaaaaatcgaaacagtagtcccaaaaatttgtgcttcagctattcaaaagctcacactagcatttatcattgcaatgattcttttatgagccagtaaaatgagaatgctttctctaactctttcatattttgttacaattaaattctttccatgctaaccaaatgctcttattaatctggaattattaacaatgcaaaagaagatgctacatgcatcatatttcttcatcaatataaaatagaatttcaaagtttaaatggtaaacaacctgataattacggaaccaaatgtgatcatcaacgatggagaatacaaagacatgatcatgatacggcttagacttcctgtgttcctttggaatcccaaatatctggggcagagcatcaaaaacgttgtccatgttaaaaatttgcagactcaatagtcacacatatgcaagaagcagagcacaagtcctcaatttaaccacatttaatttttcttgagaaaaaaaaaacaattatatgtgtatcgaaaagaagcaaaccagtgactacatagaaaggccaacttccatataaatgttgatgtaagctgtatcttaaataaataactctaaaagaagtccttgcagttgctaaagtacacaaatatgaggataatgaggacgagaactatttcaaatggaaggggaaaataggatcagagttggatatcataagacaaagtatgagtaacatatacatgtatgtataaaaactatggcttttgcttgtcagacgaagggaatataaggtatccaatagttgcttgagaaaagacaagcaagaaagcataatatacctgtataatcatctccttcaaaagtttccagtgagctttgttttcaaaattggatgagaacgttaaaaggggtcgtgatcctttaagatgattcccagtaagcttcaattcctccatagtgtgcactgaaaagaacaaaaagtaattcaacaaattactttttctcaacttctgtaaaaagcaat

SEQ ID NO: 93196 - DNA, 742 bp, Cannabis sativa
tagtcgactttaatagagagaaaacccgatgtgaatactgaaaattgaaaaacaatgagaaagaaaagggttttcacaatcacaactcaaaagctttttatgataaccaaaagaaaactctaacagagaaattcctgtcaaaattaaagcggcccacaaaataaaaattgacccttatctgagaatcaaataaaaaagagcatttgattgtgttaattaaatacatcacacaatctaaactaaacacacttatttttcaaaaactaacaagtttccctaagtttcttatactcctcaaaacccagtaaaaaatccttgaccttgagccaatccttgatttctctttccgccgatgaattaagcaactgtggctgctctatcagtctgtcgtttagttccaacaaagaccctttcacgcaacacctaccaaatcgttattgtgagaatatatattcgcaattacccctacaaataccaaattgttattgtgagaatctcatttgtagaatttcaccattgttgttgcaagaaaagcgacattcttcaatttggatactcatggtgacacatttagttgatttctttagattttttttttcaactcaatcgttagttactatgaatttttatttattattattcggaattaaaaatattaaaaaaaaaatacaaccaaacgatttcctttaattttcaaataccagttcaaatattaatgagatttgttttattattattttat

SEQ ID NO: 93197 - DNA, 1018 bp, Cannabis sativa
attaagaatgctttaaaaccttatgtttttttaattttacttgaaacttttaaattatatcaccaaaagattacctttttaatctttaatatattttatttattttaaacatatataatattaatgtatacttatctacacataaaaaaaatatcaaaactcaaacaattaatcaaatatatttagaataattaataatatcttataaatatataacatggataataaatttttaagaaattttaaaacgaatgcgttttaaatatctgatgcagtgtattatttacttttcggttggttcttcaaatattttaaaacttctttattttaaagtatctaatgtgagtgctcggtggtgttcgatattattaataccctttatagcattcgtcaaaggtttatcctatctttcaaatttcttcaagggcttggaatcatattaattaacaaaccaaaataatgagttgatatataatatatatattattttacttaaaaattaattttttaaagttaaaaataataaattatatatctattataaatttaattgaaatatttttatttattattttctagaatttttatttttatttaaaaattatttaaattaaattattatgtttttatttattaataaagtatttttatgaaattacaaacttatttaaaatatattttattttatttagtcatattgcactaaatacaatactaataaatctatccaatattaatttgaggtgttgtccagtctaatctcatccaatcccacatactaaatatgtcattaattaattatcattacaaccttttaatcacaataaaaaattacttgtgactaaaatatagtaattaaatataaattgttactaatttaattttaataacaacaagtattaactaaatacacatttaataatcgtaataaattataatttttatgactagctaatatttttaatcacacggattttttagtcataatataaaaatattaatttataattagtcacaa

SEQ ID NO: 93198 - DNA, 587 bp, Cannabis sativa
tatggggtatggacacattatggcaaattgtcgaaaaggagaaatgaagaaaaagcaacaagaattgaaaggcagagactcagctcaatctagtgtgcaagagcaggaaacaaaggaaaggactaaacaggttgaggctactgctaccaggaaactagttttgcaggaggaaattggtacaagggcacagaataaagattgggttactccgagaaaaactttctctcagaagcatccaaaggaggctgaaaagaagggtgatacatgggggaattctgttaacagttttatggctttaggaggagatgaagggggtcagataatggataaagtgtccgaggaggaaggggaaccaggtaaaaattttcactctcatggataattgcaacattgcttgttggaatgttaggggtgtgaataatagggaaaaacaggatgtagttttggatttttgtaatctaaataacgttggtgttggagctttagaagagactaaactaagaggggaaaaagttaaagaaatgatggaaaataaattcaataattgggattacttctctagttccactattgaaggtagaattctt

SEQ ID NO: 93199 - DNA, 1816 bp, Cannabis sativa
gtctatttttttatttagcaaaacagagaatcaaattagtaatttttacaaaataaggtccaaaataatatttatttataaaaaaaatcacaaatccaaagaaaaaaaatccatacaaagtgtaaaaaaaatacaattttagatattttgtgtaaatttacccccaaaataaatttgcatgtttcataattttttttatacagtcctagcctactatcaaagaaaagactaatatgagagggagaagaacacaaaaatatactcattcattacttgcttcatgtaatacaagagattgaatacaagaaagataattgtgccactaaatcttactaacagtaactaataaagtattattagataaaaatatggcaaataacagtaactaataaaacatactttccaaaaccttgcatgtttcataacttttttaggatgaactctttctttctatataaatatattttgtaaatatgaaaaaaattgaaatttgtttttattacaatacatcttttatatgggaatgggacacattttgacatttatcatatgaaattatttgtgcaataaatttttaaaaaatcaacaaatatgagattttttgatggaaatttttcatattttgaataatatgatatgattataggttttttttgacattagtagatttgaatttgattttcttttttcaactaaaagatcacaatataccaccaattttataaatatagaataacttatatcaaatatgtttcaaaataagtgaagtcgccataagttaactagtttattttatttaataatttttttaaaaaatagattttaaattttttccaaatattattattttttattctaaaattattgtttaatcgtgtctctttaatttttatccaccttagttctatgttagtaaaattggacagaaatttatgagtttgaccatctcaataattttttaaaaaaattaaacgaataatttaatacacatcaattttttttaaaaaaaattctaattaaccgaattattttatcataaaataacacactaattccaatatattaattagacagataatatggtcttgtaactcacattgtccaacaatgtttggcattgaaatcaacaaactttgaccccaacgcatcaaaatccccaaaatacccttaccaagacaaaacgcacttacaaacccaatcaaaatagaaggacaaatccgtaattaaaccctaagctcattaaaacgtactactcaatactattaacatttactacacgtctcaaaattaataaaaataaataaataatcctttttgtttttatttccattttctcactctaaaatccaattcagatatttccaatttctccattgtttctctctctaaaaaagctccaagaataattaaatagtgtggtatacgtacgagaatatgcatctttcatccttttcaatactaaatactaaaagaaaataattataaaaaaattagagtatttcctttttaaatttaaaattattgaaggttatttttttttttggctaggttcgtcggacttctttggtttaagtgcagtttgattagagttatattttattactgtaatttaattttaatactgtgattattcttgtttttgtgatataattttgatctttgtcagatacttttgaatattttcattttatctctatgacatattgacataattttaagtattttttagtcttgtcatgacatatttttattttgcttttttattgatttttctttatacttttgtgactcaacatcaaattattgtttttttttt

SEQ ID NO: 93200 - DNA, 881 bp, Cannabis sativa
tatttattttagggatattgatagtaaaattatttaaattttatgattagtgacatttaatcacataaattaattttttggtggtaaaatcctccaaacctaacttttgttaattatttaccccctctgatcaaaaggctctgttaagtgtcacgatggatatgccacagtgtacataagtgtatacgtggttgttaacgcagtttttcaataaccaaaattgagcctcacgaatatgattcaacgtagaaattaaaaaaaaattgtagaaaattaaaataagaacaccaggttttcttacgtggtttgacagttaaaattctgcatagtccacgagtcaatcttatttagatatctgagtatgttctttttttcagggcctctcgcgtaagagtttttttttcgtcccctcttccttcagattgtttgccactacttataattacatagtgacagttaattacaaggctgaccaaaatgtaattacaattatcattccttaaatcgtgggatctgattacatattacaaaatgtaaacgcggtgcatgattttgaaagtcatacagctgtgattttttcgcttttaccgggtcagaaatatcgtgtattaaacacatctttagttgttgattctggagatgtctcgatagaaacttgattgtagtgatcccaatggcgagctggaaccattgttctatccaagatcgacaacatacagtggtcgcggatataaggaaatctactgacttgctagggttgtgagcagtgatggacccagaattttgactgtgtgggggcttatttatcataaaaaaaaatatttatacctataatataatcactattactagatttgtttaattttgtgggggcttttcta

SEQ ID NO: 93201 - DNA, 714 bp, Cannabis sativa
aaaaaaaaaaaaaaagtttgtaaatcagcagcattacacacatattgttgattattgatttgatgatggaattttttttttattgtttactatagattaaaattaagagttataaaaataataaattttagggaaaagtttaaattatactgcctcacagaatatttttaaaaaatattatcttttctttttataaaatagttgtaaaacaataaaacagaacaattgaaataacagtagaataactaaagacaattatggaacagcaatcaaacttaaattaaatttgctcggcagtaaaaaaaattgaaaattttagtatatggtgtaaaaatccctaaaattaataatctaaaagagccaatttttcattatacttcaaattactcctctcattcaaacacttatccctctctctctctttcgctctcgtaccctcttgcttgttctctcgctttcactttcacaacttctcacctaaaaccactgtcaaaccaccgtgccaacccaggcccatcattgtcaaactaccgtgtcaatccaaaccaccgatcgattacccacaacaccaaaataaaatttaagaccccacgacccacatcgaagcgaaaaaattcgatacccacaaccctcaatctacccacgatgcttcatgcaccaccgaccacgatgatattgaataaaatgttaaaagtgagtcttagttaattgttt

SEQ ID NO: 93202 - DNA, 563 bp, Cannabis sativa
taatactcagttagtgatgaatcataatacacagtagtgatgaatcacctcgtaatgcacatgtagcaatgtatttcctcgtattacacaccagcaatatacttgctctcaaataacatgatctgaccaagttaaatacaacttcaaagaccacttttttgtattttaaatataaagcggttatttatacttatccaaatattcagttatatgtgaaacgtgggcagtaaccacccatcaattgtaacttttcacttagataagattgagtagccaccatcctattcctataaatagaggttctttcaaagggaaaagggggaggcaattttgatttacaaaaactttacccaattgtcaacacaagcaaaacttaggaataatgtggactcgtggagtatgtagattttaactataaaaccacgtaaaatattgctgttgatttattattgtcgtgtcttctattcttgaattaataatcttcttagattaagttgaaaaaaattgcgtcaacagtttggtactttcattgagagaaggaagttttaagagattcaagagga

SEQ ID NO: 93203 - DNA, 2877 bp, Cannabis sativa
ggttcaaatatttactgggttttttgttatcgataattagctcccattttagaagtaaagtgatgtttctcaatggttgttctttgcagttatggaaatgataatgacatgtggttttatggttttttactaaggattcttattttttttttaattattatttattatttattggcagaaattttttcttcaaggaaggtttatctttggtcctgatgtgagatcattgggcttgaccatctttctcattgttgctcctgtcacgattttctgcatctttgtcgccaaaaatctcatggatgactggggtcatcactggggactatcagtaatggttgttgctgttctattcactttatatgtaagtattcccgttttcccttgctaaatgtgtgtgtgtattgcccatcatgaaatgtcccagtgagtaattatgtttatggagctggttttgcttaatgatgtcatgatcgtagtttgcttatcaaattaatccactttatatataatgtgactttaggcatggctgatggtatttattatattaaggattcagtttattacatttgtgaattggttttgattctcagttcttagaatatattgtcattgttctcaataagcttcctctttgtaccttgtaacatttagttccaataactgttgccagcagatagattaataagataattagtatgttctggtttcaggtattagttcttctcctcctaacttctggaagagatcctggtattattccccgcaatgctcaccctcctgagccagaaggctatgatgggagtatggatgttggggctggacaaactccacaactacggctgcctcgggtcaaggaagtagaggtcaatggaatgactgttaagatcaagtattgtgacacttgtatgctataccgacctcctcgctgctctcactgctcaatatgcaataactgtgtagaacgatttgaccaccattgcccttgggttgggcagtgtatagggctggtatgtggttctttatgtagaattatgttatgctacctagactgctcttgcaatgaaataattacattagtatttgtgtgtgagtgctactagatttttatgaaatggtagcaatatgcctctattgaagatgattatttctccaattaatatcatggattgaatctagaacatcaaaaagttctttgtttcgcttgagatctttttctgaattttatgttaggcatgcttgtaaaggaaaatttttagagttacaactttatttggtgccatttatcattttttgaatattgtatttgtgacatggagtgaagcctaatctaaacaatcattaatttggttgcagcgaaattatagattcttcttcatgtttgtcttctcaacgacccttctttgtatatatgtatttgcattctgctgggtctacataaggagaattatggagggagaagacataacaatttggaaagcaatgataaaaactccagcatccattgtgctaatcatttacactttcatatccatgtggtttgttggtggtcttacagctttccatttatatctcatcagcacaaatcaggtgagagacttatccttgtcaaacattgtagctttatatttgctgaaactttaaatttttctagtgacatgcatttgcttttgcagactacctatgagaatttccgatatcggtatgatagaagagccaacccgtacaacaaaggagttgttgataacttcaaggagatattctgcaccagcacccctccatccaaaaaccatttcagggcaatggttccaagggaagcagggtttcctcctggtcgatctgggggtgggggttttatgagtccaaacatgggaaaagccgtggatgacatagaaatgggaagaaaaacagtatggggagacatgggagctggggctgatcatttcgagggacaactcaacaacaacaacaacgagagggtgaatgtaaaggaaggtgagttaggtgaagtgtcccctgatgtaaggactacagtagatgatggtgcagagcgcggtggacacccaaggcgatcgagttggggaagaaaaagtggaagctgggaaatgtcacctgaagttcttgcactggctgccagagttggagaaccgaatcgtgttggtggaagtaccagtggcagttccgcagcaaatgacagtcgacaagcgtaagcaatagaaactacggaataccactggatgatgtcatgtaacacaaagaggcattaaaattggggagataagatgggaatggtttagaggttagccatcaactgtgcttgtttattcaactcctcccacataagatatttctggcaatgtggggattaactttggctggatgtttgtaagtttggtttggtctttgtgtttcttctaggaaggaaatgatggtgtgttgtatgagtgagctttcttcttctgtcttgatttttcttcatctttaattattgctattgtgaaattagttagcatctattttcttgcaattatgaaattagatctcttcctcatcctatctatctagaaacaataatttggaaatatataattttttttctttcttaagttaaaattagttgatgggaaagtttattattattccctttccccatataaaaatcaacaaatcgccacaaaaataagggatgcatatttgtttatgagcaagagttctaataagattaatgttaaaactttctcaactaaataaataaaggtaaatactactgggtgattctacaatgcacccccttaaatgtactcttaacttgttttggcatccagaagaattttttagtctaatttttttttcatattcatgtatgttatagctatttaa

SEQ ID NO: 93204 - DNA, 947 bp, Cannabis sativa
ggaccaggacctcagactcggactcggaccccagacttagaccccggacccagacccagacacttggacccgagacccaagactcaagaccgcgacctgggacctagactcagacccagaaacaaactcgaacccgaacctggacccggatctgaacccaaacttggacctagacccgaactcgcgacttggagccaagacccgagacccaagacctaggacctggacccaaaaccaaacccagatcggacttgactcgtagttggtgttgggggtcgagtgtattgaaagtatattataactttacacaatctattaatacaagtcgataccaaatatagtattgtattaaataatactaatataatccaacacaatataatacagtacggcgtaccaaacgaaccctaaatgatatgggatgtgatgtaatgtaaagaaaaaattagttcatagaacaaaaattttaaatatatatataaaaatatttcatcacgaaaaaaaatatatatatttttacttttttatttataaaaatatcttttcagtaaaaacaataaattattttttaagttgtttttatagtttatttatagttgtattataattatttataattaatttatagttgatgaggttaattttttgttattttataactttttgctgagtaaagcgtgtttttataatttgaaaactttacgaaagtacttttataattaaaaattttaaactgtaaaattataaataaaatataaaaaaaataaaaaattcccctcatgtaaaataattttttttaattatttttttaaagaatgtacgacttcaataatatactttacaatatagagattattttataaatataaaaaaataataaaaaaattacaaaaatatagttgtacgatattttaaatattttcataatttttatgattttatttaca

SEQ ID NO: 93205 - DNA, 505 bp, Cannabis sativa
gataatgctatagctaaagcacaactgttggaggatagaaatgatgatctctcaggtcgttcttgtaatgtctgcattttaaaacttacgaatttgaagataattttattataatatatttataaatctcataaactgggatctcgagtttcaaagcatagttgaaaatacatttactagatataaagtttcgtaataataatatttttttttaactactgggcagttacaaaatataattcaaaatgctgtagaccaaaatcctccaagttgcactgccgcgatatgtacaatcatttccaagctctaactcactgctacctttacctacataaggtagcaaactgatgagtcgacagacttagtaagatatgcataacatatatataaacaatgatataccgactttatgctcaagtcgtcctgagcccaattgctaagctcaccaactagttaagaatgttctcaacagaaacacgaccactgtaccatatgcactagagta

SEQ ID NO: 93206 - DNA, 913 bp, Cannabis sativa
aattagtttatgaaagaaaaatagtcatctcattaaactcttagggccgtaagatcataggtggtggctttttaaatttctatagatttattaaccatttaattcaaatgttaatatttatattagtataaaaattgaaaagtcacatatatataattaatcatcattaaagtaaataatatgtatatactctcgatcgtaaaattataaaaaaaaaacaggatacattatttatgtgtaaaaaaaaaaagatgtaatttttaatattacaataataaatgtaattttttaatattttaataataaattattattaattatattttaaaaaaaaatctaaaaaaatatgcaaaaaaaatgagaaagcaaagaaataaaaagaaaactcacaccatcttgtgtcatatgtcacctcacttagtatcacaattataataatatatttttaaaatatgtgaaataataataatacaatttttatatatatacatatatttacgtgtacatatataaaaaacaaaactacgaacaaaaccgaaactacatttataataagaaataagagttgatgtttagatcaaagggtacatttgaggagagatttcaatggagaaaagattaacttgtgattgtagatgcatgtcaccttgcagtcatttactgagactttattttgagttatttaatcttcaatacagataaaagaattgtctttcttaaaagatggcaaaaataaaaaatatataagagccataaaataagattataaaccttttattataaaatcggaaaaaaaaaatcaaagatatgatgatgagttgagaaaagaaagagagaaaaagaatagattgagttagagcacttactctgtttgagttttttttttctgtagttatagtatgtgttatatatc

SEQ ID NO: 93207 - DNA, 570 bp, Cannabis sativa
tggtgcgtatcacttttcttaccttagtccagaaaccagccatgcgggccgacctgagtggaattacgctcgacgatcccgagtcctatgtcacgacaacaaaactcgataaacaacttacccaaactctggaatcaaatccctaatctctgaaaccgaacatctaacttcccactggattagaacaattcaagtatcactaaaataccctaatataagctatgaaagacaccccgagcggaaatcggttttgaggctaaaagtagagttttcccctgctggcaaaccggttaactggttttactatgcctaaaaaactggttaaccggttttccttgctgcagaaacggaaaatctggtttgttgcttcaaaacccaactaattcttcaccaaacctgctcaaaccttccagaataataccatatcataaaaataatgtattcaagtcatcaattcacaacaatttatcaatttaagcaaaccaccataattgagtagaaatttagctcaaaaccctaaattcctctagcacaaaactaaaacacctctaaatctaaccaaactaaact

SEQ ID NO: 93208 - DNA, 705 bp, Cannabis sativa
atttattcaaatcacacttaactctttgttgttttaagagaaaaatctcacttacaatgatatttcaattttcacttaagggaaggtttttcaattcttgacttttgtcaaaatggcatcctttccttggtgaaaaaaatttaatttctaggttttagtatttttgcatatatttcttggtggagtctagttattatacacatatatgcccccaaataattttaaaaaaattaaactttttataattacttgaaatattcagattttttattcaagacaaggaactactattacaaagattaatatagcattacaagataaattagtagtaataaggtcatagatgctcgttgttctggtaattttttattagcgagctattgagccaagctaatttgtaaattttgattccaactacaactttaatgatgtacggaccttcccagtttaagttaaacactctagctgctagatctcgcgtctttgtaaatagacatcttaacaccaaatcttctacattgaagagtttctttcaaactcttttattaaagtatctagtgatatcttttcaaaaaaaaaaaaaaaagtatctagtgatacaatattgataagcaacattagttacttgtgacttggtgcgattttcttcaagcagatctaatgacatactcaaaagttcttaattttgttcttgattgtagaatt

SEQ ID NO: 93209 - DNA, 688 bp, Cannabis sativa
tagtctttggcggtgcaaaattattgcaagaggtttggaaacactttggtgaaaatttcccgtaagggttagtcaagcctgtgaacttggttcgatatttgaactcaaagctacgtccatagctttgaagactaaggacgtaggtggcttagttttatcgaacctcgtaaaaaatgagagtttgcaattttttacccttaaactctttactttacaagtttgattatttcctatacattattgtttgccatattacttaattgcataattttgtgttaaaagttttaatttaccgaaattaatttaaatttccaattcaccttccccccatggaaacatatcttgggctaacatttgttgactgtttactcatatctttcataaggtgtttgaaacttgttagaatattaattgtatatttgtaaaaatcaaggtaaattgtatttagtagtttcctatttaatctcctagctttgtatataaatatatactattctatgaaatataaaatacaattcattcaacattttctacatagtatcaaagcaatacttagaattgcgattcgaaattcgaatttagggtttatataaaaaaaagagattagggtttgagaagggttcctttttaagaaaccctatccgaagtatgtttcagttctcaccacccacacaagagaaccgcctag

SEQ ID NO: 93210 - DNA, 1036 bp, Cannabis sativa
agcttaaatgggtgatagattaaggttacactataatgtgcattacaagcaatccattactcaaaaggttatgatcttagtagatatagcagtagtaagaagtacttaagtcacctctctgccaaggcttttgttacattaaacgtttcatctgatgtgtctgcacctcttacaatctcaactagcttcattataggaggaggattcataaaatgcatcccaattacctgtgaaattacatcttcatatgatcagattagatatattgggtactggcattaatagttgtaaatgtttctgttgagatatcttataaatagctttgaaaatgaaaaacaattcaactccaagaataacctggcatggccttgtcgttgctgatgctagacgagtaatagagatggaacttgtattagaagccaaaatagcagaacgttttgtaattttatctaggtcctgaaataacttcttcttcacatcttcagattccacaatagcttcaataacaatatctgcctcagaaaggtcttccatatttgttgtacaatgcaaacgttgcaagacttccccattttcaacctgtggattggaaataagaagagagaaaataagtcatgaaaatcagcccaagtattgtacataaacaaacgcttaaatttaaggccatgtcagaatgtaatttaagcggtacactgaactcgacttttccttcactaggaaggattacactgatgaccttctcttttgtagtacaacataagtataaggattttgaaaataacgtagcaaattaaacactaacatcagaagtatcatcaatccaggaattgaagaaagaaggtgaaagatgaggctaatgtctccagagtccattttataagatttttttagtttttagaaagctaggggtggccattggccattggcctagctctgtcagttggcaacactttattgaacatcaaatagaagaggcctaagattttaaccgaatgaatcattcagctgtgattgtcctcagcaaaatagatgacac

SEQ ID NO: 93211 - DNA, 1079 bp, Cannabis sativa
gatcccggtctgggtcttggttcgggtgttggtccgagttcaggtcccgggtgttggtccaggtctaggtctgggtcagggtctcggtccagatctaggtcaccagtttcgatcccggtctatgtctgggtctgggttcgagtctaggttcatatccaaatccctatctagctttaagtctgggtctaggatcaactcccaagtctaggtctgggtcaaggtctcggtcatggtctgggtacacaactgtgtctaggcctgagtttcggtctcagtttggttctggggctaaattcgagttcggttctaggtttgagtgagggtcttggtcactatcctagtcttgttcgagggtcctagtctggcagttcttgtttaggttcccgttttgggtcccgagtctgggttagggtcccagtttgggtcctggtccgggttcgggtcctggtctgagtcacaaatctagatccatgtcacgtgtcccgatttggttctggttcaggtccccggtcccaggtccgagtttgggttcgggaccgagactggggtgcggttctaggttccggcccaatttctgtgtcccgagttggttccatgtttggttctgagttcgggtccagggtcggcaccgagtccagatctgggttgagatcctagtctggttctcggttcacgtctaggtctgggttggagtctaggtcctggtccggctatggttcctggtcccagtccgagtacttgtcccagtttaggttcaagtctcggtgctagtttgggtctgggtcacagtcctgatctcaatccaggtctgagtcttgggctcgagtctgagttatgttacgagttcgggtctaggtctgggtttgggtttgggtcttggtctaggtttcagtctgtgtttggctctgagtcttggtcttgttcttggtctgggtctgggttctggtacgggtctaggttctggtcaatgtcctaagtcacgggtccttggtcgaaggtcctagcgcaagtttgggttcaagttcaggtctgggtcttggaaatggttccaggttcgggtcttggtacgattccaagat

SEQ ID NO: 93212 - DNA, 525 bp, Cannabis sativa
ggtaatttatttgcttactgaagactttttatccaaatttgtatgaaaaaagtgagataaaatgattgttactaagtctcgtttggtgcaaagaacaggtaaatgattggaaatgtatttttttaggaccagccaaacaaggcccttgttctgaagtgggataaaaggtcaatatttggttggccattaaaaaactcatcttgaactcattttttgttgtataatttttttaaggcctaaccaaacacaatccttgtccttaaaaagtatctattttcatctcttaagtgctaataaaaaagtgtttattccaatatattttttatcctatttttttttctcaaatataaaaagtgggataaaaaatctcatttcttgtagtgattcaaaacacaccattcaatagcatcattaataattatttcaatgattcttcagttgtatttatataaatacaatattattaataaatataaaatatttacagcacgaaatatttgtacaaatctataacgatattatatt

SEQ ID NO: 93213 - DNA, 859 bp, Cannabis sativa
atcagtgaacaatacattgtttaataactcttcctcactaggacaaaaggctattgtcatttccctcaatagacaagaagttgctgccatttcactttcttaattgttgttgatattagataaactagtgaaagatgacagagcatctttcaccttaccaataacaattaagagactggcaccagcacctctcaagcaaagctcatttctctgatgccaaaattcagcaaaaagacaacttgcaaacatgatgatttcattcttgtttatcgcgtgagagtttgtaattaaattctccataaaatgaatcatcgaacttcctggtatagtcctaatctgcataggaaacctccccacaaaccacaatgctttcaaaaagttataatctctaaaaagatgaagaccacattcttccagctcaccacacaaataacactccttgtgtaaaataaaagacaatttgtcttctgtgagaattctctaaaggaaaactgagattctggggtggattcttgcatcccaaatcaacttccaaatgtctcttgtaggagcaaacctccaagcttgatctacacaataagcatctttaactgagaactgaccattttgcttatttttccaaaagagttgatccttaaaaggatgggcaattcttggaatttttagaatatgattcccacttcttctccaaatttgaactaccatttcttcattccaattgttgcctatggacatatcagctaaagtttgaaccgtgaaacgcttactcttgagttcatccattgtatccataaactcttgaaggtccaaccataaattcaccactagcagcgatagagatcgatcattttgctattgt

SEQ ID NO: 93214 - DNA, 1051 bp, Cannabis sativa
aaaatagttcaactctcccaccatgctcatctcaaattcctcttttatctgtttcacaaaaacctgcacctcattgttaaaagtaaaaccaaaaataatatcatctacataaatctaagcaatgattatgttagatttattatttttgataaataaagttttatctactcctcccctcttgtaaccatgagaaactagaaattgagttagtctctcataccaagcctgtggggcttgtttcaaatcataaagagctttctccaattcgtaaacatgatcaggtgcatgaggatcctcgaatcccttcggttgttcaacatagacttcttcattaaagattctattgagaaatggtgatctaacatccatttggaataacatgaaactaatcaaacaagaaatagacaataataatctagttaattcaagtctagcaacatgtgcaaaggtttcatcaaagtctattccttctacttgtgtatacctttgtgccacaagtcttgctttattctgaataaccgcgccaaactcatcagttttgttcttgtaaatctattttgtaccaatgatattgatatacaatggtctaggagcaagaatccacactttgtttctaaaaaaattgctctaactcttcctgcatagctttgatccaaaattcatcagttaaagcttctttcacatttttaggttcaatcaaggagaaaaaaatgaataaattgagcaacactactataccttcttcttgttaccataccatcttttggattttcaagaattaagtctgatcgatgattcaatttaactctgctagagggctctttctagaattcatctgagatgatatttggaaatttcttttctgtcttctcagtatctgtttcatcagattcatgatctgttggaacagacacctcaattgttgcaacaggagagtcgctgatacgtgtttcatgtttctatattacagaaatacgtttaagatcccactcatgtgctgagttatgagaacctagaacttcagccagatctatcgtacgaagaacaacca

SEQ ID NO: 93215 - DNA, 776 bp, Cannabis sativa
ataccaagctctagttttctacccaaaagtggtccttaatgacaacatatagctacaaaatatcacgaagaaagccataaattctctacatttaacaaaacaaaataataaagaaaagcagttatttccttctgattttgaaagcaagtaacatgacacatgagccataaagtttcaactatcatcacacatgggatgcataattgcatttttacaaatgaaatttaacagtatgccataatgtaatgaaactatacataataaaacatgacaactccattgcagttgattagacaataaaatagtataaagtagtaatttgcatagaaatacaattacaatatccacgaagggggtaaatttctcttgttgtcgcaccaaaatcttttgatttaacaaaattagttttaggatatagtccttcctataaataaaactataattcttgagaacaatgaaatggatacaagatataagctcattatgctacttagagacttggaattacttattatactttgtctttcatctcttttcttaatttcttctgtttcaagatttatacgtacggagaaaataacagtagctgaatgtatttttttataactagtgcccttagtttaagtttgtaagaaaaatatgttgttataaaccgagtaagtttatcgtaattttcctttccttttcctctgttttgttttcccgtccttttatttatttattttagtttcgtttgtttggcttttatgctcagtcttacaatatggccacttcag

SEQ ID NO: 93216 - DNA, 984 bp, Cannabis sativa
tagtcgtttgggtaagtgatgaatgtcaggaaacacgacagcaaagtcgagaagagggggcaaagttttggttcaaagaggtgagtaagggtgaaggtttctagtcgaggatgctacctgagagaattctctgggcaagggattgaagcttaaggtgaggaaggaaaagtgaattctatcgtcaagacttttatttatatgggtggcaacggttcagacatttttgaaatacacggtccaaattgaattaatcaaaaacaccatccaacggctggggattcaaaatgtttacatttaatgcgcccaaagaaaaagaataaattattcattactcatcatttcgtggcaacacctccaacatgccagaaggttggcatcttttcaagtccatttgttattcatttcctacgagaaatgtgcctaggctcagagcgtgagctccacagctccactaaacaatcaccatgcttcagcaaatagtatcccagagtatatcaacccctcagttacccaagggaatacggaagacttcttccatattccaatacttggacgacaagtcaaaataataagtcaagcatccggaaggaagctgcaagctccttacactagtgttatctgcatcctgggatgcctggtatgtggcaattacgcaaggatgacacgtcagatcatgcataattagtatgtaccttttgcctttcgacatcatgggagatgttgtacaccagaagttacccagaggttcttcctgtcagtgaggacggaaggagctccgagattcccattaatgatttgatattgggaaggattagaagctatgagtgttccagggtggcagcgggtttatttgattcgggaaggctatggccagatgctcttcgaacctatttgggtgtgtcttagtcagagcttaaggtgatgattgcatatcttctaacaccaaatcagatcttgttccttgcgtcagaccttggtagtgca

SEQ ID NO: 93217 - DNA, 610 bp, Cannabis sativa
gtcgatttatgatatataatatgatatgctgtgaaattagaagtaagattcaatttatttaagattatttaatttgctcttttattataaatatcttccagttgtaattaatggtgtaaaattacaactgtattttggattaatatcggtattagaataagatttgcataactacatttttaccttaccaagctcattatctgatcaactttctcatctcatcatttttattattttttcttcattcacatttatatcattttctatttatattaatcttaagtgataatttacctccctgtggatacgacatagctcgtttactaccgcgaccgcagtgtaactaattaggcgatatcaatatttacgctacaagaggttagtataatagtttatttatttattattttttttagtatctatttatttttatttttttgtctctctttatttgtttatatgaaaaaaaaaattaggtaatatagtataatttagtttttttatttgtatatatagattcaaataaaaaataattactatatattattattattattattatttctcttcttttctcttttagtaaaaaaaaagaagtagtttagttttt

SEQ ID NO: 93218 - DNA, 638 bp, Cannabis sativa
cggcaattccaggataagcacctcatgatgatggtgggggcaagttttgggctgcctcctcgccatctccaaaattttgaacaaaggtgattgggacatcagtacattgagcaagaatttcatccagattaccttgtaactgagagttattttgctcctcttgagctttccttctacgggttttgacttttgagtgtttgtggcctgatgctctcttttgtttgcttcgcctggttctgcctctagacgattctccatggtgaatcaagcctggctcgaatttccttccctcttcaggaatccaattactcgaactcccattccctgactgcactgtcgacaccctatcatcatcattctccaggaagggggagttttcaaacacatcaggtgtagggtggtaccaagtatgaaccttcctctttctagttcccagaagatgagttatcaactcagagacattgggggattagagatcaaagaaggttgggctatataacggtcaatggactctggccctagcaattgacaataaatcttttggagctctggatcattgcttggccaacgaatattgagtggttcagggaagtgatgaggttgttgggatttgtaagtccagatatgggggatgtcaa

SEQ ID NO: 93219 - DNA, 1189 bp, Cannabis sativa
gagaattgataactgctcgcaaatgaaaagcatagcagataataactactcgcgcacatagtagaccactaactaattaaataatatcaaaggaaaatacgagcaatgaaaattcctaaagtattttaaatttgatccaaatataattgtacgaaacattcaatgaaaataaaataaaagcaaagttggccatccaaccttgcaaatttatctttacaaaagtgtcacaaggggcaaaccattatctcgaccttaaggccatttgcctagataaaacaaaaataaataaaaaccaagcttacatagtagaagacttggatagttcttcttcttctactgcctcgacatcttcttcttccttcttagtcttctcgcaaaaggcaaggatttcctcctcagactctcctaagaaactcgtatccatcctcggattcgccatccaagcttggtagatggaacgtaggccaacaaggttgcatcgttcaatggtttcggcttctttcccatcgagtgttaccttggctgcatcaagttccccttggagtttgtggcatgcattggcttgtcttttgcctccttagcagcttcaagctcagccgcgagggtcctcttcatcttctcggcttctttgattaggcgagtgttttctagcttggcatcattccattgcttggttacaacctcgcgctggtctatcaagttctgaatctcgctctccatatactttatttttgccatgcctcgccgttgggcgacaaaggaaatgaaagatgtttgaaaaccaacaaacaaaatgcatgagtattttgaaggacttgaaaaaaaaagtgagcagataaggataaggaaattttccgagaggctatgagatgcactccttgtaaacatctcccctagatctccattattgattaaatcccattcatagcggaggagagccttgaaatgacgccagaaagctgcaccaaactctgcagtgtactccaggccaatttttctagcctcgacaggcagagttttgagggcttggctcaaggaggtagaagcttgagtcatttttggaataggctcgtcgctacgtgcaagggcaggaggaggggttggatcctgagtcttagtttcagggaccttaagattagcgttctagaaggctcgcttcttgttagcagtagtcttcttgagccttttt

SEQ ID NO: 93220 - DNA, 544 bp, Cannabis sativa
tttccttaatacattttcaaaaaaagataaggggtttttttatttttatatttaaaagcagttttttttttttgcatttatacagaaatacacagagcaactaatagatcaatctaaattgcaatctaaattcacattgcaacccacacagttgttaagagtataggatagttagtcttgctgtttataattaagtcagttaattatgttttgctagttaaagttgattagggggttagttttgtcttttcctttttctgcctaatcttgtaactatataaactgtatccaacactttcataattaatgagaatcaatctttgttaattcatttcgtttaacacggtatcagagcgcagcacggttctcgttcatcattcgaatcttgttgttgaataattgttgtcttcttcttcgttgatctgccatggattcctcaccagctctctcctctacaaccagccaaaacagagctactggttctggtggttcttcgttcactcccgttgtgtttcctcataaattggccacaaagctcgatcat

SEQ ID NO: 93221 - DNA, 1598 bp, Cannabis sativa
gacaaccggtctttctcttatcaacacaactgcatttcgcatcatatgtaagtaacttttgtctcagaaacttagttttgatttgttttctgatttatagttgtgaggtgcttacttaatatgcttgttgtgttgacagtggtttccaagagccaatccccacccctgagatggccagcgccacaaaatcttgttgggtcttccattcggactgcgatcggctgactttctcttgaataaagccaatctgagaactgttggccttcttggctcggatgagtacagttgtgactacaagtttccaaagtactcttcgtgggagaaggtccctgttccaactgatgaagagagccaggactatgtggctcgcgtacactatctcccgagaataaccccttgggaagctgaagaaggagcatcctgaggtaatcaatgtggatgatcacctactgtgcttaaagcaaagtgtactttgttagtaacattctgagatagtcgatataatttctatactaggaacaatttcctcatagactgtataacacataggtttgatagttggtatcctaggtttcacgtctagcttagttgcactagctcgtactatgggattgccgagcagtatgggaccattttggatagggcgagccacccaaattcaaattgggattcagatccaattaacccttacgacatattcatgatcacaggatctacggagtttagtaactattatagttcttcctcgtcatgttctgatgattatggtaacttccttttaagtgggactttattccccattttccttttatttgtttttgagccagtgtttgatgtatctcttttatcttacagatatggatcttgatctggaaaacatgttcaacaacccctgctcattgacaaaagagccaaaaaatgagccgcctaagcaaatgaagcctcgggttctatcaaagaacccaaaagaactaaaacaactaccaacaagaagaagatctcgagccaactcactatcgagccaacaaaatctccagagaaggctgcgccgactatggcaagcatcagtgaacagcccattgcatctgtacagcaagtaaaattctcttgttctcgcccagagatggttcttctcgagccctctggcctcttgccctttaaaactagcactgaaggttgacacctctgctcgctacacgctaccaacagctggcggcattatcaagcctttgagtccaacgagtgggatcagctaacaaagggcaattttgagggtctggtgcaaataagttatgatctcatgcatcaggttagtctccttttcttcttatttctttctccttcccgtctttgtacttctttcttactgcatgtattcattcctcgcacgcatctctactatcctttgtcgttcaacatagagggcttcagagggttgaaatgcttgaaactgagcttcgtcagactagagatcatcgagatgccatggccaaaaaatggaacaagtcagattctgagctttctcaggtaaaggaggaggctgaaaagcaacatcaagttattcaaaatgagattaaagagcttgaggattccatcaa

SEQ ID NO: 93222 - DNA, 719 bp, Cannabis sativa
  modified_base (468)..(480): a, c, t, g, unknown or other
agagagagagagagggacgattatggattttttttaacatatatattatattatttattatatatataatacttttttactcggtcaagcctaggtcttacatatatacatttaaagaacatgaaaataaagaaaaaaataattggtgtagtgtcttaataaaattaatttgttaatactcaatccttaaaaaataactatttaaaagaaaatctctcataataataataataacaaagattttttcattttttatatttcaaaataatttttttttttattttaattacgaaattgcacaaagaaactctcattataacatctaacaacctaaatcacaaccaaaatctacatagcaacccatatagaaattaccggaaaaattaccgtagcaactgtaaattttttttaaaaaaaataaaagatagtatatggtgtaattttccacataataataataataataannnnnnnnnnnnnaataataataatgatgatgatgatttggactgtattctttcaaaataaaagtagttctacttcaaaaaataaatgttatcatagagttattttattgaaatcgaatttatagataaacaattaaaattaaaatattaagatattgtttatcgaaaaattagttaaagcaattatgttaaataatggtgatattctgttaatgttgacagaacaaaaactattagttgttctaaaaaaaa

SEQ ID NO: 93223 - DNA, 1604 bp, Cannabis sativa
taggctgacattatgatcgatagtattattgtatgaacgttccagacttagtaccgtgtgacacacgaggatagggttatgatcaggtgtatgggcaccatgtcataacccgggatattagtatgttttatgttatgcttttcttgttgaatctttcgactcacagtgctattttcacgtgtaggtaagggcaaggctaaagctgaggagtcgtgtcggggcagttaggcctggagcatatgatctttgggatatcaaggcttttgctgattagtcgcttggcgacaaaacttttgtatatgaatagcaaaattttgtaaaggtattttgtaacgggatcctagacttgtataaatgtattactttatgtttttaattaattaagcaaattttgattaatcacgtttttcattaatctcgttgattagaattgagcagcacagtacgttcaaaatcacattaacatgcctaattagctagggtgttacaatttggtattagagccgctatgttgtcttccgaagattgtcacgacatgtacaatcatcatcagcagtcagctcgttttatggttcactaagcttttattgctttagttgtttattttaatagtatgatttaagaaaagcctattaggaagcatgttagtagactgatagtagaataggcgcatgtttttagtttccaaataagcggcattagtaagttttcacttgatcacgatctgacaagactagctcttggttacgtaggcttttctaattagtatggacgccaggcaaaacaccaggagccagggcaattcggttggatctagtggtggtcagggagcttaggttcccttaaatatttgtagccattgtagaggtcctagaagtagggcacgtggtcggggtgatgctaacccgccacaggctgcccatgattgggaaaaccagtttgcagaaatgcaagccagaattaatgaacaagatgaagagattcgacggttgagacagtagggtgctcttgcaatccctgctccagaaataccattagctcctgcccctgctgtgcaggccgaacctgtagttgcagtgaaccggagggaacccctgtatgaaaggttccgtaagcaggcacctcaagtttccctgggaggtcccgatgtcatgaaagtcgagcaatggctaacagtgattaccagaatcttgaactttatgggcatcaccagaaatgatagggtgtcccgtgtctatttccaatttcaataagacgctttggtttggtgggacatggtgtccatgatacacgatgttacgacaatgacctgggaaaagttttaggaacagttcaatgccaagtattacaacgaggcagttagaagtgctaaaaaaaaaagaatttactcagctgactcagaaggagaacatgagtgttactaaatacacggctcaatttgatcgtttggtgaggtgggtctcgggaattgtgccaatcgattttagtaagaaagagaaatacctggatgggttgaatgcgaagatcagacacgatttaatgattactactgatgaaagcaccacctatgctgatatggtgggtaaggcactgcgagctgaggg

SEQ ID NO: 93224 - DNA, 694 bp, Cannabis sativa
acagatcctatcaccccaattgaagatgtttaagattagtaataataaatacagttttaggatagagttggacacagcagagtttgagctggttgaaggtgtttgttcatgcaatcccatctcattaataactaaactgatcatagtcttatcaaatttacctttcaagaacaacaactcctctctaatcatgatatatcattacaacttagaaactcaaaacattggtgactagtaactaaaaagtagagaaaccagttatatgacaccaaaccacatacatataaatgtcagaatactaattaatgatttaaggtttaataaattagttcctatttgagattaagataattctcaagctgcaaaaatgttaccaaaaaagtccttgtaccaaagaaagaaagagcaatgaattatacaatattatattatcattgaataatgacaaagacaaaaactcattttctattgcagttaggttgatattattgtatccaggaaacctaatctgctggataaccatgaccgtccgatcagagcgggattaacggctagatcttcttcggaagatcatctagtttctttagctggggtggtcgatcggttgtctgacaggtttccctattttttttgtaatggatttagtttaggcagttctaatcctagttaaattgtttaattttgtttcattagc

SEQ ID NO: 93225 - DNA, 1511 bp, Cannabis sativa
aacaccttgaccacatgcatcttatatatctggtactatctttctacacattaacaataatatttaaatgtcccttaaaacatagttcttttctttttgcggttgataccattgctctttcattgattatagcccatgatagcattgctcttatatttttgggttaatacattttaactaatatctcaatctggttggtgtacatctatcatttaaaataaaaagttagttatagttattcattagaattacttgagaaaaaggctttgtttgaacaaaaggaggagtattactaggcacccggagtgcccaacactttttataagtgttactttataattagttagcgatatatcttaaaatttattttttttaagttatatgggacccgctgtttaattacaccaatagcgatatgaagatgctaaacatgagagtggtgtccttaacaattctctaaaagtagagatgtgtaggtaagaatcaaagaacagatgtatctatctacataatgacattaaagatacttgcatggtttatgctctgggtttggtagactcaatagattctcttcaatcaatacaagcaacaacatatatcatgaatgccattaaaaacatcaccctccacacccatcccaagatagaaaacagatgcctctacttttttcatttctatttatgaagagtaatgattcatttgttgagggaggtctattcaaatttggtactttatgtgaaattagtaaattatgcatatgatcacacaaaaataatatgatttataaaagtctttttttttttggaaatggtgatttataaacgctttaattatacacatttttaaataaataattttaaccacataaataaaaaatttccttaaaattatctatggctaatattaaaaacaattatatgtgtaaagtatgtacaatttaaatttgtatccaatattactaagagtactatttagcattttaaatattacatattcaattaaagtgtggcgaaattactcaaaattttataatttgttacacacatatttaaatttcttttgcctactaaactactcaagctgatgatcatttcttacacttaaatactcatacattcaaaaaattatataaattgattttaaattataataaataactaaaattaaaatatatatgatacaaaaaacaaaattatttataaaattaaaataaataatagttttattattcataaaaaaaaaaattcaaggtaaatttgtattacaacctgcaaactttcataaaattttgaataatttatgtgcccaaaattgttcagaattttgtgaaatatatatagaatttttaattaagatcatctctacaaattattattttatgaaaattttctcttgcatgccgaaatatacattggcgtaccaaaagactaatgtaatttttattttttattaaatatgaatagtgtaatgtaaatcaattaatcatataaaatagaaagtttaaagaaaaa

SEQ ID NO: 93226 - DNA, 764 bp, Cannabis sativa
gaatggtgggaaatgggaataattgttggtatattttgcatatatgtatagaagcttaattaaataataattgaaataaaagcttagctaataacatatatagaaggacgtacctccgttaagccataagacgagtggcttgtgttgagaattgtttatggcttcaaaaaaccaatagaacaaagctcttccattagtttggttaacgttaacatatccggcgtagtgtttgaagctcacaggtggctgtcccggcaatccaaccactcggtctgcctcttgctctgctttaattttctcactcactttattactataatattcatcactatttccagtaccactaatcctaccaaccaataacaagctcagacttatcacaacaaaaatcagataattatttttcatacccattattctatactacaagatttcaaattatatatctacgagattagctaggtatttatatatatagataaaaagggatgtgtaaattgtacgtgtggattatgtacagggaaagattcaagtgagacagataagcctcatatgcgtagtcttgctgttaccttttttttttgggggggtcattttctcccagctggaagtatatgaaaagatactattcactatttttattcccctaaaactgtggacaccatttctttttggcagtacttttggagtattaaatgtccatgtcattaatattgaaattctcaatgacaaatttgactttctatgcttagtgtgagggctag

SEQ ID NO: 93227 - DNA, 1209 bp, Cannabis sativa
  modified_base (1138)..(1145): a, c, t, g, unknown or other
ttgataatgctttgctacaaaaaaaaaaaactaaataaaattaaagaaattaataaattaaaaaactaatgatttgtattttttattaacatatagtgacgtgcaaggcatgactgtgtacacattaaatttatttatttaatattaaatatatttaataataattaaatatattattatgatatagtgacgcgccaggcatgctgggacacacttttgcagtccctcctggcatgactctataggtcagtaatattttttttttgttagaaaaacctttagtgacccttcatagttttagtgacacacatgacaggagagtaacactaaaaatttagagtctcaatatgcatgtcactaaaaattactcctaaatctttagtgacacgtagttttgtgcgagtcactaaagagtgtcactaaaaggccaaattgtagtactgtctagatttttctaggcattcattcttagttttaagtagataaacccacacatgcctactgaaatcatctacaatagataagaaaaagtgtttaccttagtgagttccaactttgtgagacccccacagatccacatggacatattccaatggccttttagaataatgatttcctgccatgaacttcaacttgtggtgctttcccaacacacatggttcacagaattgtagtgaattaggttcgaagctgcctaggaggccttgtttggtcaattctttgatcccttgctcactcatgtgacccatccttttatgccacatttccatctcaattttgcacaatactggcttcacaagccattactattttccttgcataatgtatcagccattcttcttttcacccttcatgatggtaagaaaccctttgcaattgtcatctggccattgcaggatttacagctgtagccttcatcttcaagggttcctagtgagatcaggttttttctcaactctggtatgtgtctcacttcatgcagcattcgaacaataccatcatagtcctttatggcaacttttctaatgccaattaccctacaagaattgtcatttcacattagtacagtaccagcattcactttcttataatcaataaatttttcaagagtaggacacatatggtatgtgcatccagnnnnnnnnatccattcattagtgattctttgatctgaaaccatgtaagagtcaccatcagaggagcaatgat

SEQ ID NO: 93228 - DNA, 595 bp, Cannabis sativa
taatactatttattaccttaagttaacattagattttatttacataccaatgtgggagtcaaattggttttccttctcctctgctttatcattttttccgaaacatgattttcgactccgactctttatcaacatgacatgtattgcgtaatattttcataaaatcgacgtgaggcttgttaaatcctagtactgctgagtagaacaaaacagcatattccataaattaatctcatccgaattaggctctcagctacaaaaaggaataaaaaattgtagaataaaagaaaagaagcaaaagaaattgttttaatgactgtcccatgaacctttattgagtatgcatagcattttataaaagaggaaaactcttcatagttatatctattgtatataaagtctgcctatataattaaattcttagtttatgaaaaatttacgagtcattttttatttatatttaataaaataatagaatgatatcgatagttttttagtagtataattgttatttgtatcatgatgttaatgtgttttattgaccgaaaagggaaaaatactgtgcttattaattttaccagctgaactcttctaa

SEQ ID NO: 93229 - DNA, 549 bp, Cannabis sativa
acattaataataagtgaaaacttattaatactatttataagatcatatgctagctagcaacctactccactcattgtcaatatcaatatcggttttgaaataaaacctcattattctcatcttaccatacatttcaacctattctactttctcagccagaattacattctaataatatgtaaatatcaaaattataatgagtatacagaatcccatatgcataattaagtaattgatgaaacatataaaaacatatgaccatattgaaatgttggaaactttttgttgttcaaaagagacattcaattataaaatgatttattaatctgtaacaaatcatacctgcacccgagaaccagacaccgccaatttcactcggaaagtgggattagactatttaatctctcctccaaacaatttgacatcctttgaagatgaagcagttgttagaattattatggtggactaatattatcatgagcttaataccataaacacaatcattaactatgtgcccaatatttgttcactaccataatgggatggtta

SEQ ID NO: 93230 - DNA, 8989 bp, Cannabis sativa
  modified_base (737)..(739): a, c, t, g, unknown or other
gatgataaaaattttctatataaggtgaaataattcatatcttaaattattattttgagataaagaatataaataacatatataattttaattaattatagaatagccacatcatctctgatgaaataaaattatgtattattcatctattataacttttatcttcaagtgtgataaattcaactcaaaccaacatcttaaaaataaatctggaatgagaataaattaagaacatttgtttgcttgcttctaattttagaagcctgatgtacttaagagcctgaataagactttgtattgcatttgtttcagaatcgttaagtagtatcagaataactaaagttaagaccactttattttttatacaaagtgatgagatgtctttaagatactaaaaattatattcatacatattttgttaagatgattgaccatttgaaaatatagttaaccaattagattctaacgtacttcactagttgtattgattcacataaatcaatatttgattacgtctataagattaccaataagctatatcgtggagagccttaattgtaatttccattataaaagtcagagtcatttgttttgaggatacatctcgtatgatgtattatagagtttcatagtaggcatatagttcagaattacagttttattaggccattaagaaaactttgtgacaaattcagctacaattttatggttaataactataagagtactggtcgaannnagcatatcgaaattaagtatttagtcataaaaaggcgtgataagtggtcattaagcacgcaaactgaattgggtgatcacatatccttgactaaaggcatgccacaacacaaattcaaggatcgtaaagtaaatatgtgattcaattaccccatatgcaattttttgtttctacaactaaaattattcaatgaaactctaattttgatattttctcatatttatgtgcaccttaatttcatttgagaaaattattgtaagaggactagaatgaacatgaggtttagggtttgttcgcttaagtacattaccacattaagtacattgttatatgtaatgaatatatcgtaatactcgccatataatgaggacacatcgccatgattcatatgtttgttatatagcaaggataatcgttgaataagtgttaaatctaaatgctagccaagtgagagaatattagaataatttttattttaagaatagaatcaatgaattaatttaagataaatgaatattttatattcattgaatctgtacgcaattaattcattgatattctatatatggtcagattacgatttatcaaatatttgatttcctgatttaatttgttgaattaattgtcaaaatattttgacaataattgtggcagagactttgatggaaggtctcacctatataaatatagggtctcggaccctgagttcactacccattctatgaaaaacagtaaatccatcccaagagagtagagagagcttgaaagcccgattacccacatcaattagttttctctacagattaaaacttgtgtgggatagaaactcaagaatcaatggcgggaggtatttcgatcctttagttatagtgcatatatgttttattaattccacactttatacaataatatatatgctttattatcatatgcataaatgtctaacaataacaatatatgactttaacatttataattaacttatggaaaatttagtggaacaatatgtgtgttttacaaaatttaaatcaaacattatgtaataaaaattaaagaagatgtgggatcttaaaattaaggaaaaaaattattaaataagttaatatagaatactattagaaaaattaaacacagtatagtgaaacttgttcctatcttctatgagctcagctgcttgaatggtgagttaattgtactttggactcatcgttcgttttgaatctacatataactgaattttctattttttgtcgataatttctccgttgtttttttttttttgaacaaacaacctatgtttctgtaaaaataattattaatattatttttatgatgattaaaataagattcattatattaaatgactttcttttttttttttaattaaatgatcataattttgtttgagtagttttaagttttattctttttggttaatggaaaaaataaaaataaaataaatttgatatattatgcatattagttttttttttttaaaaaaaaaatcaaaaaaaacaaaacatgatatagtaacgtcaagtgagtgtagctgttcaagaaaaattattaaaaaaaataaaaataaataaatatagtagtactctatccgtgtggttgttacctttagagtctacatcgaagggtcattaaatatttcttttcctgacactcacattagtaacatacagttagtgacggacccaaaatttttattttgagggggcttatttatcattaaaaaatatttatacatacattataattacttttactagattaatttaattttatgggggcttttctactattttaatctataattatcaaattcaaaaaattacatttaattttttaaaagataatatttttgttagtggggctatagccccacatgaatgcaagtgggtccgtccctgcatacagtgaagggtctctaaatatttatagactccttcaatctgggtcacatgaaccttatttttgtagtagatgattttataattttaccaaaatgaattctaggtaaataattgttgaggaggtgttaattttttaacatgcttgtggagttcaattaacacaacacaaggtcacctattggagtcatacccaagtattactcattagttttattaatggataacatctatttaaaaaatagaattaataataataaatgtttcaattttgttgggttattgagaccaggtcaaccacaaggacatcggtctcatctatcaaaaataaaaaattacaaaatagaggtcttccctccccttctctctttccttaaaaaaatattttctttttagaagtggtttttaaaattttgtggatgttaacagaattatattatattatatagtttgcctcatctattttaaattaattacaaggttgtattccttacaaagaggggttaaacattgtattttttaaattcaattttttgaagaaaaaaaaaaaaaaaaaaacaaccctgcgacgttcataatagagccaataaaaaaggactatgaattagttctatatatatacacacatattatgaatatgaaggaagagcaaatagatgggttagtatgcacattgagaattccaacatggatgcaccatactggaaatcatgataattgaaattagattcaatctgagaattataatgagttttcactttctgagcactgtaataaaaacaagtggggttttatgctatttacattgaaagtgtaataaaaacaagtgtgagggtcaacatcttggggttggagattctccctcacctatattcaattcaaggtacttacaaaaagtggggcatgcatgagttgcttaaccaatgtcacccactaactctacagttccatgcattgtacacaacaacactcactaaccagtcacaactacaggacaccctcttatcatctcatctcatgctcatcatcatacttgttacagcttcatcgatatataaacattaatcaacttaagtactcctaatgtattgtactttactctgagaaattaaataatataaatatataaattttatataactaaattgtaaattcttaatgaacaaaattgatgtaaaatgtaaaaaaatcaaaactctgaaggatgtaaatattgttactttttccacgattgaagtccttagttttagaaatagcagcaactaagtcattgttttctaaaatcaaaatctaaacttttaatggaaaaagttgatattatacatttgtattttcaaaaaaacattttagacatatgtgtgtagaattcaaacattttcaccccagaaaaaatatatagtaataaatatcaatgtgaaaatgagagagtggattttatattgattgctccatttgaaaatgatgatattctttctgcaatttagttcttggaagcattcatttatatatatatcaaatgaaaatttaaaattaataataatttataattagtaaataaatatataaatctgacactttatttttatatttatattcaaacatggcagcatcttcactttaaaaaattgctctgccctctttccctcacttagctcttctccccataaccatctaatatctccattacacaacaacacacaaagccatatcatcatatgagataatggccattgcaacaactactaatcttatagatgaggactacatagacatggaaataacctcttcatcttcatcttcttctaacttgtttaaaaatgcaattaacaactctccaccgctaccaccatgtccatcacctcaacaaagcaacaaagagtttgagtttcaaatgtcctcatcacattcttatttcccagctgatgagcttttctacaaaggaaaactcctccctcttcatctccctcctcgtttaaaaatggttcaaaagattatccaaagctcaaatacacaacaacaagaagaagaacaagatgatgatgaacaagaagcctttgaagacacttttaccataatgcccttctcttcttccactgctccatgtacaaacacaaacactccaatggagtcctcaccatctgactcatgtagagttagttgtgagctaaacccagatgagtatctctctcaatgggcaaatgaagtcagagttttcatcaatggtggtggtggtggtggtgctggtgggggtggtaatggtagattgccaaggatcaagtcatggtcttggaagctcaagcagtcttcacttgggagaaagctcaaggcctcaagagcttatctcaagtccttgtttaataatgataatactaagtcatcagaagattctacaactactactactcctcctactagctctagtagtggcacaagtaatggatccattaaaaatgggagataccagaagatatctactctaatgaagagcattgaaaatgaaattatggctgaggctgcagctgctgctgctactggtagttaccatagaaagtcattttctggtgtgattcagaggcattctggggctaaatttttgtgtacatctacttctatatcagggggatcttcttcttcttcttcttcttcttcatcatcatcatcttctttttcattaagccccaatggttctcatgaccttcattttcttaagaggagtagtagcagtgcaagctcagaacttgagagctccattcaaggagccatagcacactgtaagcagtcatcacagcaacagctattcagtgcttcatatagatcaaagacacttactcaagatggggattttccattgtgttcatcaaggattgcagtttgattatttttataattaaaatgatggctctatcaatgttatgtttaagcactaatatatttaattttagaaaatatatacatgtttggataattgttaattgtttgttcaaatcaaatctacttagccctacttcctttcttgactttcttttgtacttgcttgtaactctttacaataacattttcaatattcactctatacaagtatgtttctttcataatcatcaacccaacttttttttttttttttacatgatggacatttgatagctaagcaaagagctgagtgagactaagaatcagctcagctcattcattaaatgatgaaaaaaaaagctttttgtttttcagtgacagctgctttaatagaatctttctgaaaatgtaaacaaatgaatagaaaactgagactttttctatctagattcacaatgtctttcacgctttattagctacaaccgtcctttttaaaaaatgaaaactgagtgtttactgtgtgcttttattattttttgcatgaaagtgtggaatataatcaaagttattatctgagcttttattgaaaaggaaagctgaaaaaggtgttcagatgaactcttctttctttacatatgaattgttcaattgacatgttcttgtgcagaaaaatcatcattttactgttcactgttgaaaaagaaaaaataaaaataaaaaattcatatatcctttggctcttaatgttatccacaagttaaaattgaaaatattatctgaatatttccatcaatatatatatataatctgaatatatgtatatgcattggaggtaccaaagtgtaataattggggggcctctgcagaacattggttttagagtatggactagatcaaatattaaagatgtatttcctagaaaactatatccactgagttttattaactgtgtgaaagtagcagctaagtgattattatttattttgtgaaacaagtcatggttttgaatggaaatattatttaatatttatattaaatttctgtagtaaacactatgacatattaaagttttaagatccaaaagtttaaatacactatattctttctttttacttttatttttcggatacaaattaactagagcaacttttattactcaaagatttgactgccaaaatattattagaattgatggagtactgtacataacttagacatatctcttattaatgacaaaacctctataaacgttttgtctttctggacttatatattgttacacttgtttccctaagttcttattttctacagctatgtttaatatctttttatggacctcatgttttaatcactttctccttactagttaactagaatgctactatttcaattattttttttatcacattatatacatattgtacaactcggggcatacatacatacataatttatcaaatttgtcatttattgcatgtaattttttatttactttttttatggaatttatatagagagagatggaatttttaggtaaatgtttgaaaaaagagacaaagaagagtttatgctgtttgcatttgtcagtgtgttgttgatttgaactaaacattcgagagagaaaacatatgttggaaagatatttgacaataattgtgtaataatattaatgaataccagtccacttgttcaatcactcttcttcccaatggcagcgtacaaaccttaagtacactatacctatacattcaccctattttttgaacaaatggacccttttattttatttttttgtgtatggggggagggtcgtgttcactttcagctacgcttttccgtacaatttttcagcaatatggataagaatatacaaaccaagacatgttcttattttgccttcttcacaccattacaataatatttgagggagattgaatgaaaggaaaattctcattaattgaatgaataagtaaattacgtgtatatatagcaaccaatctgtaagttgtagtaactaaaattagttacgaagaataacataaataacaagcatctcaactaactaatccagcttatttagagttcgtttggaacgtcgtattaggttgtattgtattgtattatattgaattagatgatatatcatattttatataatactatgttaaattttaatttatactaaaatattgtatattgaggtgtccataaaagttaataccacatatagttttatatataaatattgcataaaatacaattcaatataatacaatgcaatacaatacgacttaatacggcgttccaaaagagcccttactaactaactcacttcctatacttttaacactcttcctcaaaatagagtatgaatgtcagtcccatcttgtctttgagaagtttgaactggagaaaggaatttagtcaatatgtttgctatctgattctttgtagaaacatgcacagttttcacaactactccttggattattttcctaacaatgtgacagtctatctaaatatatttagttctttcgtgatagactgaattggttgcaatgtgttgagcaactttattgtcacaatgcagcattgtaggcccttttgtgatcgattttaagttcttttaggatatataaaagccacactacttcacatgtaatgttagacgttgaacggtattctactttagtagaagaccttgatatagtatgttgcttttttgctcttccaagacaccatagaaatatcaatgaatatgtaaaatccactagtggacctccttgtatcaacgcctgctgcccaatctgaattggcataggcttgaagtttgaattctaatgttgatgagagcatgattccttgtccaggagtacctttaatatattgtaaaactctttcagtagcagtcatatggctagccttaagtgtagcaagcaattgactcagtttgtttactgaaaaagatatgtctgccctagcgattgttgctagactttctttgttatcctgggataatttaaagtttgtctccatgggagtactaactagtttgtttcttaggaatctaagatcatcaaggaattgtaagggatatcctctttgagacacaaaattcccttatttagacactgttatctcaaagcgaagaaagtatttcagttcaacaaagtcttttgacttcaactttgtgtttaatcttactttcaaaccctccaactcctgtgtatgatttttggcatgaattacatcatccacatagagaagtagtaggatgaaattattaccaaaatgcttaatgaacaagcaatgatcagttgcttaatgatgaaagccttcatgctctaaagttgttgagaattttcaaactgtaagtgtcatgttttgtgtggcaaattagatattgcttttgttcagtatttgttgtctctaacatctgttctggagttagttgcatctgtttttcactaatatcattttagtg

SEQ ID NO: 93231 - DNA, 906 bp, Cannabis sativa
tgacaataatgttttcttagaatttcactctaaatgttgttttgttaaggacaaaatcacagggagggtgctcctcaaggggaggcttaaaaatggcctctacatgctgtctcacagctcctttccttccaaagttcaacttcaatgtcagctagttaccaagaaatcccaacccgagtcaccaagttctggttcatctgcaaccattcaagattgtgcacctatttcacattcatgtttttcctcatgtaataagagtactgctacatcagtaactccccaatgtaatgactcttcacataataacaatgattttttacctcaaactaatgaatctttatcttgtcttgctcaaaagtctgatgtcaatatatggcattcgaaacttggtcaccctacactagaaacattaggcaaaatcctctcaggattacacattcccaccacccttaaaaatttaaaattctgtgatgcttgcaaaagaggtaaaactcataaataattccaccctttatctgagtctagagcatctcaaccattacaattggttcactcggacttgtggggaccatcccatgttgaatccaaagaagggcataggtactatattcactttctcgatgattttagtcgttacacatggatctttcctttgtccacaaagtctcaagcatatagtaccttcttacagtttaaaacttttgtcgaaaaacaatttgatctccccatcaaggctgtccaatctgactgggaaggtgagtataggcccctggcatcattcctcactcatcatggagtccatttccaacatccatgcccccatgaccatgttcaaaatggtcgagctgagcgcaagcaccgtcatgttgggttttatgccctaaataaaactctgtttcaatgtaa

SEQ ID NO: 93232 - DNA, 1181 bp, Cannabis sativa
ctgcagccacattttggatggcggacacagccatcactgcgacgaccaaagtcgaaaaaagcctcattctgattggagccatttttgttgggaaaaagagaggtaaaagaaagaaaatgttgagattgatgagagaattgtggttggtttattttgtggtgaattgggtgttattgttatgtatttatagtaagaaagataattgagttttgggaaaatgtggccttgaagaccgttgctccaaccaaaaattgcacatgggtttggtgccatacagctggtgctgctttgtgccaacggttgttttttctttcttttttgggtcccatttgcatttggtatcaattagccataaccatagcctgtctttcttaacaactttcattctttattgggttctgtaatgtggcccttttttggtcttctcttatcacttttttactattttattatttattaatagttttcttttgtgcttttaaaaaaatatagaaggaaaaaaatattagagtaatcagcggtaaaattccgttttaatttttagggtatataatgatataagtatttaaagttttaagtttgtaaacggtgtaaatttattgtttatttttagcggcataaatgtttaatatttgtaaaattttaatttttctctagtttcgtcaatacagactccgttttgaatttattaatttagatttaatttatactacatatttttatctaaacccaataatctataatgtgttctgtttaagataataacagtttgtactgacaaaattagagaaaaattataattttataaatattgtatacttatactgctaaaaataaacattgagtttatgtcacttataaatttaaaatacttatgacgctatttaccttaatttttatacactttaacttttttatttttttatttgtgtggtataattttttaagtttatttttctttacaaatttgagttttcaataaatattattgtggaaaactattgtgtacttttataagtgtgacaataaacttcaaagtcaatatagtagtaatttaattttttaacgttaatatttaacatgtacattaaatttgtgaaaaaagataaatataagacaggttttcaaaaaaaaaaaagggaaagttttgctactagtaacccaaaatattaattatgttg

SEQ ID NO: 93233 - DNA, 969 bp, Cannabis sativa
catataggctcacacaagcacactaatttggatggatcctatcatgttacaaggtttatacacatatagaagaagattacaaaatttacgttttacaaattatttatttgacctattcacaattgaactattggttaaaatcatatgattggatttgtcaataagttaaccatagcaattttgatcaaacaataataggttttataataaatgttttgataataaaaaatatataaaacacatacacatgtaacaaactggatagatgaatatagaataatttaatttaaataaattaaataattaaattaattttcgaaagtcaaataaataaatacataatttcaaaaataataaataaaattgaataattaattttaataattaaacctataaatttgaaaaattaggttttcaacaaacctaaatatctattcaaaaataatgccaacaaacttttcaaatttaatgttatttcaaaagaaaattaaattaaatatctaataaaataaaatagtaaattaatatcatttatctgattttataattcaatttaaatagaataataaaaatttgaaagttgacaaaatatctggttagatttttaaaattttctagattaaaataatcttattttaaatttcaaataaggtaattttataaaattaattaaataatctaaaatataaaatatctgaccttaaatttaaaagtaagataaaacaaccaaaattttaaaaataagtgttaacgcaaatttcgttaactaaatttgagcctcacaatagtgatttcacatagaattaatgaaagctatagaaataaaaaatatgaacacaaggttttttgggtggtttttaagttaaaattctgcatagtccacgagttaatctttttagatttcagattatttttcagggcctctcttgtatgattttttttgtgccctttttaatcttgtctgtcatt

SEQ ID NO: 93234 - DNA, 2073 bp, Cannabis sativa
atgggattggtatttctatggccaatggttctttggcgttcttgatgaacgatcattgaaaaaaccttgtttaaaggaggacaaggatcaagaaggagaacttgatctcgtacagcatgataggagtcattgagtcctttaagaaattgtaggacttgatcatgattgtgataatcttgattttgtgtagcagctacacaggtacatgggatttttgggcgaagttgagcgatttcgtcccaaatagcagtcagtttggtgaaatatgtactgacagaatcgtcaccttgttgaaggaaggtgaggttttcattgagttcgaaaatccgtggaccattgctttgattgaacctattatttagttcagtccacatgtctgcagcagtatcaagatacatgatactgcttttgatctcgggtgaaaccgagtgaaggatccaagattggaccatttgattacaacgaatccaagaactgtataaagcatcattaggagggggtttagggagcgtaccatcaatgaaaggtgttttgtttcgagcaccgattgaaagtttgaagtcccgagtccatggttgaaaattcctgtctgttagaatcggagttacaagtgcaattcctggatgatctgcggtactgaggtagtaaggactacggatatcctcatatgccggtcgatctccatggctatggtggtttgatggagctggaacaggaatttgggggggaagatctgcagagttctgggatgctggaggagcaggattctgaatcgcatcgtccattggattgtcagtggaagtagcagaggaatttgctctcgtacgcaccattgttgaatgcagaggaaggtgatgatgactagagttcttggattaaatcttctgataccatattagtgaagaacagagcaaaacagaaaagaatgaagtgtttctttatttctgtaaaatatgagaacttgttgaatgaaatcaatgcaacaggaggctatttatatagcaatacaaccgactttgactaactatagaaataacagaaataacggaaaaaataacaacctaactaactcactaactctaatagtccccttcaaggtggagtgtaaaagtcttttacacccaacttggatacaagatctttgaaatgagttgggaagagtggtttggttagtatgtcggccaggttgttttgagacttgacatggtttgtttgaagagtcccattggcaatcttttcacggacagtgtggcagtctatctcaacgtgttttgtgcgttcgtgatacactggattttcagcaatgtggatggcagcgctattgtcacagtagagaatggaaggaagtttgatgggaatgttgaagtctttgagtattgaagttagccatgtgagttcacatgtcgcatgagccatggatctgtactcggcttctgcagaagatcgagaaatggtctgctgtttcttcgacttccatgagagtagtgaatgtcctaggaagacacaatatccagatatggatctccttgaatcaggacaagctgcccaatccgcatcagcaaacgcatgaagttgtagaggttctggtgtagtggagtgatagaacagcccctgacctggtgaacttttgagatagtcgagaactctgtatgcagcctgtaagtgtggttgtcgaggtgcctgaaggtattgactcaatttattgacagcatagctgatgtcaggacgggtaattgtgagataaatcaacttgccaatgagagaccggtattgtttgggatctgtgagaaggtctccagattcattactaagtttgttgttgggttccattggtgttgaagatggtttggaaccaagatggccagaatcctggagaagttgcattgtaaaaggtcgctgagaaactgaaatacctttgctacagcgagctatttcgagaccgagaaaaaaatgcaagctaccaaggtcctttaatttgaattttgagtcaagtgtggcaatgaattcattgagggcaactgtgttattagttgctgcaattatgtcgtcgacatatataagtaaggctaggaa

SEQ ID NO: 93235 - DNA, 522 bp, Cannabis sativa
gctttagtatttttagtattttcaatttttagctaagtaccagacattattttttccagttgaatcgtgaaaaacgtgaaaaaaaaatatattttttcgggaccaggagcccagttgtcgcgaccaccaagttcctgggtcgcgaccctttttggaagtcgcgaccttggtcgtgacctcgggttttacagaaccacgaaaaattttcatgcccagtagtcgcgactagggtgactggaggttgcgaccctttttccaagtcgcgaccccagtcgcgactacccaattttccagaagcccccagaattttgaattcaagctagtcgcgaccagcctttgggcaagccgcgaccagctgacaatttttctataaatatcccaatttttccccccattcaaccctacaccaaaaattcaaatcactctttcttctcagccgaccctagcctctttcattccaaaaattcaaattttccttcctaaatcttcaatcttttcatcttttcttcaatttcttaaacc

SEQ ID NO: 93236 - DNA, 509 bp, Cannabis sativa
ggtcccaagtcggggtccaggtcctgaattaagttttatatatatattgaattcgggtcggatcagatccgatccagaaaaaaattaggcgaggtggagcagatctgatccgagatccaataagtatccgaatattttggattagagctccgacctaatctaactaaatggatctttttgacatgcctaatgaaatgcttttacagaaaataacttctagtttttcttgtgtattgctctggaatgtttggaattgcatataccagcttttgcactatgaggttaggcactctcctcctaagatttttgaatggacagcaagcttcctacaagaatacaagattaatcacggtgttgtaaacaacaccccaaattctcgacagtccatagttgttgcgacctgggaagctcctccaacaagccttgtcaagttaaatgttgatgtcgcccagtgtacaacatcgagcaaaatgggatttggtctagtcattcacaaatgcgaaggtggt

SEQ ID NO: 93237 - DNA, 715 bp, Cannabis sativa
taagggtaacttggtcatttctaaaatctcgactattcccaacattctcaatatcaaattatattgtcccgctacttcaaaattactaaaatgtgattctaatggctaaacgccacgttccaatgttgctgggcacaaaacatgagaaacataaaatttcatatatggcataaataatacatcccgaattcaaataaatgtccataaaatgataaatcataattaatattctagtttcataattaaaccgtaattatttgctaatttcaaattaaaactaaagggtctttacagttatccccccattaaaaagatttcgtcctcaaaatctaacctgaacaactctagatattgagccttcatgttggactctaacttccaggtggcttcctccaccttactgtttctccagagcaccttgaccaaagttatggtcttatttcgaaggactttatctcttctgtctaagatctgaattggttgttcttcgtatgagaaatttggttgtagctcaagattctcataactcagatcatgagtgggatctgaaacgtatttccgtaacatagaaacatgaaacacattgtgtattactgaaagcactagaggtaaggccagacgatatgctccagtccaacctcgaaaggccctgtaactctagggcataacttgcccctttttccaaaacgtctgatctccttcatcagagacaccc

SEQ ID NO: 93238 - DNA, 679 bp, Cannabis sativa
ttattaaatatttattagctaaaattgtattgactgaccatgttctctagttataaattatagaaattttatgtatagtaatagtaggcattcaaaaaaaattagtctgtttttttataaacgtgtatattatagttatttaagattatttgtaaatttttaaaaaattataaataatttactatattcaaaataaaattaaatagttaaacgtgtaacaaaaaatataaatctaatttttgatattgtaaacaatttaaaatattttaaattttaaaaataactctaaataattataatgtacgtgattatgaaaaataaattgactaaaagttcgttcgtaccaaaatataactttaaaattatatattgtgttatatagtaatattgtaatttttaattttaatattcattaaaaattaaaaaaaaaatccagatggaaatttatgtgttgacaataatgcgcccatggtttatataaagaagagaatatattgcaactaggggcctataatatatggagaagtagtcacatcacatactataattatatatttgatttcattttatattaaaatttgcacaattaaatcgttttgagtatttattttatttgaatcgtttttttggaatataaaaaaacagttacttttaatgatattttttaattataatataa

SEQ ID NO: 93239 - DNA, 649 bp, Cannabis sativa
ccaacctaacatgaataattcgtacctatgggtcaggttgggccttacatttgaaatatgggtcaggctcgacaggacttatattgttaaataagttataccagacttttagtagaattggtcggaacagatgaggccacctaaatgtacaactttcattaagagtcattagtagtttctttttgtgacattgcggggtaaggaggattcgaacttggacattattattgtgacgaaaaatgtaaaatgcctataaccattgtgttagtagtttcttatattacttattaaattaaaatgtaggagagagtattacctcaataatattaagataaatacttaaaggtattagtggtataattaaatattgagtctcatataatttaatataataattacagtagaacttctatctaagaatacacttgggactaataaattatattctaattgagaggttaactatatagagttacactagaaaaaaaattattaaaatactaaaaaaatttcaatgtaacaagaataacaataaacaatttttagtagtatatcataattgaattatttttgagtaaatataatatttataagtatattacaatttagaataaaattattaattctacataaataaatttataaaata

SEQ ID NO: 93240 - DNA, 661 bp, Cannabis sativa
cgtttgggtggcatctgaatcccaattttttagtttttctttaaggtatcaggtttaccaggttccggccagacagggtcagcaggcgagttgggttttcgggcggggtttttacaccacatattgaaatttataacttttttactttggtactgtggggtggaatcttttcaaaaatatagtgtaagttttatgttgtgtattgtgttaagttttcacggttgttccattgttgttttaattgttttattttgttgttttacggttgatttataaaaaaacagtatttttgtaaaaagaaaattgtataacagtaaaattataaacttttactcaaaatctaatatttttgtaaaaaaaatttcaagctcaaatataccctactctactatagatgagtagaagtggagaagtttaggttttgaatatggttattataatgaatgatgataggaggagtggttttgttgggctagaaatttttaaggcccaacaaaacttaaggtagacttatcttagagcacttacatcaattttattattaaatgttttttaataatgtgtttttttttgttttttgtttttttgcattatatgtagataattttgagctaaaattgtgaaatgtctacctttccacatgaagctataaagggaaaaa

SEQ ID NO: 93241 - DNA, 522 bp, Cannabis sativa
attgtgtttcacttgatactatctcaagcttgatctttaggtttgtatgccatataattctttttcattcattttttcccctttaattcaaaagatggttgaaatgatatttgagtgatttatgtaacatataatgatttggatggtttcatatttatattctatgtttgataaaatgactcaaaagtatgatttcctcacatttagcattggttgaattgagctattatttgagtttgtgcaattatttgtttttgaagctttaagtttatattggttttgatttcccatttttttgttgggatactcatgagaaaattatattttatacccactttattttatttgttttaatttttacctttatttccatattttttaagatatattcacttttaatagatgtgcctattataccttttatataaatgtaaattatgtactacacttaagtagaaagtaaaaatatattagacaattcactcataaaagtgggtagattttaattaaataaaatatgaa

SEQ ID NO: 93242 - DNA, 978 bp, Cannabis sativa
  modified_base (677)..(678): a, c, t, g, unknown or other
ttataaaagatattgcaataaatttatgataccttttttattgtgaatatcggtcaagtctgatgtataaccatacatccaatacaagcttactttactaatgccttggaaaatatattctactataaaagtgtaagtaaaccgaattattgattatcatatcagtgtaaatcttgtgtaatgataaatcatgggactaattagtttaatcacgtaatcttgattattactctgtagacaatacaattatcataaatagcaatgtgataaagatttaatagaatttatatatcaaacataagatcatgaaacaaacatgtgaacaaagaattatattaaacaagtaataaaataattcatgttcctttattgataaatgaaattcaagataactttgaaataggattttagttagggtcaaaacccaacaaaatctcacttgcactaacataaaacaatcagtacatttcaactaatcctagattttctctgtgctttcaaatgcagtctctgtcaatgtctcggtgaatgggtctgctaggttatctttaatattaaccttttctaccagcacgttgttgagattttatgccctaaataaaaactattttaatataattatatttgttatcaataagagattagaagtcatttatgtttacatgtagttattaatnnttatggtttaatatacaatttctattaaatccagaacatatagttcataattatagtaatgtcaacacagtggaaggtaattgtaattatatgtttcaaaagtttatgttccatgattcatgagtgcactggatttacactgatgtgatagtcagtaataaagtttacttacaccttgaataagtgttatgtcctttccaagacattggcacagtatgctagtatcagaagtatggagtatacattagactaggaccgatattgatcttgataaagatattataatcttactgttgtatc

SEQ ID NO: 93243 - DNA, 581 bp, Cannabis sativa
gcttccatggctcggccaacaaccagatctcaagatggcactgctccatcaatggtcgacaacaacacagcagaagtcaattccgactccatgcctgcccctccttcttcagcaatcccccgttgtaaccctcctgttcgtgttcaacctcagaatacaaatcaagatattcagcgccattccaccattgctgaagacaactcaactcagattctccaaaccagatcggttgctgatgatcattccagcccgttcttcctcagcaccggcgaccacccagggctgattcttgtgaccacagtcctcaacagaaccaactaccagccgtggaaacgaggcatcacaatggcgttaacgaccaagaataagatcgcattcatcgatggatctcttcctcatcccgaacctggtaacacaaatctaaactcttggttaaggtgcaataatatggtaatgtcttggttggttaattttgtctcatctgaaattgcacaaagcatcatgtattttgatttagctactgacatgtagagtgatcttgctgagcgtttcaatgagggtaatggccctagaatttttca

SEQ ID NO: 93244 - DNA, 502 bp, Cannabis sativa
ctatccacagagagatctctctcatcaatgggtttgttttctggaatggtttctaaggcctccacagactaagacatcgccatgaaggcctcagttaggtcttgtcccgcaaaaaacctttccacaattggaataagttcgccctcgacacacatggatgtgtttgtgagggggtcttcgttcaaatccatgaaagaaaaggaaaattctttgaaatgacgaatgggtgtgaagacgggctctgtctttcacacacactatctactatacggcccaagaacagttctatccctaacctaagcaaaaccttcttacccaaaacatgaaatgccaagaaattcagacaggggattagtgcacttacttttcgaatcataagcgataagtggtgtgcccagaaagcctacttgaaaactctgaagcgagttgattcaacggtcacagttaacctaaaaatcaaatgtctcctctaaggaagaacttcatcggtccagtcagaggg

SEQ ID NO: 93245 - DNA, 2588 bp, Cannabis sativa
ttttgataagttttgtgaggttatatttggtactttgattataaaatagggtatttatcaattaaaattattttaaagttatatttggttaatgtgtaagaaaaaggggtagttttcaatttaaagaatagaggaaaacgattcagagtgctctaagcccataatttcacctttcctatcagtgagcaacgatggcccagcctagtcgtttggcccatatatacataagcctgagcctcttgcctctaaaaaaacaagcttcactagttactccatctccaatggctcattgttgcaccggctcgtggcgtgcaccggtctacttcaccgtgtctgtaatcttggccttcatagccatctcaacatcaatgcactccaaaaccgaacaaccatcctccccaaccaaactcaatttccatgaactctccctcaacgcctccaaagccttaagaaaagctggcttcaacgtcatggccacccttcttcaagtctcccctgagatcttcctcttatctccaaactcaactatctttgccattcaagatgatgccatctccaactcttcactcccaccatggcttttgagaaacctccttcaatatcacacctctcctctcaaccttcccatgaaagacctcttaaagaagcctcgagggagttgcttgccgacccttcaccgccaaaagaacattgccatcactaacatcgacttcaaagaaacaacagttgatatcaacaacgtttcagtgactcatcctgatgtatttcttgcagaaaccatttccgtccacggtgttcttgagcccttttcttcgttggatcctgaagatgttcatcagggttggaactctatccaagcccccacctgcaacgcaatgtctgttctagtttcggatgctgtgaaatccaccaacatggttgaatggtcgtggattgtcaggttgctgagctcgaacggattcgttcctttcgctataggattaaattctgttcttgaagagattcttaaagattacaagggattgaattctgtaacaatctttgctcctccaaatttacagtctttgacatctccttcacccctactcaaaagaacagtgtggtttcacatacttcctcagaggttaacgtataaagaacttactgcattgcctgctggaacgttgctcatgacattggttcgtgatctatctctcgaggttgcaggggcagcaggtttcaaaggtggactaatcataaatggaatcgagattgtggcgcccgacattttcacttcaaaaaagttcaccgttcatgggatttctcgagcttttgaggttgctgatcaggtagctgcaatcggtacatagattcgaagttcttagttgctgttgtatagaaatagatcatacttactgatcctaatttccttgttcaattagttcggattgttgtaattttgtcaagctttgaatgaaaaataaataaataaaatcttcagctcttttctattgccaatgcatagtgaaatactaaaatcgttccaactccttaagtatcaaaatggtctgaaaccagaataactcaagtagctcatatatgcaagggttgcaagcaggctttggggccaaaacaggttaaggggaacagtaaaacgactcctgttttagaggtgattgtaataagaacaacactatttaaaaattgaaaggtcatcttaccgaaaattaaaagtctagcaattaaaattgattccttgtaatggctcaaaactactaaatctatcctctggagcttaagatcttcattggcgacaaattaattttaagttattggtataatgaattcaaaatgtgagcactgtgatgctaatgtaaacatcagtgaactgttcattaagacaagtattttcatatctgcaattctgaaactccatcaatctattataaccatccaattacacatcttcattttcaactctaaacatgagcaaacactgaagacaagcaacacgaaacaaataaaacaatatgtctgtacatgtatataaatcaaacaacaagaaccccaaaattcaagatggaacattttgggtcctcatcataattctggtcattctcattccagtcaaagtaacattaatggcgttaacaaatatcgaattcttaaataaaccaacaattgatcttgtttcctcatccccacattcgtcaacaacaatcacagaagccccaccaggccgaactgtcctttccatctccgaaatgaatcgcgacgggaacaacgcctcggccaagtgggcactgaaagccaaatcaaacaaattatcaaaaaacggcaagttatgaggatcggcccgactcaccagcggcggcgagtccaccaactcggttccggtgacgtcaacgacgcccaattgggtcaggcccatgacctcgtggccggcgccgacggagacgcaaaggactttggagtggttatgaagaaggcccagatcccgaaatggttggaagaattggacaaaggaagagactttgttttgccaagaccgggtggaccagaggcgcttattcttcttctcgattgtcacgatttctcggggcgaaggg

SEQ ID NO: 93246 - DNA, 841 bp, Cannabis sativa
acacaactcaaattctcaataattttgataccaagcatatcaaaattatacactaatttagacaccaaacatgtctaaatgacactttattttaagacgatttaagacacccaacatgtcttaaacttttcacgttagggtattaaccccacaacttcacatttcattatcaagacaatatcttgattttaaaatatagaaggccactttgtctctataatttttctaaaatttaacctccttgaaattattcttcatcaaaattttcacatatgcacatagccaaacttgatttagaatgttaattcaaaatcaaataaatgaatcaacaatatctcaacatactttgattaaatttgtggctcacatccacatttctagcataaagtgtatataaaatattactattgtgtatttttctcttgaaatgactctttaaggtcacttttattcatccaagtctgatcactcactatttgttcatcacactacaacatctgttactcttgttttagtgtatgttgatgatattttgattacaggtagtgatccttaagctgtgtcatctctaatcaaatccctgcatcaaacaccttggtaccctcaaatattcccttggcattgaagtcacttccacaaccaatggtctgctactgtcccaaagtaaatatgctcaagatttactctctcgagctcatatgtaggatgcaaagccaatcagcactcccatggtcagtggtcaaaagctctctacatatggtagtgaagtatttgacaatcctcaaacgtataggtccatagtgggggcactacaataccttacaatcataagacctgagat

SEQ ID NO: 93247 - DNA, 629 bp, Cannabis sativa
tctatatggcctcaagcaagcctcccgccaatggtttgccaaacttagttcaacactcattgcttctggttttacaaaatcccaattagatcattctctattcattaaaaacaaaaacaacatcttctttgcagttttaatttacgttgatgacatagtcattgccaccaacaatgatgttgctgctaccgtgttcaaacaacacctaaactccaaattcaaactcaaagacctcgacccctttaaattcttccttggtctcaagattggaagatttaaatctgacatttcagtgtctcaacgacccgtcgccctacagctcttacaagacaccagttttttaggtgccaaacctgcttccactccaatggagcctcacaaaaaattaagcaatgatttaggtgacattcttcaagaccctacttcatatcgcagtctaataggcaaactcatctacctcacaatcactcggcatgatataacctttgcagtaaacaaacttagtcaattcatgactactccttgccttccccatctgcatgctgcacaccgtgtgctcctgcaacaccctaactagcctaggcgtgttaacgtgattttaaacatgctgtgtagctcgttgctaatca

SEQ ID NO: 93248 - DNA, 676 bp, Cannabis sativa
acaccacaagtgagttgatatgatgttgtgggacactagactaaggcaattgagttgggattgaggagatgagtggagttgcagatcatcataatcaaaagaatacatgccactcttgtgtctccccatgagaagaacaacatgtgttacttgatctttcacaaaatattggttatggtgaaattgaaaatagactccacaatttgcagcaaacttagacacacaaactaaatttttagtaatagtagacacatgtaagatatttttaagaagtaaagggtgagagtgacaagaagtttgtgaaatgaaagtgtggtcaatgtgtttaatggacagagttgtaccatcaccaacatacatacgttcaggttctatgtaatcactattgttcatgatattttgagcatctggtgtgaaatggttggttgcacctacgtcagggtaccaattgttatcagaggcttaatttgcagcagtgagattagcttgagctgatacagattgtactgatgaagttgagctcgaggcaagggagttggagaagctcttgtcaaatctataatagcagtcttaagtagtgtgaccatatctgaagtagatttggcattgaggtctattggtaggtgaactaaacctcgtcctcttgaaaatccaggtccacctctcgaggaaacac

SEQ ID NO: 93249 - DNA, 776 bp, Cannabis sativa
tgaaatatcactgttgggctatttagctagggttgctgagaagatttggcattgcacatctctaggtacttgttggatatctgttcagatcttaaagtattttaggtgtgctaggggatcttctcgtgcagtatttattttccataccggaattttgaacttggacaagggcaaggcattgatgtatgcaaagaatggtgagccccttgacctatccaatttaaggtctgatggtttcgggccagctaagcccttgatcatgtcttttatttgatccaactgtgctttcacaaaaggatttgatgctgcagaggcctggttgattagcccttcttgattggtcagcaaccctaaatttgttaaagcctggctggccataccctagaagagggtattcaaggccggctagccctaagcctgatagctggccgtggtcggccacctctgtataagggaactagccctggtcgaccatcctacactgagaaactattcatggcaagccaatcctatgctaggtagggcctggcttcccgttgttccttgattgtctagtgtagcatgtgtgttagtagggggtatatcataccagttgttggaattaggtggatctaagtatctaaagtgatatgtctcatttctggagttgtcattatcttggttgtttccacccgtttcagacctagaaagttaaagattagcctttgggtgacttgctcttgcattttctaagatggaagttcaccttgttggccggccagaggtgcaccactaag

SEQ ID NO: 93250 - DNA, 628 bp, Cannabis sativa
tcgtccctggcaccgtcgacgaactaggtatgggcctcctttaatttttttttgcaatttatcctttaaattgtgaatctttaatataactaagatatgtagtttattaaaatttcaaatttctagtttttgtgtttggggatgaatgtagggtaggggaattgggatttctggatttttggtgttttgtgcgattttatgcgatgttatgcgactttaatgcgatgtaatattgaattcacgtttttgttagggattttgtgcgatttttgttagcttaggtagtttctgttatattatgcgatgtttatgcgatttttggcgatttgtgtgcgatttgttctgaacaatgggtcctctgttatactatgcgatgtttatgtgagttttggcgatttttatgcgatttaccctgaacaatgtgttctctgtaatgttatgcgatgtgtatccgatttttggcgatgtttgtgcgatttatgataaataataatttttgttttgtttgattgcaaatggctcgagaacttattctgcccttggctgagcattttccaggccgtatcacctacagaggaaatgggtactttgcttcaataaaggctaagtttgaagccttcaacttgac

SEQ ID NO: 93251 - DNA, 765 bp, Cannabis sativa
aaaaaacacagtaaaaaagttaaaaattccgcctaacagtatttttgtaagaaaatgacaaaagttagtataccatgtaaatttcccaaaatttatgggattattttagaaatactaaaaacatatataaaatacggttatacagaattttaaatatttttatatattttaagattttatttataaaaaatatgatttttggatgttttcataattttatctacagataaaaaaattacaagattatgcatatgtgttatctgtgtggtagatcatgggtgtatgttaggtaaatgtggtgtatttttttagaaaatgtatttctttactaataaaataattcatatttagatttatatattatacaatttttttaaaagaaaaatatctcatttgtatttggatatattcatgtgcccttttttatgttctccaacacaacttaatttcatttcaataaaatataattataaaataacacttattttgattacttaatgtaaataaattctttttattaaaaaaaaaaggaaaagaagtagaagaaacaagggcaaatatatatagttggtagtactgtaaatatagttggtaatatctattttcgcatagtaaactattcaaaaaaaaaaaaaattataaatagttttaaatagctacaccatttatgatcattaaattaaaataatcacataaatactgaaacaaataaaagatctatcaaaataatcttttaaaaaatctactacataactttcttttttt

SEQ ID NO: 93252 - DNA, 630 bp, Cannabis sativa
catttgtgtaaagtatgtatttatttttgtataaattacagtaaatactgtaatttataattttgatatttgtgatataaatctgaaaagtgtgagtaaaattggcgtgtttataattttgaaatgtattttagttatagtttataaatgtaaaatgtattgtagttataaaaatttatatctataaaaaatatatataatttatacatttgtgtatatatatttggatatggatatttgtatatatatataaatttatatatttgtatttttatacattatatatataatttgtgctgttaaatatttttaattgggattattatttgagatccatattgttattgttgtttaaagtaattttatattgttttagttatgattgtttatgtgattaaaataattttatttttgtttagtttaatttaatttaggaaataaaaaattaaaaagtttagtttaaaaattttaaatataaaaaaaaaaattatatgaatatttagtgtgactatccttaaataatgaacacaaaattttgatacatttatataattataaaattagcataattatttaaataagagtgtttgaaaataaaaaattttgcatttaaatattttaataaatttt

SEQ ID NO: 93253 - DNA, 552 bp, Cannabis sativa
tgaggaattccattcagcccaaaaaccaatagcttcgggttctactcagtagcaagtaccatccacaaaggtttcatcaattccgcaatggttaaacccaccattggggagattgaaattaaataccgatgtggttgttaacgcaatgacacaaacttttggttttggtgctatattacgaaattgtaggggagataccatcgctgcaatgtctaaaacttttcctaggttgtttttgaccaaaagtgatggaagcatcagccttaatgtatagtctgcaatggcttaaagatcctcatttactagttcactacatagagtctgattctcttgtggttgttaaaggatcggaatcatatcaagcctctgtctctgactctcattgtttgttagcaaatatctctcttttagtgtctaatttttttggaatataagtttctcatgtttatagatcagcgaatactgttcccacgtactagctaagtgtactctctcggtggatactgattgcttatggttagaagaattactactttttctaatgtctattgt

SEQ ID NO: 93254 - DNA, 1337 bp, Cannabis sativa
aacttaagtatttatttacaactttgagttaaacttaagtatttatgccacaaatttaaaatagtgcttcctcaataattattggaattcaacctttcaacaagcaacacttaatagattttttttcaactatgatcatcatgccctcgctgttagtgctcctgctgctacatattcaacaaagaactactcaaagatttcagttaaaatttaagaaactatggctgaaagattctaaaagtatgcacattattacgcaaagccgacaaccatatttttctgattaccctatacaaaattggctcttgtgcgcttgatttacaacagtgacgcttctataaatatggtagcttcaagcgaaaaataataatgctcaacaacaagtgacaatgtttaacaactctaatgacgaatctccacaatgcttttaacaacttcaatcttcaaaagctattctcgagaagctattggaacaagaagaaacttattggcatcaaaggtctcaagttgagtggctgaaaaaagaagttattttttattttgcaattacttttgagcgtttatacacattctcaagtagggatagttaaaaacatcaatcaatttaatttgattttcttgcaaattgtttagtttttagttgttgcgttaaagtttaacttacaaattacaattcctgtgaaaaccatactctttacttattataatttgactatatttatttgcacacaccaattttcacaataatctatttattactaatcattgatgtgcaaaacatttaaaatagaataaaattgattaaaccacgagacgacttagtgaggtgttataattaggactgaacattatgcagattgatcaggttcgcgtgtttcgagttcaaaaaattatattcggacccgacccgtgaaatggtttcaggttcgcgggtccgtgggtttgggttgactggattggtcaggtcaactcggtcaactttttgttttttcaatcacccaaattctttagaaaaatagaaaaatattctcaatccaaagtagaaacttaaatccaataatcctaaaccaaacaaataattcatcaaattgatgcttattgtttatgaaaatcatgaatggtgaacatgataataaaaactaaaagtgtcaaaataaattgtgactaaaaatttaaaatcgatactgtatagtccattcatacatttcatactaattattgtccaccataccccatccatacattccgtactagttattgttcactatagtctatgataataatatatccaatattatccatatccatatgatataaggcataagtatttataaata

SEQ ID NO: 93255 - DNA, 553 bp, Cannabis sativa
tagccaccatcttcctacaacaaccgatccagttatgacgaaagaataccaaataaaagggagaaaaaattaggggaaacaccttatagtatgggcgacgaataaatcttcaaccaggttcgcatttgtccaagaggccctcaaatttgcaagtgttgagggtcaagaacaacatttcgcaggtttcattgccatttttgtcttcgttcgtcttcttctctcttcaacttcaactatggagctttgatcaaaatatgtttcaattttttaaattatttagtttttgatttcttttgttttaattatttttcattcaacttaatatttatttttcgtatttttattttagttgacatggcattgaaaatagtaacttggtagctgcattatatgtccacataggtgattaatggggtcagatggaccagatagtagttttgttaacagcagagtaatttggttggtttgaccgtaaaaaaaatgatttgaagtttaaaaagctaatgaaaagtttggggtttgatgcaatttcttacttcaaaaaaaaaaaaaa

SEQ ID NO: 93256 - DNA, 508 bp, Cannabis sativa
tttttaatttcttgaactatgtggcatgtctagatagaaggattatatgtgtattttgcttgttgtttatgaataatgactttaggccaatgactaggaaattgtttttgataggattaggatattctgaacagatttaagaattaacaggaattaaattcttttgttgtactgttctagaaaaattctactttgctactgaagtactggcaaaattttttactcccttgtttggaacctttatggttctagatagtatatgagctttgtatgtttcttttattcttgtgttcccgattctactacctagaacaaatgctccctgagggttttattttaagatagtgaatttagtgggggcctctccaagcaattatggggagaggattcccatgtaccctcactatcttagttggtctaagtaaataactatttggtgttcttttagcttccataatgtctaggagagcttagcgaagagtaatggaaacaaacaaagaagatgtgg

SEQ ID NO: 93257 - DNA, 729 bp, Cannabis sativa
cagctcttgcccagtttgtgaagatgatgtcgaaacacaccaacacctcttttttgactgtatctttgctagaaaagttagagaggaagttacttcttggtttggtccattcaaatggcccctatcaggctgtcactgatagaatggcattcttggtgtgtagatttcaagcctaaactcttgaactctgtttctaatgcattgatttcagctattgtttattttatttggtgcaatggaaacaaatgtgtgtttgagtttgtttgtaatttagccaagttgattagctttgcaatcaagttagccatcaaagctaaaattagatgcttaaatgttgctttgctaaacactagacataggctaatttgtaatagaattgtttctatgtaatttgggacttgttattcggtgggctactctctttaacagctgtctttgcattgtattttgtttagtttgaatgaatttatcccttttcttaaaaaaaaactaattagttaccgcataatataatacaattcaattaataaaattttttaatgaatgttaactaagattttaaaaaaaaaaaattataaaacaataactactcactattatagtaaccaaataatttcttttctgaaaatataatgaaaaaaatatgtttacattgaagagtagatcacaacagtatattttttttaaactcaactgaataacaatgtaataaaaattatttttaaaatt

SEQ ID NO: 93258 - DNA, 511 bp, Cannabis sativa
ggattgacactcatatctatatgttttttttaccagtaacataaactagatttctaaattctcaactgtttatttgggggttaaaaaatttagttaattaggacttttttgcccccttaattttgacatgtatcaaattatatatgccgcttgaatttttcaggctataaaaattcgtcttgaactatagagattgttagatttaaggacttctgtcccattcccactcaattttactaatgcggtgattttccatatactaaatcgtgcctcccgaattttgacatgtacaaaatcattctctcataatttttcatcaacgttaggattctattagtaaaattggacaaaagttcttaaatctaacaatcttaatagtccggggagaatttttaatagcttaaaaagtttaaagaacatgatttgttacatatgaaagttcgcgaaacaaaaatcttaattagcctaaagaaaaattcctttttggcttaatgttttttttttttttttt

SEQ ID NO: 93259 - DNA, 1172 bp, Cannabis sativa
tggtacctagattattatttatactaaaagttggagctgtgcttataagacttggtctgagaattatacatttaataaataattaattaacaatactacttggtaggcttttgtatatatttatataaatattgctatttggcacgtgccaaatatatttctcaccagaacgaaaaaagaataaaaaagacagtacgttatttatatttattaatgggataacttttcgttgattacatacttgactgtgtccgacattgttgtaactggtttatgttagtgttaccatatatatatatgtacaaagttaattaaattaaatgagactaatttggtgttaaatttgaaagaggtatcatgtcttcttgttttttattctgtttggacatgagtaagacagaaaatgtatgagaaatatgaccagctcagaatatattgtgctcctagcaaatattattattgtctagctagcacatggaaaattgattatgacgatgcgcacaagggttttgtacttatgtatatatagtcggccgtttgaatattaaggggaaaagttattgaatgaaattcaataatgccaccgaggttttcggtgataattctgatgatcatgtgatctataataataataataattaatgattaaaaaattaagattactgtcaaaacagaaaattatgatcattttgaagataatatagctaacacgtttgttgttttccataacgatccgtagttgacaaaaagacaacaagtatatagtttaattaagtatttctaacacacacggtgctcttaccctacaatttaatatttttttttgacacaagtaacacatacagtggtgattaattagttgcatttttttttgttagagctaggccccataattataaacaagattaatgaagtagtaatggtccatttggttgttgtatattaatattcttctcaacttatatattttaatatgagtcaaatcgaatgtatattatatataatatatattatatattatatatatatttatataaattatatttatacaagttatgtacctatacccatgtaagactgaaagtaaatgaatcatgtttaggtttcaacttggccataggactaggacatgcatgcgtgaaaaagaagaagaacaataataataataaaaa

SEQ ID NO: 93260 - DNA, 655 bp, Cannabis sativa
aaaacttgactaaaataaaacactaaaaatagacattgtaatggcataaaatgtgtattccggggatccctgttataaaagttttacaaaagaactatatacgacgatgcctcaaaacatataaatcaaaatacacaatagatacagtccaaaacaaatcctggcagcccagcacgcaagccggcgaggtcaatatgtacattgttggagaaggtagtcacctcatggcagctctaacttttccttgcccttacttgcaccacatagcacccgtgagtcacaaagactcagcaagaatattaataataatcatatagtttattattcaaatattgtcatttatacacaatcaaaatcaaaccattatgcattattcataaaatgaaatccaaaatcactactggcttctaccatgaataagtatcagtatacagatatttggtaatacaaaattattataccaataataggaatcattttcatttaaaaatgtatattttatatatgttacctcataaagtaaccatcttcattacatcacattgcctaatcaggcaagtcgatgctttaatctaatgatcttgtattacgttgcctaattcgaatcctatagtgttcttcaccattaaaattcaagccttagtgattgagtaca

SEQ ID NO: 93261 - DNA, 991 bp, Cannabis sativa
tccaaacaacttttccaaggcaaaccataagcctcttgctgagttacgccccattacttctgttgctatggattctatcattgatccatagagccaacccatgagaagttggtcacaaatgatccattacttatactcatggttcacacaaactccaaaacctagtagcccatcaccaaatgcaactccagctggtatatactcttgtggagcatgtttcagtccactaatgtagtcatccaatctatagcctctgataatggttgtgaccattgttttccagagtgtatagttattgcgatcgagtttgaatgcaaatggttgtgagagagtattaccaaacggagtatgagcaatacctacttgtccagaatattctttttcatagctattttcaaaatatctagagagaaaaaggaaattatttttctctcaagttttcttgctcatgtgttgagaaatcaacaagaacacattatacactttatcctaatagcccacactgttccttgtgtacggtggatcgatttggaagacattggtgtgaattcaaattgtattatctagattaaggatacaacatacgagaagtttcgaggataccctgatagtcatcaacacgtatatattttaaacttgttattttattgttttgatttaatgtacacacatctggaaatctaatgggatatggtacaatgataattaaataatacaaaatctaatttaagtatgggatattggcggcaaaattaccagaattatacgatttgtgacacttaatcccataaattaattttttgacggcaaaactacctaaattacacttctgttttggtctttacccttctgtccaaaatgatatattaagtaccatggtggacatgctacaatgtattcctgatgtacgcgtgacaaatatttagtggtccgcataatattaataatttaaatattataaaaaatatttaactttaaaaaaaaaaaaaaa

SEQ ID NO: 93262 - DNA, 1346 bp, Cannabis sativa
aaaaaaaataatgtattattagttcttagaaaaaataaatttaggaaaaaaaattataaatttagatataaaattaatttttttttaaaaaaaaagttgggtttgattagatccgcttcgtataaagcgggtcggatctgatccgggtaacaagtctatcggggcgcagcggggcggggccaattattacatgatccagatcaggtcggattataactggatcagatccgacccgctccattaagactcttaataatcacaatcattagtgtaaaatgattgacaattcttgctcctagtgttaatacgaatgttaaattacttaatcatcataaccattaaaacgttattaagattatgatgtcacgtcattaaaaaattcaaaataattaataatacataataaaatttatcacctgatgaaagccattgttatgagtgagggcaacaccaagatcagccaaacaagaatacagcatgaaatcactgactctcaaagtgggatatctgttaagacagccatccaacttggaagccactaaggaagccaaaggataactcaacgcatagccagctcccccaaaggccatctcgaacgagaaatcgtagttggacctgatacactcagaactggtaccaatataatggtacttagtatgatcatacttgctcaaaacttctaccaagttatccaatgccagaacggtgtcgtcgtcagtcatcacataccatctaacattctcgtcaccttctctaaccatctcaagaatcgtccgcacaatcctaacctgagaagggttcgaggctctttcgtatattgccttgaccttttcgttcacgcgaaatggtggggccgaagatggccaagggaggaactcgtttttgggtggtttgtctagaaaaagatatcctcgagtcacgttgggtctccaccaggcttcggagtagtgccttttgttcttccacgtgttcatggagccaactatgctgaaaacgaggtggcttaggttggtttttatcatggggttattaggatcaggagtacttgaaataagattagtgctgtttgtaattggtattggccatttctgtatgagggagttgtctgtagtattgtcgaacaaaattatgtagaagaggaagatgagtagacctgatatggctaatgatttgaataagtctccaaataatgaccccatttttggtttttttgtgggagaatctgtcgctagtactggagatgtcattttcgtttccctctctgctgttctttgatgaccctcttaactcagtactcactcgttagtttttctaatgtatataaatatatacattggagtattttt

SEQ ID NO: 93263 - DNA, 556 bp, Cannabis sativa
cttatattataaatttttagtcagtttttgtgtctgaaattacatgttaaaatatttttttctcatagcgatattcattatagttacaatatcatttctgtaaattttttaaaaatttcaaaaagtttataattgcaaaaataaaatttttgatattctactttactacacgtgctttaaaaattttaaacctatttttaatactgtaaactactcaatttttttaataatttataaagatgatgttgtaactataacaaacacttctatgatattttttttttttaaaaaaaatatagtaatatgtattttcaagcacaaaaattaattaaaaatttataataaaaagttaaaaatacaacccatctctatttgagaaatgtacttaattttacaagttggatatgtactaattttacgaaatcacaatatgcaatatggtatataattccttatttttttgtgttaaaaaaattttcttatttttttaatttttgtattattattattttattttttgaaaggttataattccttaatttgattgtataaagtt

SEQ ID NO: 93264 - DNA, 660 bp, Cannabis sativa
aaagattaagagagttagatctgagcatggaggtgaatatctttcgataaatgatttgtgtaaaaaagaaggcataattcatgaagtaattcttctgtattctcctgaatcaaatggagttgcagaacaaaaaaatagaattttaaaagaaatgatgaatgcaatgcttattagttcttgtgcacctaataatctttggggtgaagttatattgtctgcttgtcatttgtaaaatagaattccatataagaaaataggtaagtctccttatgagctatggaagggatacaagcctaacttataatatttaaaagtgtgggagtgtctagcaataaaggtcttgttacctgatcctaagaaaagaaaattaggctcccaaacttctgattgcatgtttattgattatgctaatcatagtgttgcttatagatttcttgttgtgaaaagtgatgtacttgattgtaatactattcttgaaacaaagaatgctgaattttttttgaatatatttttcctttgaaaactgattcaatttctcatgtgcctgctaaaaataattttaaaaattaatcttttgaagagcttggaaaaagtaaaaggcaaaggaaagaaacttcttttggaaatgatttttatacatatcttattgaaagtgatcct

SEQ ID NO: 93265 - DNA, 554 bp, Cannabis sativa
ctctaatatatgatttccttgtgtgttttttaaggggagaagttaaaaaatactttatttttttatctattaatcaaaaatatccttatattatattttattaaaatatatcaatttttttgagtgggtttaccaatatactattactctttacttaagtctagcatataatttacattaatttaaagggtctaatggggacatcatctataaaagtgagtatatcttaaaagatataaaaatagaggtaaaaattaaaataaataaaataaaatgagtatacaatgtaattttctcttttttaagagtagtaaaaataataagtttgaaaacaccgcatatcttattgtgccttaactaatttcttcgtagacctatttttctattctgtacaatacatgtttataaataaatttaccttaaattctaaaaatatttatgtttacaataattaacatttttttattaaatatatagggtggaaatttatgttaatttattatatattttgtaacaacatcatttaaaactaaaaagggatgtaaaaacaaaaa

SEQ ID NO: 93266 - DNA, 1799 bp, Cannabis sativa
aagtctttattttgaatttaattaaagatttaaattaaaccacacttttctaaaatttatagattagtgataataagtttataaaagcacagacgtggtgtccttgagggtcagggcattacagtgtcaacccaaactgtattcatgcttacgaaagaagcacctatggcactcgaagtggaagatctgatggagacgaagctgttttggaagagtgtgaggatgggttagatcctagagtcggaattgaaataaatttagaaccaatggaagagatagaggaagtgagtatcagggatgaaaatcccactagaactatcagtgtgggaaaaaatctctctccaaccgtaagagaggatgttattaacacagttagagaaaattaggatgtactggattggagtcatttttacatgatcgatattgattggaataccatttgtcatgctttaaatttccatgaagatgcaaccttggtccgtcagaaaagaagacctttggatcccgctagagccgatgcggtaaaggcctgccaaaagattatttccttctcccgtagatcgatcagacggtagatgccacatttaggtacaagtttctcacctttatggatgcctattctaggtataatcagatccaaatgcacaccgccgatgaggagcacaccagttttcaaactgacaagggcctttatttacagtgattcctaactggtggtgaatctgatctctggcgagtatcagacgagacgtgagaaaatggccacttatgtcctcatgtcgcgcgagttgttgcaaagattcaaaagttataatatacatcagattccgagacagcaaaacttgttcaccgacatgttggttaagttggccacagatcccgagatcatcaaacacaaagtagtctttgttggccatctgaagaagtccagcatcgaagtgcagggggtgaatgccatagtggataactcccactcttggatggaacctatttacaagttcttgagcacgggagagctccctgtagacatggctgcttcaagaaaaattcaataccaagctccccgctatgtgatcatggatggaaagctatatcgtagggggttttcaattccgtatctaaggtgtatcaccgggatggagattagcgtggtggtccatgaggtccacgacggtttctgcagagatcacacttttgggcctagcctttccacgaaaatccttcgacaatggtatttttggcccaccatgaagaagggttgtacaaatatgtgaggaagtgtgaacagtgccagagatatgctaaatttctgatcacaccacccatcaaaatcacattaatgagcagcccatggccttttacagtctgggaattgacttggtagggtccctccccacgtgtaaatgagtcaactatgcaattgttgcagtcaaccacttcatcaaatgggtcaaggttgtacctatgaatacagttacttccaagaaggcattggattttgttgtcaaaaatatcgtgtgtaggtatggactcccatataaaattatttcagacaacaggaagcaatttgatagcaagcattttactgagttttgtgcccagcatgggatagtgaaagcttttcggctgtaacacggccacaagccaatggacaagtggaggtggtcaaaaaaattctcaagaccacgttgaagaagaaacttaaagcttctaaggcccattggccagaggaactcccccaagttctctgggcctataagaaagaacatcaacggggcacacatcgtttgaaatggcct

SEQ ID NO: 93267 - DNA, 1006 bp, Cannabis sativa
aatgtaatggtgtaaataaatcgggttggatttgataatgatttaatttgatctgaatttgttgttgatctaacctgctctgctctgctaggttatttttctaagttggatttgatgcgatccaaatattcaaatttaacttttttttcttctacaaatttaaatctttgtactaaaacttatgtatgattatatttgattactaaactcaataaaataaataatttacaaaattgatctactagttttaattatcaaactaaattttcttaatatatatttgaagagaggaaaaaaaaattatcaaaataagataatttgtttgaggagtttaatttttttttttttcaattggtcctagtagattttgttttagatcaaaaaaaaaaaaaaataggatgaataaatacaaattttttcaaatataatgttaatatttttcaaaattcatcaccaataaataataatgtagtatgtcaattacttgaaattaatattttttttacttgattgggttatgatctgataagaaatctgtttgttccgattagaaccgtccaccaatttgaggctccgatccgaccgaaaaatctaaattttgccatgcctaattaatggtgtggggtgaagtcttgtctataagaaaaattaaaaataaaccaacaaaatattgctaatattgacaataaattttaattgtgatgaccaaaattgatatttgtaaatttacataagtagtgttatttggtggggagtgtgtgtcaatctttagaaataaaaaaaattggtccatgtatagcgattagctaccaacaaattataatttgatattcatattagattattttaattataatttgatattcaatattgatatattaaattatattaattaattatttccctaactagagattaaagcatgaaacaccacaaaatttgacaagcataacattatgtcatccaattaattttcatttgttattgttgcttttttttttttttt

SEQ ID NO: 93268 - DNA, 1135 bp, Cannabis sativa
ttcaggcataactcttacctcagaagtctgaactcgggattcatctctatacaatgacagacacacttatagaattgtgagggctatagatagtcccccagtaaaataaaaaattgtattaaaaaatttaaatatttttcttttcatttgataattatagcacaaaaaattaaaaaaatcccgacaaaataaaaaaataaaataaaataaacctaatttttttaataacaattaaacccccacataatgaaaatattaggtccgtcactgcctctatataagtcattttagctaaaaagatagtttttattacatatttttaaattatatttacaaaaattaagcaatatttttctaattaattattttaccataaaaaatatcgtataaagtataatttttttaaaaataaaaatttaaatagccgcacaaagagcagcttatttttctagttataaaataatatagtcccaaacatgttaaataaattctacactataattgtctcttcttttttgaaattgtccttgaaatttaccaaaaaaatttgggataccgatcttatatgtctaactctaactcctgagtcatttcctcaatcttgttgtttttcaatagtacttaactaagaaaattgacttattctataaaactttcttctcctaccgatttaaaaatctgaacaagttattcttcacaagtcaaattcagttgaaattctgaagtttcatagcttagtacacgtgttgaatctgatatatactttttgagcattaacacatgaagtacattacgaactctagacaacaatgctagatgcaatgccaatttataagctacctaacctaaccattcctttccaggatttcaaatggaccaccgaatcaatagttcaacctctctttctttccaatttttttcacttctttcattagtgaaactgggagaaagacataatcaccaacttgaaattctatattactatgttttgaagctaacatacgaattctaattttatatggcctcactagtcttctaaactactttagggataaaattacaacaatattcccgagattataattataacaatggtcttctccaaaagttcttccctggcttaattagatgatca

SEQ ID NO: 93269 - DNA, 681 bp, Cannabis sativa
ctcagaatcatcccacttaaccttccccaggcagtgtgggattgcatagcttacccggtatttccccttacgaatcatgggactattgactgtcacaagaataattcaatccactattgttaataagataggaagaaaagtaaatcatatttaccttcctctctagcttcataactctgtcaaaatgtctatcttgttagtaggggtgttcatcaaaccgctcaaactacccgcaccacagtgcggtttgtggttttgaagtgttaatatgcagttcaaaccgtaccgcccttcacattataaaaataccatttttttttatttattgaggttcaatatgtgaatgtctagcccaaagcccactaattattgtattgttgaaacttaatttttttttcatatttattttcaagccttatggtattaagtgttgctcaagcttagttgtatttgtgatagtttaattatttggtgatagtccaaactacagaaaccgtaaaaaccgcaccgcactatattttgcggtgcagtttatgctattttttagtttcgcggtgcagggtacggtttgggaaattgaaaaaattacatgcactatacaaaaaatcttacttttagtcacaacaaaatttgtgaccaaaagtaaaaaagttgtgcctaattattaattatcattcttat

SEQ ID NO: 93270 - DNA, 607 bp, Cannabis sativa
cgcagagggaacgattcctatttttatgcaaatttcaaatatgagaaagtccccacattttgctttatctgtggattgctcggacactcagagaatttttgtcctaaactctacgatacactagcagataagattgtgaagccctatggaatgtggatgaaggctcccaatcgaaggcagaatttccttaccgcctcaccgtggctgcgatcggggaagacgacatctcaggctgacagtggggtgcccgaagatgaagcattcaacattaattccccctcccaattttcgcctgaatcaaagaagacaactcaccaaatggattcggcttctaatcctaccgtgaatgaagggacagttgttatcttgaaggaaaatggtattaaatttgcttctgacttggaatttgaaatatcagaaggtaagagaaagagaatggattctttatccattgggcctggtgctatttctggtgggccggttgatacaagtggttttgtcactttgataaataccacaaatgttgaaggcagttcaaaaaatgttcaaaaggtgggtgctggtatccaggcccaccaatcatcatgaatacactaagttggaattg

SEQ ID NO: 93271 - DNA, 605 bp, Cannabis sativa
tcaaaatcaaacaaaaatcaattcatgcaatgtctacaagacaatacatgaaccgtaattttttcttttcttttcacaattgcatcattagtggcatgatagtataattggtttaataaaccaagaacaatgaatagaagagatcatcatgccattacccaatccacatttcagaaagaaaaaaagtattaataataaataaatgtttttccttttcaattttactaattataacgcgctcatcgaaaatacctatggaaacttcacttttcacattagagaatactaaatacagcataaaatgatcccaaatcaacttgtacttaatcaatatgaatagggaaaaataacaaacagagaccatcatttatcttgggaaacaaacagaaacgaagtagaatgatgataatctattagagaaaagatgtaagctagtggaacttacggtgtgagaatcgaggatgaggattttcatgccggagatgtcttgaagcatccaattgacgtaatcacgggcggtagaaatgagcaccattgttactgtgatcaatactcgcaacgtaaacaataaaattaatctaaacatcatgaccagatcaaattgg

SEQ ID NO: 93272 - DNA, 2342 bp, Cannabis sativa
ctattttgatatgtccttgtggtattttttcccttatcaaaaaatatttgatgtctatattcttggttctaccgtgagacataaaattcttgtacaagtgtatagcactttgactatttaaattaatccgtgcaatatcttcaaatagctttagctctttcagaatcccttgaatctaagcacactcctttatggcctctatagctaccatgaactcaacttttgtggtggctagaactatcatagataacaattatgttttctagctaacataatttccacacactaagagctggtaggtttaggtagaccttttggtgtatttgtgatctgcataatttgaatcactaaacccttgaaaactaaccactccagctttgtgtttatacagaaatccttcatttatagttcccaccaagtatctcattaaccatttcattgtatgtcaatgatcctttcctagattggccatatatctactaagacaactgatactatgggaaaaattaggtattgaacataccataaggtatatgattgaccctactacaacaacatagggtatcttttccatctctttctttttgttcatagtttcaggactctgtttacttgtgacttggtactgtgatgtcatatgctgcttagttggtttggatcccttcatagaaaaattctcaaaaaattaattgtgtaacctttctgaccgattactaaagtcccttcctttctgtttctctttagttccattcctaggattcttttttcacaatctaagtctttcatgtaaaactttgagctaagaatcttcttgaggttgtcaacctttgtttttttctttctaataagcagcatgtcatctacatacaataataagtactcacattcttcaacacatgactctcttatgtataggaaggtatcatgcagactcttctgaaaccttgttttatcatgaagctgtcaaatcttctattccattacctcgaagcttatttcaagaaatattgtgccttcttgaccttgcaaaatgtttttgttgtagatcctttctcataacctcttgtatgttctataaagatatcttcttctaactcaccatataaaaatgttgtcttaacatccatttgttcaagttccatgtcaaactgaacaacaattgaaaacattatcctcatggttttatttttcactacaagtgaaaaaaattcattgaatcgattccttatttttgtgtaaaacccttatccaccaacctggccttgtatctaggttttcctccttctaactctccatctttcaccttgtaaacccatttttttgacactacagaaccatctgtaagccttgaaactagataccaggttttattcttaaccaatgatgtcatctcttcatccattgcatcattccatttctttgcatcaatactattcattgcatattcataactctttagttatcttttgatcaactccattgctgagtagaaaggcataggctatgatattttcccatattttgagactcaacttgttgacagattttaactcacttcttggttcatctcttgttaacatgtagccttcaagccttggttcttcctcttgagcatgttcactaggctcttcttctggtacttattaacttagttccatctaagcccgattctccttggtgttgatgttggtgcctatttcagtcatttatttcacctgaacagatccttggttcatgcttgaatcttctttttcgatgtttatattgctagcattactaggacctgcactcatgttagctttacaaggaaattcattttcattgaatattacatctctattaataatgactttgaaacctcctcttgacctgtgtaaaagtctatacctttaaaccccatatggatatcccaagaaaacacacttgctagacctaggttctaacttcccaatattctgatgtacaaatgcagtacatccaaacaccttgagatgggataagttaggcttacctgtccactttttcttatggagtcttgaggttgatagctctagaagggcatctatttatcaaatatgcagcagccgtgatggcttctccgcagaagccttttggtaaatctgaactaagcaacatgcttttatcattttccaagagagtgccattcatcctctcaaccataccataatgttatggtgtccttctaactgtcatgtgcatgtgcctgtatataccgtgatctaaacaaaattgatcaaattcatgtcaaaatttaagtcgattgtaaattttgagaattttaattttgttaccagtttcattttcagtcagattttttcaat

SEQ ID NO: 93273 - DNA, 550 bp, Cannabis sativa
  modified_base (33)..(64): a, c, t, g, unknown or other
cattgtttttgaattcatattagggtgttaatnnnnnnnnnnnnnnnnnnnnnnnnnnnnnnnntaaaataatttccaacagatgttgcctattagaggcatacggccctctggcttgataaccccccagatcaggatttggttggctgttagcccaactttcagcttcatcatcaccatgatcgtcggggtagtttgaacggtagtcactgttgacctcagggtcttctcttctccccctagacctactatttcttgggcgatcatcgccatcttgtggttggctgcgttaatcgcggggttgccactccctacgttggggcgtccttccaccatttctgccacgatcaccattgttgttcctagagtttcctccaccactccgccttagacagacattgtgggagtcatcacatcccatatgatgactgggtagaacttgctaatcggccgagggcgatcgattattattgcggggaaccctattagaggagtgactcctagccctttctttgttcctttggcgttcttcaggtccatagaccaccct

SEQ ID NO: 93274 - DNA, 936 bp, Cannabis sativa
  modified_base (52)..(53): a, c, t, g, unknown or other
tcttactttcacagtcaatgatcctcaggtacttatatatatatataaatanntatatatatatatatgaaaattttatataatagactaaatattcgaaattacaaaaataagtcaaaataattttttttacgttttaataataaaccgtttttttttttattattttatagtttagttatagttgtcatgagattatttctttggttttttttgtttgttttataatttatttataattgtattatagttgttatgagattgtttttctgtttttaattgttttataatttatttatagttgttgtgatgttgatttctcgctattttttaattattttcttactttttactgagaaaagtgttttttttttttttgtaattttaaaatttacaagtgtatttttttaataaaaaattttagtggtaaaattgtaaataaaacacaagagaaaagtattttttttttttttttaaaattctccattatatattatattatcctaaattaaaagttaattaatcggtattttattttaccatttgaagaacttaattataattaaaatctttttataaaacaatgtagcatcttatctattaatctttttaaagtttgatgtatatcttattaagttaattttgacctaataataataatgtgatgataattaattaattaatactaattttaggcagaattgattgaaccagcattaaagggaacacttaatgttttgaggtcatgtgcaaaagtgtcttcacttaagagagtggttttaacatcttccacatcttcacttatctttaatggaacaccactcacttcagatatggtcattgatgagacttggtactcagatccactttactgtgaaaattccaaagtaagtcaatatctatatatatagggatatgattttgtctcgtgatgta

SEQ ID NO: 93275 - DNA, 504 bp, Cannabis sativa
tcatattatagattctccactttgtctttttgtaaaagtaattctgagactgttcagcatgctctgttggggtgttccagattgaaaaaggcttggaaatcctctaggtttgctgatctttattttaaatttaaacatcttgatattactgattttttgttaacctcttttgagatgttagataaggaatatgttggcattttgttttgctttctttgggcattatggaataacagaaataattgcatacatcagaagaatgctatccctgtttatgatacttttgattggagtctgaattacttttttcagtatatggatgctcagcagaaaatgcagcagactcatatgtcggctcaaaattcaaatagggagtcgaccagtatttctggttcttctttgcaggtttttactgatgctgccattgatgttcgtggacacaagcatagttatggtataatggtggctaatgagtctggtgctgtcaaagctggtgtggctaaa

SEQ ID NO: 93276 - DNA, 1023 bp, Cannabis sativa
taattttcataccacattatcatgattgatctatgtcatttagctatgttgatatatgtgaccattgatgggtttagttgtgattgatacaataaagattgctttcaccctatgttgatatagttaatggacgagattgtatatgcctacaattatgatgacaacgttataagctcaataaggttacacttttatatatatacgtatgtgacctagggaaattgttagaaatttatttatttggggtcacaattgtatatataaaaatgtgtgttgggtcatcatataaatgagtcaaatttatgtggtctattttgaaataaagtttatgacttaagggtatgattatcatgattttaatatgtggataccattgagacaatttttgatttgatgatgggtcaaatcaaaaatagtaaataaatgattaattattgtttttacaattattaataaataggtattggtcccctttttccatcgtaccatttcatattcctgaatccccatcattaggaaaacaaagactttagagaaagttttgatgaaaaattagaagatcataccattctaagacgattctatggactctggtatgcttttgctattctttgattctattgtcaaatttctcatgaattaattagggctaaattcaaatttacagtgttctaacaatttatgctccacttttgactgagagtacacaaggatattgccgataaatactataacataaatatcgaggaaatctttgaatacccaattcatgaaatccatgaaagctacaagtgcattcgttagcctgaaagacataaccaaaatttcataatgaccatacctagctagtgagaaagcaatcttcataatatctttctcttagattctcagttgatgatagatcaagcgaagattaatcaaggaaaagactgtctttccttgaagattatcaaaaagatagtcgattcttggtaatggatacttattcttgattgtcaacttgttcaattctctgtagtcgat

SEQ ID NO: 93277 - DNA, 1075 bp, Cannabis sativa
ttaggacacaaaacccaacagaaataagcacatagagtatagggcggtggcacaattatatgttatttgaattgttgttgagaaagtgtgtattagggttaataccctaagtatatgtgatgtgaactagggttactaccctaagtaaatatattgagaattaggattactaccctaagtaaatatgttgtaagttagggttattactctaaatatattgattgggaattagggttaccaccctaaatatatgtatggtgaattaggattattatcctaagtttatgtgatgagaattagggctactaccctaattaaatatgttgtgagttagggttattaccctaaaacttcatatagtagagtatatgttgaatgtattatgtgcatatatatatatgtcaagatttatgtgtataagacataaatgagttagacctgataaacatcatcatgataaaaccactataagagaataatgtatggatcatgtacatatgagtagagttatgcgggtaatgcataactagattagactcggtaactataaccgagacaaaccctagtaaggccttaaatgtaaaatagacgtgtgagcgtaacacataggtctatcctacatagacattaattatattgacattattgtatagaataatataatttagtgcagtggcacaatatatatacaatagcgtactgtatgaagtttaattattattatacttattatgttgtattattatttctgtcttgttgggccttgacccacgggtgctctaatgtccaggtattattaaaatggtgtcagttcaaccatgagttcgagggttttgaagatgagttgtacatgttccagccaagctagaccacgagggttgggtctaacagggaattgtgttgaaatcccaattttgttgctttggtcggcctgtgagaaatgacttgtaatatttcaaaaataaattttacgtgatccgagatatgtaactttaactattttggtttaaaataaagtttgtaatattgcaagttgtttatttaaattaagtttaatattggttttaaataactt

SEQ ID NO: 93278 - DNA, 827 bp, Cannabis sativa
atatgatggacaaccctctaaattttaacgctgccatgacttaggcacctttggacaattcctggctaaggcatgaccattccaaacatgattgacacccttttgtatggaaccatctctgacaaaggcatgaccttcatgaatagattagacatccttttacatgagactatcccatatgaagaaatgaccttcctgaacatgatggacaaccttcttcattaaactaatttaggctaaggcatgaccttctcggactgggtggacatatctcttcatgggacaatcctcgtcgaagacatgactttcccggacaggatgcacatctctccaagtcctaatgcccgacacgacttaggcacattgagaatgagtccaagtgctccgggctggaaacaatctcttcaagtcctaatgcctgctacttaggaatcttgagaataagcccaaggccttcaggcttggaaaaattgtctttgattcctaacgttttccatggcttacgcacatctagaattagccaaaggccttcaagcttggaaaaatttcctctatgtcttaatgcccgccacgtcttaggtaccttgggaattagcccaagacatccaagcatggagaaattccctctaagtcctaatgcccgccacgaataagataccttagggaataatctcaaacctctaggcttaagaaacttcactttaagtcctaacccccaccaaggcttaggcaccttgggaccatccccggctaatgcgtcacctgattggacaggatggatatccctcttcatgggacagtcgtcgactaaggcatgaccttcatgg

SEQ ID NO: 93279 - DNA, 758 bp, Cannabis sativa
agtcacatgggtaagtttataacatattttttagcaagacaaatatttaagatatttagaatattagagttaggcgggattataattttggacttactttatttctctaaaaattccactaagtggaaaaataaatgaaaacttaaggctaaattttccaaaatgtccattacttccttcataaacaaccttattgattagaggtaaaatagtcaaaatacattacctcacataatttcgacatacgaaatgctcataagtcgtttctcgctaattctaactttctaagacactaaactatatctaagtgactttaatggtcaaatcgtcaagttccactgttatcgggcataataaaacataaaaatattaaaatttataattaacatgcatgacacaactaaaatacaataaaatttccataattgaaaaattatttctcaaatgcctattttttacaataaattttattttgtactaaatgtacgtatataacataaatagtatttaaatcactaataaactactaattttcgtatctaaatatgcggtaattgtacaagattttggtaaagttctatttgttaaaagaaaaatgctatcggacactttaaggtgccaaacaatacaagacatactattgatgtaaattaatataatgagtctcacatattttaatttaataaataatataaaaaattactaattactcaaaatgtgacacatcaacataatgttaggtaccttgctcttattaa

SEQ ID NO: 93280 - DNA, 713 bp, Cannabis sativa
tttttttttttaaaaaaaatacgctcaaatggtggagatatggactgtaggagaggtagttggcaaaggtggcaaggattttggatagtgttagttattcttcatttggttttgttaggaaaaagaagatgaagaataggtgaagacgaatgttgaagggttaatatataaccttatagtgtcggttatttgaaaataaccgacgacataggctacatgtgttaaatataaatgacacctatgccgtaagttattttcaaatgaccgacaccataggggtttttgttacagtttattatttctaattaaaaatcgaaggcaaatggttttaataaatattataactacgatttttataaaataaccgcttctaaatgccaatttttaaaaggcaggtatttttacaccttttagctttcctttttataaaaggtgtcaaaaaaccaacctctaaaagactgctttgtagtagtaatttagtgtggaaacttgttgatacgaacaagtggcttagtctcggcgctatgttcgagcgaatccagatcagtagttatcatcatgtttatgaatctcggatgtcttattatatattttatttgtatcctgttgatacaatatgatgcacaattagttttgtagacattagtgtttcttgagatttttgtctgttgacactattgcatagtgatagcacatatatgtgtaattatgta

SEQ ID NO: 93281 - DNA, 532 bp, Cannabis sativa
cagcccttcagtggttacaggacaactttttattaatggtttcacttatactattttatttgattctggagctacacgctcatatgttgcaacgagggttcttagtcagcttggtaggcctagcgatgtatttgacatgggatttgcaaccctattgcctaatggggaactaactatttcaagaaaaagggttagatctgtgctaatcaaaattgaaggcagagaactgagtgctgatcttggggagttaccattagccaaatatgacattatactcagaatggactttttgtccaaatactctgccagtattgattgcaaatggaaaaaggtaacttttcaactagaaaatgaggaaccttttgttttagtgggatcagtttacggttctcgtgtccctagaatttcaacactaaaggctagggatttactacacagtgtatgtgtaggattcgtgtgtaggattcctagcggttgtaattgattttggtaaacatgtgttgcttggacctgaggaggtcaaagtggttaa

SEQ ID NO: 93282 - DNA, 739 bp, Cannabis sativa
acagggatatcatccagttgacctccgacgagaatctggtgcagtacgggctttacccaaaggactttgcatctatgtccatggcagggaagaaggggaaatctgatgttggccgccctaaacgagctcatccggagaatgagctcattcaacttaagcgtgaagctaagttgaaaggaggtgcccgggcaaagcagtatgctcaggatcgtatgaatcttgaagatgaggccgaggttgaggctgaggctgagcaggtgacttctttgaagaggaagaagaaactcccggctacagccaggcctgttgaacatgccattcgcgtaagggagcccatttcatctgttcggccatctcatccccttgctggaaaagggaaggctgttatgtctgagatatcaggtattgatggacttctgactttctgggcggacagtcactctgcgttttacttctttcttagcatcttgattttcaagctttgtattttctgctggtttttgctaaccacgttgtttttgttcagtgcagacatgtctcggcaaatgaatgatgctctaaggaagaggatgggcggaagctctagcgcctcccctccggccaagaagtctaagggcgaagaggggtcttcagagaagaggccttctagagagcttatcgacctttccgaggagctgaccgctgcaactccttccactcccaaattcgccaagtctaaggagtctgggccaccaacaac

SEQ ID NO: 93283 - DNA, 989 bp, Cannabis sativa
gtgtaattttgtattttgatttttatttttcaaattttaaatttaattatcagaataaaattaattaattttagatattagtagattttcaacctgaaaatagataaaatctgatattttgcttaattggttaccttatttttattttgaaatttgattatcttatcttatttttaaatttaaggtcacataatttatattttatattatctaattaattttataaaatgaccttatttgatattcaaaatatgatatattttatctattttttttttttttttaaaatctaactagatatttcgtcaactttcaaatttttgttatattatttaaattaaattataaaatcaaataaataatatttattttattagatctttaattttgttttcttttaaaaataacataaattttaaaaagttagttgtcatttttgaatagatatttaggtttgttaagaacctaatttttcaaatttataggtttaattttaaaattaattatttagtttaattttataattttcaaaaataatcatttatttatttatatttttcaaaaacaatttaattatttaattaatttaaattaaataaatcttatatccaactatctagttttgttgcatatgtgtgttttaaatattgtttattatttaaacttttttttaataaaacctattattgtttgatccaaattgccatgattaacttgttgacagatctaatgatctgattttacccatagttcaattgtcaataggtcaaataaataatctgtaacaggtaaatttggcaattttctttcatctgtgtataaacctagtaacatgataggatccatctaaatcagtgtgtgcctatgcctttatgattcctttgggcttagatgcgtataggaagcccatttaatttttgtaattaaaatggactaggttgctaaataaaattgtcacatatgatactatgatagattttatttaggtc

SEQ ID NO: 93284 - DNA, 1282 bp, Cannabis sativa
taagatcctagtaaaataaattccaacaataataatgccattacaattattgtctatttgacataaacctgtgtgttacgctcacatgcctaattacgtctatgtgacatagacccacgtgttaagctcatacgtctatttacaataagaccttagatcggttcatcttggctctaattatcgagtccaaccaaattatgtcttgaacgcataattctttaaatcaatatataaaacatggcatagcatttaaaaatccataatcactagggtaataaccctagaccatataaccgctcactttagggtaataaccctaatcccgattcttaattaatcacatttataatattcaacatgagcaccaccacgcttaactctacgtgctaactactatcttacctaatgtcccaagtacatggagattccaaatccccgagtgctcatgaacaagtgccgataatcctagtcacaattcttaggatttcacaaatagagttaatcctaaaattcactttcaataatcacataattataattccatttatagattaacatatagagctcaaaatgagcttcccaacgatataaagaacgtccaaaacagagtcccgagtcaaaagttatggctaaaataaaatcgcgaaaatgggattgctctctgctaggttttggccgcgacgactaaaaatttagccgcggccactgggttcagaaaacccagaaatcccatttttaaggtctaaaaatgccaattttttcatatcttcgaatttcaaccaaaacatccccaaaactcaaacaaaatcatacaaaatccaatttttcaacttaaaccaaaccaatataacattggtgattatatgagcatcacaccaagcttaaaaatcaaaacaacaaaaaaaaatcaagcatacatcaaataccaaggttgcacacatatgctcaagtttgaagttcaaagctttaagataaaacccagaacttcaaagccttacaccagaatttgaacaacatataccaaccctaaaatcaaccaaaaccatctagatgcaatatacacaatcctaatagctcaaaactcacaacaaacaccaaaatcaccttcaatttcacatccataatttaaaggacatcaagaacaccttaattcattacataacatcagaaattaataaataaaaaagctaaggatcattaccacaagttcctcaagtttctccaagcaagaacatccacaaagttacacaaattcaagccttttcttccacaattgaaattt

SEQ ID NO: 93285 - DNA, 554 bp, Cannabis sativa
  modified_base (341)..(367): a, c, t, g, unknown or other
aaaaccgacgctgaaagggcttaaaaaccgcctctaaaaggggtttttgtagtagtgtcttaagatttctactatgaatttggtttcttaacttaatcataggaactcggtacgcacttcttattcgttgtggttttaatagggctgttttgagtttttagtcggcccgtcatatcgcccaaccatttcgttgaagagagatgcatgccccagtccccaccttttttttaactgcttataaaatgacctataattttagatggattgtcaatctcttggatatatgcacacttacaacagttgatgagaagatgataaattgaaagtacaacttgttgatnnnnnnnnnnnnnnnnnnnnnnnnnnntatttttagattgattgatttcaagatatgaattatagacatgaatcgataatcaagcagtaaatcacataaaaatttacaagcgcttcatctgcactgagaacacatctcagccgactagtgcttgggttccccgaaccagggtaaattcatctactaattctcaaaggttcatattacaatttcc

SEQ ID NO: 93286 - DNA, 1468 bp, Cannabis sativa
tccccttcccttaagcctcttgttagagtaacaaagccaacaattttgccatttaaaagaacagacaacttagttgtggacaagcatttcattattacttttatccacctgatgtgaaaccccattttttccatgaaaacaaagtttcaaagtaattccatcctatcaaaagcctttgctcctatcaattgtttgacagcaacaactcctttcttacccgaagttctttgatgaatgttataaactagttcaaaagcaaccaagatgttataagtaatttgtcttgtggataaaaatgcactttacatttcagaaatgacatatggaaggacctttttaaagttgagcaccaacacttttgaaatgaatttatacaaaactgtacaaagaacatgacaaacatttcatcaatacttgggcttttaccagggctcattgttttcaaggtaacaaacacttcaacattaaaatggatcaacaactcgtcatccatagcaacagtaatacttgtgggaatattggacaacgtaaaatgtagagcttgactatcaacttgagaagtagagaaaagaccttggtaatatgtttaaattacattagtaatatctgcctttgaagtctagaaggccctccttatttgtaagactacgaatcgcattattttcctttcttgatgaagcccttgcttgaaagaatttcgtattttgatcatttgactgtagccaatcaattcgcgaatgcaactgccaatggattttttcttgctccaaaagatcatctaaaattgcttcagtgtttttcatagcttcttctgggtgagacacatggttaggattattatggagtgctgaaacattttcttgagcttgcttaattttctttttgaactacccaaatgtttgaatattccatctctgcaagtttgaagcctacaattgtctatattagacacgacaacttccacaggatcaactagaatattgtaattccagcacctttgaactatcttcgtgctttctggtttaggtagccatattttctcaaagaaacatgcttcttcatttttcttctgtaacagtagtagtcaacaaagaaatgtgcacctgaatggcatggtgattcgacttgtaataatcaaggtgttctacagttggtaactcaaacatttctgcccaataattatcataaagtaacaatctaggcgttcctttatggtattacaaagtttcttttaaaaatcaatagttcccgtaaaatcaatagcttcttttaaagtttctttatggaaacacacacaagatcataatatcacagctagttagataggaaagaattgagtaaccaaatttcctttttacgttatttttcataaataggaaaactagacaactttccttccaaagttagatacacaaaataaggaaaaccaatattaacaccacagcaaaaattaataataaattaacaa

SEQ ID NO: 93287 - DNA, 1107 bp, Cannabis sativa
atcaaagatttaaaataagcaatcgaatgtgtatgagaaaaaaattatcttgaaataatttttgttaataaaaagtaactaattgatatattatttacataaatagcaactaaaaagttgcttttcttttccaaaacttgcaaaacattgaaatttctagaagggaatttttttttaattttttctattttcggtaattattttaaatttcggtatttgagttaaggtgtcatatcggtatttatgcaaataattttgttaaaggtatttttataaataaaattaattttatgtataatattgaaaactcccctaaaaattaacaattaggaagacatgacacatacaaatccacttattaataacaatcggatttgatagaaagtaaaaaaatagacaaaatttaagtacctggttttatgcactattacatgcgcctcagtatttaggggagaggcgtacgcctcagacttgtgaggcggtaaaaaatcgcttgaggcgtaaaaacatgtgaggcccatgcctcaaaagaaaaaccaatactataaggttttatcagcccattttcatttaataacttaaaaaaaagcccaataatacaatttaagaaaaagaaacacaaatttaaagttttttatggcattcctcatgaatttttcccatatttgtaagttttcttaaaaaaatgtcatatttagggtaattaagtttttatgccatatatattaaaacatacctttattttcccatatttttgtaaatagtccttataaaaatccaataaaacttaaaaaaaagcccaactcaaaactaaacctacaccatttatattaaaaagaatacaactatatttctttagggttaacacttaaacagccgaccccctccttcaaacttcatcattcttctcaaatatcattcttcatcctttcttctttctgctgctcagactaaaaaagaaaaaacttgctgctgcctttcctcttttattgttcttcttcctttcttctttctagctgtttggtgaagttttcttcctgatcccttgccgctcttaggtaaatattaattagtttttttttttttgttttttttttatctatattt

SEQ ID NO: 93288 - DNA, 1616 bp, Cannabis sativa
tgttactagttctataggggttcaagtttggacagatgcgtgtcctagatttattagtgctcctgtaacagctgatttgatttgattaatgacatactttctttcaaaaaaaaaaaaaataaattgcttcttttctttaaaatttactatttatactttacatttacagaatattattcagtgtactaaatatattttattaattattttgagttttaataattttttttgtatgaatgatatatatgtgtatatattcatattatatatttgaaataaataaaatataataaaattagaaaaaaaataaaattttagtgatttattttaatgaaaataatgcatggtatgatattaaagctgttttaaaataaagaaaagtaaaagtttaatcatgcattttaaaaaataaagtaaaaatgaggcggccttgatgcaaaactatcggacaaatatcattactcaaagttagtttcaaataatggggtggtccatttgtaagatatttcaattttttttttctttggaattaggtaacggataaaaggctgatttgacaaatctaacaatcaatgccacaccaacgtttactaaacgtcatgtacatatatccacacaatttcatggcgccgcctattatatctgagtaatgatcgagtaatgatcctgcaccataatttatacacaaacttacaacacatgtaacaattaattttatcgttatttaagattggtccaaacttaattaccacataattatatatgcatgtgtgtaatttagaagtagacaacttatttattttctttataagaaatccattgcgtaaagtaattagtacaatacgtttcaaataaatggatgagaattgacagacttaattttctttattaattgcatgtctacatcgatgaatatgatctacgtacgtgtccaattattatatataaacacagatataatcgtagaaacaaaccataaattaatccactatcaatttctctatactcaaaaaccttaggttcatattcaaaatgaagtcaacgatcatagcaggaagcactctcattagcttggcgtggcttgtaattatggccatagtagccacagctcacgaacccacgaacaatccagttctggacaccaccggaaatcctcttcggcgcggggttgattactacatcaagccggccatcacggacaagaacggcaggtttacgctggtcgaagggagcgagtggtgcaagctgtacgtcggccaggaaaacgattcgagcagcgaagggttaccggtaacctttgaaccgttcgccgaaggcgaggaagtgattagggagatgagggatttgaagatcaccttctctgcaaacaccatctgtattgtgtcgaccaggtgggagttggaagtacagagagatgtggaggtgggaaggagacttattgggactggaagctcaggaacaggaactaactactttcgaattgagaaacaaaatgggaactacatcatcaattggtgccctaatgagttctgttctcggtgtaggatcgattgtggttttgttggggctgtggtcaagaatggaacgaggtttctggctttagatggttctgttct

SEQ ID NO: 93289 - DNA, 947 bp, Cannabis sativa
gtatattgttatttctagatttattctgttgagaaattgttatttctaattgataatgtaaattttattgtttggctctcagatttagtttggagtaattcatggccagatttgaaagtttttcttttctgtggtgtcggttctaaattgagacatatagtgcaaaaataatttgcacacccgttagtgtcaatttaaaactgacacccaatgcctaaatgtcttagttcaaaaattgagaccaaagaatatactttttgtcactgtagaataggtatttgttctatgatccgacattataggtgtaagtgttagtttaaaaatgataccaaaagtgcattttgtagtaatgccccttcaaatctttctaagaaatttcttttatgattttaaaattcgacaaagaccaaatgatcatacattttaaatttcaattttcaccaaatgcataattacttttctttaattattaatattattttttagagcaaattattaatattattaatttcgttatcattagttgttggaagttaaaaagtttaaactattttgatttcattataaactttaatatttgcaactaccaaattttaactgcgttttggtaattagataaatattatatatgatgtgatttaatctaaaaaaaattaattattataattaagctttcatatttatttttgcatctttatattttgtactgatttattaaataatttttaaattactaaatacaaattaatatttaccaaaatagcatgataaaaatatatattaaatataaaatcttttacaatcaatttaaaataagacattatatacgttttttttattattattatacatatagttatatataaaagtatacaatgcttcttatatgagtgcacactatagacacctctaaaatatagtagaaatttgtgattcatctcttcttt

SEQ ID NO: 93290 - DNA, 593 bp, Cannabis sativa
gtttctctacaggttgtgtacttcagttggaggattgttcctctgaagtgcgttctattattttgaatgagtttaattaataaatcttccgattaactaaaaaaaaaataataattatataacatttatttttttacaaaattatatatagtatattatttaataaataaattaacatttatttgtagcacatgtatctaggggtaccaggatttttgtttagggtggacaaaatttagggtggacaacatataataatttaaattacatcaataaatttctgtatattaaaagtaaaattttaagttaattaagcgaatacgttacatataattttactatatttgacattattcaaaaaataattattagacaaaaaatttcttgtttaaaaaaataacatcttgagtttaactatgtgacatattttcaaaaatatgggaaaaatgaaccatcttatgataaatatggcaagaaaattaaatgccacaaaatatggcataaactaaccaagcaaactacaaatatggtttttttttttttaaaaaaaaaccataaaataacttaaaaacagaaactaattttaaatgaat

SEQ ID NO: 93291 - DNA, 961 bp, Cannabis sativa
  modified_base (453)..(467): a, c, t, g, unknown or other
gaggtaattaagcaatgaaatcatcattagaataataatatatatttatatatttattggtggagaaaagaaagattaatttttttgtctttgtttttgtttctttcatacaggttgatcaactccttgctaaaggggtcaatgtgactatatacagtgggcaagtaagtcattttcttactcatctatagaaattgggttagatcccatttggaattttttgctaattacttgacaaattgatgcatgatgatttggatgatatgaaatagtaatgtactcaatgagagaaagtcactcgattggagctggtacaagtttagatgtactaatatgacatttacttatgagataattttggttggtgattatagcttgatctcatttgtgcaaccaagggaactgaagcttgggttaagaagctcaagtaatttctctttctctctctctctnnnnnnnnnnnnnnntatatatatattataattattatagttggtgttagtggttttcttgcttaattaatatattgaacatattttaggtgggaaggactccaaacatttttgagcaaggatagaactcctctgtattgtgggaaaggaggcccaaccaaagggttcatgtcttcacaccaaaacctccatttctattggatccttggagcaggacacgatgtaagtaaactttccatatcacatttacattaccactcaactcaatgaacattttctttcttttttattattttcccatccactacttatattgtatcgaaactcattctagaaaaaaaaaaacatgttttagtttactactcactcacctaacctttctctaaggtatatatatatattgtcatttttgtacggttgtgaatcccaaaataggttagaaggataagttttatagtgagtgagtggctgaaaaccaatctacccctctttacaataaattattaata

SEQ ID NO: 93292 - DNA, 810 bp, Cannabis sativa
  modified_base (43)..(61): a, c, t, g, unknown or other
taacggtcaaaaaagttcaggggacacgatttagtacatgtcnnnnnnnnnnnnnnnnnnntactaattagccaaaaaaaaattaaaactaaccatattacaataatcaaaactatacttgctcttgctcatttgttagttaaatttcttgttttacagtcatgagttatttctatttctgagagaattttggtttatcaagatggactcatgaaaaatttgcattgcgtggaaaatgaagaattgcgtacaatcatttgttaatttatttcccctgtgaatgattgaactcgtgttttttgaagtaattgattgaactcatgctagtacgagaattgtgttttatttattatgttcgcttaatgcgcatgcgtcctcctttggaagccgtaatctctttattttgtcactatatattatatatctatatatattaattgatacataaatcaaactttatattaaaaaagtaactgatttcgttttttgccgggtaataaaagaaaaggcacggtacacgctatagtttgtggtttattatgtgcaaacattcataatctaataaatctatactgtacataatctatttgttacttttcacagtcaaaaagaaaagctatgatgatcagttccaatactctaaagaagacgaaaaagtactccgtatatatgctttaatcatttctgataccatacttttctttcaagtactctgaccttgaagaggtagtggctttcatatattttgattctaattaccatatacttattattttaacttaaatataagcacaaaaaaaaaaaaaaaaa

SEQ ID NO: 93293 - DNA, 740 bp, Cannabis sativa
taggactccctttgtgttgtgagttgctgctgtaaaattgatcttgtgttgcttgccctaaacacaagtctcacagaatggtaatgcacatgtttgaatcttttcaatgactcccttcttcagtaattccctcatgccttgttcactcatatgtccaagcctttgatgccatagttgcatatcactttctaaaccttttactgtttcttcctcagccacagatacagtttcaccctcgagtacatacaatccatgtactctctctcctttcatcacaagcattgaaccttttgtgatccttaggctcccattcaaggactttgttaacgtagattttcgttaaccaaatttgagcctgaatgataaacttgcacagaaaaataaaaatagtaaagaaaaaaaatgaacacaaaggttttttatgtagttttgcagttaaaattctgcatagtctacgagtcaatcttattagatttctgggtgtttttcagtgccttttttcttatgaattttttcgtccctttctcagtctatcttgcatcttcttataatcacatataggcagttaattactgagttgactgatattcttacaataattatcccctaaaattgtgggatctgattacatatcacgtaaaataaatgcggttattatttgaatatcacacagctgtgattagtccgcttttactaaatcaaaataaaacatgtagtaaatacattgcaaaccgtatttt

SEQ ID NO: 93294 - DNA, 627 bp, Cannabis sativa
aagtttaactctcagttacaaataaatatttaaatttaatttttagcattaataatatttaaattataattttagaacttgtatttaaatacctgattaaataaattaacatgtgacaatattaattcgtctaaattattaaatttttattatttaaaaaaaattaatttaaatatactaataaaaaataactttaacggtcaaatactccaaaattttaaaaatattatttaaatattattaccaataaaaattaaatttatccgagtaaattaattaaattcgtctaaattattagaactgagagttaaactagccatttatccgagtaatgtataataacaactccctaaaaaaaaaaaattgaagtatcggtatccatttcaattaactctggatattcataaacttttatcgtgattctttcttaaaatgactaaaaacttcaaggtaagacaagacaacaggtggatcaattacaaatttactcacaatttcataatacatatttttgacaactctcatcaaaaacacattcttccaaagccataatttactcttaatcacaatatcaaccacagatctcaatagctttcacatcagccttcttgacttcctccttaggaa

SEQ ID NO: 93295 - DNA, 540 bp, Cannabis sativa
gtattttattttgctttagtaatctttttttcttttagtttttttcaaaattatgggtattgttaagttttttttttggtaatttagttcttaaaatattttttaattaatgtgcatttttattgggaatttaaattgtttttactacattgattttttgcattcaattacttttttcttctaaggaaagatttcttctcagatctctttttggtttaggaaaatttttgtaagataaagaattcttttatggaaagttgtctaactctaatggatgatttcggtttttcctttaatagaataaattaaataaagtttatttggcaggtttgaagtccaaattcctgatcttggttcaatttggaaagtttcttttctggtcctaatttgctactgcaaaacccaattctgatactgcaaattaggatttttttttaagaaagtttcgtatagctgagaaatcatttttgtggctgtctttagggttggtatgttatataaataagacctagagagcagtcaaacgattttatctcttct

SEQ ID NO: 93296 - DNA, 632 bp, Cannabis sativa
  modified_base (576)..(585): a, c, t, g, unknown or other
aggtctcccaaactcccgaacatcacagcaacatcatttttttttcgtatatcaagtctcattcttggtgcaccggagaatctagccgaaaacaaatggcatcgaacaagtctccgacgccggcgataatgaaaaaacagagagagtattttttttccaactataattgtaattttctgggtttacagaaattgcaatatattttttagtatttcaatttatttccctttttaattctttatttacaagtggcacctccatcttccttcgaaattttacaggacaggagtttcaaaggatttggtaactaatgaaatgagtggagtaatatccaacctccatattggaggggtaattttattgggacccatttattttaaggattatttcacgtacacacaaaacaacaaaaaaaaaaattacaaaaatatgattttacgtaattttaaatatttttacaattttttttattttatttacagaaaatacaatctttatatgttgcactcgtgttcatttgttttcgattttctgttatctttatgttatttttattgttatttagatgttattttnnnnnnnnnnttatgtaattttcttgttgttttgtgttgtttttatggaaaattgta

SEQ ID NO: 93297 - DNA, 519 bp, Cannabis sativa
atatactcttttaagatttatattaatttctaattcgattataactttttttttcattaacattgtttgtagtttattaaaagtaataattttcctccataaaaaaaattcattttgtgtgtataaactaacttctagaattataataaatgttatacttcataaggaaatgttatacttcataaggaattctgtaattaatttatgtgctttatatagaattgtactttattaaaagggaatttttttcatttgttttagaggttttttaataaaaaaaaaaatatattaaaaatctcacatcatatttatcaaattttcttaaaatatataggtttattttttgaaaaaaaattaacagccgcgcaaagcgcgattttgttacctagttttagtataattgtaagtaaagctttattccacgaggacaatgtttatttaattactcaaaaattagtgacaaaagttaaaaaaaatgaggtgtttatgtgtagaaagaaaatagcataaataaaaata

SEQ ID NO: 93298 - DNA, 1211 bp, Cannabis sativa
acgtggcttggcacgtaacaatcacctagtatatatataaagatatatattgtgcttaacaaacaaaaaattatggtagtgcatatttttttggggggtcattttaacaattttagaagtcacgtttgaactataagaatcttatattttaactaactttaattgaattatcggtaattacttcaagatttcataaatgacacaacttacgacaagctaataaacttcaaaaggactaaacctttaattttttttagaggagttatagtggatttcgaacctttgacccaaataaaaagaaggatataatttattcaaaaaaaaaaaagatataataagtaaagacaattcctactactataccacacaacacgaggtttgtctgcatctatatttagttatgcctttttctcttttgtttgtttgtttgctacataattctagtgattcccattgttaattaaatagtgattaattagttttagttttggtatttactagtacttttccctaatattgtatagtgtgtggacgtaggtacactaaaattgcatgtatcaaaatagcagaattactcacctaattatattaaattgtgtacgtatatgttgtccatatatagcaaaacagaaaagaaagaaaaaaagaaaattaaattgctattatggaaagtggaaggttaattggcttagaggcgtataaataggatttatatatatatatataatatatattttatggaaaaaataggtactaaatggaactatacgtataataaaagctaataaatataactgcatgcatgcatgaatgattttcatatatataattaaaaggggaaaggtagtgtatcttttgacttaatagcaattgttttataaaaatagtttttataaaaaaaaaaaattatattagtaaaatataattttgtaccgtggcaaaaaataattatgacttacactgtgcgaccaaatataaataattatagatttatagtgtgtaattattattactatgatcgtataaaataaattaagtaaaattattttgtaaattttaatattttatattattattttgacaaattttataatcgcaaaaacaactaaatagtcaactagggatccctaaatacgggttcatttgtgcaagtatagtaaataaaacttgtgagtgggatgatattttgtttttatatctataaaaaaaaa

SEQ ID NO: 93299 - DNA, 652 bp, Cannabis sativa
tatatatatataatataaaaaattcccctaattatttttccatttaaatatgagtatggctataaaacaccattggtacttatcactatttagagatgacattttgcgattagttaacaatatttcaacatatacagaagaaatggttcaaagaatttagttgctcactcttaaaatgataaaaggaaaaaagaaaaattacaaagagaaacactattcaattgttgcaaatatcccactttagttacatttagcttatattttttaaagcaatttgcttatgtggtcatgcattaaaggtatatgtaataaccccaacatagtttcaattagaaccattattcatcatcatcattgataccaatttttgccaagtcttcaatgggattcatcagcatgttatcatcttgtatataaattttgaaccagagatgagaacaaaggaatttctcacataaatgactcaccaaatctcttattaattaaaataatggatgcaagtacaagaagcttccaatccaagacaccatattaattgcaacactggcattaattcttactaattaagtactcgaaattaaactctcttcatataaaattatcaaatcatttctatgtgaagctcccattattaacttactcctgcataaga

SEQ ID NO: 93300 - DNA, 1316 bp, Cannabis sativa
ctctaaaactatttagtgacacttcactgcgcgtcactaatgagggtgactggaaagctagttttcagtgacactttgtgcgtgtcactaaaccctttcacaatcactcattgcgcgtcaccgtaaacatttagagtcagattttttcaaactgaaacaataacagcaacccccaaaaaacgtcactatatccatttttttattttttattattattttgtagatatagtgacacacaaaaaatgccactattaattttttttaaaaaaaaaataatattcaattcttcttaattcatattttttaaattattatttttttaattgactgttattgtttttatttcaatcaattttaggttaaaaaaagtatagattggttatattgtaccagattttcttttaaaaaaatggtactagattttattttaataatataaaacttaaaaaagtaaattttatgaatattaatgctatatagaataactaatcaaattcttaatccactcatcaaaaaatagtagacagtgatacaactacagaaaaaaatctgaaacaaaaaattttaataagctcagataaaaaaaaaaacgttcataacttatatggagagctcaacaatccaacaagtgattcaacaaacactactattaaaattaattacataataatgggtatactaacctaaattttaacccaaaataatatgcaaaaatacaatcttcctaacagttaaaaaaacccagaaatagacctaaaacaaaatcaaatccaaggagcttaaaacaaaccctacaccatgaaagtcgaaatccacaacgaacttcaatcattgtccaccatgaacgctgcagaaaggagagagcgaaagagaggcaaacaaaaaaataaaacagaaaaagaaaaagagaagaaagatatttaccagcggcggagggtatctcgaaacttctgctggtaagagaggcggcgacggtaaacttctgctcataataacaatggccatctggggtggcctacggtgtgacgaagatcgaggcatttcctgttgggtgttttgggttcttggaatggaggcaaatggatttgtggcttcggtgcaaaaacagagagatggtgagaagtcgagcgagagagaaggtcggggtcatggctttcttgagaaaatagagagagggtgagaggtcgaggtcgtggctccagtgcaaaaacagagagaggctgggatgagaggcctcttgcggctgagatgttggctgttagaaactttaggttttttttttgtgtttaagagagagaggggaaagagataaggct

SEQ ID NO: 93301 - DNA, 882 bp, Cannabis sativa
tttgcccttagtggcatttttgtaaagacaagtttgtaaaccaacttgggttttctcttatcttaaatgcctagtactttttcattcaaacttaatatcctgatcaaatgcagagtatttttgggttttcccattgctcgtaattttcctgtttaagtagttaataatctaccaaatttttgatttacgagcagcagtcaattctacctcgcaatgacagttacaatctgtcttaagcaaacttgaatatacatttaatgattttatcacttttgtacatttttgattgcttgtatgaatagttatattatccatacattcactaggtttaagtacttttatcaagacatctcatgtctcgtttattactttcctatcttgcgtgaactgttagtactcaactttgtacgcaaattatgagttatatctcatttataactttgattttcctttcccgtcagacaggtttaaacgaaaaagttatgacggtttgatccccttctcgtcagaaaggtttaatcagtggtttaatccctttcgtgtcagaaaggtttgatcagtggtttgatccccttcttgtcagaaaggtttgatcaaaaactttatttttttaagttatgggtttgcattatactatgtatttcagatgaattccgatcaatcatacacaattttaaagagtaaagctctgtaattacttaaataatagaaatgattctctttattcataattgaagttaaaatattacatcagtaatgtgagttacatcatttattaattggtaatagggtcgcaaatgttccacgttctagtagttctttattagcgagccattgagtcaagccaatttgtaaactccgattcctactactgctttgatt

SEQ ID NO: 93302 - DNA, 1364 bp, Cannabis sativa
gctgcaatttaccttatttttaattttataatatttttcattaatatttttaaaattattgatcatacattttttattattattttttttataaaataatagtacgggaaagattttttttttgtaagtgcaataagtaagagcgtcatcacaatattcatcaggcaaataatcagggatagacctactcttgtgaatgtggggtctgtaatccacactaacaaaaatattaccttttaaaaaattaaatgtattttttttaatttgataattataaactaaaataataaaaaagcccccacaatattaaataaatatagtaagagtgattataatataaatataaatatttttttaatgataaataagtccccacaaagtaaaaattcggggtccaatcattttccattttattgttaaaaaatgaaaacaatggatttggtaaaagaaaataataatagacaaatacttttttagatatatatatgtaatgtttattaaaaaaatctataaaaaaaataaacacctactcatatagttacatttaatataacatacctgaatttcgtccgagttgttggtctggacagcaacttcccaaacggggtgacccgagaggaggctgccatattcttccggtgtatccattttgtcagtggtagtttttccgcccaggtagcggagcgccaccaccttagaattgaaccttacgcatttgaggacgtcaaagtgccgggcgtaggagttgaggtaatccaagacctctaggtgggaaggaaagctatactcctttttcactgcagcaggccatgggaaatccgagaactcgtagtctcggtaagtcgattggaggttagtggagctgtaacagcaatggctccacacccctccaatcgtatcagtcccttcaaatacaatgggatcatggtgtctcatctgtttggctgctgcaataccactaactccagctcctattatcccaattttagtaaaaataggagaagtaggagccatttttggagaatttatttagtaatgactgggttgggaaattggggtgaaattttgttgtgagagcattgtgatatatataggagttgcatgagagttttgggtacgtgaaacaatatttcacgtgttggtgaaagtgttggaataatcaataatgtataagagaattaatgataggttggtgctttgaacataaaaatgaggctaattaagaattttttgacatgtactaaataaataaattatgcttcgtgaatttttttggttaaaccattgagattgttaaatttaaggacgtacttttgtataattttagttaaaaaattatgacatggatgaaagttcagaggcat

SEQ ID NO: 93303 - DNA, 738 bp, Cannabis sativa
tctgttactcactaaaaaagattatttagtgataattttttagtcgcaatatatatttatttgtgactaaatatgacttttactcataatataaaaaaaaatattagtgattaaagtatagtatttagatatgagaactcactaaattagtattagtcacaatagttttagacataacaagtattgtgacaaaacgtatttagccacaacaaattgtaatttttgtgactaatacatttagtcacgaactttttagtcacaacataagaattattttttataattagtcataactttttctcttttaatcacaaattttattgtgactaaaattgtaaattttttttttatagtgactgattgtgttatatatataatgtaaatgacaattacatggtgatgacattatcacaatataacttattaatatggtctacaatacatatagttaatttggagtattattcatgaaaatagaaaagataacattaacaaaatcaaattttcaattcaagagcatatatatatcttttaattttttaagtttaatatatctaaacttattactatggaaataacaaggaatactcttctcttttttaatttattctcattgattatatcacaaaaatgaacattacttaaattatatcgtactttagctaagactacaattactaggtaaattacatagtaatgtccctcatatgaaagcgtccaaaaccctctcatgggcta

SEQ ID NO: 93304 - DNA, 2492 bp, Cannabis sativa
gtgatttcattagatgatatgcttacatgaacatgttgctcgcattgtatttgtatttgtaattttgaaggtatttctcaaggttgtctttagttttcatctttagacaagaaattcttatattactgctagtaaaactccggtggcattttataattaattaataattttttaaaattaaaataaataaaattcaatgttaaattacaccgataaatacatttttttttccattaattatgaaaaggagaaactttatctaaactaaaccccaacattagttcttccttgcacaattttttaagggtagtaaaccttacttaacgggatgtttcgatatattctttacttagctcattagtgaaactgaattgattgccaatttgccaaatggcttaatgaattttgtaaagaatccaatgtgcattaattagttttattctcttagctgttatcttgccattcagcatttccttcctccactatcaataaataatatataataaatgataaaataaatgatatctagtacgtaacagcagtattgaacagggtgtcaaaatctgtgtctcaaccactgaagtggttttaattccaatagaaaaatcatttatgtgaatacaaaaactgttcacattgttgtatctcgatatatatacactcttttcatctacatatttataataaaatataaataaattaataattaataatgaatcaaataaaaataaattaaattcaaaaacatcctcatcaactgtcaatttgttgttttggattttgatcatgatgttcatcatacgatctgtaaagatcataaggcttccaaagataatcaacaggacaaggcatcttagattcaagcctcacccatggctttcccttaccactccaatgaagcaaactgactggaccagggtgcaatgacctacaattgttgaccacattatcaccaccaagaccatgttggttccacctatgttcaatcgcttcaacctcaccaccaaaaaccaacaaaaatggtggaagagaacccagttggtagattctcctctctctttgaatcttcatccatttctcaatcttactagtgtaatctccttctctccatttaaccaaatccataaccataacacctgtattgaaataacaaggacttttcttctcattattattattattaccttcaaaagcttcactaaccatttcaatatctgaccaaaactcttcagagaaatagctttgaaaattagcatgacagtattctggtgctcctattactcttgacccacttaaggtaacctcccaaagcttctttatatcatctactacaatggtatctgagtctaaatagataactcggtcaacacacgagtcaagcaactcagccaagtaacttcttgcatagtttaatgggttattaagagcttgacgaattgaagatgaaatcagattagttacaacactttctttgaataaataaagcttgaatttcagagaagggaaagtgtaacgaagaacacgattaagaaactgggtattttctattgaatcagaatcagaagcaacgaagtgaaagaaaatattttctgggcaagaagtgtgtcttagaactgaatgtacagaagcaattgagcctcttaagtactctgaatcgagagtcattgctatgtgaatagctaaaggattacaagataatggtaatgtaagaagtgggcaatctaatccgtttctgtaatctggagcctctaaaaaatggaggggaatggtttcggaatcggttatttctcggcctctgtaagtgattttctcgggaaacaaacgagaacaaaacgatgatgaacataacaatgaaaatattaaaaaggtaatgggattcatggtagagaagaatatgattatggaatggaatggagtagtgtgtatagtgttggattggattggagttgaaagaaaaaaagagtatttattggaatgaaaatagaaaaggaaagaaagaagaaaggaatggagaacgttaacgcgtaatacaacaacaacgcgtttactttcttcttcaaatataaataaataaataaataatagaggatttgtatatcaaattatttatgaatggtaaggtaagcttacctggtttgatttgaataatatttgagtcaattttgaaatttcctcaacttttcctttccttttttattttttatacttaatataattgagggaatatttaatataatataaggaattttcaccacaccatatttttataattttattttatataatataatatttaatttatactatttttaaaaaaaatatatttataaaattaaaaataaaatatattttaaatatcatagcaaaaaattgaaataaataattatgtgaaattttgtgaaaaaattgaaaaaaattatttatgatttaaaaaaaatgtgaaaataaaataaatttaattattgatatcttttttttttttgaaaggattt

SEQ ID NO: 93305 - DNA, 549 bp, Cannabis sativa
tataggttctcactcaattgatgggaacaaatagtggttgagattagtcttggggaccaaacccttatattttttatatagaaaactaattagagttacatcaatcctaattagatttactattgagtattacacataataaagtccataccaaataaaatatttattggactcatttatttagatcacttatttaacttaatttaaaatattagttcaaataaattatcttaatttataagcccacatatattaaattattaaaaataatcccacactagaaacccttgcagacactttttaggctattgtatattatttattggagtagtaaaagtgcaacatttttaacaatgtggggtatattttcgtttcaaaaacaatttggatattcaaatgctacatttgagtaactttgagtatttttcagtcaaaaataaaattttattagtaaaatgctacaaactttaaacattgagtatctttgctataaatgcccattctcaaaaaaaaaaaatgtgacaataatttgttttgttttgttttgtt

SEQ ID NO: 93306 - DNA, 537 bp, Cannabis sativa
attaaaaatatactaaacttaatctaaaattaatattaaaaataacataacagatagatcgaggaaggtctatcaacaagctgaacaacctagcccctcagggactaggacaaatattcccttgccagaggcacgacagagcttgcctcaaagatctaacgtgaaaaacatccagatcctagcaactaacggcatggggggccagccagggatctcaagctcaacaacatcccccatcattaacctttggctggctagccatctggatgagttcccttggccgaccagagaggagcacttcctccccaagagaagcaaggtaccaaaggtcaatcttcaaccgacaaggaatgggagcgggtggaaacacccaaaacgatgatttgagaagtgaaatcgatcactttagacacctagatccactaaattccaacaactggtgcgatctacttcctatcaacacactgccaaattcaatcaatcgaggagtcacaggtgaccagacctttctctatgcaggtctggctagccatggag

SEQ ID NO: 93307 - DNA, 507 bp, Cannabis sativa
tcttggatttttatcaattcaaaatattttatctacataaacttctatattttgaccaatttggtgttcaaatattccattcacgattcgttggtaagtggctcatttattctttagtctgaatggaatggtcttataacaataaagccccatattggtaataaatcttgtatattcttgatcaccgacatgtatttttatctgaatgaatatgcatgcataaaagacacgagttttcgtcttgctgtggcgtcaactagctgatcaatcctaggtaatggaaatcaatcttttggatatactttattcaggttagagaagtctataaaagttcttcatgtgtcgtttggtttcgagactaacgctgggtccaaaacccaaagtgggtaaaatgcctctcaaatgaagttgttggttaataacttatcaacctcttcctttaaatcattttgtctttcatattcgaggaggcgtcttttttgttgtgttggaggatagagtggatct

SEQ ID NO: 93308 - DNA, 2563 bp, Cannabis sativa
tactgggtggtcccatcttgtggtgctctatttagatctttatgtatggttagttgtggttttctgttgtgtaggtcttgtgttgattttgtgttttctgtgtatttcctttttgttgctttgtttttggtgtttttcactgaatctattgtgacattggctattaggtcattttggtaggggtcgctcccatgtatcggcgtagggtgctattattgtctccttgtaaaaattatgcgattttatcttcacataactttttacggacttgttatttatttatatattttatgacattcaatttcctgttgaatgatatttatctctttcataaattttatagtgcgaatttttcgcctagaaatacaagagcagcctactataaaattgatacgtggatctattcctcgaggaaaagatgacctatttattaatgactctcaaagagttagcctcgcttgatctgaactagcgagattatgcgatcttgatagagtctagtagcatatgccttgcatagtcaaagacaagcaggaccaagatgatttaatacaagtcgcatatatgtcaaaatatgtgcgacgactaggtagacctctcctatgactagtaaagatcgcttctttaataaagattggttcgaatgactgatcgtgttcaacgactcatcagggactcaaatgtcccacgttatcaacacgcgaaatgtccgtatacacaatcttagttgaacgtagacatccaaacgacaggcccatgagccacttagcgaatacaaagcgcatcaaaagcctgcgagtttgtgcaagaatatgaacaaacaactcacgccaagcaagtcgcatacgttaccacatttaaagcaatgacagattaaactattcttatctttaacgtttattctgatttaatactgttatttattgtaaaacggttttaaaactgatcagttattaaaatttaaagaatacttactttttatataaaggagtgatctgaatcaaataaactaagttgaaatctttgcaacaacggattaaacagatcaagttccgattgaactactatactttctttgtgtttttattattttttcactatctgttctgtttgtttgttgtcaattctttgagtactcgtaagttttatctgagtgtccttaatagcattaattactctcataaattttggtattgttcaaattaatccgactacaattatagttcttatatcgaatagtatgccttttcattgaaacaatcctttgttgtctccactttaaatcttaaaaagtgaatattgatttctcaataaacaagatttcaaacattgaaattgagtactttgagaagagcatcaataatcaagaagagagaatctttttttttaagcataatatcagaaaaatgcactaactgaaacgaaacttattaacagtctttattttgggaagccacaacccctagatagtggagcctatgtgacccaaaaaaaaaaaatgtccacacttcaatgaaatctttaattaataatctcatttatataatgttatgggggacagagtgatcgtcccttccagatagatcatcttaatgtgacagttgagtttcttttaacaatatgctattgtgctagtgtaataagatttagtcagtagaaaatgggtcccaccatacgtgtaagattccaaattgaagtggaaaaacaaaacaaaaatgggacatatttgtatgctatgcccccagataagcattagtagcaccttaccataaaagaaaaatgtcttcattattcatttcccactaaaaaccacataataaagccatttgttatgaaaaagaaaaaatacccaaaagaaataaaaccaaagtgggttcagaaatttcacgctgatctgactcagataactgtattttttgcataaaaaagtgaaaactcttttgatgatctatataggagttggaattgagtggatttgggccggcttatagtgggtcccttgctggacgacaaagtgggcccatgtgtatggatcgttttctggtttgggcacgagccaagcccatgtgcatgtacctgccacgtgggatgttggatcattcatctcattcctctcctctttctcaagtctcaactacattttaattaataagataaggataaggtttatatttttatttttaaaaaaacgaaaaatatttataaattatgatcgtaaattttaacattttgtgcgtacaaaaatacaatgttaacatcatgacctgaatcggcattgagcctgaaatagctgttttttattttgtcatttaacgagtaaatttgagggttggtgaaattgaaggattgttaattaattaattttgttttatctaatgttttaattattattattgtatataaatagtgaagatcacactattattttacagtgtttattggacttgagaagctaacctacagacactagagtcgggctttggattgactatacaagtcggttttagttatccttttcaaaatgagcccggctgcaaaaatattaagaaaattattttaaata

SEQ ID NO: 93309 - DNA, 906 bp, Cannabis sativa
cttaataaacctttcaaatgagacgggaatggcagataatgggcgtgaaacatgaataggaagagatcatagtgacaactcttcataaagaggagataagattataagaggaacaacaaggctccaaaattattaaacaattccgcagttgtgaattagaatttaccatcctttaggaatgaaaggccatccaccttcatggggagtaatcttctctgtgaactccattcagcatactcacagacaaactaataaatctggattttcttttgcaagaaaactaccaaaaaatcgaaaatagcaaaattggaaaagaaaaagtaatcaaacgttgaagaccgcaagaatggatacctgattactatcacacacctaatcacagtagattttctttttcttttttgtttaagttgatgtgaacaaaagaaatttagatccaacgagcaatatataaaatacattacctgtgaatttgatgcatctccatatataggcataggagaaaacatgggactggcagaaggaggccatgaaagcactacaatgaacaagtttctcaatggtaagaaaataatggtttattgttttccagaaaataccataagcactgctatggctttcctatgcaaaatcactactggcaccatctacagcaatttacaaaagttgcttacaaaaaccaataaaataaaaataaaaaatggtaaagcaacctacagaaatgttgtgaagctaataagatctcagtcccagaggaggagattccagagcttacattgtcatcaatgaaaggaacatgaaactagtatcttgtggcttttaagatcaccgtagagataggcacagagttagatagcataagcctgcccctccactacacatgatcctacccgttcctaagtttcc

SEQ ID NO: 93310 - DNA, 1237 bp, Cannabis sativa
aaatttaatcacctatcacctattgggttagaaagaattatacatgtgccaaatatgtcatttgttattgtaaaaggaagaaaataacaacataattcatacacatacaagtaactttattaattttcaagcactttaattaagactttgtggttttgctatgaatatgcagagagtttaagctgcctgcatctcatgtcactgttggactcatatatattggcaactctactactgcagattctccgagaaatgcatacaagtattcgtggtgtctcttgtttttttttcttcctttttttcttctttcctattctttgtctttttattttaattttttggctcctgaaagtagacatttttttgtgtgctaaatttaattgcagaaatagcttgagggttgctaaagagaacaaaactcaatatattttttatgtgtgtatcatctacttcttctctctcaatacgtaacatcttttccttagtattttcttatgtccttcaataatagatttttgaatcttatttttcagtgttatcttagtcaattctttgtaactttacattattgtggttaattttggttgttgatagttcaagtctaataaatttttggaccatatttgatattattttttttaattaactttatattatcaatagttaagggtaaaaaattaggatttgattctttatatattatcaatattagtttgattctttcagtttattcccgtaaatacaagtaagatttatattgttatcgtaatcactttatattaaaaaagaaaataattaaaccattaaattaaattaaattatatatgattattgattgtatcattcataattaatatagaacataatattaaattgaattttagaattgaatttggttaaacagattaatttaatcgatatactaaataaattatgtattactcataattctcctaactctctttctctcaccatctcagtagttggaaatcctcttagcaaacctctctcctttgaaaaaaatctcctttaatatttttttcttagcgttatatatatacaaaaaattctttgcaaatactgctacatttaccatgctaatactcattattgaagggatttattcttattttgtttctaagagaattattttctaaatttctatgattttaatttaattataaaacatctaatataaaattaagtatacgtgccttgcacgtaactttcttctagt

SEQ ID NO: 93311 - DNA, 1588 bp, Cannabis sativa
  modified_base (286)..(293): a, c, t, g, unknown or other
  modified_base (653)..(659): a, c, t, g, unknown or other
acaacggatcacaaacggcttttcgaccagtggcaatttgggctcacaacggatcacaagtggctttgataccatgttagaatttgaggaataagatgaatgaggttccatcacaaaacaaattggcaatgggaggagtagccctttcatcttatatatcacaatttatttccacacattaataatgtgggactaactcttaatatagaccaaaacttttaaaaaataaattacaaaaatacttttttaggctcatttgggacgccgtattgtattgtattgtatnnnnnnnntttaatataatactatgtttgatattaacttgtattaatgtattgtattgtattgtattagtattatttaattcgggtcccgatctcgagtccgggtcaggatctgggttcgggtccgggtccaggtctaggttcgagtttggattcggatccaggtttgtggtccgggtcgggattggggtctgggtcccaggtccggattggagattggtgttgaccccgaatcctttgtaaatattataatacaaactaatacggactatttgttatgtattaaataatacaacatacattgttttaaatattttggtcgtaataattaatacaatatattattttatctaaacataatattatttnnnnnnnaatacaatacgacccttatacagcaccaaacgagcccttagtaaaataataaatcgttttttagtttatttataattatattatagttataataaaattatttttctagttattttttattgttttataatttgtttataattattgtgagattgattttaagttgtttttttaattatttttttactttttcagcaaaaagtgcatttatataattttaaaaattttaaaatttatttttgtaaataaaaattttattaggttgtaaaattataaatgaaagataaaacaaattttttcgataattctcctaaaaaagtataattaaataactgattgatatgataattatcactttaattgggtaattttttaagaaattcaaagtgaaatcctgtcttaatgaaaatgttgaagctttattatcaacaacttgtttcacaatcaatatatgatttttttattttattttattatggcagaagttattcagtaagtacttttggtggccttgtaaaaagtttgacaatatgatttatttagactaaaaggaaatagctaatgtttattatagaacatgaggaacaaagaaagcaaccaaatttatgagaccaaatttttaacttattggatttgaaaatcaaatttgttataaaaaagactccgttatcctttatgatagttaaaatttaaataagccgacaacctaaatgagtggctaaatattatcacaatatataatgtacatttctattagaaattaataaaataaaattttatatatgttttcacgaagtttcaaaaatgttatgacatattgtctggcctaatattagggttagttgaaatatatcttttttttttgccatcaattaactaaaaatggttggttttatgccttaaataaaactctttacaatctgattagt

SEQ ID NO: 93312 - DNA, 838 bp, Cannabis sativa
ggaatggattggtcggcagcagaattggaatttccagtctctttcacgcctggtgttatcccagccagaggggaagtcacactgtggcccacaataggtggttgtgtgttaggctgctcgagagtagtttttggtgggctcttgtattccgaggggtttgtacagcagggtctgtcaccattgggtcactctgatcaaccaagcctctacaagtttggaccaccattctgtatgcctgttgagacttaagacaaagaacaaacttggatttttgctcacaatgaaagcaccaaaatgttgatctcgcttttagtcaacgatagtgagtcaattatgaagcgattagaaatacaataaaacagaacaaaaaccaataagtaataaagacatcagactttgaagaggtttgacccctttaatacggtaatagcctactcctcttagattgtattaagttgagaataaagaacacagtgtttcctctctcaaagctctcacaatgaaatctctaagtatttctcttagatctctctctaaagcaatttttttgatcccttttacagtgaagctaaatcactatttatagggccttaatgcatgagggaaggtttcccttttacttacaatgtctataattggaaggaacatttattacataattagaatacatgaaatggaggattgagatagcctgccatatccctctaattcaatcccatgatcatagggattgccttcgtgcctgggctccccgataccattatgaagtagtcaagtccaagtatacagttcgaaaaaccaaactcgttctctagtcgaatagtctgcccttcattct

SEQ ID NO: 93313 - DNA, 548 bp, Cannabis sativa
atttaaccaagtttaatattctttctaaatcacttggcttatggaccatgattaacgagattagtggtttattatcacgacacatggcattcctctgagtaggacattacaaccttctatagaataagatgatagaaaactttagaatttaatcaaaaagtatctcctctactttcctactttatttttagattaatttagtcatgatcttagaagagcaatatttgttgaaacaaatactttcttatcttaatgaccataggatgtaagcaaacactttggaatagctatgaaacatgtaaaccttagttagaagttttggctttccatatataagttcatgattggggcatccttgaatctagtaatggtgtatactaagtatacaaccattccatcattctgaggttttctttggattatacttagatgggataacatagaatgtcatttgctatctctaaggcatttccctagaaggactcaggcagctgctagtaactaatcatagaccttacatttttatcaatatgtgactctgaagttct

SEQ ID NO: 93314 - DNA, 852 bp, Cannabis sativa
agcatcactggcacggaagagatccaccctcatgttccggccaaaaagcttaaaattggaaaagttttgttggtcgaagtaaaatctgcattgataaaatttttgggagcaaatcttgacatttttgcctggtcacatgaggatatggtttgaattgatcattttgtaattttgcacatcctaaatattgatcccaacttacgaccagttcaacaaaagcgaaggctattggacaaaaagcgagctctagccctgaaggaagaggtagagaaactacgaaataacaacttcataagtgaagctttctaccctgcttgggttgccaatcccatacgtgtacccaagctgaacaaaaaatgacgagtatgtattgatttcatagacctcaacaaggcgtgccccaaagactgttttctacttctacgaatcgatcagcttgtggacgcaaaagtagggcatgaaatattgagcttcatggacgcttattcgaggtacaaccaaattaaaatgcgtccaccggaccaagaacatacaagtttccgaacatatatgggtctatattactataaagtaatgccatttggtctaaaaaatgctagagccacataccaaagattggtaagtaagatgtttaaagaccagatcggacgaaacccggaagtatatgtgggtgacatgctcctcaaatcttggaaggctggggggcacatagataacctggaaaaatgcttcaaagtcctcttgaaatacaacatgaaacgcaatcccttaaagtgctcctttggagtaagctcgggtaagattcaagccctcttggatatgaaatcaccaataagaaccaaggaagtacaa

SEQ ID NO: 93315 - DNA, 503 bp, Cannabis sativa
tagttagggtgttacaatacacatacttgattcgtaaaaaaaatatatattgattatgcatgtcaaaaatatattagagataattctaatacaaaaatgctaaaatatttagcagtttattagaaatactcttagtaattaaatattatttcgtcgagttagtttatttagtaaaaaataattatttgttatatgaagataaaaaagttaaaatcaatattaaaaatttaaataatatttgtttttatttattcaaacagagaaaaggtcttgttttaaatttaggcctgtccatggctctatatatatttttcttgatgttggggcaaaataggctcatttaaccttgaaaaaccgtgtttttgcaaatgtcaattgtctgcagaagcagaaagtaattctgttacggtagaaaccagttttgcagagacaaaatagaacaggcagaacactcctagtccacggggccacgcgcagagaatgaaatcaattaataaagtatc

SEQ ID NO: 93316 - DNA, 1553 bp, Cannabis sativa
  modified_base (31)..(32): a, c, t, g, unknown or other
  modified_base (545)..(568): a, c, t, g, unknown or other
  modified_base (814)..(821): a, c, t, g, unknown or other
tggatgagaatgagagcatcatgttcctttnntagtatttcaactagggtttagaatttaattatatcgattaaaaagagtaaaataataggcaaaattacacttaagtggacgaccacactaatgagcctcactacttataattttgccactttatttcaaccacttatcatttctttcaataataccatattttccaatttcaatcctataaatgtcaaaactatttattaaataaatttgccatttattttatttattaattagaacatacaaagtctcttaattgacaaataaaccccaaaacctcttttcttcacaattaagctattgtttagtaaaaattcataaataagacatagtctaattctagaattataattaattaaaactaattaacttagtctgcaatgcaagcagtattatctcaactagtatggagatcatgagcttatataatcaagcttccattaagtagaattatacttggtaaattctctaacttattagttcttccttgcgccactatagattcagaattgcannnnnnnnnnnnnnnnnnnnnnnntatgtaccaagatataaatacgttatgaattatctattgttacaatccaaatagtcaaagatcctttataaatgatctatatcaaatagagacaaatttaccgttctattcttcaatgtattttatctttaaaatacttagctacctatagttactgaaatgaggcctcaatcatttatttctattaagctaagctcaaagaaaattatcgtttcacttctaaatacctataaaagctatagattnnnnnnnnatgattagtgctcccactcaattgaactaaatacttatgccacttataaacttgaaagtttgggtatttatgtcgctatttaccttattattaattaataactattttttcattattttttttagaattgaatatggtattttttgtgttaccgtttcttcattattgctctacaccaacaaatatgtagaattcaatattaaattgtactaatagtgatattaactttttataaagtggtgttggatagcatttctctaaaaaaaagaaaaaatagcagacatacaaaaaaaagtttctccaataatatgttagaaagttttgtcaaatttttctatataaaaaaaagttatgttaacttcaacgcacattaaaataataaatattcattttttcattagttttacaccttattataattttattattaattttgacttatttattattaagtcctttttttttgccataacttattttttctttttttgacatttatatgcattacagaagaattatagaaattgtagtaaatgtgtcatttattgatttttggtgctaacttttagtcttatgtacattggatatagtcctattatttggatatatttgtctcggtagcagtaattatttggacctgggccagtccgttagagttggactactttggtttggtttctgctaaagcctcaagctcctattgcctaacaaccaggggcggacccacattgt

SEQ ID NO: 93317 - DNA, 2119 bp, Cannabis sativa
  modified_base (26)..(27): a, c, t, g, unknown or other
  modified_base (54)..(55): a, c, t, g, unknown or other
  modified_base (81)..(82): a, c, t, g, unknown or other
  modified_base (109)..(110): a, c, t, g, unknown or other
  modified_base (1834)..(1835): a, c, t, g, unknown or other
taaattgcttgatccacgtgtccttnnccacgtgtccttatctggttggtccannacgtgtccttatctggttggtccacnntccttatctggttggtccacgtatatnnggcaaaatcaggggcaacactagtcattataggcgtttcctacaagaaataactgagggtaaatgtcattacttgggagatggagcctggcctgaacctttgtcattatcttctattcctttggctaaacccttatttttacccagagtcacaattgcttttttcaccaggtgacctagattttgaaattatgtcttccaagcatcataagtcaaagactccccaggatcctaatgtcactttcgaggctgagctcattgagtcaagaataagagctataggggactatgttggtggtgttttaaggacttgtggcatcaaccaaaagcaagggttccgtgttagatctgttgcatctggtgaattcagttgttatccaccagaacgacttatccgtgaggatcgtagggagtccagtgatgaagccagtactagtagctcggttgggataggcgcttagagcatctagcatatcaaggcttgagcaaatctccccctgagagattattttaaagagttcatcaaccatcttagaattgctcatttccaattggttcctatttcctacagaatccttgcaagtctaaaggttttgtatcatattttaggatgggagtgtcccactccccaggaaattatttatctttattctgttaaggcagttcctgcgaggaagcattgtggaggggggcttttactatcttgggactcatacaaatgatcgtaggatcatcataggattaccaaacaagaccgcttttaaggaggatttcttctggacaatttgtctttccccaattaacatgactgcatttcacattatacgtatgtaaaccttatctcaaaaacttagttttgagttatttcatatttgtaacctttgcctcgctgacttatcttatttattatgttgatagcagtctcaaaaaggccatcccactcttgagatggccaagaggtgtaaagctttgctgggtctcccattcgaactgcgatcggctgagtttctgttgaatgaagccaatctgaagactgttggccttctcacttcggacgagcatacttgtaattacaaatttcttaagtatacattgtgggagaaggttgtagttccagctgacgaggagagtcaagattatgtggctcgggtgcattatctcaagaatgtaacccctcgggaagctaaagaagatgcatcctgaggtagtcaatgtggatggtctcccactgttcttagggcaagacgtactttgttagtaactttcaacaatggtcggtataacttttacatttggaactccttcctcattgattgtattacccatatgtttgatagttggtatccacaattccatgttcaacttagttgcactagttcttactatgggattgccgagcagaatgggactaaattggatagagcgagccatctagattcaaattgggaattagatccaattaacccctatgacatattcatgatcataggatctagggagtttagtgaatactatagtcctccttcttcatcatctgatgattatggtacttcccttaagtgggaatttattttctattttcctgtttatctatttttaaataagtattgatgcatctctttgtctcgcaaatatgaatttaaagaatctcatccactcttcgagcaaaaaagggaaaaagaggacggctgcctcgaaaacttcttcagatgttaatgtggaacnnctcaagagatccaggaagaccactgcaaataagaagcatgcctcacagtctatagacctcgagacttctgaagaccaaattcaagttcacactccagccattccacatgtcgaggagccagtcccagaaactcaccaggctaccacttctttgagtaaggcacctgagactttgaccatcgaggctgcgggcactggttcagagtgtgtgcaatttgatgcatcctgctggcgccatttctgatctttccagtctagcgactagggtttggtcaacaatggcag

SEQ ID NO: 93318 - DNA, 536 bp, Cannabis sativa
ttaattggacgggttgcactaagaattttgtaacccaatttttacgttgagttgaaaaaaatgtaacctaaactgaccgacatacacccttaatctcaaatatatgtacccttttgtgtaaatcccaaaatatttcatttaccctatcacttttcctttcttatcttttctctttctcttttcactccaaacattttcactcttctctacacccaaaaaaatatccccattagattaattttcagagctattatctgtgaaagataactatatttcaatcaagaaagagccttatcacaagataggaggagaaggtcaatgttttcaagattttggattgttttttggtggaaaagaaatgggtatgtgattttgtgctaaatttgttgttactcttaattttgttcaagtatattgttgttttgtaccttaaatatacatttgcgtgtgtgttttgtctatttgttggctggagcatcagatccgcattttagggttccttttatttttttgcgtaaaatttgatgcattcgatg

SEQ ID NO: 93319 - DNA, 583 bp, Cannabis sativa
agttttcaaaaaagacatactattgttaatggaggattaatttgtgttgctaagatacaccgatcaatggttaggttaatgtgataaaattaagcttatattaaaaattacaaattagaaaaatacacaaatttaatagaatattggtgtaccattcttaagatcctttctcgaagcacttttaaagtgtttgatattattaaaataaaattatatataaattaagaaataagtaaataattccaattttaaaaaataacttcaaaaatggactctagcttctctcaaaataaatataatcttcttgtattcctagcaattccaatccaaagtattttagagataccaaaacactcctctctcatacacttggatcctttattaattaattaataatgcagagaaaacaatcaacaataaacttctcacaccaaataacaaaacttttattgatcacaatagacaaccaaaaaccccgttaaaaacacacacagaattacaatttacaacatgattaccagttgtttttatttagataaaacagtaacgagtaacaccacactaaatatagactttaaagcca

SEQ ID NO: 93320 - DNA, 530 bp, Cannabis sativa
agcagaacccaacgcaccaggccaggagtcaacctaggcatgaggtgcttcttgggctccttcttagggctcgtttgaatacttctactgcatccaagattgcgaacgaggtctcctgccctatttttgaccattttaaacttggagtagaatttgtgtttgaggagcagaaacatgcggactaggttgcatgtcaacctaggcgcagcgtgccatgtcagcctgggcattggggccctgttctggctacttagaaatctcatttgctctatgagatcacttgtatcttcattatttctaatgatggaaaaaatgtccggaacactttttttgaagtatgactagaaatatctcaggttgacaaaatgtcaatctgggtgctgggcctagtgccaggtgtcagcctaggcactggatcaaattttgttgcccctagatgactccgtttgattatcggaaacacttgtatcttaacctttggcaaaaaaggaaagtattcccgaaagacttgtcaaaaaaaaaaaaaaaaa

SEQ ID NO: 93321 - DNA, 583 bp, Cannabis sativa
aaactttttttttttttttcataatctcaatttgctaggtgctacaagaacaattacatagtaactatattgaaatggatgcgctacgaatctttgatgttttgaattctatattttaaggatttatcttgttttttacatttaattttaaaggtttgtttctttttttttttttttttgaagctgttttatttttcatgttaagaaaaatattaagcatacttataatttagcaaaagttgaattaaaaacattaatattgatttataataatagtggaaacttcctttttaaaaaaaagtactaaatcatgttcacatgccttgaagagctcatgtttgacccaactataatcaccaccgttgaatctccataaaactcgacgatgacgcatgctgtgatgaaaccacaatctcaacggtgacacttggtcgtgtaaaagccacgtgctgactccacaggcctccacgtgttcatgttcgcttggggctttgtatatatatgtgaagatgggccttctatgctttctcgttatcaataccaaatgctttgtacttcgactcgttatcttctctatcagaaa

SEQ ID NO: 93322 - DNA, 590 bp, Cannabis sativa
ggttaaataaggtaacacattaatattagatattagttgacttgataattatatgtttaggttattttgaggatatgaatgaggccaacctagttttgcgtttgcaaagggtttaccttataaacatgagaatatgggttaaacatgagaatagtaatgtgtgatgtcacagggttcagtaatcagtgatctgtaagagaaaacatcgagtaaactgtgtataattttgagaaagattaaatataatgattttaagacttgtagatatgacaatgacattatgcaatgaagatgtctattaaatgaatttatgggtataaattctaaaattaagtgtgattgacttaaaataatatgaagataaagaaattttttccaaaaaaatgtacaaatacacatccgccgtataaattgtgtaggtacaattaaaaaattaagtatatagtaagtatagtgagctgagcatacttttctgtatcatatatagatagctagtagctattggagtataggtggaggaatgaggccagcaagagccaggcaataaggcagctcaacatgttcttatttgcatcccaatcctattatat

SEQ ID NO: 93323 - DNA, 1027 bp, Cannabis sativa
agtggttcaactagtatgggcgcttggagccttgagcatatttgtgcaggggccatcctccctctttgagactacttcaaagactacataaatcatactggggtttccccattccagctaaatcccatctcctacaggattctcgctagtttgaaagttttttacaaaattatgaattggggttgtcccacacccgtagagattgagtatctttactcatttaaggctgttccatcgaggaagaacaccgcagtgggcttttcctacctctgtactcatgctagcgagccaaaagttattgtagacttgccaaataaggtgtctttcaaggacaacctcttctggatgtctggtctctcccccattggcacaaccacgttttgcaaactttgtaagtgattgttctcttcttacatatttacatcaatcttcctttttcaagtacttgattaatgttttgtttattctgacagctcttttgacgagacctactcctacccctgaaatggttagtaggcactggcgcctgatgactctcccttacagtctccgatcatgcaaattccttttgaatgaagctaacttgtgatcggcaggccttctcggtgataaagaatacaattccgattacaaggttcccaagtattcttcttggcagcaaataattgttccacccaaaaaccaggcttgggatcgctttgcccaagcacaataccttcaaagcactgcccctgaggtatctggtgaaggagcaccccgaggtaatcaatgtggctggtcacctactctacttagggctgagcgtaatacattagttaccttccaagactcctgtcttaatttttatacttgaaatttcattctcgtggaccgcattgctcataagtttgacaattggtagattccacgtccagattagctgtcacgagtcattttatggtatagccgagcaatacggtactatggaagatagagcaggtcacatagatgcgagctaggatttagaaacaatcgagccttttgatat

SEQ ID NO: 93324 - DNA, 658 bp, Cannabis sativa
taatgtataataagtttttaatttttaatggaatgttaccaagttatattttaaatgaaaaattatttaaattaataattatttaaaaaatttaatgaaattatttctaaaattaagtaattttaaataataataattgataaataaaattaattagttgataataaatatttaaaataaaagttaaaaaagtttcataaaatgacataagattaccgttagttcaattagtacctaaaattataaaatttttcttacattaggcaatttgatttatttaaagtaaattttttggtagatgacaatcgataagtcttgggtgaccatgagaaatcgtaaaaatccagcttattggggaaggtcggccaagtctttatggcacttgcgtctaaacacatagattgtgatggaagaattttctgtccttgtgttaaatgcaagaacaccagattgcatcctttgaatactgtggaggcacacatctttacgaagggtttcgaaagcaattatgagaggtagatttaccatggggaactggatgaacctatcaaggctaacgtcaatgtcgatgcggatgagatggttgatgttattgaagatttctttcctcctataaatgatgacgaaagagctggtgatgatgacatgcagaggggtc

SEQ ID NO: 93325 - DNA, 1247 bp, Cannabis sativa
  modified_base (329)..(346): a, c, t, g, unknown or other
cactctttccctacacgacgctcttccgatctttcttttatctttaagtatattctgttaaaccaagaattaccgttagatagacacttttaatatataaagatatatatatatataactatcagtttttttatggaaaattatgaccaagttgttttatctacaaggtaagaattttatctttataataaaatggttcattacaaaaaaaaaaaaaattacttttagtcacaataaaatttgtgaatgaaaataaaaaaagttatgactaattataaatcatcattcttatgttgtaactaaaaagtccgtagctaaaagtattagtnnnnnnnnnnnnnnnnnnttgtgactaaatgtattttcggtcacaatactcgttgtaattaaaactaaattagtgctaacttgtatttaaatactatgttttgctacaaataattttttgttgtgactaaaagtgacatttagtcacaaaaaagttatgttgtgattaaaaaattatcactaagcacatatattttttgtggtggttagtctatatttatctttgttgaaactgcatggtatcaagttacatctacatgttattgcaggttattttggacacgttagctattagtgttaatttgagaagagttaaatctagttaattaactggtcagtttggtaattagttacaaattaaagttactataagtaatcaaattcttgattagttaactaatcctattgattaatttttgttacagtgttaaaaaatgctttctttttctctttgttttctttgatattgtatacttgcaggaacctcattgaagggtgaagtttaaagcaaggtttgaagctactaaagtgttgattggccttatttgaatctaaagaaatttcatatcgtgaagttgtcgaaaggattttggcaattgacacaagaagatcttgtgtacaaccaaatgatttggtttagggtaattgttcactagtgtctttcgtatatgaatgtattgtgaaatttttaatatggattagctattattaaatacattattgacttgttagagttattgccctagttctttgggagacccgaggagtagttgactaaaatctgtttctaattatagtgaacttgtaattttttggtgttgtgattttataattaccaagtgatgattaattgttccaaagtttcaagaaatgagatcaaaatttggtatagcacattcaattggtatcagaacctactt

SEQ ID NO: 93326 - DNA, 876 bp, Cannabis sativa
cggtataggcttcgcaaatcaggtaaacctttttcttttgatatttatttatattctcccttgtttttattatgtcttgttttgttttgaatcaacaagtttttatttttatttaattgtttggttcaaaaattaaaaagaaaatattttattttcttttaatatttatgtccatggatatttcttttttgttttttttttttttttgagagaagtccatggatatttcttttattatttttaactctctgtcttgtgttcttttttataacatgtctttttctttgcagtaagcttttatttattacttggtcaaactaccctgattttctttgcatgtgacattgtttgactcatgcttatgaacacaatatatttctttctgatagctgcttttccttaaaatatcaactttgattatgtcacttaagaaattttagcgcatgttttttcttgagagacatgacaagttgtcacaactctcatcaatggtagtctcttcttaattgcagtctgtgccactttatctgtcggagatggctccatacaaatttaggggtgcattaaacattgtgttccagctctccattactattggtatcgttgtggctaatgttgtaaactatttcttcgccaagatagaaggtgggtggggatggaggctgagtctgggcggggctgttgtccctgccctcatcattacaatcggatctcttgtcctccctgacaccccaaattctatgatagagcgtggccagcacgaggaagccagaattaagctccaaagaattcgagggattgataacgttgatgaggaatttgctgaccttgtcgccgctagtgatgcctcaaaacaagttgaacatccatggacaa

SEQ ID NO: 93327 - DNA, 5804 bp, Cannabis sativa
gaatgtagattctggttgttctttctatctatcccttaccattctaaatgatttgaccaaattattattttggtctaacattttaggtaattcaacaactatttcatgatcaatttctgtcttcctttcatggttcaacattgtgtttattctatttccgatctcattgtcagtatcatatatataaagctgagcaaattgcggtcttctctcatcttctggcaataatgaaccaaagttatgataattttggcattcatccaaaaaagataagggccttttgattgattgattgacctatcaattcggcctcccattgatgtgaatgcaaacatcgagttgtaaatccttatgtttttcctgaatttgactcatttttggccagagtcgtcttgaaggagatatttgagaaaagggagtgcttctttcaacaatggtatttgtaaacatccttcaatacaacataatgagcatttgggatttcggatcttttgaaatttcttagttcgttattcataccatagaatggcatcacaatatttgcatgtgtgagtaggaggtccaaaattccatgttgttgtccaattatctgtttaaagaaaaaataaaatattgttcgaaataaaatattgaataaatgtaaatattgttagaaataaatgaaaatactacatattttctaaccctacgtaaagatcgggttgcaaaattttatgtgcaacctgcctaatttaaaaataaaaaaaaattacgggaccaacgggttggtcggttttgtcgggttaacccgacctaaccgacctaagttttttctttttttttttttaaacatagatacatacgagagagacagagggtgagaggcatagatagatacgagagagggtgaaaggctgagatgaaatgagagacaagagtgacagtgagacgagaaaggtgtcaggtcattcatttattttagattttgttttttttttaatatatacatatatattattatatttatgttataataaaagtaatcaatggatcttttcaaaaaaagaaccatacctactataataatattaattctaatgggttattatctcaaggaaaaaaacgatttactattattatatcatatttttgtatatatattaatcagtatatataaattatatacttttttgacatttttaagttaaatcggtttcattgggcgtgttgaatctattttcaacccgcacaattaactgattgggcggtttagaattttatcgggttatttcagtttatattttttattggcttttcggtttggtttgggcgatttacgaaaatttctatacaaccctataggagataatgacaattagggtgccatgtgaaattctttgggcattcctttatatatatattgatatattgattattgatatttattatatattttagtattattatataatttatcacattttcactgtattattatatttaatttataaatgacttagtattgttattgtaaaaactgataaaataaaatggtatttgaagtcatattaaattccaattaaaacattcataaagtgaaaatagtaccattacataaccatgtaatgtaaaaacccacaaagagaaatggcctaaggcccaacaaccaaacaaaaaataaacacgcataagaaaatgaaaaaccaaaatcacacttaaatcacacaaatgaaaatggcctacaggtccaaccacctcaactctccaacaataaacactaattaactaattattttcatcttcaacattatcatcgacttcttcatcctcatcattaagaatgaggagttttctctttctactttcaccagcactaataacatttatgttgtccacatcttcatcttccaaattacaatcctgtcatatattgattataaaggaaaatattattatctaaactaatttttcttttaaatttaataataacaattaatagaatttattctatcttaatttttcctacaaaataattagcattagaattttctaaattacataacagttaaccaatttatcaagtatttcttcttaattcaaaatttttattttcaatgataacgttaatttttctattttcgattcatgtgcttgctctaatatatcatttggctcaaaaatcttagacacggtgaaattttcatattcatctctcaaattataatcatccaaccttaatttgtagacaaaattctttccacacagtgcttgaatcactaccagaacatcattattatttgtaggtaatagcttcttcactgatgtgtcaagtaatttttcagctataacattgaataagacaaaagttgtttccccacttttatcccttacttttatatgaatttttttacctacattgaccaataaaattagagtaaatctattcaataacataatcttattttttttaaaagaaaaatcattaaattattttccttacatcataagaggatagtcacatttttttttacaatggctacaataataaacaccatctttgtaatcaacctttctccaacatgtcttgcaggacacataacaccatccaaatatctattccaataatctttgcctttatagtaactttgtattcctacattcaaatattttcaattacttttactaattatataatacaacaatagttaagagaagataaaatgaatagaaattaaaattaccttcaatttatcatcccattcaatctctagaagttctttaatgctcattcaattgatgaacatctcttcctcaagtgataccttattcacattagagctttcaatattttgcaccccattaacgacagttgaaaattgttcaattaaagatgctacataatctatttctagatttatgtataattgggtagcacttgttgaaaaaaaactgttttcacctatttatagtaattgtgaaatcatgtaaattatatttgaaagacatagtaaaaataattttgatgtaatattgagatgaacatatagtaatcaccttgaaattatttaattgtcgtagaagttactatcacaataaaagggccctcatctttttggtacacattcgtatcaaacatctctgccaacttaccccacaaagtaatttttgaagtgactgagctgtaaaaacaagcaaaatacaaaaatatattaatactaaagcaaattatgaaacacttttaaaataatttataataacaaaaaatgatatagactatgaaagtttaattaaacttaataatctgttataacttttaggtctctttttttccaatctccactaacaatttcaaggtctcccacaccacataaacatctaacaatatctaacaataacaactaaaaataacatacaaatatctgaatatgaagacttaaaaaattaaatcacacaccacatagaaaaattaaaattcatataaatacctgaaaggattgtgtggccattaacacatgaatcaatcaaattttgagatatgaattgaaatccatgagtcgaattcttaatgcttccttcttctaacttcatcactaaagtattacgatgaaaaataattttgtacgcagttgaaacagacctatactcctatgtacttgcaataaccttgaaattcttcacactatataaagaaccctcactcaaaagattcttaaacttggagacaaaaatcttccgggttgtagcatgcataacattttcctgtaacgaataaacttgttacattacgaataaaacaatataatataaaataaataaataatttgatcaaactatttatatataccttctcatcaataaaaatcatgtctatactaattaattcatcattctttttggtgttagtagactcccacattctacaattgtaacccttatcatccaactatcattgtcgtcgttgttcaattcttgaagaaaagaatactccataatacaaattgtaaagtatactttacaaataatagtggaagaagggatatggtaaatagaaaacaaacaaaacactctttaaatagaagaccatctagtaaaaataaattattaattatgtatcaaattataaaactgttaggattcttttttttaaaataaacattacataattcataattacacacaataaaactataataattattcctaatcataaattaaatcaaaagattgatgaaattcctcttgcaatatataatatatatattataatatatatacatatattataatatatatatgtactatatattataatatatatacatatattataatatatacatgtactatatatattatatatagttagtaaaaaaattttaatgaacaaaaaataaataagtgaaggaaaaacaggtgaaatagtaattataaattattatattataataataataatagcaaatgaaatataccattaatgtatatttaataatagaaaatatgcatatttattactaatgcttacatatttattgcagactaatcaatgtgtatataataatagagaatgtgtatgtataattctttattactaatgcttacaaatttgattatgaatttaagattttttttctctgaattatgaatctaaactaaatgtgtgctaattgaaatagttaatattttagccattaaaagagtcaaagtggtaattaaaaaattatcatattataataatgacaataaataacaaatgaaaagtaacgacatttagcaataattatgtcagttattcttttgttttctttttacttttgacttctcattaataaaatttatcaataatagttaatagaccatgagtattaaaagccattaattattatcatattaaagaaaaatttattattattaaatctattattaatattaatatttatttaaaaaatacatttattattatcatatattaaaggaaaaatttattattattattcttattattattattattattaatattataaaaaatttattattaatattaattttatatatataaaaatattattattatatattaatattattattatatatattacttaattattaaaaaaatatattattattattataataaagtttatagattattaataataattaatattagtatttatacttctgcctctaaattttgtacttatatcaatattaatatttatacttcagttatatatacaattatttattttgtatttataattccgtctttatttctgcacatatatttatactagtatttatgtttctgtcaaatatatacatattatttattttttgttatattttaaattcagtctttatttacgcatgtatatggtaggcacctcctccttattttttctgttattttaatttttgtgatacatgatgtaggattcgctgggaacaaaattctaaaaattatttagttaaaagaaagttattgtgggttgaaactaagattgaaaattcctacatcataaaaccaaatcaagtgaatgtggaagaaaagactctcattgatcatgtttctcccatttttgctaatccttcatcatgcattatttttctgaaacaaatgctacacattttgagccggaaccttccataattcaatttttgccatctttttaagggttagatatagaagatcgatacatgtatgtgaataattttttttggaaatttgctctacttttagatttttattttttttttcataaatctgttaggcttagactttttccattctcattaaaagataagtctaaagcctg

SEQ ID NO: 93328 - DNA, 827 bp, Cannabis sativa
gtattttaggataggacggttttcagataatcccaaaggtaatgtaaaacattactaggaggagttagttaatcatcttcgatcacacctttgattcgaccattcttattatttttgtttttttacttttactattttcattatttttgatatgtagtaagggtgatgtagattagtgtttactattcacgtcaaaagaaatattattattattatttagggctttttttatatacgtacaactaaaataattatattacaattatatggttaagaaaagataattataatattctatacaaaacatcaacatattacatatactctagtataaaaattattgtacttattaacactctaaaattatgggagttactatgtatatattaaataaataaaaatactctttattcattgcaattaatacattattaagtaagtcacaattataaataaatgtgcttctgaattttttcttttaaaaaagttactcgacattttttttaactcaagatagtcaacatttaaaaacatcaattatatataacgtaacaaatagataaaaaaaaataaataaaaacaaaatattatttatatatataggatttctaaaaaaattactaaaaaataaacataacacttatagagtgatataataaacttatataaataatattatgttgtttattaaattagtatgttttttttttgagaaaagaccattatattaataggaaaatattacataacagtcataagtggaggtggaaattcctccaaccaagaaacatcagtatccaccgtaagagcaaacttagccaaaacat

SEQ ID NO: 93329 - DNA, 3835 bp, Cannabis sativa
tttaaaaatcttaaaaaatatgagccaaactaatacaacacatatttagcatacaatgtattgtagcacaaacaaaaaaatgcagttctattagaataaaattaacaacatatatgcgatatgttatttcattgatgttatattatattatacgtattttcactttttttttaatcatttaattaatattatttatttaaagttgattaattcttttttagctcacttgtacttcttttctaccttgtagctattataacacgttttgaaaatgatacaaaattaatggagttaggtttagtacaaagaaataaatacagatcttagtaatttaaatttaataagacacaagtaaattttaaattaaaattaaattaatagtgaaatgggagaattaacattcaatgagattaaatataaatgatcaaacatgacataaagtggttaactaaataatttataacatatctacaacattacaaatgtttatttttggtgtttgattaattattttctaattattaaatttatcatttatttatagtgttgtacatatgttaaaattgaccagtgtaagtgttacaatgacctgtttaaacctattttttttttaaatgtctaatttccaaaatttacaaaggttaaaatatgttatgcatgttcaaagtattaacatgttatatatggtttcacaaaaaaaaaatgttatatatggttagtacaatccaatatgatttatttaaatatcgggttaaaattagtagttaccaaaatgatagagttttgttaattagataaatattatgtttgatgtgattttatgtgattttatgaacttaaaattcaaaaactaatttgattttgattttattcaatattcatagaaattcaaacattaatgccaaatccgagaaactaggtaatttaaaaccaatcaaattttgattctattcaatattcatagaagtttaggtatttataccgaatcgaataggctgtgtaatttaaaaaaacaatcacattttaattttttagttttagatttaaaccaaaactcctatcaataaacaaaaaaaaaatattgcgtctgaaatcagtgaagaagggacgatgaaaaagaaagaatagaagaacagcaagaaagttgagcaaagatgatgtgaaaagagggtgaaaagtgaagagatgatggaataaatccaacttgtctaatatactgctaactgacatattgaagcgacaattttaatttaatcatgattttaaaaatatataatttaatttagatatatccatatggtagttggaagctcagtttatgttagtattttctgcgaacatagcgtgcgatcattattttgtactgtgccacactattgcgggaagagtgtatcgcattgtagattcttcttatatatatcgtgttaaatgtgttgtatcacaaaattatatatttacaaacaaatatacattttgtgacacattatttaatcgtgttgtgttaaaaattatatattattttaactctagtctttatttataatatgaagtgaaatactttaaaatttgtgatgaagactatcaagtttcttataagaggcttttattgctaaatcaatagatggcttgtaaaagaaagtttgcattgagatataaatgcagatagtgatgtaagaacccattttggttctcatctcaattatatcttcaaccaaaaattttcctcatcacaccaccaacaccaagtggatatctttcttttaatatatatatttatatatatatatataggaccacactcataactagtaaccaataagatgtaaaaccacttaaaataatcaatttcatttattaaacaaaacacaacacactagttaattctaattttgggtgtctttgtttagtaataaactctttaaagtttgaccccaacatcccaaattagatatgaaaaatgaaaataacaaacttttgtttcattaacttgggaaagtaaccaaatttagatctcaataagaaagaaaatatagtgtacttatacattctcttcttcacttattggaatctaaaaggggattcatttgacttatcaaaagtttcctttgaacaagagaaaaatgcaaaaagggtttcttaatatagcacataacaatatttttttatggtaattatttccatattacaaaacaaaaaaggatacaaatattggttatacatagggagtaaccaataatgttatagagaaggaaagcaataatccctactaaaaacataggtgggaaaattacaaaccagttacatatatgaatgttaaagtactttaacatctaaaattgtcaaagataaaacagtttttttgaccaaaaataataataatagaaaccacttgtttacatattttcacatgctacataaaatttgcatcaacttatggtttcttttctaataatattgcatcataggtcacagctaatttcccttgctaatgaaaagactctatagccgtactcgtcgaaaaattcgcaccattggattcggttgcagtgcattcagaagagttcttgcagaagttgtatggaattgcattcatcatcctgcaatgatcaaacaagtcttaaagttaattgactcggccctgagattggatgggccttctgcctctgtttagaaccgaccctgactctctctaatcccttttaatctctctttgctatgaataaagagaacaaagatatcttctttgaatactgacctttccttgcgcttttccaaaaaccgagccaaagatgctttgcgagcttgtggaatggctgcataagaatgatattttcttagtgtaatacttgtatagatcaaacatagaaaatcccaatttgaacataaaaagcataccagaaggcataatagcagttgcaccaactgatctagctgcattcattatcttaggagggtctactttgctcacaactgctttaacagacatcaattcatcattacttgatgaaccactccctgatgggatacctgtatgagaagagaccgacaacgaccttgaaagcgcagcgttcggtgtattcatattcggctgattcattgggagagggagaccatcaaaagctcccaactttgagcttggtgacacaatttgagctttcagattcgaagcattagaagacaaacacgaactactcccagctaagaacataattgcctgtgcctgtttaaccaacacaatttttcattacatgactcaaatgaacatacagagttttggtaattgaataaaagctatgtttggtgtatgtgagaaaccttctcaggggagatatcttcatagacattaactgaacccccataaaatattgtcaattgagcagaagacccaacagcagccttaacattattcctacaaaagtatgaatctttaacagattacataactgtaaattctttttgcttgaaataaaagaaagaatcaatcaagtcaaattaccatggttgttcagtgataccagctattgaacatgtagttgggagaatgtaatgctgagccgtcgccacggggattcctcccagcaacggttgcttgacattagcagcagtagcagcaacagcgaaatgatcctttaagtaaggatttcctaaagaaactgaagttgcttggtttggaaccgaaaacatcttcacatcatgagaacggtgcatagaatacatatcatgttgcaaagggtatgttgtgaagggaaattgaggagagcctccttgcctatcttgattgaaagatttctgcatagtaaaacccgaaaatcgataagagaaaaggcaacaacaa

SEQ ID NO: 93330 - DNA, 551 bp, Cannabis sativa
aaaaaaaactatttaaaaaaaatttgaaagcggtttttttttgtttttgaaatttagatttttaattaaaaatggaaagtaataaaaacagttttataaatcgtgattttaaaattatttttacttttttaattttaaaaataaaaatttaattaaaaaagtgttacccaacatactcctaactattcttttctttttttaaaaaaatatatatataattttaatattttttgtaggataataattttaagaaaaatcttaactagggcatcatttcttttgtggactgtaggaacatttcttgtttttgatatataataagtattattgttttttttttcttgttttattttttaaaattaaataatttatgatattaaaaataacatttaaatattcaattacacgtagcatactacttaatacgcgtggaaaacattattttaaattttatgttttatatagtaaattatttaaaacaaactaaatgtgtataaaatacctactatataactataatatatatcatctctctctctcaaaaaaaaaaa

SEQ ID NO: 93331 - DNA, 536 bp, Cannabis sativa
tgtgatctaggggctagtatcaaccttatgtccttgtcagtattcaagaggttgcagcttggagaagcaaaacctacaactgttacattgcagctagctgatcggtctttagcccatccaagaggagtaatagaagatgtccttgtcaaggtggacaaattcatattccctgctgattttatagtcctcgacatggaagaagacaacaatatctctatcatcttgggaagacctttcttggcaacagggaaagcattgatcgatgtccagaagggagagtttaagctcagagtgcaaggagatgaagtcgtatttaacgtactcaaggaaatgactggtcctacaactagtgacaattgtttttcaattgacgtggtggtggtagagtaaaaggagcacagtgaagaccctcttaatttgactttggtgcaagaggaggtggtggaacaagatggtaaataagtaaacgactatgctatgtggcttggctcttatggaccattgaataaaaaatattatgaagagttaggagtcat

SEQ ID NO: 93332 - DNA, 1843 bp, Cannabis sativa
attaatttctttttttttttttatccatattttaatgagttttttttttttttttgaaagaaacttagttccatattttttatgagttgatctaatacataacttgcaggatttctctctgacactgtatcttttatatttattcataattatgggttacttcggatataatatctttacaatctaatgtataatatgtttatttcttcaaaaagaaattataattgaaaaagtgttgtttaatattttaatgttaatttgggatatcatttaattaaactaattattaataattgtaataataagcgatcggaaaacaatatataaagtgaaattatttttaatagggtatggagtatggatcatatgtgaaaccatttattgttcgtttagactttagagtgtaaaagaatactctctatatcacaaatccatgtgcctttgctaattattattcccccgttatctttttattgttttcccactaattcaactatttatttattttaacataattttggggtaagaaccttctcgaactttttatcatctaactaaaaatattctttatgaaattgtagactattgaattcttattatgagccatatgaaataaaattatttttaaaaatttagacaataaaattataacattttcaaataacacacatagtttattaaaatacaacttcctattattatctatcgccaaagctagaatttttttttttaaaaaaaaaaaacatcgcaccacaaaaataaaattatattaaaatagcagtctttaaaccaaaaaaataatatacaaactcagaatttaacacaactcatatcagtagctcaaaattactaaacaaagctaaaagccaaaaaaaaaatcttatagcacttaccatagtttctctactctattatttaatatacattattaaaattttattttttttattttagctcaaacttttatattacatcatacaacatattctttatttttcttctaaatattatttaaataatatatttataaataaaatattatatatatggtaaagtgtgtatatgatgtgattagaaaagttaaaataatattaaaaaacgtttaaagaaccactatttatatagctaaatgtggagaaaattttagctcaaaatcttatgaggtaaaataaaaatgagctttaaatttgtttacattttagctattataaaacaccaattgaaagtgcttttagtaaaactacttaaaggtgttatcctttagttaaaggtaacttattagctctccactaattcaaaataaataccccatgcactatatcttaatttttttaaatagcacctaaatatatgtaaaatgaaaataaatagaatctaaacatctttcagtattcgccaaatacaaaacatcaacaatgattacttaaaataaacaatcaatacatataaagttaaacttatgagcaaaatttttataatggaagactctcaggcctacaaaataacaataaatacaattctattaccacacattgttagagattttattacttgtaacgccctaatattaaggcacgctacaatacctttttcaattacagtgctatttttgctaatcaaaattttttctcgaaaaatgtgtcaaattaaaactttttataataaatattaaactttataatttacataattatttacaaacacagggatcccgtttctaaacttttatacaaaatgtaccaaaatataatatccaggtcgctcagcgactacaaaatataaccccagatgtcccgagaccgaacactccaggtcccgttgccatgacatgtacaatcccatc

SEQ ID NO: 93333 - DNA, 854 bp, Cannabis sativa
gtagattacaataatattttttctaggctcaattgagtaacaacatgaccataaattctttttaaaatttaaagataagagagagaaagagagaaagagaaaaagataaagagaggggaagatggtaaggataaactggatctatctatgcttaattccacatgctgtacaaataaataagtaaacaaaaggaaaaaagaaaaaaatatataaagaaagaaagaaagaaaaaggtatcagcttagtatatcaattaaaataaaaacggtataaacaaacggtaaaattattaattaaatgttgtacaatattactgataataagatataaaaaacgactgcacatgtaaatttccctaataaaaaggctttaaacatattgtgaaagtgatttttacttgcattcacaccgataaattatggttggcttattaatttgtttatgaaatcccttaaaatattcgtcgcgccaaaaaaatacatgatgctgtatatatacagtaatacgagaacacaggtgacatattattattcctcttggaactatgttattgtatggggtggccatgccccttaatattctaaagaatcatttttaatatatttataatttataaaaattaaatttagttattaaaaaaatataattagtttagtttacctcaatgtacataaatagatggtgtattattatatacgggttctataggtgtattttatttcttatattaatttaaaaactatgtgtaggatttgtcccttgaattaatatgattatcaaatcgtcttttaaatttatttactattctctttcaactatgtcacaatgctaaatataagacttctaataagttt

SEQ ID NO: 93334 - DNA, 1064 bp, Cannabis sativa
agtctcaagtacttattcacttagaaagatttaaacatgagacaaaggcggtgattagaattagttaaagactttgcttgcaaaattttgtatcatcccaagaaggaaaatgttgtagcggatgccctaagccgaaagggtcctaatcaaacttttagtactgtaatgatctttcgtcgattagcctcggatatgtctagggcaaacattgagtttgaaattggagaatcgtataatttgacacttcaaccagacttactagagaggatcaaaatgacacaactggaagaccctgaattaactactcctcgagaagatgttttagcaggcaaagttaaggatttctcaattgtaagcaatgggatgttattgtttaaggctcaactgtgtgttcagagtaatgttgagcttaaaaaggcgatcctagatgaagcacacactaccccttattcattgcacccgagtaccaccaagatgtatcaagatctgaagtctattattggtgatacggaatgaagagggatgtagtgaattatgtggctaaatgcttaacatgccagcaaatcaaagcagaatattagcgaccagtagggttacttcagccattagaatttttgaaatggaagtgggaggatattgcaatggattttgtggtcagattatgtaaaactacaagaatgtacgactcaatttgtgtcatagtggattattttacaaaattagcacatttcttgcccgtgaaaataacatatatagtggatcaatatgcgtagttgtacgtgaaggaaatagttcgcattcatggggtcccaaagtctatcatttcggatagggatcctaaattcatatcaaagtttaaagtgagtctacagaaagctatgggtactaacttaaagtttagtacaacctatcatcctcaaacagacggacagtctgaacgaaccattcaaatacttaaagattttttacgagcttgtgtcatggacttcagaggttcatggagtacatatttgcctctaatagaattctcctataataacagttaccaaagtaccataggaatg

SEQ ID NO: 93335 - DNA, 833 bp, Cannabis sativa
gcaagcatactatattgagaaagtgttgaataaatttagccatctaaaggctaaagaggccaacacaccattcgatcatattaaatcacgagttaaaaataatggtagagcggtggctcagttagagtatgcaagtgctataaggagctttatgtatgctgcccaatgtacaaggctcgaatcatttgcagtgagtaaacttagtaggtttactagtaatccaagtgtggatcattggaaggaaatagggagagttttgggttatctaaagaaaaccaaaaatatatgccttcactactccaaatttccttcaatttttgaaggatatactgatgcaagttggatagccaaccttggggataatttttcaacaacgacttgggtatttaccctaggtggaggggcggtttcttgggggtctaagaaacaaacttgcatttcttatttcacaatggaagcagagtttatagctctagctgcgccactaggaaagaggtcgaatggtcaagagatctcttgattgagattctaattattagagggggctgtatctacaatatcgatatattgtgatagccaagcaacattggctagagcatatagtggagtatacaatgtgaagtctagacatattattctaagacatggatatgtaagtgagttgattcaaaaaggagtcatctcaatatcctatgtgagatcaagtgaaaacttagcagatccgttaacgaagccactaactagagatttagtggaaaagacttctaaagggatgagactaaaactccctaaatctattcacaattgcagttaacctatcttaatactagtaa

SEQ ID NO: 93336 - DNA, 1680 bp, Cannabis sativa
gtacatgacaaattggtattaagtatatcactgaaacatatagtttgaaagaaattttgacatttggaaccaaaaagcatgaatatttatgcatatatgtatattgttggaactttttcttaaattaatgaattttgataaaataagacagtatctcaatgtgtgtaatagaatgagtctcacatggaatatgagttcttgtttacaatagtatataaattgtaactttgtcacttgggataggactccaaaaagtacttaattttgtgcgaatgagtgaggacacatacacttgacctgccatgcgagtgtcatcatttcgtccaatcataccaagctagtgtgacactttaatttttggagaaaatttattataaaattatttttattatttagttaattaaaatagtttttaaatgtgtttaattaattggtaaagataggcgtgttctcctccttattttcagcatctctcttacacaggaaaaaataatttacagttaaatatttacgattatattatataagtagtccgagcagtagttgttcggtgtggtattttgacggttctctatcgtgtaatagagctccgatatagtggtattttgattgggctgttttatcctgggacgaccggcaaatccgactgcttgcacattcctgggcaatgccgcaaacgtcttaaagagagtgacctagcctgtgactcaacataaaaattttatttggtaatagtgttcctgttttattttccaatagcagtctgtataagaattttaagacgttcattctgctatgaatattgccgatgattttttttggttctactgctcacattaacaagctttttcgttttgagagtttgcattttcaacgttggagacagaagatgttttttttttttataactatgaaaaaagttgtgtttatgttgactgttttgaaatcagttgtgtttgagactccaccttttgctgagaagaaggatgaagtcaagaagtatgaatcacatgttaaggaaagggactcctaagtagagaacgattttttgtgtaagaattttaatttgaatgatttgtctgatgatttgtatgattactataattctgataaatttgccaaagaaatatggaaagcattacaaaaaaaatatgatactaaggaggtaggaacaaagaaatatgctgagagccactatctgaagtttcaaatgaccgatgataaatcagttgaagcccagtctcacgagctttaaaaaatagctcacgaaattctgtctgaaggtatgactattgataaataatttcaagttgccgttataattgataaattatccccttcatggtaatattattttgagggttttcattcgataatattgtttttgttttattttctagtagcagtctgtataataattttaagacgttcattcttctatgactactaccgatgaattttttagttctactattggcattaacaagccttttctttttgaaagtttgtattttaaacgttgtttttttttactatgaaaaaagctgtgttaatactgattgttttgaaaccaattatgtttgagactccacctcctgccgagaagaaggatgaagtcgagaagtatgaatcataggttaatgaaggaactcctaggtagagaacgattttttgtgtaag

SEQ ID NO: 93337 - DNA, 544 bp, Cannabis sativa
caagattggattggtaaatatataccatccatcttgagggggagtattagaagaattagttgttaagctgtcttgagttagttaggaaagtttgttaaagttgttatcgtgtcagttagaatcagttagtgtccattgttgtatctcaatatacagagcaactatatatagctctctcccctgtttttccattgacatttaatgaatacacagttttcttctttctcgtctctctttctttctggtttacttagctaaacgttactgtcgatcaagaaaatagatctaatttgggttggaatttttatttttaaaaagaaaaattatgtagcttaagattatgtttggaaattaggattgaattaagctgtcccattgggattattgaggatgttagacccaaactcaggatgcccttgtcttcggtgaaatatgtatgtttcagtaagatcacaattgcacgaacacgggccaaattcataaattaattacccaatatgttagggtttcttggaattttctttgaataggtgatgatctgtga

SEQ ID NO: 93338 - DNA, 1094 bp, Cannabis sativa
ctgaaaacttacagaggacacacactgcattatcatttgacagaagtgactactgaaaccgaaagcctttagaacctttaggaggaaattccattcaagcctatcataggccttcgacatatcacatttgatgcaagcaaaagcattaccccctcttctccgcttcatgtcatgaacaatttcattggcaataatagaattttctgctatgtttcttcctttaataaaggcagcctgatttggggagatcaaattatccaacaccccactcagccggttcgcaagaagtttggatacaatcttgtaaattgagttgcataggctgataggtctataatcatcaaaacactccgcatgagacttcttgggaatgagcacgatgaacgttttattaacctcagaacagaattttccattgttgaaaaattctttaacaaagtccaccacctggttcccaacgatgtcccaatattgcttgaagaactttaccgggaaaccgtcagggccaggcgacttcagaggaggcagagcccacactatctttttgatttcatcctccgaagggcagctacacaatcgaaggttctcctcccgagtgatagaagccgtaattaagtcagagaaatcattttccacattatcaccactagaactgaacaaagcttggaaattagaccgaaagtagtgagcaatactagctctatcctcaatcaatgaaccatccgcctgtctgaccgcccagatgtgatttcgtttacgtctcaccacaattgaagcatgaaaaaaacgagagttcttatccccctcatgaagccagttttctctcaatttttgtctccaaatcgactctaaactatcctcaacttcatctaattcaagcataatcgacccttcaagctctaaattatccttcgaaggagggcgattttgcacctcaatcaaaagcttttcaagcgccttgatcttcgattggtagaagccaaacaccagccgattccactcacaaagagctttagcagtaatctttaatttctgacagagaataaagctctgaaatccctccacaccatgcttccaagaatcttcaatcactt

SEQ ID NO: 93339 - DNA, 695 bp, Cannabis sativa
ttatatgtagtaatttatgtataacatccatagaaaagagagaaaatggtaggatttgagaaaaggaaaaaagaaaagaaaaagaaaaagagatggggttaaaaattattaagggagtatttttggaattatacaaaaataagaacatatatatttgaaatggtgtccaaatattagtcttattctaattttagtattaattaatgtattaagggtttgtttattacgttttattataatatataatattttagtctaaattaaaatataacatagcattattttaaaatattatatataatcaaatttaatataatacaatacaatattatacaatttatacgaaatgagcctaaaaaatcaaatttctcgtatgaagttagcttgtgaaattatacattcattcccatgcatggacaattctcacaagaaaaccaatcaagtgggaaattcaaattaatgttataatgattttgctacataagcaaattcatcttatatatagacctagccttattcacaatatatgcttacaaactttctcacaatattttctttttagatcatcttctttgttagagtctagggatcgaaacgaagagctgcgaaaaaaaatggcaagcatgtcaaagaagatgcagagcaatgaaacgttgtgttgtaaggctgggcctggttacgcttcacctcgagaa

SEQ ID NO: 93340 - DNA, 1077 bp, Cannabis sativa
  modified_base (433)..(435): a, c, t, g, unknown or other
  modified_base (802)..(802): a, c, t, g, unknown or other
ctagtacttgcttgacagagttagaagagtaggttattaggttggatgagaatgagagcatcatgttccttttatagaattttaactaggattaaggatttaattatatggattaaaaagataaaataataggcaaaaattaagctagtggcttgccatacatagtggatctcactagttataattttaccactttatttcaaccatttatcttttctttcaataatactatgttttccaatttcaatcctataaatgtcaaaactctttatttaatgattataattaattatcaaataaaatttgcatttaacttatttattaattgaaccttacaaagtctctcaattaataaataaatccaaaaactttttttcttcacaattaagcccttggttagtaaaaattcataaataagacatagtctagtttnnnaattataattaattaattaaaactaattaactaagtatgcaagaagtattatctaaacttgtgtggagaccatgggcctatataatcaaacttccaataatagtagaattaggatttaccaagtgaattctctaacttattaattcctcctcgcgccactatagattcggaatttcactcttaattatattgaacgctctatatgtaccaagacataaatacgctatgaattatccatcgttctaatccaaataatcaatgatcctctatacatgatctagatcaaagggacaaatttatcgttctacctttcaatgtattttatccttaaaatacttagctacatataaatgatattttagtaaantaatataattactgaaatgaggcctcaatcatttatctctattaactcaagctcgaaggagatcattatttcacttctaaatacgtataaaagttatagattctgtggtatttgatcctctaaacaaaactaaaactaacttacctacccttagctaactcaactaactttcagttatgttagttggttagttggtgctagttttgcaccttagtttctagtggtgagttgtacctataaataggatattcttttgacttctgaagcagagaata

SEQ ID NO: 93341 - DNA, 716 bp, Cannabis sativa
ctttcattatctcaaagacaagctaactgttaaatactcaccacagcttagcttgagggggcatgttgaaatgaaaggatcagaagcagcccaatttgatgatgaggcccaacaagcatttgatacccctgctgctgactaagcagagtatatcctttaataccgttgcactgatttggagaggattctactttaacaatattcataattgtggaccccatagagaatattttcttgtaacaatataatcttccagtatcttctttccttgtatataaatatagcctttatggcagtgtaaatattgagctgagtaaatcaatacagtcatataccgaaaagttttcattactctgttttccacttttcaagctctggactaataaactaaatcaaaacaacaacataaaacattaaatctaaaaatagatctaagataaaacaacaacaaaaaataaaaacaggaccataaataccacaccaacaggggagaaagagtcaacccaccaccaacaagctctctgcgccggagggaatgtgaaacccaaccacccctccatctcaatccatccctgagcttcaaaagaaaaggcagagggccaaaaataccaaaaacaactgagcaaagacgactaacactgttggaggcctttcggtgcctcctctggatctcaactgttgtaaaccacaaagtcccaaaaagctcgacctcccct

SEQ ID NO: 93342 - DNA, 529 bp, Cannabis sativa
  modified_base (493)..(504): a, c, t, g, unknown or other
caaggacatcattcttttcctagccgagcatagatcatctgagtggccaataacaccgcacttgtagcagaaaagggggagcctttcatacttgaaataactccaaactttctcaccacctgcatcgtctagacccacaccagccaaaaggggttttgtaaggtcaaggctaacccgaaaacgcatgtagttgcttcgaagcactcccctgactcgcgttttgttggtcgacaatacctaccaactctgttcgtaattttttccacattttcatcaaaaagtaacgataaaggacacccaaagctctagtcctaatgttgacatgattaagatctgccgacttttacttttcatcgtccagcatcagagtaaccagcatgaaacctccacagggagcccagggaacattctcaatccccttcaaggcatctgattctctggggaatctaaaagtgaaaatattgggactgatctgtgacagtcagtagtcccnnnnnnnnnnnngggaaataccgggtaagctgtacaa

SEQ ID NO: 93343 - DNA, 576 bp, Cannabis sativa
ataaatgattatgtagggaatagtattccaaatgtcaatgtaattatatataaaaaaaaaaaaaggtcaacgtaattaattaggtgaaattttcgatgtgattcattttgccatacattcttcctttcaaagaaaaaaactatatccatgagtaattatctattttatcaaacttctttcctataatatcattatttcttaaaaaaaaaaaaaaaaatctataccatctgcaatacaacacaactgttaaatttagcacagaacataatttttatttctagttttgtatattctagttatttaaaattaggagactaagctttgcttcgcgcgggtttaactctatttttgatacaatttatagcaacaatataagttcatgttagtatagttgagttagttagttagttgttgtaactaactttgtaacagtttttcttagtctgttaattctcgttattctttctgttgctttctaacacttgtatataaatacaatcaataatatcaagagaactcaagttctggttttactcttctcatacactctgttctctctctcgttttgttactctg

SEQ ID NO: 93344 - DNA, 1991 bp, Cannabis sativa
tttctacatctaagattactagctacttgacttactattcttaggctgctggtgctatttagtaattctcaaatctcaatgtctagatggttgatgggattgtaaacattatgcagatcaaaagtcttgcggctgagctttgtctagacagagctgttgttcttgaaatgcttcgtgaaccccctcctagtctcttgatgatggctgctactttacctgatgacgaacctacaggtccgataataacagtaactgacatgaagaccatagaagaagctgttgtggaggaaactcccaaactggagacttctgcgaaagtgcctgttcatgtcaaacagcaaagattgtcctctcaaaagcgaataaagaaagtggacattcaaacccttgaaaatgtttacagaagatcaaaacgaccaactgtaagtgatagttcctttttttttcgtagtgattttaccacgttataataaatctcaggcagcgtactgtgtattctctttattgtctagttgaaccacctaaatggtgagtaactatgcgttacatatttacaaaatcattggagttggatgaattacagcatttctgatagctaagctaaaaatcatcttcaactgagaactgttttccctatatgtgttgataaactatgcagaacacgatgattgacagcattgtgcatgtgacaaacctgccccgtaaaagaattgtgaaatggtttgaggataagcgagctgaagaaggggttcccgggcagagacttccatatcaacgctctgctcctgatacagttcagtaaagctatatacataaagcctttagttgtttactttactggtactgacattaagaagtagaagtcttcctttctttctttgttgttcatgtcatatagatttgtaaaagtatatatgatggttttctttctatagcctatccttgtccacaatattactccagctttagttttttggagtctattactctatttgttctgatagtattgatcacttgtctaggaaccaaaaaaaatcttgtaaagttcgagtgtttctgttttaaaaaatgaagaacgtaaacgtggatcactcaacacttcattagttagaacactttcatagtttcatatctttcgtagacaccaacacttcattttttcattgtaaaaaagaaaaatatacacttcattttcatataaggatattcctgcttctttctatgtttacctttactcactgcatgagagtatgagatagtgtttttgctttgagaccatacaggatttttgggccttaatggactcactcagcttaatgactcagctttagacatctagaagtagatattgttcctctagttgcgaaaacagaggattcctgggattatgaatgaaagaggattttcatgagctttgtgatattcttatttggatcattgaactgagtgtaataagaatcgaagagggtggttgttgaaattattggccctttatatgcatattttgagtctaaaataaattgtttgatgtgtcttggatgagtaagatgatcagattaggggtgagcaaaaaattcaagaaaccgaccagaccgagtacaccgaccgtccgaacactgaaaactaaaaaacgtctccggttaaaacctcctttgcacggtcggttttagtgtcaatgacaaaccgatcgattaaatcgagaaccgaccgaacgtatatatattatacactatacatatataatataattatttttgtacatatttaatatacaattttattaaaatagttttactttttattttttttttatttaaagtctcaattctccattactttgttttattataatttgatgtatttatatattacatacacatattcataaagtaatatgagttttttaatataactcattatcatactagtagcacaaataatttgagcaaatttaaaaaagtttaatttatattatttatttcactaagaaa

SEQ ID NO: 93345 - DNA, 722 bp, Cannabis sativa
aaacaaataacataccgaattaaaagagagtagtactcatctaaaacaacagtcttattttgtcttattctcatcatttaatttgagaattccaataaaaatatcttcaccaaactaatttatttatttataatttcattcaattaaaattttattatcatcattattttcttcttttttgctgaatcatcacttttcctttttaatgtagaaattttctagtttgttttcaaatcagaacctaaattaaatatctgaattcgtaaattgaataaattccttaatttgttaataagcttttgaaatttcattttcaggtagggtcgtaactcgtaatctgaatctggacattcattcagagctaacgtgtcaaaaccgaaagatttttatcaagattggacaggaacaggaaatataaccgaccgcaccctatcttttccatgccacctgtcatttcaatcaagcaaacaaatatctgtcctgacgcggctacacggagtatatggtgtaccctcttgtagggaagttacatgaatatctatttttctcgaacaaaagctcgctttttgtcaaaagaaaatatctggctgaacattggccaaagatatttatctgagctgagctggcaaagtgctgatgaaacgtacacgtgtaaaagcgacgccatgtggagacttaattggtccaaccacacaaacaccgccttctctttctttctcttt

SEQ ID NO: 93346 - DNA, 1089 bp, Cannabis sativa
aagtcgacatatttagaaggtgctaggcagacatatttagaaggtgctaggcaccactggtgcccaatagcaatgctcatatctttatcattcccgccatcatctatattatcattaatttcaaattccgcaccaattgttgttgggaatttaggacaattcttatgattctaacacaagattaatagagtatgaacacataaaaattgacaataataaaaataacgaaagggatttaaatcaaaaataataaaataagaacattaatattgttgttattatgaacgacaagattagttaaaaggaataattaagaataaagattgacacaaatagcgtatagatgagttttgaaaacataattctatgaaatcaatgttgaattaaaattttattgtaggcacatatgtataatgtatatactatgataaagtgtgatataaaattacgtgaccaattatgttatgagtatcaaaaagatattaaattgtcatgaaaataacgtgtaaatactattagttaatttataatttgttgaggggctaaattataaatacccaaaactcatgtttatatatagtggtccccaagaaacactagggtttctgtattctctccttccccatcagagaaaatactttaagaaatagtgtattcttggaagatcaaaacattctctgcaatctccaacaatggcttcaggttagtgcttccgctcatattttattatcttcttctttaatttagcaaaggttccataaatttataatttaggattttttatattaaagcacttttaggaatatgtttagatctgtgatatatatatttcttgagtattttataaatctgtggcactaaagctacctttgttgaattaattgaagatctgatgattttatttataaaatttggagattttaaaaattacgatgttttatttattttttgaacaattttgttgatatagtttttgggcttcagtatttttttggattaaaagaatattatataaacctgttttggcccattgtatttaatatatattgatttgattcgtttctcggtaataagcttcagtgtgattga

SEQ ID NO: 93347 - DNA, 831 bp, Cannabis sativa
ctatctaacaatttttgttgtgcatttaatgttttttaacagaatattccctaataaatagttaattttaacagaaattaaaatactaatggcatattttaagagttgcatcctcccacacaactattcacaataagtacctattcatatggtttaaacagtaattcgtatggtttaacagattttgttgtgcattctgttagtttaaacgacgaaacaacaacaaaaattaaaaaactaacggataaaaaaggtctccatttgagtattgcacccttttagaatagttgcaacggtatacatataacctaacctacacctaacaacttcaatttcactgagtagttgtgacttgtgagtatagtttaatatcggttccaaattcaatttccattagtcaaggttcaatatgttctttctttcatttttagaaatttttgctattgtggtagtttgtggataataatcttttttttttttctcgttctttgtgattctgcagtgttgtgtttcatttgtagttacatgtgatttcatctatatgcagacataataacatttatagaattagttttatttattatcaacaaaatatccgtaattttgctactaatttgtttatcattttctttcttctttatattagagtggagatactcaccaaactaaaaatggcttactaaaagtgcaaaaggcctgttgtttgcaaggtatatataacaaaaatgttccattttcctaattttttttcatgtatattaaagaatagtaaaaatctcttaaatgggcagttgctgcagtttataatctaggtaatatctaaacacattc

SEQ ID NO: 93348 - DNA, 883 bp, Cannabis sativa
cctttaaaacatcgtgaggtccccatcgtccttgtacgccctttgaccccttttcttctgacagccacctctgccctctcctctggttagttttcttgcttctagtttccatggaactcttcaactattactcggtgctctgcaagtgttttataaaatgttttaaaagatcccaagaaaactaagtcatgggtctctcacttatggcattcagtttaatctcaacgattcttaatcacaagataattgtctattatctgaattttctttaccagttgtaactaatatcagctaagtaactctacacaacaaaagttgtttatcagattttcatgttgtttccttgacaggggatagtattgattctcgtattattatattgcattttctctgatgtaaaggtaatgattatagtgcattttaaactacttcttccaattgaatgattccaactacttgatatgtcaaatatagtagtaggttgatgcaatttcagtcaagcaaaacttacttaattagttaaggcttctacttctcataaatacacatacactatcacaaacactaattctcgtcttttatccttgactgcaccttcattttgtttttttatttaataagtgtgataatttttaattgtttctgagacaacggtgatttgtgtttgactttgcaactctgcttcgtacgacaatccctattatctgtttcttggttactttgtttactgtaatgaaattgtaagtcatactttttaattttatttttttaggtcattaatcatactagagaatgttttcatctgattttgaatctcctatgaagaaaacatctaaaaatacgcaatccccttcttatactcgtggtattaaaagaaagtgca

SEQ ID NO: 93349 - DNA, 598 bp, Cannabis sativa
taatattgttttgagtaatgatatctatataaacgtaaaaacaaaaacatactatattaataaggttagagcatctctaaggagtacactaaatttagtattacactattactaaatttaatattaaaaactattttcactccaaccacaatactaaaaaatattttttttattatattttttttaataaattttaaaaaaaactaatattatatcttgttatatttaaataataattagtccgccacttttaaattgaaaatttatttttattaccataaaaataatttatggtattcacatttaaatttacacataaaaaattaaaatgtacttttaacgtacccttaattaaagagtcaaatatataacacataatttgaactttattttcggtgtgttaaatttttttcgataacagaatgtcttaaataattataatatacattgtaaaattttataaaaaaaaaaataatttgatccgaaacaaataagagtattcagtgtaccactttaaaaagtacattgtaattttataaatacaattaataatataaatatatatataaaaaaaaaaaaaaagtataaagtgtaattt

SEQ ID NO: 93350 - DNA, 908 bp, Cannabis sativa
aaatgccctattgtattagatacaattcctgaattttttttgttcagtctaagcataagaagaaaattcgaactaaattgaaattcacctttcttcagattcttttatagttggctcctgaaacataaattcaaaagaatagttaggaaattttggtaagcatcaagccaaaataagtaactaaagtaaccaattccataaaagacataacaaaatgtactgcacatattaataagaaatttaatatgctggaagtaccaaatgaagggtatttttttagaaaggtaccaaaaagaagggtgttaatatgacattttgctagcatttgactaatgcttcagaaacaacaaactgaaccaccaattgtaatttggcgaaatctagcatttgagatttaagaagcttcattttaaatttcatttacaagtatgagtaagataatgccaatcaaaagatttaatacatatacataagagcatccatactcctaccatttttatattttatggtcaaacttcacattcacataaaagattaaactgagaagccatattatagtcatctcgttgcccatcaaatcaacaagtcaacataacatctaataacacataagaataatcctatgctattttccacttacatatctagccataggtagaaaaaaaattgtgattcaatagtctgtagaaaacttcaacaaaaatatgacaattttttaaaaaagggatatttattctctaaaaggaatcttttgccatactataaatagcaaccaaaaaggaatcttttgccacactaaaaataataaaaaggtatgtgaaggagttaatatcaccaaacacctcatcacgagctcgagtatcagcaactggctgaggagagtgagatttgtttttgttcctgtgatg

SEQ ID NO: 93351 - DNA, 759 bp, Cannabis sativa
aggatattgtggcaggatttaaaatcaattgcttctcatataccttgggtagtaatgggggattttaatgaaattttagaaaaagatgaaagagttggctctaaagttaaggagcataatctcactttatttagagattgtgtttctttttgccaattggaagatgtaaaaagcagtgggaagtttttcacatggtgcaataatcaacaaggagaagctagaatttatgctaaattggatcgggtattggccaatgagagttggcaggatattttcccaggtgctgaagcaatctttttgagtgaaggtgtattcgatcatgctccagccattgttatatttcataatctactacataatgggaaaaaaccttttcggtattttaaaatgtggcaatctcaccctgattttgacagcaaagtgaaggcagtctgggaggctaattaccaagggactgctatgtatcagctcatgactaaacttaaagctttgaaaccggttttcaaacagattaatcaagcagggtactcagatttgcaagcagcagtcacaagaacaaagttattgctggaggaacatcaacacaaattaatgtcagatccgatgaatgtgttgctgcaggtagaggagaaagctgccaggaatgagttctccaaagcacataatgattaccaatctttcctactgcagaaagctaaggtggcttggactagagatggagatgataacacaactatttttcatgctagcattaaatca

SEQ ID NO: 93352 - DNA, 643 bp, Cannabis sativa
tcataatggactgaatgatgaaacgaaaaagtgagtgaattatggagcagaggtaactagagagtcattattaagaagtcatgaaggcataatgcacttattatatgatatggctgattttgactatcattggcattgagatccttgacttcagggttagagtcaccaataccctctatattttccaaactcatcccaaccaattgaagaggaagatcatacactgtcacttttagaaaaaataatccaattggagtgtatggtaagatctctaacggataatttaatggttcataatgtggagtgctttaaggacaatgactcaaataatcaagattatgagagttgtttgaataaagtagaagtaccattagttgagtcaaaagaagagattgagtctgcaattgaagatcaagacccctttgaagtggtactatttcaagatttcgctaaattggattcttacttgacaaataatgcatgcagtgtggtaaatgaagtaaattccatccatgatcatgaaattattgaatatgaaatcacaagcaaggttatggatagccaagtgaagagtgaagaacaaaaagaatggttgttagatgaaagtgaaacaaatatcaaattgaaagatgaggaagcacct

SEQ ID NO: 93353 - DNA, 661 bp, Cannabis sativa
  modified_base (419)..(421): a, c, t, g, unknown or other
ggggtctaacgtactcgtcgaccactctttcgactgatcaaagctctcgtgataccatttgtaatgccttcatttatttaaataaaataccacatgcaaattatatatgtgtgtttttttagctcagttgtgtatttaattttataaaattttatattagtaatttgtaataattttgtaacagtactttgttatagttttctatttacattgtatttatacaaaattgtaacatatatatgattatacatttataataagtgtagttataaatttgtaaaaactttagttacaaaagtgtattgttataaatttgttagttttcttttagaaaaataaagactgtatttatttgtaattataccccttcactatatatatatacatatatttgtaagggtaaatagcggcataagtannnaaagttttgagtttgtaagcggcataaacccaatgatttttttagtggcataagtacctaatgtttgtaaaactgtatttgcgactactcgacttttaaatttattaaaaaaagatttagaaataacagatactacagatttttcgtccagactaaataatctaaaatttgggtcttatatgcgtcctgtttaagacaataacagagtctgttctgatgaaactagaagaaaattacagt

SEQ ID NO: 93354 - DNA, 924 bp, Cannabis sativa
tgattttgcatagaaacactgtttttggataaagagttacccgtttggaaattcggttactcgtttggggtatttttgtttggatttatgctctaaaagcaagtatttattggaaaatatattagagaatatatgaaaaacaaatataagataaataaatatgttaattatagaaatataattgatcaatatctaaaaaatttatattcatatagatatgatcttataaggtggtacaagagaactaagatcatataatatgaataaaataagtcagtagtgtattaaaataaggaatctttaatatgaaattaccaagtacggtttactaagcactatactctagtggatgtaattacatgccgtttatcgtgaaagagttattcatatcacagtgatgatcattagtagatcagtttgaatcctgagtatacatgaactcatgtttgtgttatgttgacctcgccagccaacgacgctgagcctttaaagcgatgagattataaataataatcaaacaaaactaagcaaataagaacaccggaacttatagctattcgaccttgtggttatggcaatagcctactcctattttacttgtattacttcaaagaataattaagatcacaaggagttggccaagtgagtttcttaataatcctaataaaagcttacaattatttagacagtataatgagtctcaagaacatatgattttcggattcctaaaccatggaatggctccattatttataagaaaaagaaaatacatcaattaagttttccaaaaacataggaataaattgggaaactaaactagtttcctataatttctatcagtgtgtcaatcccataaaaatagggatttgattgaattatgaaataaggatatatttatggaaaatatctttaaagatcttgttc

SEQ ID NO: 93355 - DNA, 888 bp, Cannabis sativa
agcctaaccaaacttttccaatactagttgcattggcttttaggtttgtaggcccactagtctgcatcatgtaagtacacactgttaatccatttcagctatagattatcttttttatttgcaatcgcccatacatatttacccatagcagctctattccatgcatccacactcttaaaccctatacctccagttgattttggttggcaaatagattcttaagaaatagctccaggcccttgatacatagctttcccattccataagtaattcctgcatattgcttcaatggcattcactacctttttttttggcaaaatcagcacttggcaccaataggcatgaatagccatcaacactgaattgataagcactactcttccagcaaaggatagattccttgagctccaaatcttgattctagctgtcattttttctgccaacacctcgcaatctttccatgatatcttctttgcacctattgggacccccagataagtaagaggcagagactactttgtgaaaccagatacttccaggattttccttaactgatcttcaggcatgtcgctggaatatatagcaaattttgtagcatttggatacaagcttgatgtcaatgagaacaatttaagcccctgtagtaaataatatacactcctgaaatctccattgcagaagagcaatacatcatcagcaaaagcaaggtgattgagcttggttgctgcacatttattatggaaatagaaatcttgtttatccccgattttccccattattcgggataagtattccatacctaacacaaataataaaggagacattggatccccctgcctgaggcctctcttagactcaaaatagccatgcatagtgccattaaacata

SEQ ID NO: 93356 - DNA, 1791 bp, Cannabis sativa
ttctgcaaattcaattttttttttctttttaagttgtaataatggaatccaatgaaagaaaagaatgtatgataggagcatgaattagtatttaccatgggatacatggagtcttgtgaatacccggtgtaactgtaaattagcccccatacaagaaataaatgaatcaatgtttgaagtaaaactgaaaagcagggggaatttaggaaagaaaaaaactaatagtaataatttgaggatttaatgttaataattatgagcgttttagcttacccataagctgagtaaggaattgaatattgagcagtgggttggtgaaagtatgttgatgttgagccttgataagctggtggagtcactattccagggcttggtctaaaccttcctgctcctcctgcaggaacaaaaaataagaaaaaagaaaaaaaaatatataatgacatcctttgaagcttgtaagaatggaaatgtgataattttaattaggattaacataatcaattgtcaaatattgaatatttaattatgatgagattgaatgttatttttgaatatctaattaaatttgatgttggatgaaatatccaatctaattaattaattagtatttttatttaatttaaatttttttttgaaggaaatttagtttagaagttgtgagattttatgttgttctacttaaaaatatttttaatgtatacatgaaaattattaggattaaaatttgacattttttgggggttggatcaaatccaatttaataaatattagatctatggatctgataagaaaatactaaaaatactaatactaagtttaaaagattagataaatccgaaccaatttagtaaatatatatgaaatgtatacaaagaataaaacaaatctaatcgaatattcaaatgactcgaattaattggattagatcggttaacaaaatttaattattggatcggatctaggcctaaaacatatgatctatctaattaattaagagaaagataagagattccagaccatgttgaggagttggtggacgggttttctgtgcaccaagagaggcaacgttacagtttgctcttcttccatcaatcacaggagatgggttttgacatgctcttatggctgcctctggatccttaaaagtaacctatgaaaatataaggccaaataaaaaaaatgaaaaaaagaagaagaaagactcatctttcttaatcacaaatacaaatacaaaaacattatgagaatgatgaaacatgaaatgggcttacaaagccatagcccttggatcttccagtgtttttatctgtaataacaacagcttctaagatctctccaaactgttcaaaatatcttttcatagtctccctttgagtctcccaagccaaccctccaacaaagattttggtaagagttgtgtcactgaattgtcccggattgttattaccaaccatctgaaattgccttggttgagacatagaagagttgcaaaaataaaataaaataaaagatcaactctatatctataaaaagaaaagaataataataaaaataaatataaaaattattaataataatattcgtcttcttctagttctctcctcctcctcctcctaccttctgtctataacttgttcttgttcttgttgttttttaagaaagagaaaaagaaaccatcacccttataaaaaataaaagataataataatataaattattatcatatattatacacaagtaacacaactaataacaataataataaaccaaagaccagataatattattatg

SEQ ID NO: 93357 - DNA, 1820 bp, Cannabis sativa
ttttttttacttttaggcacaaattttgttgtgactaaaattaagaacaatattaaaataatattctactctaataagggattacttttgccataatattttctattttgaccttaatttagaaaaattatatgttcattgtagtatattgaagttataataaatcttacaaaagtttaaaaaatttaagaacataaaatttaaaataattaaatgcgcatatatatataaaaaaattgcatgtatatatcaagatcttttgaagaataacaacaagaaaaacctctcccaaaggtgcatcatcaaagttgacattagtaaagcctatgatacgatgaattgagattttctaataaggctttgctcaatgcttttagggtgccgtccagattcataagccagatgatgacttgtttgaaagccacttcttattctattaatggaagagtgcaagacaacttctaaggtcaaaagggtctaacacaaggggaccccctctctcccttcctctttgtgttgataatggagtatctaacaaggagactctccatggcagccagtaatatataccagattcaggtatcaccccttatgcaaaagtctcaaaattgtaaatctctgctttgctgatgatttgatatcttgtttagtaaaggtaatattcagtcaattcagattctcaaggatatcatgaatgaattttatgctacttcgggcctagctattaacaccaagaagtcccaaatttatttgggaggggttgataacaaggctaaacatgaaatcctgagagatataaacctttctgaatgcaagttcccactaaaatatttgggagtcccgttgagaccaataaaatggaaagcggaagactgtaatgtgatcctaaagaaaatcaagcaaagactccatagttaggcaagtagacatctgtcctttgcaggaagatcgcaacttattcattttgtctccgtaactactggatgagcatctttattctcccttaaagtataacgaaggagattgaaaaactctatagaggttttttttggggttggagtagaaataggagtaagcttcatgtggctagttggaaaaaagtttgtctttcgaagaactatggtggtttggggttcaaagatggtgtcaaatggaatcaagctgttctggcgaaatatatttgggccatttcaaacaaaagtgattctctttgggtgaaatggatcaacaacatatatctaaagaacacttcaatatggacctatgttttaaagcttgactcgagttggtattggcggaagctttgccatgtgagagacaattttgacagcatggagatacacattgcaagggcctcgggtaagtttaaattgcatctattgtataatagtaaactgtcccaggtgcctttcatttacagcaagagtatatggagttcgattaatgttccaaagcatcggttcatcttgtggcaagctgtaaatgctcagctgttaacaagggataaaatgcttcaatttcgggtcgtattagataacacagagtgtccgatttgtgctgaagttgctgaatcaaatgaacatcttttctttgagtagactctctcaaaaggtggcaaatctagcacagacttggctaggagttggggtttggccgaaggagtatcaagcttggaaaaactggttggtggttatcagccaaaacagaacttatagaatttttattgctgtcatggctgctatgatttatagattgtggttaaacagaaatgattgtgttttcaacggttactcaagcacagtcactagcattgtacagga

SEQ ID NO: 93358 - DNA, 977 bp, Cannabis sativa
tatacattttttttttattttaccaattttgaaaaataccacatcttttctaacataagggcccaaaatttttttttcccctatgacccactttgattcagggccggccctgattatcaaattaaaaaagttacattgaattttttaaaagataatatttttgttagtgggggctatagccccatacgagtaccaatgggttcgtctcttgtttttactaggatatatttggagatgggtaacgtccaatttacaattattatgctattgaattttttaaaaattaaatatttttctttaaattgtaaatcaaataattgtataattatatgtaataaatttttaattaaacttttaattaagaattatatatttaaatatatataaaaaaaaagttaaccaaagaatttattacatatagctatatataagattatttgatttacaatttgaagaaaaatcatttcatatttaattattttttatatataagggtatggctgactatttaaaacagttgtttatactataggtgacaattttaacagttgcatatagtatagcgacggttggttacactgctcttaatattggtgatagttttgcacaattaaaaaaaaaatttccgatatttatctaccgccttctattctactctgttttgcaacggtcgaataagtgttagttttagagatcgatagtaatactttgcccgagagtcgggaaaaccaaattttgtagtattgtttcctaataatatccacgcatttattccttgttgagttcatttccaacttgagaagacgaatctagccatgagcgaagtatatgttcagaattttatgtgcttataagttaaatcttttgttttgatgaattgtgtaatttcttataatatttgtatactcatattctttactttttctatctgataccttttctttcttctctagctatgtagcttgttgcacacaccg

SEQ ID NO: 93359 - DNA, 826 bp, Cannabis sativa
cccaagcaaggcaaggcagggcaggtcaggtcagggtatttttacttctctcagccaggctgcaagtggttgagcgggacggaccacaaagccatcagcaaactagggtgttttgttgatgagtacttcatggtgaaagaaaaaaaacaaaagaaagaatagcttagtaactgaccttcatagcattgattaaaagtactgtcaaccattttaatcagttctcaattcactacggaaagaacacctgggcaaatatcccaaaatcatcatatcaatacaccacacaaatatttatacacaaatttagacaagtttaaggtcagttcaaaggcccaggcaattataaggtcaattcaaaacagaagaatctagtagatttacccaaggaatatatgaatactagcaaaaaaaacagaagtagaaattaccagttactcattgtcaaatatataaaagggaaaagatatgaaaataactaaagaatctgcaaaattataagaaattgtatttaattgttgagaaattaaaagtaagcttttgatttccaatgtctcaaacttgagaaacaacttttataaaagcagattagccaaaacttataatttcagataccatatcacccatgaaattgtctaataaccatattaaaaccatcttaagaaactaaaacaatgaagcatacatattccatacttaattatctctaattctaagtgctgcaaaatgtcatttcgaaattagtattagtaaatataattcttctgtttagtgctgcacgtgagttgggttgggcaggttgatactattttaataggctaacccaatt

SEQ ID NO: 93360 - DNA, 547 bp, Cannabis sativa
tccatctcctgccactccccaagcaagcaggatataattattcgctaccccaggatacaatcaaagtcttactttagctcctgcatcatcacattttggagcgcccatgaacaatccctctgggttgagtatccaaactctgtcccaatccgcaccagccaccagtatggcaggagcttcgcaaagctcccagagtaagagatcctcaaagagtagtactcagactaagacaagtgacagcgaaggcggtataccccccagtacacacaatacacggagcttgcagatatttaggagcgtgtatatttcgccacccgacaaaatacacactacgggaagcctccactcttgtacagagatagctcccggagagatcccaataaaagatgcgaataccacaacaataattgccacaccacaaacgagtgcaaaaacttgaaagaccaaattaagaacctaattcgactaggttacttgtatgaatggatcaaaagcaggttaccccacttaaacccagctccagcaggaggcccattacctcagggag

SEQ ID NO: 93361 - DNA, 516 bp, Cannabis sativa
atatacatacacacaaatatatgtatctatatacatacaaatataaaaaaatatatatatgtatatatacgtagatatatgtacacatacacaaaaatatatatatttatacactaatatatacatacatatacatatacataaagttaccaaaaaatcaaattatatatgttatactcaaaattcggcttcactctagaaattgacacgtgtacaacagaaggaatatgaatcaattctgaatgacataataatattatatcaataaatgcatattaaataactcgttaatattaaataaaggtttgatagataatattcaaacttgttgactgtatagtcaaaagcgagacaaggataataactattaagctgagtttaaacgagacatatgtatgcctcaaaatatacagattagaaagaaatattcatctactcgaactgaataaaggtaataacataactgcctcgcatcacacatagcgagaatgtcacctcgcattgttgataccaaca

SEQ ID NO: 93362 - DNA, 504 bp, Cannabis sativa
ttcatttaaattttatatttttcttttctctttttaaaataaatacacatcttggaagaaagaaatgaagattagaaaattactagatttgagtggatcaacattatgaaattaggttgtatccactaatatgcattagattaattttgtcaaacgattttttcatttttacacttcaaggtagtttttttttttttttgtatttttacggaaattaacatagaaacccacataacaactaacaaagcaatttaaattgcaactaaaattcatagcaactcagattaaaactactgaaacaactcaaatcgtaatttttttaaaaaaaaatagtttgttgaaataatgtaacagttagtttagttaagctaaagtcggttggtattattaataacagaatgttagttagtctttctttctttcttgttttctgttgtaacaaactatgtacttttacattcagtataaatatcagtaaaagccaatctgttgagattgagcatt

SEQ ID NO: 93363 - DNA, 890 bp, Cannabis sativa
  modified_base (850)..(855): a, c, t, g, unknown or other
aaataaatttagagtttttagattttagttttgggatgtatatatgtgtgtgtttgtttgttggatttgaatttatttaatttggtttaagtttgacttgagttttgtttaatttttttgtgcgatatggatttaaaaaataagttgtggtgatagagtgattggtggtggtgtttacggtgtctatgaatggtggtggtgatagtatttagactgaagaagaagaatgaaaaaaaaaatattttttttcaaaaaaaatatgatatatggtaaaaaaaaatatatcttttttaattttttaattttaattttgttaatataattatttatgtagaccaatgaaattatgtcacatacactgtatttatgtagacaattcagcatgacaattaataattaaatttattagataaaaattataaattactaatgatatcatagtttttagaattttgtggtacaaatttagattatgggagttaattacaaacaaagtaaaactattgaaagtttttacacaatttactcatattaatatacttaataacttccaacaaacaaaacaatcaatgtgttctctacattctacgtatgttatatgacattatgatctaatatataattagtactaatgattaagtttcattataattgaacattattaattatattagagtttgttacgggtatatattaaactacttagcacttttatgatattttatgattagttaaattaaaataaatgaaactcgatattaaattacactataataataataacaaaattatacctcataaaaagtactagatatgtaggaatttactgttttaaccctacaccaacaannnnnncaatatcagtattaaggtcaaaattgacctttcct

SEQ ID NO: 93364 - DNA, 1931 bp, Cannabis sativa
tatttgtattagattgttttcttttctgtcactgtctaggcaatgacttctatggaaaattaaattttattgaatttggagctgttattataagtttgatggtttagttgacttttgcatcatacaaggaaggaaaaatctgatacattattaagattttagtttcttttcttacacgtgagtactgtttagaaattctgaagatggtaaaataatattattaaagtaaatatagtggagttgtttgagttctgaatttatatttaaatttgcaggcagaagttttgggccttgatcctagggatgttgatgttcccgtagttggaggtcatgcaggggttacaatcttacctcttctgtctcaggtataaaattactttgttttcatatactattttgcttggataattctcagcagtacaatctttacatgcccaattttggaaatgtaaatgctgacatttcatacaggttaaacctccatgcgcttttaatgctaaagaaattgattaccttacaaaccgcattcaaaatggaggaactgaggtcgtcgaggtaaatttctttatttcttttttagtttgatgaatgcctgcagtttcatttggaagttagtttagtctgttcaaattttccgaatctgaagtagtatgacttttggtatctcactgaaatgttcattttggtatctcagtaaaccaagtaattgcattacataaacctaaccgatggttgatttttacataaattttcatatctttcaaccttgtcaaatactaatgcccatttgaaaataggactcttctctaggaaagtgaaaaaggattaagattgtacctactgaatcagcatacttagattgattagactttaatgtatacaaggcttccagtgtcattctttctcgacattgaatgtgaacttatgcttatccccatacaagttgtaactaaagtgttggcactttgagatatctgtttgtacaaaaccttaaaatttggcacaattcttctccatcatattaaagacacttaagaagagttcttgatccaattttttcattgtctccaggcaaaagctggagccggatctgcaacattgtccatggtgagcagttttacaaatttgttgttatttagatacctttccaaccaccttcaattggaccttaatctaaatctgtacatgttaaacaaatgcaggcttatgctgctgtcaagtttgccgatgcatgtctccgtggtttgagaggagatgctggcattatccagtgtgcttttgtggcttctcaggcaagtattggtgttttatggcaatacttttttatccctttttttagaacctgactttgaaaccatagagatttgaacattcttatatactcactcacattcatacaaatcttacttgtgtacactttttgttttggacatgaaattgatgatttaccgatatgtcacaggtgactgaacttcctttctttgcatcgaaagtaaggcttggccgcagtggagtggaggaagtacaccctcttggtcccctgaatgagtacgaaaggtctgtaatctctctctatctatgtcttatatgtatgtatgtatgaaaggctcttcaattgacttgtgccttcactttgtattaaatgaaacttcacactgcatgaaacagagatggcttggagaaggcaaagaaagagttagaagcaagcattcagaagggagtttccttcatcaggaaatgagtgaatgcaaaacataaaaatttcatgtttgatctgtgtggtctggtctgggggtattctattctggcttttacactcacagtgatggaaaataagttgaaaaataagccctttgttgtataacaaaaatagaggtatttatggaaatggtaggagagaaaagaaaaagaataagaataacaagtgtagt

SEQ ID NO: 93365 - DNA, 1055 bp, Cannabis sativa
ataaccacctctagctttaacattcagtggtccacaaagatcttaatgcactatgcctagtggttccttggcacgctctccctttgcagagaaagaacgttttttcattttgccttcaaggcaagattcacaaactggcaattcacctaagatgaaatttttcaatggaccacctttggttaacctgtgaagtctatcatagcctatatgacgaagacgtaactgccataaatatgtttcgtcttcagtattgatcttttgctttttgtggtttctaggtttagctaccttaaacatttcaatattaaacagaaatagttcatttggtcttagaacataaagctctgttccatagatgcaacacaaatttgaatgtcatttcgagaaatcatagaaccaaaacttgaaaaaattagtttgtattgttgcaactgtaaacatgaaacagaaatcaagtttctactaaaatttggaataaataagacattgtgtatcatgttctgaaacttgagtttcgcttttcttctagctctatccgataccattttgccattaccaattttaagtttgaactctctggattttacataattccaatttttaagcaattacaatgaacaacaaacatggttagtagatccagaattaagaatcaagatggatttgtcattctataaaacacatgattcaaaaactaaaacattggaatcactggttaactgtttttcggattgttcttattaatggttcaatatgttgtgaaaaataatctgagtaagtggaatcactttctctattcttctcaactgagcctgaagtagtaggattgttgaaggaattattctcaatatcttcagcttttctttttcccttatctgcattactggaaaaagatctccatgcaagtgacaatgttcgttcataagcacgcaattcaccgtccagcttgtctatgtcagaagagtttcaattgttaatcacaaattggctaaactcaggtgataagctgttgagaacaaaataaactctttgctcttcagataaaacaattccca

SEQ ID NO: 93366 - DNA, 820 bp, Cannabis sativa
tgataattaattaataacaaaaaaattagtgattgtatataattgtatagcaagctaaaatccgatcaactctaaattattcagaaccttcaaaaatagctcacaacctacaatataataaaatacaataaaattaaaattttaattatttaacaacttattagctatatcatttataaataactagttactatttgataaattatgtacataaataattaaaaaaaaaaattatatatacatacatatataataaacaatatttaacactaacaaaattttaaaaacatctttttttttaaagataaaaacatcatttttaaaataaaattaaaactctcaatataaaatttatatatacacacaatgcacaatatatacagacaatatatattgtctaaactacatacaaaatataaaatatatatacacacaaaacagaatatatatatacattcatattcaataaaatataaaatacatacatatatactatatattaaagtttaaatatttactttataagcgcaatccaacgaccaattctgacaaaaattcggctaccatgcatataaacaacaacataatgttaataaaatagaaaatcataaaaaaaaaattacaaaaacaaaattaaagcaatgtacattattaaaacggctcgcggctaaaccacctaaactttaccttttgtaacacttaaccaaaaaaatactaatattttggtggcaaaacctactgaactcccattctgttttgctctgtacccctctatccaaaaatcacagttaagtgtcacagtggattgtccacgtgtaca

SEQ ID NO: 93367 - DNA, 931 bp, Cannabis sativa
gtccaggttcgtatccggatccctatcaaggttggagtttgggtcgagatcaggtccccggtctaggtccgagtctaggttccagtccaggtctcggtcccggttagggtacacaactgtgtttgggcctgagttctagtctcgatttaggtctgggctaggtctgagtttagttctaggtttggcctcgagtcttggtcacggtcctagtcttgttcgagggacctggtctgggggttcttgttcagattccaattttatgttttgggtgtgggtcagggtttggatttgggttctggtctgatttttggtcttggtctgagtcctagatctggatccctgtcacgtgtcccagtttggttcttgttcaggtctcaggttcgaggtctgagtttgggttcaggaccgagaccagggtgcgattctaggtctcgggcccagttctgtgtctcgagtctgcttccttgtttgggtcggagtttgggtccgaattcgggtcctgagtccaagtcttggttgggatccgggtcagggtcctggttcgggtctaggtctgggtttgagtcttggtccttgtccgattacggttcctgatctaggtccaggtccggttatggttccaggtccaagtcctagttccagtcccgttgttgggtcccagtctacttccagtttcgattccaatttcgggtcacagggtacatgttcgggtccaagtttgggtttgggtctaggactgggttcaggtctgggtctaggttcggatataggttcggatccttgtttgggtttttgtccgggctgggtcccacatctatacaccgactacgggttcgatccaagcgcctgatctagatctggatctcgatctcgggttctggtcttgttccatttcgagtgtcgggtcatgagttgggtcctaggttcaagt

SEQ ID NO: 93368 - DNA, 927 bp, Cannabis sativa
aaaaaaaaaatcaaaattcattaattttgaccatagatgatgatataatggtcaaaattaaattttgaggttgatagtcaattttttgagcccaggtcaaggcggcgggacctactatgtgtaagttggagcttatttttgtaactcccttaagagtaagatttgaggtcaataacttaagaattgtgattgaagtgtgagacatttcttgataaagcattgaattagcttcaaaacgcaagttgaatcgcatcaatcagatcaatattgagtgagttatggttgttttactgaaggcaattcataactcagtgcccaagtgaacatccagtgcccaagttgacattcaagcgcccagattgacatatgacgtcaacctggacggtgggtaagtaaaaaaatatcaaggggatgtactttatgatgcctaagtgatattttgacatcacttggtctgttaatcgtgttttgtcaaagctggacaccagttcttagagatattgctattttttgagtagttttcccatgttggaaatgagaaatgtgaagttgtaaatttcacttctctgacttcatggctctcagttattgtgaaaaattagacagaagattgaaacgaaatcagaatcagataaggaaaatccaacgcaccaggccattggtcaagctgggtgttgggtgcccggccaccgagtgctccgagtgctcaaaaaagaactttctccgaatctgattctaatgcctcaaatatgtctatggtatgtctagttcatgtctcaatgcaaagtttgacatatatgcactaagacggtcccaaaaactaaacccctggttaaggatgtaaaccttggtgctaggtgaaactcttaggtgcccaggttgactatcggtgtgtaagttcatgtattttcagcttccaaggcttgg

SEQ ID NO: 93369 - DNA, 859 bp, Cannabis sativa
atccaacccattattcagatttgtgaacaagttactgcaaatataagattcttgaaatgaaacaatacaaacataaatggatttgtatatatagtctgcccaaaagaaaaggaatgaagaaaacatgcctggaagccactatgattcaactgtttgatcgcaacatccaaccccaaaaccctaacaactcctctgtaaacgcagccaaaatctccacccccaatcaacaaggccttactgaaccctctggtaaccgatttgagctcgaagaacatgaacaccctcagatcattggctctacgtagacttatgaactcgtaaaccccaatggagttagaaaggtacctggagtcggaatcgatctcggagcagcgagtacagtcaaggctgctggagcctggacgcaacactaatcgagcgagcccaatacaccttggagcgagagtttgccaacaaagatggtgataatggccggagtttgctggagtttgccgagctctgttttttttctaaggaaggagatcatgttgtgttgtgagagagaagggaagaatccgtataattggtaaagaaagtatatttgtgcaataattttgattttattgtatatatatgaataaaaaattacttataaaggtataaataaaaaaatccctcaatttaaatattagattttttctgttgtcaaagattatatttttctatcatataaaaaaacaaataaattttattatttaattctctaaatctttttttagggaatatatatatatagttacatattagattttcctgtcatatgaagaaagaaataaataatactattatttactcttcgttagtgtgtgttttagctatg

SEQ ID NO: 93370 - DNA, 598 bp, Cannabis sativa
  modified_base (515)..(547): a, c, t, g, unknown or other
tttgtgattaaaaaattaaaaaagaaaaatattaccaaacgacaccttaattaattgattaaaaaaagtggtatttttcaacttacccctatgcattatgtatcactatggatcaagtcctgaatttggacgtaggcttcgattcatccaacgagcacattctcaagaccaagcccaaatttattaaaagttcaagtagaaattacacaatatattcaaaaaattataagtggtttttttttttttttatttttttttatttacatctatatgggatttttatgctatatttttgtaaaaaaaagaatagaaatcccgtatttttaaaataataataagtttcactggaaaattcacgggcaccgaaaaaatcattggaaagttagtgtcaccgttgctggaaaagtcactgttgccgaaaaaagtcactagaaaagttatcagaagtagatgtctcaaattaatataaacaaaaatggaactggttctatacataatgaataaaaataaataannnnnnnnnnnnnnnnnnnnnnnnnnnnnnnnnagaaccggttctataacagtgttataataaataaaaacaaataacacgaaa

SEQ ID NO: 93371 - DNA, 812 bp, Cannabis sativa
tatatctagttgatgtcccaatgtttgttttgattcatttgcactaagatggttccaaaaacataaatcctagtttggaatgtcaactcgggcaccaagtgaaaccctaagtgcctaggttggttttcaagttgcaagtttgtgtaattttagctcccaaggcttggattagttttctccatgtcttcatggtagataatactgaaagatagttgattggattcaagctattaaagtctgaacttccatcctagagctcccgaagtcaacctgggcacagtgctaggttcccctcatagcttgactgctatgactctggtctactcaactctgtgatgccatccatcatgccacgtttgatgtctacatcaccaggaaaagttttcgggctaacatttgtcccccaagtcaactttacacttgtgtggagttgacttgatgacgtgaaccgagcccgttttacttgaaactacaagatggaaattaattttgacattcttaggtaattgtatctattcttcaagcatttccaattgagttgagactttgagctcttttgcgtagtccttgggaattttgaaaactaattaacaaagaaaaagagaaaaaccttagcttttatctttcacttatcttttacatttttctttaaaaatatgaattttattttttatttttttcatggcgttaggattaattagattgaaatcgtaatcctagtagtaaacgccattcgaaaatttgaagaaaaaagacttttgttattttacttatcatttatcttttctttaattctttaatttttcattaat

SEQ ID NO: 93372 - DNA, 687 bp, Cannabis sativa
catatagaacatgaaataaaatgtatatgctaataaaatcatacagctaaaatactaataaactgaagctacatgtgtgcaagttcatgtggagctgagttagaagctgcagtgcccagatcgctgaagtgtgggtcggccataacctttgtaggctggccggtcacttggtcaaaaccttggctgtacacctgggtgggctagctatggcctcattaaactgccccaatgatgatccttatagctagatagttgtttggtttgccttcatcttgctctcatacaacgctttcccttgggctagtgtgctctcaaagaaagaaacatccctcatgtaagaaagatcagctctgggattgtgcatcttgaaattgtagatgatctccaaagataagtcgacctactcgtcctttatggccttctgcccatcaagggcaagcttcagcttcttttcacttctcttgagtttagtccctagtctggaaacgtcaatagtgagcgaggtattctcctgattcttggtgttgatcatgagctctaaactagaaatcatgtcccaattctattgaacaagagcctccaagttggtcacaacctcacccctcactaggagctcagcctccagggtctttacctgctctcagagagcactggaggaccccttggagttcccatgcgagaaactaa

SEQ ID NO: 93373 - DNA, 870 bp, Cannabis sativa
tttcccaaaatacccctaagtactatttatgacttttagtgtggaaagggcaaaatggtctttttgcccatttgtattttttgtcctttagtggactttatgttaatgtaataatctgaattttaaagattaattggctgaaatatttaataaatcaagttttatctcatttatttataaaatagaaaataattgaaaaagaaagcatttctctcaactccctctctctttttcgacccaccctagagcagctagggtttgtttgttcttcaattattcagggagattcagcttgtttttaggggatcttaatcaaggtaaaggttttagctcttcttctcgtgttttcttgagttttaagttagagatttttgcatgattttatggttttgttgctgtagctactgttagggtttgttataatttttagaggttaatatatgtttagaaatgttgttttgagcatgaatttagggatgtcagtggttgctttcaacttttgagtttttgaactcaaacttgaagcttcaatggtgaaattcaattctgagctttgattgttgttttgttacttagaaatgatttattggggtataatatgcaggtctggacagtttggttgagtttggaaacaatttggttaggcttggttggtttttgggttttctaggtaaaatcggctaaccggttttacaagcatacaatgcttgtaaaaccggttagccaattagcagggaaacccgaaaattcagcttgttgttttgcgtctatttcaggtttctagttggttgattccctgctagtttagggtatttccatattaagttgcagtagataggtttttggtttaaaacctaagttccggttgtg

SEQ ID NO: 93374 - DNA, 520 bp, Cannabis sativa
aatatgaaaaaaaaaaattatactacaatacattccattatttataaaaatgaacaaaatgcattccatatatattgcatatttgcatgttcatataaaacattttcattgcggtacatttttttaaaaaaagtttattagagtacatattaaatttaagaattatttctaaaaaactcaaaaataacaaaataattacaaaaatacaattatataaaatttaaatattttttacaattttttgaaattttatttacataaaatacattcatatattgtacttttattattttattattaagtttttattatttgtatattttttatgtttgaatattttttttattattttcatgtacaccataaaaatattaaaaaaataataatcatatatgtataaaaaatttgcgtaatttatgtaaatttccatttaatctaatactatctggaaaaagtagcctaacactcatctatgaaaataatgaatacgtgcgtgaaatataacatgggatatcatcca

SEQ ID NO: 93375 - DNA, 540 bp, Cannabis sativa
caataccagttattgctatgtggtgtggtccacagatactatcacatacatttagaaggctggaattcatagaaggagaaaagcatgacaaggttaaaaatgttattccattttctcttggttacttatcatgccttcatggttcttgtaacattggagatggtctggataaaagtaaattcaaattattcgtgaatacaacaaatgaaaaacagtgtcaaacactagcttatctattgcaaggattttggtgttcgaagtgtgacaaaaaaaatgaatgcaagaatgaattgtattcgaaaggtgtgaatatgcttgatatgcacagctgggaaatcggtacagattgtgatttcagcctcctaaggaatctattttttgaacttctttacaatgagtcatctgaagaggttcaagtttcttgtgtaaaaaatattcgtaggatcataacacacttggattactcaagacagaataacacacttgccatatagctttttattttatgttttgcagaaggaaagcttatgaatgagagaa

SEQ ID NO: 93376 - DNA, 613 bp, Cannabis sativa
cgctcttccgatctaaataaaaattaaattaaaaatttaaataaatacagatttatatttattttttttgatgaaacagagaatttgtattgctcacaacaaagtttttacaaactaattaattgcccctttttaaaggccaggaataactatacatgtattagttgactataatttcttatttacaaacaactacaacttatgaaaccattctttgtcttcttcatttacccgttttggccaacaaagtgtaactcgctgctttactgaatgtttgatctactgaattaacaagtctggatgcacctggttttgactccaaattttgacatttcgggcactccaaatcatgtacaccagaccagtaatacacgctgcaaagataagcttccgaaacttgctcattttttctctcccaatctacctgagcagtcggggtaactctgtagcagaagcatgccaattcagccatgctttcactgctagtaagcattctgctgcaattggatagtcaaaaaatagatggtgacatgtttctatatcctggcaacatagaacacaaattctatcttgagtgattccaatgcgagctaaccgatcctttgttttcaat

SEQ ID NO: 93377 - DNA, 649 bp, Cannabis sativa
ctcctcttcgaattaaatcttcctccaacgtcccaatactcatttaaatgatttaattgagtattgtaacagtttctaatagctataaacttatccgcaatgatttcataacctccatatataataaatcacttaattacatataattaaatgtaatccttaaattacaaaatcattttcagattttgtaaccactcttatattacaaatcatgtgtattattaaactatattatataatttttttgaaaaaatattgtataatttaattactaaataatatagattaatttcatattaatatataatatgtcacatttaaatattttaatttatattatattataacaaataatataacactattaattagcaatttttgataatatttattaaagtaaaataagtgagactcgatattaagttacattaataacgatattacacctcacaaaagtgctagacagtatctataaatgccctttagcatttctcattcataagttggtttacacttacacatttctaccagcttaaagtatattgacaataaaataataggggtattagtcaaaaatatatatagaaaaaaaaaaaatgtgtatactaatttggctagattatagagacagaagatcctagtgccataa

SEQ ID NO: 93378 - DNA, 1175 bp, Cannabis sativa
  modified_base (771)..(776): a, c, t, g, unknown or other
  modified_base (894)..(909): a, c, t, g, unknown or other
  modified_base (1016)..(1016): a, c, t, g, unknown or other
  modified_base (1105)..(1117): a, c, t, g, unknown or other
aaggcccatttgccttatttaaataactatattagtctaacctaattaaattgaattagcaacataattagttttaaaatatatgaaatttagctttcattagattattttaaaactaattttaaaaaaacacttagttactgagatatactctagatagttatttatagtaactaattatattttctaatatttaattaattagaaaatatatttaagttgaaaattaattattttaaatacttttagagcaatgtaaattagaatatttttcttatatattaaattagaactaataattaagttaattctattcaagatacttaattatttgtttcttatatttaatcaatttaattaaatagaaaatttaatatttaagttaaatagaaaatataagttattttcatgatatttatttagataaaaattatatttaagtacaaaattttaatttcagaaaaactttagttagaataattttcgaaatatatgttattttattttattaatcattttcccactaatttcgaaattgcttttatttaatgcagataattttgattttttttaaaaaaaatatattaaaattaaaaattaattattttaattaattttagatcaacttaaatcaagaaaaaaatttcattaatgatttgttaaaatatatagactaaaataaattatattttaaatagaaaataagcaattagttagtgaaatatttagatagttattttttgtatgcttgtggtatttttctagttatannnnnntaaatagaaaattaatatttaagctgatattattcaatattcttaaatatttgatatttttcttagatatttaattaaatagaaaaattatatttgtgttgaaaattaattttttaannnnnnnnnnnnnnnnataaattagaataatttttcaatatttcattttattttatataaatttcgaaaatgttttattttaaaaatacattggatttcgaattttgctatatatatttatanaaaattaaatttgagttgaaaaataattttaattaatgttacaccaacttaaattaagcaattttcataatatttattgagaattattnnnnnnnnnnnnnataattttatttattttcagatctttctaagtacaactttataaatattaaattaaaa

SEQ ID NO: 93379 - DNA, 516 bp, Cannabis sativa
aaaattccataatatcttttatttttctttgttaattttttagatcgaaaattatatggtgaattttttttatataattttttctctttatcgaaaattataagacaccaacatctattcaaccttaaattcaataaaattatatattttttaattattttaccaaaaccccaaaaaaaacttaaaaaataatatgtatcagattttgataaaattatgcaagattaatcttaaaaaattattaattttagagtaattacatatatttcctaggatattcttttatcaaaaattaaaataagaaaataattttattgaaatccctaaaaatgtgaaacaaaaatgattaagtacgagatatcgataaaatattttttttttttgtttatttaaaaaatacttgcagctaaatacgaaaaatataaagcatgtggaaaacaaatgtatatcacatactaatctcagtgattgtaaattatattaataacgaaattacttttaggtagagcccaatac

SEQ ID NO: 93380 - DNA, 506 bp, Cannabis sativa
aaagaggacaatataaaaagagtataaagtataattttctcgtaaaaaaattgccaaaccacctcattctagccatgtgcagccctaagtaatagtgagatattgattaaaaatgaaataagaatgaaaaatccatattagaattgttagagatgaactttcgtttttaaaggatttggtttggataaattttggttgtaaaaaaaagttgtaaattattattattattatctcaaaagaaaaagaaattgttgtggaaattgtaaataattaataagaaattgttatggtgtagacgttttttttttataaaaataacaaaaaaaattatataaaaataaccaaaaaataacatcaaaacaacaataaaataataataaaaaataatatacaaataaaaatagattaataaaaatataatataaaaatacatttataaaaatataatattttctataaataaaattataaaaatcataaaaatatttaaaattccatacaactat

SEQ ID NO: 93381 - DNA, 942 bp, Cannabis sativa
acaaggtttgcttgaaaaagtaaacttgaaaagcttgacttctgtgattattgtgtgttggtaaatcttacagggtcaaatttataattagaaagaagagaaccaagagaacacttgactacattcataattatctgtggggggctctcaagaaatgtatctcactcaggatggaggtactttctatctattattgatgatttctctaaaaaactatggattattattttgaaaagtgcaactgaagtgttagagaaatttaggcattagaaaataatgaaagaaaactaaactgataagaaaatgaagagacataggactgataatggagaagagagaatgaaagttagagaaaaattttgggaatttggagtaatttggaaagaaaaacaatagaatactaatgcaattatataatatttttaaggggaatttgcggtgaaagctctttatgttttaatttttatacatttaacccccttatttttttgtttttggtagcaaaacctctttaagtttacttttctttgcaaatggaaaaagaattttttttggagagttggatggtgtgatccgtaatctcgaagataggatctcttggattcaaaagcagtatccatccaagaacttagtcgatgaagaggtggatggtaaaatgtaaacttaaagaggtggatggtgtgatgcagccacatagacatccccactattataaccatcactgagattggcattatgataattattcttgttcttgttttgtttatttaaatcttcttgatgatctgaattaggttttctaccacttctcttgtagaaataacattctcgtttgaagtgtgtcattttccacaatgatagcttccattagggtctttaggtcctattgagtttaatcttcctctactatgattatttcctttacttcttcctcgattttgc

SEQ ID NO: 93382 - DNA, 1242 bp, Cannabis sativa
  modified_base (165)..(173): a, c, t, g, unknown or other
tttaaatattattttatttataaatacatatcttaaaaaattaaaataaaattattattgaaaatttaataaataatttaaaccactaatattttgtaaagagaaaaatcaatcttattttgtgcttacaaatttatatcttaaaaataaaaaaaaataattaannnnnnnnnaaaaatataaaattattttaaaatatatctataaattaaacttaaaaatatgttatgtatatttaaatatatctagattttttgaggaaaaaaaaatcaaatttattcttgttaaattagtttttacagatcgaatttttaatatattttttttaaaaaaaattaatttttcaaattgcttaatttgttttaaattttttatttattttttaattttcttaattattcacaatgatttttttattgttctaaattaattttcaaaatatactaaaaataaaatataaaatctttaatatttttatttagataggatacaatatgatagttgtaaaagtttagggaacaaaattactaatttacaaacatatgtcaacatttaaacggaaaaatatgaataatatgatgaaaccaaatagaataactaaattttagtatttgtaaaaatttctaaatattttttaataagtcctatatttaaaagataagatcaataatattgaaagttaaaaggtaaaattactaattattcttgttataataaaggagaaaaggggttatcctagtttgtctgttgtgttcttcaatggtaaaacttgagaggatgcttgatgaggtagacatattatgtggcaaaatattgagatgtaataccattggagagaaagtgatgccattattgaaattcgtatggatgctatgttgtagcattgatgctatttatttttttaaaataaaaaattgtagctaaaaagttattgtagctaaaaattaggatatacattaaataataatgtatgagatcataattatagcatttttaaagagtgttatacattgaagtgtttttagaagtaagagtgctaaaaatgatgtggaagaaaaataatataaaatattatatttttagatgatgcgtaaattttcagtatcctcaaaggatgctttcattggagatacttagggcccgtttggtacaacagattagactggattggactagactggacaagattggattatgctgaaagtaatcctgtgtttggtttaagaatagactggactattt

SEQ ID NO: 93383 - DNA, 1161 bp, Cannabis sativa
cctcaatgagaatggaacaaaaatgcattggcgttcatggaatctattgtgcaagagaaaggatagcaaaggtatggggtttcgctcttttgaacactttaatcgggcgctactcgcaaaacaagcttcgaaaattcttactcaacctgattctcttcctgccatgtttctaaattgtcaatatttttcccatggctccttcctcgaggctaatcttgggcactctccttccttaacgtggcaaggcatccattggggtaaagagttgttgtcttcaggtttaatatggaaaattggtgagggttgtcgatttaagtgtggtattgatccttgaatccctggacactccacttttcaaccaattctctactcgggtccaatggatggtgtgggttcaaaccttataactgaagatagacaatgggatgtgtcactccttaatcaatggttttccccacctgatgtggaccgcatcttgacaattcctttagggttcttcagacacaacgacacacttgtttcgcacaatcactcctctggtgtatactccgttcaaacgggatatcattatgcagcatcactagaagatattgacagcaactcatgctcctcttcaacaaaacaatggtggaagttcttttggttactccaactgtcacagaaaataagaatttttgcttggcgtgcctataatgatgaattacatgtggctactgcattcgtcaaaaggaaaagcatcactaatgctacttgctccatctgccatcaagcttgggagtccattggccatgctctattcggttgcaaatatgtaagggcagtttggcgacattcgaaccgtgtactcgacttgtctaaggcgtccacaatgcaaaagggtgattatcttgttcacttgtctacaattttcacacgatctgaaatggagtaatttttttgcaacctttagtcaatatggtctaaaagaaatcatgtaaagaccgcttagtttaaatttggaaattagcagacactacaagaaaaggcatttttaccggcgcagttcttcaaatgcgccgtaaaggttgtcgagatagagcaaaatctgaaatcccacttgcatttaggcttcacttttgccggcgcattattacgccagtgttaaaaggttttaccggcgca

SEQ ID NO: 93384 - DNA, 2429 bp, Cannabis sativa
ggtataaatatttttaaataataagtaagcccccacaaagtaaaaattctgggtccgtcactggatatatttattataatttatgattattatcatattcaaaaatttagtttataatttatctatttaccaaaaataagataaaaatagcacttttactatacaatttcagtaaatatatagatttaaagatataatagcttgagttttgtttttttatgctttataccaatgtatgattattatatgattttataagtttatttacttttttttttctgaaatattcttatttcatgacatctcatgaattaattgtgcatacattcaacatcaataaaaaaagatttaatgaattttttttatcatatttgtactctttgattattatttgaatgataagtttggcatatagaaatttctttttccatataatgctaaagtcttgtgtcaattttatgctaacatgtttaccacaattgactagtattacaatttatacataaaaggccaagttaggctaattttattatttattatcaaattaataatctattgaattacgtatgaattactgaaatactacaactcagctaccacaattttctatggtatggtgtgtaacgaaccatgactcaaaacaaatttagtcatctttgtttattattttaactttttttaatcctctattcaaattcctcactccattcattacaaaaattaaaaataataaagaaactataaaataaatacatataaattttaaagcatcaatattatatagagttgtgaactaatttaaaaaattaggatttcctaaaattatatgtcaagaggttatttttttctctgaatagacccttcgcctttcttaggcatagatgtggcttggtcagaattgtcttttgctattatgatttaatttttgttactgtgattagtgttatctctatgacatagttttaagtgttttagtcatgtctgtgacatagttttgttttgtctttttttttttgtttcgttgttggttatttgatgggtcgccttcaaatcgctgttagtggttaagaataacaagttctctataactaaagggactgttagtagttcagttatgtaccttgcacaatagttgagtgctcaagttataagttgaataaacctgctgcaacaatttctactgttgtgtcttttgagcggtaaataaaactgaacataaaagttattaaaattaactgtaatgttgcaattttttaatctgattttggttttaatttatttttgttaaacgatttgaaaattagacaactaattattcaattggctcgtttttctaattctaattttaatcattgtcaaaaatatctattaaattgaaaactattaatcttaattaattgatgttgataaaattgctctaacaaaaaaaaatcttatttaagttttgttattttgttcttgccaactattatttattaatttattgttatgaaagataatccaatttgtatggcagtcgtgcaacaaaccacatagccttcccagaaaaaaaaataataataaaaatacccccattatccttatattccacgtggcaatcaaaaagtgggtcccacgatagccgacgtaaggtgccgcaccgtagccactgatgatgccatgcatgacgtcgtcgttttgacgccactccgcaccacacgttgacgtgtgtagcccaccttatccggagatccaacggtacacaactcaccctcataacaacaacgtttactggctgcatcaaaaagcctccaattctcaattctcaaaagtcacccctccatttttgttttattaattaccaccccttttttattcatgttttaatttttcagtccatttattatttattattgaataattaatatttttgtccctttaactagtttataaaaaatatctctcaatatattacaactataaaaatgtgctccttatattactttttgttatattagtcatttgtttggtgatgtggcaaaagattaaaaaaataattaacactaacttatgagagaaaaaatgctgatattaaatagaattctcttatatatataatgacatattgaaaaaataaatatttatataaaaaaaaaagtaatatacaaaatttatttgaaggttttcattgatgaagaagataataaaaaatggaaaaattataatattgtatatattaattaattttattataaaatatgtacataataaataaattacattaaaacatacaatatattagtgaaaacttttcctttgaataggaaagtttttttaattaaatttaaatatttattttgttaataaattgatgataattaatagggacaagttgaaaactaccctcttttattacacattaactaaatataactctaaaataattttaa

SEQ ID NO: 93385 - DNA, 522 bp, Cannabis sativa
atcgagataatatatattattgtagaaataatattatataaataatgtaattaattaattgttcaattttatgacattgccaaaaaaaatgaaaataaaataattaggatttgcccttgaacttttcaatttgtcaaaatttatcgaaattattgagattgttgaatttaaaattttttatccaatgttgttacgtgatcatgattataattatgcccccttgaattttcatccacataaagtaactgttagtaaaattttataaaactctttaaattcaataattttagtcttttgagaaaagttttaacggtctaaaaagtttaggagcgaaaagaatagtattattggacactaatatataggtggcgttgatcacgattggttagcgcaatattttttaaaaaatattttcttaaattatatgagacggaatatttaattacaccaatagcaaattgatagttagacaagtgctaagcaccaataatattttttaacaatttttcaaaaaaaaaaaaa

SEQ ID NO: 93386 - DNA, 779 bp, Cannabis sativa
tttcggattgcaccaatccagaccgaaaactgaattttagatttttatatagacaagaaccgaccaaaccgaccgatgctcagtcctaatataaatattgagtgagatgaccattttactgaaggcaattcataccagcccccaggttgacatttagtgcctaggttgacatgtcagcgcccaagttgacatatgatgttaacctacatgttgggtgagtagaaaaacatcctgcgtatgtactttttgttgcctaagtgatactttgacattgcttagtctgtttttgtgctctggcaaagctggtcgccagttctcagagatgttgttgttctgcaaaaaatgagagactcaaaacttttcatattcgagtggttttcccatgttagaaatgagaaatgtgaagttgtgaatttgacttctctgacttcatggatcttagttgttgtgaaaaactagacgaacggtcgaaacagaatcgtaattggataagcagaagccaacgcaccacaccatttgtcaacctcaacactgggtgtttcttttctgggctctcgagttgtcatttggatacttccaaggttcttaaacttgaagacgaattctcccaccccatttttggccatttcaaagagaattctcggatcaaatttgacatttgaatgatcaaaactagcgcagcagtttgattgtcaacctaggcgttgggctctgtttccagaccctcgggtttgtgtttttcttcccgagtttgcttgaatcttaattatttctaatga

SEQ ID NO: 93387 - DNA, 556 bp, Cannabis sativa
acctttatttaatcccaaaaataaaagataatttatttttaattcaaatttcaaatataaatatcgtgattaatgaaaatcaattataatcttttatttaataatatctttttaattttaaatacattatctgataatatttaatgtatcgtatatatatttcaagattaaaagcgttaaagtttaaattaatgttaaaaacttaaacataagacaaatataaattgaataaacattaaattattaaacaacattcttaaaaatatagataaaaatgtatatatatatatattatatatatatattaatgtagtgtagattctgaatgttaactttaatattcaaataatactaaaattatcaactataaagtttgcatttctgattaaacactataaagtagaaactttaaatataaaatagtttaattagtaaacgttatttatgtaatatatattatagataattttagtaaaaataaataaattagtttattcgggttatttaagcaggttagaatcatattcaatccacacaatatattcattgaacgatt

SEQ ID NO: 93388 - DNA, 520 bp, Cannabis sativa
atgataaaataattttttatttttcaaaatgatataaataagattcttgactgattttttgtcaaaataaaattacttaataataatattatgacaaaataaaattacttaagattcgatctagaaatattatgacaaaattggttattttttctatatctattcatattagtaattgtcttcaagtcggttgtataataaaaaaaattatcgaaaattaagttcaatatcttatttttatcattttggaaaatacaaagtccattttatcatttgacaaaacagaggatccaatagtaacttttacacaaattctaaaatagtatttacctaatacacttttaacaataactatattttatatcaaaaaaaaatgaaaaactattttatcagcttgaatcaatcccaattagaaaatttaaatactgggttcttccatacagttccatattattaataaataatattggaaattttgatggtgaatcatctaaaaatacaaataatattgtacttttgt

SEQ ID NO: 93389 - DNA, 622 bp, Cannabis sativa
gatacaattatcatcaatcctgacagaagcattgatcttgcaacccgtgaaagtctcaaagtgcttcacaaagtgtttaaccacttcctcaaagttatcaacaatagtatctcctttcatgaatgtggtaattctattctctattcttctttttctcatagtgatatgaaaatagctagaattttcatcattgaatttaatccactttatcttactttgctgcctaagcatctgcgtatcctgtctttagctatcacaaaaacttgctgcatttttgaaacagcagtctgctagtgcacatcatttggtttggtagcagccacctcttggataaggcagaaactgtctttagcttccttgtactccatagccagatcccaacattgttcttgctaaagatcttcaacacatgcttcaatctaagcattttttgcaccaacccagcaagccttgcaccagcaacaggcttgttccagttgtccattagtttgttcaaaccctgagtaagaagaccagtgattcccataacgaaatagtttcaccccaacattgttaagctcttgaaaatgaattaagcacaagcagtggtcagagatagtctcccacttaaagcaatcataag

SEQ ID NO: 93390 - DNA, 1332 bp, Cannabis sativa
ttacatacaactttaagctttatataaaaatatgggttactccactcattaccaattaattttgaaatagaattccataattctcaatattattttattttgttattggttatgtgaaaataatttatattttaataaatattaaaaaagtttcaattcaatctacactattatgattggattgaattcaaaatatgaaattggcaattattgccgattgaatttactttcagttacaaattgaatcggatgaacacctttaattgttataaggtaccagtagttcttaaaggtagcgtcttacaattgattaacgatatttcataaaaattattatattaaattatatatgatttgatacttaagtgtattaatagcgatatgatatattttcatgtgtgttacatttctcataattaagtgtatatttgtttctcaataacaaaatactaaatgtaattttattattattaatttaattaaatatcgaattttatatattttaatttaatataattatttaaaaaattattaattattcacaaaactaatttaatgatagtattaagtataagtggtgtctcaaatctcaatagtatgaagagcatgcattaaataatcaaaacacacattatgatgatcaaataaaataaggctatattatatcgatatccaaaaccattatatccatacaacatgcaaattaaattatgtacagatgcaaattattctaataattttgtgaattgaatgtattatattaatatacacaaagtgagattttaaactttgaaagttggaattaatatagtaatacatgaatagagtaagttcatttaagaatcctatctagtggcaaatagtatatatatttaagcattgttattaggtatcagtagtgtctaatattttttataggtgacacactaagattggttaacgatatcttttagaatttattttcttaaattacatgagacttaattacaacaataataatataacccgaaagaaattagtaagcaccaataatattttttaatatttttctatatatttatatgcttgaaagaagaacaagactgtaaaactttgacaattattcaaatatgagactaaactcgaaaaacaaacacacatccaaagacaaagtctcgaaaaactaagcttatgagcctttaatatgtttttatttttgttttaatctatagaaaaataaggtttaaaaaatgtatatacaatgatttttgaaattatatgtaaaaattaatggaaaaataaaaataaataattttttttattatttttatcacatgtattggctcccaataa

SEQ ID NO: 93391 - DNA, 765 bp, Cannabis sativa
  modified_base (727)..(736): a, c, t, g, unknown or other
gtggatggcatgtcctgcagatctttggtcagtttgacaactttagtctcgacaacaaggagcttcttattgacttctcccagctctatccgcacagcaccaagttgagcctgtgcttcctcagcatccttcatggctaagtccacctctgttcgcattgtgttggaaatggcaaggtttttagcagcagccgacatagctggggaataggcataagccatcttcagaccagtctttgcagaaagaacacatcaaaatccaaactagttaaagaagaacaaaaggaaaatgtcagaaaaggtttaccctcaaaagctatttcaggactcctcccataaccagctccagagataggtcattatctgccccagccagttgctcgtttgcctcagggatcgaccgactcacatagtgggtgagcatatctcagccccttttagtctcctggtgcagtactagaggtggggcaggggccttaatttgttcagacccacttttgatcagcttggatccaccctccgcttgttcaggcctgtccgaactacctcctcaggaatctttggacttggtcagttttaggtcaggagggtcgacaacagtttgttcttcagaaaggtcaatgaccacttcagttagcgccttctctctggatggggtctcattgcctttggatttcttggccgaaggggacaagcccgagcttgcccccactctcttcttcaaagcnnnnnnnnnnttctgagacatttctgcacggaataaaaa

SEQ ID NO: 93392 - DNA, 1275 bp, Cannabis sativa
aaattatcactctcggtaggtgatccttttccaaatcaatctctatacagaagcacattagaagccttgcaataccttattcttacacgaccggatgtggcatttattgtcaacaagctgagccagttcatacatgctcctacaactacacattgggatgcatgtaaacgtttgtttcgatatcttaaaggtactattcatgagagtctctttatcaaaccaactattcgaatggatcttcaagcttactccgatgcggaccgagttagttgtcccgatgataggagatccactggaggttatgcagtgtttctaggggataacttgatatcatggtcggctaaaaagcaacaagttgttgcttgttcaagtactgaaagtgagtttcgggcactcacaaatactgttgcagaactcaattggctcagccaccttctcaaagagcttcaagtgtccttaccatgctgtcccataatttgggttgataatcagggggctgcatctcttgcggctaatcctgtgtttcacccacgctccaaacacattgaaatcgatcaacacttcatccgagatcaactgttggccaaaactctagaagctcgatatgtgccatctatggatcaaacaacagatatccttaccaaaagtctatcaactaatcgatttccctacctcaaagacaagctcaaagtgtgttcatcaccatttcgcttgaggggggacgttagcattagtcagagttagttagtcatttagttaatacagtttttttactgttgtaacaaactgctatgccacttgtttctttggctgttttttgtttttcctttcttctttgtaacaactctgatctctataaataaaatatcgtctgctagggttgcttaacttttgcaagccttgtgatttctatctttgattgagtcctgttagattgcatagataagttcacattctacacaactggccaaggaacatcgtcgagctccaagactgggttcaaaacgctgcctatgacttaaaatttcagatttataatgttgtcttggctgggattctgtattgggtttggaagaatagaaatagttgtgtattcaacttgatgtgttactcttctacttttataagtagagatgttagaagattggtgaagtatagggtggctttgcttataaacatactaaaataaatgatagaatcatggatgtaattagtagctggtgaggctttggtggttgggcttcggctctgccttgttcaggttgtatttgctca

SEQ ID NO: 93393 - DNA, 730 bp, Cannabis sativa
accactttcagggattcatggggaatagcagctttacttcacagaggctaaggaaagattgtattgagcaaggaaatcggctgaatgtcgaacaacagctaaacatgattaacctttcactgcaaaggagataaggaaagctttctttagtatacctgattcaaaagccccgggacctgatgggtatggagctggttttttcaagaagatgtgggcggatttgggaactgatttcatcaaagctattgaaaaaattttcaacaatggggtcatgccaaaggagcttcatgcaacaatgattaccctcattcctaagatcgagaacccaactaaagcagtggattataggtcgattgcttgttgctctacggtctacaaatgcatttcaaaattgttgtgttccaggcttgcttaggtgcttcccattcttgttaatcagaatcaaggaacttttgttcaggggagatcgattgctcacaatatcatgattctccaagatatcttaaaaaattacaacacgaagaacgtatctcctagatgtaccatcaaagttgacatcagcaaagcgtatgatacggtaaattgggattttttggaggatcttcttaatgcctataattttccagctagattcatcaaatggataatgacttgtgtgagagccacatcttactcaattcttatgaatggaagagttcaaggcaacttcaaagggaagaaaggtttgaga

SEQ ID NO: 93394 - DNA, 1344 bp, Cannabis sativa
cgcatggaacggatgcaccatgttggaaagggacagaggtctaacgtatgcaactagtttggtggcttgtcgcaaggtcctgccaacatgtgtggaggaaaggcaccttgagcattggtctattgacgtatgggagtccttgggcgacgagggagactgtttggacagtatcgaatgggacatgataaaagcgttggcatattaacttggtgttggcatcttgccacacatgctaccttggtcacgaggcacaaggtgagcgtcggtgttgggatttgtcttaccatggtcggaacctatggagagtgcgagtatcttgtctagagagcctcgatgcatggatgcactcatggatgcgtgcgacatgactcggcaggagttgttcgagagacggaagtgtgcacgaggcacacagttgcgcgaaaaatgagcccattattactcggattgtttgaaggctgaccttggcttagagaagtccaggtgctgcacgggtgttctgttgcctgaaaaggtgagcccgtgagacctagcgaggagttggttatctccaacatgcgcattaggtctatgccagttaggatcgaagatagggagttgagtattgaccttataaagcttgaattaagagagtttgacattatacttgggatggattgtctgtcgaagtattcagccagcattgattgcaagcgaaaaatggtaactttccagccagagggtgaggatccattcgtttatgctggatcggttcagggtctcgaatcccgattatttcagtgttaagggctagagatttactacacaaagtatgtgtaggatttttagtggttgtgattgactctaatagaacagaaaaatttaggcctgaggtagtcacagttgttagagaatttctcgatgtatttctcgaggagttgccgggattaccaccacaacgagaaatagactttgtgattgacttggcacctggagttgaacctgtttcaaaggaaccttttaggatagctctagcggaactcaaggagctaaaaatacagcttcaggggatgtttgatttagggtttatttgacccagtgtatcgccctggggagctccggttctatttgtgaaaaagaaggatggttcccttagaatgtgcattgattattgggaattgaataagctgacaattcagaacaagtatccatttctcaaaatcgatgatttgttcgatcagctttagggaaagattgttttgcgaagattgacttgcgatctgggtatcaccagatcagaattcaggaagaagatataccaaagactgcattctgaactagatatgggcactatgagtttctggt

SEQ ID NO: 93395 - DNA, 665 bp, Cannabis sativa
cctaaatttaattactattatttatctaattactaaaagagtaatatatacgtttattttaatattttatgtatatgtatattatttatttaaaattttcttattaattcaataatttattaatctattaactaccatataaaagagtggtctgctattatgttttagtaaagttattttggaaattaatagtatggtattgattcccatacaattctctctattctctctcgcctgcgccattctcgaaccagtaccacgatggagcagcgttaggagaagactcatcggcatccgtttgcttgccacgatgagaacctggcccaaaaaccccatcctcactctttttatctctctctctctcgtctgcgcacacgccggtgctagaaggagattcaaaatctcaaatctcgttcatccgaagccaccgaactccaaaaaccaacctcgattcggagctcctagatctcgttttggtattttatttggctttggtaagatgtttttcatttctttctttttctttttttgtttattgattttcttgggaatttttttctggatctaagaactgaggagagagaatcatgtaaaatcaaaattgttttatggatttgagattgcttatgaatttaatttttattttgtgtttttacgttgatttg

SEQ ID NO: 93396 - DNA, 1497 bp, Cannabis sativa
ttaattattcaaaatgatttttttaagatctaaattaattttgtaagatttagtaaaaaaaaaaaaaaaatttcctatttttatttttaaaggatacgatttgataattttcaaaatttaagagacaaagttactaattgacaaagatatttcagcattcaaacgaaataatgagatcatacctaatataagaactaaatttctataaatgtaaaaattcaaggagaatttttaataagctgcatattttaaaaacaaaattaacattaacgacagtccacagactaaaattaaaaattatttttaatataatatatatttatatataaaaagattatgggccagtttggcacagctatgctgtgggaaacagctgtacctgtgctatgagaaaaaacagctgtatctgtgttgtgagaaaaagcaaaagtattaccaaacgccaccttcataaattatttaaaaattttggaacacctactaaatgtatgctataaaaaaaacacaaagcttgaatgaaaaatcctcatcctatccgtatagaaaagagaaaattgtggctaaagtcctcaaaaaattcacattgataaacataaattcccaatctcaaaatatagcgacaacagtctccaagttcgagattcttgtaagtctgttggtctccttttaatagatctgttaattttttcttaaaatgtcacgtgtagatactaaattaccacattagtctttaaaaagttcatttttatgcaataagttcccaatttcgaaaaattgtgacaacactcccaagctcaagattctcgttagttcgtaagtacctaatttaacagttacatttgttgctccaaaaaatgtcatgtgttgattttttattagtccaaattataattttaattaaaattaatttaaaataaacaaataaattaataaattattttacaaactaattaattaattttttaattttttctatttttttttatctttcttcttcttttagttcactccaagcccaacatccccagttctagtctgctctactaaaattctccaaattgtattagcaagaggggttgctctaaaaaaacaatctaagtaaagtttgaatcagagaagctaaaatcaaaataacgaccaccaaaactcactcttaccaaagatggagactggcggaatagattcagggagagggtcgaagcaaggtgtagctatcgtgatgaaaaaaatttgatctgggttgaagacaaaggcacgatataagtcccgatggggctcgatggccagtcaatttttccaaaaatattgactggccatcgggctctatatcgggcctttgtcttcaatccagatctaattttttcatcacgatgcatcgggaatgcatcagacctccatcgagcctgcctataaaatgtatttttcaactcaaaaatcacagattcaaaaacactaacctttgacattgggtctgtgggtcgcggtggtcgtggagaa

SEQ ID NO: 93397 - DNA, 846 bp, Cannabis sativa
attttttattttttgattctcatatatctatatataaataagagaggatgttttcttgttaagaatagatagcctctaatttgttagtgtgaatatctccttttcttctcttatgatttataggttattaagtgtgttttacctttttttttttctctaaagcttcttggtctgattgttgggtactccaattaagagaattactctaccatctctaactgtaagtatattttataataaatatttttttgattattttgaaattctattgtcctttcgtatgtcaaattgaataatgcaattcttatagcattacaagtagattgtttgtcgtaatttcatttttatgtcctgtttttatttggtcttttagttatttttgtcattcttttttgctctattcattgtctttttgaagttagaaattttttcataataataggaaggaaaatcaatgaataccacacttaaaaatagttatttttatagagttattgagagtgattaaaatttgacgaatagtactattatgttactatcaatgaaaatcctctctttatgaaatatttatatttagataaatatttatgttgcatttcaatgtgttcatatgtatatatatataaagaaaaaaggataaatataaattaggattgaagaagattgtcccaaatatatatataatgcatatatacaatagcattggtacgtaggagggtagatgtagcatcatcaagcaagatttataacttatagtcttttcattaattattaatattcacaaaacaaatatctcaagtcaacaaaataaaatatataacaatatatattattattttttgatct

SEQ ID NO: 93398 - DNA, 626 bp, Cannabis sativa
  modified_base (584)..(588): a, c, t, g, unknown or other
atagaatagatatatattaaaaaatattatcataattatctcgcctttaaaaaattaataaagctttgcaggtaaaaaaaattgtattgtaataaatttttttactaatgaattgtaataattagttatacaataggatttttatctaagaatattgaataacctctaatttattatataaaaaaattaagttccaatttaggacgtcagttataaataaaaataaaccctaaattgtaattagttatatatttttgaagctccgaattaagaaagtatacatccatataagatcattatctaaataaaaaatatatatataatttatcaatttatttatgtaaaattaataattttattttaaattataacagtactatatttattttaaaataattttatactatatttgttgttacattttatactttttggtatttggattttttttttctaaagtacttctattagtgataacctctcacttaaaataaaatttatttggtcccaaatttattcttaaatagatgttataattgtggctaaaattaacatccactacaaaaatcttacttttagtcacnnnnnaacttgtgactaaaagtgaaaaaattgtgactaaaagg

SEQ ID NO: 93399 - DNA, 800 bp, Cannabis sativa
  modified_base (584)..(584): a, c, t, g, unknown or other
cttaagaaaatgactatcctaaccttccccaccaaaattaaactatactatacttaagggtatttaagtaatttctaactaatctgccaaaccgacaactaagaattttaaactagtccgatctaattccaattcaactcatcgtttaatgttatgacatttctgaccactccgtcaagttcccacggccgccgacccaaaaatatttttattttaaaaaaaatggtatctacaatacccctataattcgataaaatctctgtaattaataaattacgctttatttaatcatttactcaaatcccactaattaactcgtaactagcttaagtaagattataatcttactctaatatccatatatttacatacttaataaaatatgtccaaataaatatcaataaaatttttgggatattacactcgtggactatgcagaattaactgcaaaatcacgtaaaaacctggtgttctttttgtatcaattattttttcttagatcatttatactttctgtgcaaaaatctattacaaaaataggctcataatcgtaaacgaaaatctgcgttaacagtttggtgctntcattgagagcctacgtgataaaagctcaaaaaaaatccctcctaacaaaagaagaaattttttctttatggctgataatggggaaaacgataatactcatcctgaagggactactcaccatcttggaaaagagccgatggactcacggaggccacccaattcacgaacaacacgttcgacacaatccacatgctcaaggaggagtcagcatgatg

SEQ ID NO: 93400 - DNA, 563 bp, Cannabis sativa
caacccgataggagcagaagtcaattgcacttgtaattctatctgttttggactgttaactatgtatacactatacatttgttacatgagttttaaatctttgtgctatttgatatttgaagttattaaggatagttgttgtagacttgtagtagtatctagatttggtggtggaaatttgatttaagtgattcggaggatgctttgttgtgagatatggttgctgcccaaaaattcttctaccctcacatgaatggtctaggatgccttgtgaaatatggtttagtggtgttaattgtctggtcttgactcttgactcttgagcatggcatttatttttcatgtatgtcttctaaagggtactaacatatgagaatccttgtaataaataaaaaacgaatcaaaaaaaccttgtagtatggattatattgcttacaagttatgaaagtgtgtgtgtacatatagatatatcgataccctataaaattgacaccctcacgcccttttgaatttggaatgggattgaaggacattgttgttaatgatgttggttcaagggtatg

SEQ ID NO: 93401 - DNA, 569 bp, Cannabis sativa
tttttttttttttggtttttgtttctgttgtcggttcttctttgttcttcgatggctcaccatcaaatcgttcttagtggttgggaatagcaaattcttggctactgaaaaggttgttagtagtgtatttacataccttatacaatagttgagtactcattacgaggttgaatgaatctaccgcagctgtttttactgttagtgtcttctgagcggtggatgaaatagaatatgtgtatttttaaggttaattgtgatgctgtaattttttttatatgattttattttagttgttttgtcaaacgatctagaaattagatggttattatttgacttatttttctaattctaatcttgatcgtgtgtttgagatgtccctaaattataattttagttgagtgccattaataagattttattatttatttcaaaaaaataatttacatgattaattagtaattttattgaaattaataattaataattgtgatgattttagtaaattaatataaaaataaaaataaggggaattaccttatatactgttttttttttaactttttttcaaa

SEQ ID NO: 93402 - DNA, 760 bp, Cannabis sativa
aatatcattgccatattttctttcgttttattgtttatgctaagatcgaaatggttggaacttggagagctaaattaaacaagtttcatcttgaactggcttctattatctgctgtgttattgaacattgtcaattatcttgaaccatgtgtaatagtgttaattaaaattatggtactttataaaatctttgaatgattgtcagggttgcgagaacttggcggtgctgttgatctcataaatcagtacaaacttatgcctcattacgaacttttttgtagaaggtcaattccttcatcaatatctgagacacactatctacatagtgtggttggaaaccttaaaatctgtaaaggggaagggatggagttggaacagctctttcaagatggcaaatttttgcgaaaaagtgatgcatgtattcgtccttttaatctgaatgccttagatgatgcctttcatatgagggatgccacttcagttaacctttctcttgtaagatttatgaattctgtatgtggttttatacttgctattttagtgtatgataattgaaacttattgtaatgttcataggcagagaaagggattcctactactgtggcaaaggttaagagtaagttggaagaaaaggtgacgaaacgcaaaaggctcgatagcaaggataaaacaactaaggagtgtaagaagcagaaatccttacataagaataaaacttatcagaagggaaagaatagcaacttttctagtggctctaatc

SEQ ID NO: 93403 - DNA, 985 bp, Cannabis sativa
aaacaccatggttgcatgtactaagtggcatttggcaatgttgctgaaacatgtaatttaattgtgtttaacgtgattatattaaagtcaacaagtcttcccttttcagtttagtacgcgtactagctacaattgttgactattttctgtacttctttttcttcttacctattaatatttgggttggtattttgtataatattccttattatgtttaaacattatatataaattttaaatttttaaataaatgtatgtgtgaatttttgtgattgaaacttaaatttttttcttttttatgtacatattccattctagactcgacccatgtatattatatataagatttaatgctactaaatttgctatatatgctagctgtttaatttatacaatgttttccatatatataagatttgataccactaaacttgctctatatatatatcatgctagctgttgaatttatacattacaataattatatatatatatgtacagcacgtaatatgagtattgattttgtatatactccactaagtgaaatatatatatatagtattacaattcaatttggaactttgctatagagcatatacatcgggtgaaaacacctcttgctaataccaagagatttatttacctgaaagatcgatctaaatattaattaatatttatttgtgtttggacacaggacaggatttttttttaatatatagaaaagtacaatatatatctatgtcgttttcgaagtctagaaaactttaaacctttcgaccgaccacagatttcaaatgatcacccataaccaaagattattaagtaatatataagggtaaataatattttggattttgtgttttgtaaaataggattctgagctgaatttttaataatttttttttaatataaccaacttgaagacaatttctaatatgaacagatacagaaaatgtaaaatgttttgtcataacatctttagatc

SEQ ID NO: 93404 - DNA, 554 bp, Cannabis sativa
atatagtgacacacagttgcagtctacattgacacttgacaaaccaaaatgaacggaaaagtggagaccaaaaccgagttgaagtttggagggtttccccgaaaattcagtccaagaaattaccgtaacaaatcttaaagttcagataatttaaccacaaattacctcactttatacaaacataaatgtaaatgatgaaataaaatgataaaaaattaaaaaaaacaaaataacatgttaatcatcccaataaataaacatagtggtcgagcaagaaggatttaaagaagaatacacaatgagagtgttataacatctctaatgaaagttgctcactaaaatgctcatgccacatatacaatattcgtttaattttcaaaagagagagagagcaaaagttgctattattggactatcgatgccatcactatttcaattttttcattattttgatttaaaaaaaataattttttacaaaaaaaaaaaaatataatctattctttataaaatatggctatataacagtatttttgatgagaaattattgggtgact

SEQ ID NO: 93405 - DNA, 891 bp, Cannabis sativa
  modified_base (35)..(36): a, c, t, g, unknown or other
tcctgattaacataaataactgctaatttccaaannaactaagcgggctttacaatcctgttccctggaagtgggacattcatcgtttaattgttgattgatccattgttgatatctccggttgtctgatttccaacaacagttatttttcttctaaatcaatgaactattgcatttcccacagacggtgccaaatgttatcgaaggaattttacaacaccaaaataaattataataataataatatgaagaacttgtgcgagtactcaccaagaatggagagtattcaaattagggacgcaaaatacttaataaaaactaactggaaatacaaaggacacaagagagtatagtggttcagttagatcacggtctgcttagtctactgttgcaaggagttctgtctccctttttatttcactgtggatcactcctttatatacaaattaagtgtccgttcatttacacagagattgaattcattatgaatccgtttatgcattgaattaaaataattaaactaaaaaatgtaaacataataaatgaagaacagtttcagcttaattaacttaatacagtaacgtatgcgacttctataatgcgagttggctgctcacattcttgcataagctcgcaggcttaaggtgcacttaagactagtcgagtctaggatgtctgcgtcctattcaagtcgcttatacagatatctcataatcaatcgataaactaagacatgcgagtctgtatcggtttatcaaggttgttgggtcaatgggaccggctcacaaaatagagaatcgatctctatgattttgtagaaggatatcggggatgctcgcatataccctggtacatgcaaccttaaaaccattccttggtcctacataatgc

SEQ ID NO: 93406 - DNA, 571 bp, Cannabis sativa
  modified_base (132)..(138): a, c, t, g, unknown or other
agaggcgttggttagagttggttaaggattacgattgtgagatcctttaccatccatggaaagccaatgtagtggctgatgccctgagaaggaagcatcgcaaacaggtaactagtatgattatgatttcannnnnnntagcagaagacatggttagatcaaccatcaagtttgttgttggcaaacttcataaattgacgttgcaatctgatctgttagaacgaattaaagctgctcagttaaatgattcataattagtaaagatcaatgaagaggtttcagctggtcaagccaaagattttacactgtcagatagtgggatgctgttgtttaagactagggcttgtgttccaagaagtgtagaacttagaaatgagattcttgaggaggcccataccaccccatattcattgcatcctggcactactaagatgtataaagatcttaacccctaattttagtagagtgggatgaataagaatgtgatagaatttgtatcccggtgcctaacttgtcaacagatcaaggatgaacatcagagactagtaggtttattgcagccattgacact

SEQ ID NO: 93407 - DNA, 510 bp, Cannabis sativa
agaaggaattgcatcagaatcatatattatttttttaaccccgatgcgattaatattgcaagcttcaacaaaatggttttctgagtttctatgatcaaatattgtttgcacagcagctttgtttggaagaaagtgatagtttttatccaggcttttcttctggttgaagattgggtgggtttaagcttgtattaactaaaagaatgtactcattgcttcttgctgacttggctgttgcttctttctgctctattttttggaggaaaattttgtgatactaatttatggatggcataaatgtgtctgggtttttagtattacttcaggtgatatttttgtatttagttgagatgtaacgctatttctgacaaatatagtattcaagatgatgaggaatattttaataatgttatatttatttatttatttatttttggacaaaatgctttatttagtttaatctgtcagaaatgtagtgtaaattaatttaacaagtcaaaagaaatattc

SEQ ID NO: 93408 - DNA, 1207 bp, Cannabis sativa
gccagcaacaaccaactttgaaaaaccaaaattgctttatcaaattcaaaagtgaacaataaccaacacttcaaactggtgtgggcgggtggtgaaatggagtcccacctctgccatcactacttttgaagtaaaaaaaaaagaaaattaaaacacatcatgaatgagcagtagggttttttgcccatgaacacataggtttaccctaaaaccttataagaattaattagtactccttaccgaaagctatggcaaatccaacaccagcaaagacaaaaataaaggtggcattaaactcaacaacataggccttgagagaagtagtgctgaaacagtcaccaaagctacccaaagtcaacttcaccatttttctgtaaaggaacttataaagagatgagttggatcagtttctcttgttgaatgggttgtgtaaaatattattttgagtgtttcttaaatactagtttagccaatatagtagattaagtaatgatgcaaaaataaaaataaaaataggcatagccggcaccgaccatgatactagttggcaacctttttatttttgtttattttttcagaaatatattttatccatcttatatttattttataagatggccaatcacttttgcatgattgtaatcaaaggaatatgagtactcatagaatctagaattaagtatacaagtaccaatgaaagattatgtttgctattttatttacatatcttatgtagctaggccataattaagctagtactaattataatttaattgaatattggaaccaaccaatctgaatcactaagctaaacaatggactttggggtctaaatttaaactaaaaaatctagcagaaagtaattgtacaatatcctgatacttgatgatgtactggtacacatgcagctagtagtgttacagagtaactctcttttcagttaagatgtttctttaattaatttcattgccacttgtaataatgcacatgatgcttttggcaaaatcaaaatatacatataaattgcattttatatatgatagtatgacatctctatatacgatacctaattataattagtacatcacaattatatatgcttatattgcagctgatcaaattgatgtaaccaattaggtgtggtatatgtatcatatatgaaatataaagtaataaggtaaaaaatgttttcatgattttcactact

SEQ ID NO: 93409 - DNA, 741 bp, Cannabis sativa
tgttccacacttcaagctttttaatgcctaaaccaccagctgattttggttgaaaaacatcctcccaagcaactgctccaactacatgaaataatgcttgtcgtttccaacgaaaatcttgacatattgtttctatgcttttcagaattttccttggcatgatcatcatttgactccagtatgcttggatagcaactagtacataattgatttaagtgattctccctgcaaaagacagatttttcaagctccaacttttgattctagcagtcatcttctcagccaaaagctcacattctttccttgagattttctttgaacatattgggatccccaaataagtaaaaggcagctcatgttttgtgaaactagacagctgcaacacctagtttataacgtcctgctgcatattactgcaatatattgtagttttattagcattagggtataatctagatgttagggaaaacaattttagggcctgcagcatatagcttatacttctaatctcccttttgcaaaaaagaagtacatcattagcaaaatctaaatgatttagcttaagatccgagcatctgtcatgatagtgaaaatcctccttctcacctatcttcctcattaacctagataggtattccatgcccggtacaaacaaaaaggggacataggatccccctgcctaagccctctcttagatttaaaaaaaaaaaaaccataaaggttccattgaacatgagagag

SEQ ID NO: 93410 - DNA, 991 bp, Cannabis sativa
aggatggagttactctcccaggttaagtgcagtgcatggagttgatgatcccttccatcaagaacacttgtcaaagggctctagttgtatatgattaaagttaaaaggatgctgaaccttacaacaaagaagaaaaagaagatgtttttatgtataaaaactgtgcagagatgattaattatttgattatacagcttagggccacttacttaaactgtattaaactactcatttttgtcacatattatacgaagctatatagtagcacctgggctgttggtctctgttgggtaattaaaacataggaaggagtacttgggaccaatgagtcagtgaccccacaaaaattaaagagagaaaagtgtcatacaataaaggaggtcaatttttgcgttgattctatcattctatataggtggtgccgtggtggtggtacatttagagtttctgtggcatacttggttgctcacattgaattgtatttgtcattcaaccaattcctgacaactaagggatagttccatttcaaaaatccctcatctcttttgaatagttgtggcattcacaagcatcacacatcttaccctttccattttctttaaacagtcctatcaattctcattaaccagaagctatcaacaacagcataataacaaaccagaagctatcaacaacaacatttacttgattaattaacatgaaacaactaaatttactatcaacaccaacatttacttgatcaaatacaacataataacaaagagtgggatatacacatcacttccaaacacattacaactcttgatagctatacccaaaaaataaaaaatactcccaactaccaccaggtatcagtacatattctccaaaattagtttctaacttcaaaataccaaaagccattaccagcaaaatacattacaactcttcatatctatatccaaaaaaaaaaaagcaccaactcttgtattccattactgagggggtagca

SEQ ID NO: 93411 - DNA, 642 bp, Cannabis sativa
aataatttattaaaaaatataaagtaataataatacaaaattaaatgtaaaatttaataataaaataataatataagtcatttatttaatgtaaagaattatgatagttaaaatgtaataataaaatattaaaaataacataatggtaaatataaaaagtatttattgtgatgcaaattttgcatcatgttatattgtaatgcgaatttaaataattttttattatgtgagatttttgcatcatgatttatcacaccattggaatagactttaataaagtgagctatattttgcgcttgcatcacttatttgcatctctattaattggagatgctctaacataattaagtgttgctcattcagtgtcagtattaatatataataataattatataatcggtaatacattgtattactattgggccataataggatagacataacgtactaatacgctcgggctcatcggcgcgctctaaaatatttttggctagtcttttgggctaagacaactaattttctcacattgaatatatataatatattgggcccataataccttataaagagaattgtgctcgtgattggtattttaaggtagaatggtcgtggtcaggtctagctttgggcataagtgagtta

SEQ ID NO: 93412 - DNA, 834 bp, Cannabis sativa
ggagtgtatccttgaggtagtgtcatgtacacatcctcatgtagatcaccatgtagaaaagcattgtttacatccatgtgatgtaaatgccaattgttcatggcagctaaagaaaaaagaagttttaaagtattgaatttggcaaccggggcataggtatcaaaataatctatcccaggttgttgagtatatcctttggcaaccaatcttgctttgcatctttcaacagatccatctgggttgtatttgattctatatacccatttattgctgatagtatgttgtccaggtggcaaagggacaatgatccaagttttgttgtcttctaatgctttaatttctgttcccatggcattattccagactttgtatttgatggcttgcgagtaggatgtaggttcgataatctgatctgcagcaagaattgcagctataaattttttggagaatcttttgtaagacaaatgattggtaagaggatgagctgttgatgtgtgtcttggaggatcacatatgtaatcgtgtaggtgatttggcttgctggtttgccggccatatttagttgtataagtgttgctggaatgtgctatgttagatggagcagatgaatgggattttgtatttttattggcatcaggatgtggggttgtaggagcagtagtagcagatgtatcgatggtgtgaggaggagcagtattaggtgctgcaatatttgttgcagcatagtcttgttgtgcatcaggtattgctgcagtagaagagtcaggtactgcaatgggagaaggaagtggagatgtttgatctgctgtgctgctgtattggtgaggaaaaaat

SEQ ID NO: 93413 - DNA, 654 bp, Cannabis sativa
  modified_base (203)..(216): a, c, t, g, unknown or other
tcatcctaataaatcaaatttgagacgaaagccgattcgaatttcttaaaaacataaaagaagagtacataaataattaacattaacaatcgttggatatatcattgggtgttcaacaaccaaagccttataggtcaaataaagcatggcatgtgatgttgacctcttcctaatagtaagcctttaataataataataataannnnnnnnnnnnnnataataataataataataatgcatcaaagtcaagcagtcaacaccttcatggaaccaagatatatataaaccaaacaacaataagaaccaaaatcccacacaaaagttttaagccatttcactcacagccaagtcaagtgaagccacatcataaaagaaggagccaagtatatataatataaacaatcctcactcaaccgaaagtaactgtcactcaaatgacaattgaagaaaaatgagtttttttgggtaagctaaaccatctcaactattattttatttggtagttcaaattttaacggtaaaatcctacaaatttacaaatttaaagtgtcattcattttttatatttaattactaatataaacaacttatgtgtatactttttgtacatgtatcaaatttatattagtgcacttaatattattattttaaaaa

SEQ ID NO: 93414 - DNA, 534 bp, Cannabis sativa
ttttttaggaaatttttggggtataaagtatacttaataatacccttttggtaaaacaaagtggggtgtgattataaaaggaaaattcgattttttatccttacagtaaggggaaatttttcccttaaacctaaaataccctatattggtaaaataagacaatatttacttaattcccacattaccccctcattcaaatctgactccacaagcatcggaccaaacacaatttttttgaaaaatcactcagcacatgcatcggacccagccccatccagcatcgggtgccatcggaccccatcggactccatcgagtccccatcggacccatcgggtcttcgtcttccccaacccattcacatggagcatcagacctgcatcggcctgaatcggattgcatcagacttggtggttcggttgagatgggttcgtggtggaggaggtggccgatcggcgtgggttttcgtggtggtcacggcgtcgagcggtgtggtggttgcggcggtcgagcggtgcagtggaggaggtggatcg

SEQ ID NO: 93415 - DNA, 582 bp, Cannabis sativa
taaagcaactaaatgataaattaaagctcaaaaaactagtcatttttttttcttaagaaaaaaaaaggacataccacaagggaatttttaacaaatttatttatgatctttttttttgtttgttttttttttatgtttcccatattttaaattttgattattttttaatcccttatctttttacattatttatttatgtcatataaaagtaaactgtattattttcccccatatttatgaaaaaacccctaaaaatggcttttttttaaataatgggaaaaaaattaaagtttacttttatatggcataaaaaaataataaaaaaaagtttactttatagctcttagtcactatgaaaaactagacgaacggttaagacgaaatcaaattcggataagcagaacccagtgcaccaagccatttgccaacctgggcgctaagggcttcttttggagcttctgggatgccgttttgacacttccaaggttcttaaacttgaggaggaggtctcctaccctgttttgaccattttagagagaatgccaagagtaaaattcgtatttaagtgatcaaaaccagcgc

SEQ ID NO: 93416 - DNA, 924 bp, Cannabis sativa
ttccacttctataatttgaatttgtctttttgtcatttttcgttataaatcatgtattgtgtggaaaattcaaacttgggaattttttttcaacttctaatcatgcactgtgcacttggaaagtgaatcttggtttggataaggtttatttgagggtccattaaggtttaaatatatcttataattgatacgtgttcgtataattgctagtaagtatagtgttagctctgtctaactgttttgtgtttgagttagttggctagagacgccagtcgtgactggctgttaagtctgttaagttatttatgttctaaccgttgctccaatacctacaaataggtattaaatattttgtatgttcaagatctatgttagataacttgtgttttgatttatgtcaagtgcaccctatcatgaaaataatgtattaatttataatttgttgtgcaggggatcaaatatatttagtgcgttttctactttcttgaagagcaaggactcaagtgatgggtcagaacaagctcttctcactgaattgaaggcacttgaagagcatctcaaggcacatgtatgtataattaagattttgtgttttgtgattcgtgaataatatataattgattaatttattattttggaatggaatcagggcccgtatgttgctggtgagaagattagtgctgtagatttaagtttggccccaaaactataccatcttgatgttgctcttgattatttcaagaagtggactgtcccggcagacctcactaatgtcctcaactacaagaaggtttatatatatttatataattatatatattcatatttaggcaagttgtttagtgaggtttaaaagctcatcctataatttaacatggctttgcactatattatataatgttgaccgattttatgattaggtct

SEQ ID NO: 93417 - DNA, 1245 bp, Cannabis sativa
  modified_base (181)..(193): a, c, t, g, unknown or other
tctttttatttaatcactctaaatttaacaattgaaatagtgatttaaatgtattctgttacatatttatttgtcgaataaatttcacataagaaatgtgtaatttgaagattgaagatttttgagcattccatccactctacatattaattttagagtaataaattacacaatatatatnnnnnnnnnnnnntttattttttttttatattttttgtttaattttagcatcctaccatgtccaattttcattgaagctcaacccaatgattttttttttttttttgctttttttttgtcttcttccaaattgtgtgtaaatagttgcgacataagagcatctccaatgataatattttggagaatgcttgatgaggtggaaagcttatgtggcaaaatatagagatgctataccattggagataaaagaatgctattcttgaaatttacattgatgccacacaatgacattgatgctatgtcttttttatacaataaaaaattaaaagtgcaatatatatataatagtttaataaagaaaaaaacttatatatatgtaataatatgtgatatcataattatagcatttttaaaaggtattataccattggagtatttttaaaagtaaaggtgccaaaaataatgtgaaagaaaaataaaataaaatattatattttggatgatgtggagatatagagcatctttaaagactgctaccattggagatgctctaagaagctcatttgtaaaacttttaaacctgcaataacaagtgttaaatcgttgaagatgatgatgactccaataaagattttgttgaaccaacaacgaaactcatcatggtccattgaaaagaaaattgcagagaaaagagtttgattccaaaagttaagatggggacccaccccgatcctcctcttcttcttcttcaaaaaatttatcaattttccagcatcaatatatctaattgataaaaaaaaaaaaatattccgacctaactcatcacccacaaatctctcacaaactcaccatcatgatgattacataaaaaccatggcttcgatcgtcgatgacagaaaccaatcccaaatctgacaatgggtgcttttgatttcgcaaggtggttaggctccggtcatcgatgacataaaccaacccagaattagttcactgtcctccaaatctcaacctcccgacgataggctctggaatgacatcgacgtggtcccgatttcaaatctaagc

SEQ ID NO: 93418 - DNA, 743 bp, Cannabis sativa
ttttttttttttttttttttttttttttttttttttttttgagataaaacaagctgctaaaagagacaatacaaatcaaagtatgcagcaaaacagaggagactaatacgaatccttatggtcatcctctctcatcctgatggcctcctttgcaagagaatgagcgcttgtgttgagttggcgcggtaagtgaagaaaggaaacaccaaggaagttggagaaggagtgcctaatctaagcaacaaggcttgaaacggctaagttatccttccaagttccattaacctttgagactaaatttaagcaatccgaaaagataaaactcggcattagctgggatgaaagacaccaagagaggctatggtacagagcttgggcctctgcgaagatgggggaggaggctcctggcttctggatttttgttgaatcaataatgcgatgagagccaaccttaaaaacacagccaagtcctgtaatacatcggtcttgatctaaagcagcatcaacatacaaggccggagtgtcctcctggatgatttcaagacaagatgagaaaagatgctgatgagaggctgagtgagaaatgtcttgagaatgcagatgttgagcctccttataatcctgtaaatagttactagggctgtacagaaattttcgtaaaccgcccaacccgaataacccgactaaaccaaaccgacaaaaccgaaaaaaaatacaaaccgacataacttgacaaaattcta

SEQ ID NO: 93419 - DNA, 1409 bp, Cannabis sativa
ggtttggtcagtttaaaccgaccaaaccgtagattaaaacggtcggtttttttatatttatataatagtcggtcaatttttcggtttataaccatgaaaattgaaagctaaatttcaaatttttttacttaaaaaaccaaccaaaccgactcttaccaaacataataattaatttagtgatttagatatcaataaataatatttgataccaattttctttttctcacatttcatatatgatatatcacaccgtccaaattacgagatgtccaaagaatattatgattcgagtgctaggtggcatttgctcaagatccgtacttgaaacttctagatagttttttttttttctgatgtcaacagtcatcctctctctattccttccaaaattctcgttctctgattctatctccatctggaaagttcacaaaaccctctctctcttttggtacattaaacaaaataatatttgatcttgaagaacaactttctcaaaaggtaatattttattgtattcttcttagttttgagttaatttctcacaaaatttattacaactttttagttatgtaaataatcatcctttgattcgaaccccatttttctaatttgatgtactcttctgggtttggaaggaaaatctaaaaaagaaaaaagtatgtaatatttctttagttttccatacatctaaacatgactttctacagatagattgattaatcattttgttggttatttttctcaggatcactaatatagttttcttaccattggtgagctttcttatttttaggccaagtcattcatgttgggatcaaaagcattctcattcgcacctgcaaagaacaagatcaaacaactgtaccctttgaaggattcttggggtagagccctctgatctgtctttttctttttcttttccaaagaatgaaagctttattttcaaaattatatgattaccaacaattatgtatatgcatatatttattgtaacaggtactttgtcatctacaacgacgaagaaacaagggaaagatgttacttcttcaggaggaacattaaaagagaagccagaaaatcctattgccatttttagtcgaccacccccactcccaccagttcttggacccttcatagtactgtctttaatggaaacttggtccactcgtgatggtaatgacgactgagtaactactacttgaggaagtgctttagaatttggagcacaaattgaaaaacgtagctttgtagtaaagtagcgaagttccaaaggtgtaagtagcttttcagaactgggcttatgaagagtcccaacataatgctgtaaacctttagtaaccaatttagtataacgtgtggactctttaggaaccctgcacatgttttaatagtgagagatatgttttgta

SEQ ID NO: 93420 - DNA, 502 bp, Cannabis sativa
agaacatgaaggcctcggttttttgtttcttggagggttggttgttggtgggcgtactgatgcagcaaggggaggattttcagtggaaccaagtgtgcgttgacgttcttcttgaacaatcatagcgaagacccgagaaagattgggtaaaggttcatttagtagaatttgggtacggacagatgagtaagattcattgagtccagtgaggaattgaagaacttgattttgattgtaaaaatcaagaaagacctttagagcaccacaagtgcatgttgtatttggctgaaattctttcagctcatcccatagggatttgagtttggtgaagtatgaggtgacagaatggtcaccttgttgcaaccgagtgagttgcgtttgaagttgaaagattcggggggcattaccctcattgaatctttcagctaaatcatgccacatatcagtagctaggtcaaaatacatgatactttgggcaatttcagcagagacggaattgacg

SEQ ID NO: 93421 - DNA, 536 bp, Cannabis sativa
ttttatgcttccaacgctaaaaatatttgttttatatggaagaacttgatttgttttatgttatgctgggtttttatttaaggttgtgcaccctgttttgagttgtaagattttgaaaagcttatgtataaaacatgccttccttaattcttctcgccctagcatgctttcctcttgtatttgcgcctttgattgatcctaatctgtcattttctgccaatacaggaccattcaagctcaatggagttcccatcagacgtgtgaatcaagcctacgtgatcggaacctccaccaaggttgatgtttctggtgtcaatttggagaagtttgatgacaaatattttgccaaggaaggcaaaaagaagtcgaagaagggagagggagagttctttgaggctgagaaagaggttagttttcttgtttattcatctctgtatacatatatgtctcctgaagttttcactttccccaaacttttattggttctctattaaattccttctttaattgcctttcacctgctgcaattttttatt

SEQ ID NO: 93422 - DNA, 662 bp, Cannabis sativa
tgactgagattctctcacattattcacatttcacatgtgtttacaattgtctgataatattattattagaacatatatatatcatccaattgaccatcaaaacaatatactgtcaaaataagtactgatcattataatttggcttgggtttggttggttaatttttccatgtgtaattttagattattagtactaattaattataacaacaaaatgtcaatatcgatcatatgaccattagttcactgctcatctctgcagtataacaatagaattattattacataatcaaatggacaatcaagacgctgctgctgctgctgctggtacccatatattgtgtttattacaaaattatttgtatgtaatatgtattatgttaattaattgtttaatttgcagaaccggtcaaagccaaagcccttacaaaatacccatttggtgctgcttcagaattggggataataaagaaacccctcccatatcgtttactcagcggcctccctcctgttaagggtaaatgtattaattacgtactaaatgttttgacttttagattttacagagattatatatttttaaaatgtcaaagtgtattgttgaggaagtacgaataagtgtatatgtaaggtgtatgagactccatctcaaaattaattgat

SEQ ID NO: 93423 - DNA, 517 bp, Cannabis sativa
ttaaaaaaataaacaaaaacaaaacacgacggaaccaaccaatgtccctccccaacaactatgccaatcatttgtatgtattgtgcttgatttgtaagtgtgaattaaaaaactgtacgaatagtaaagtatacaataacataataacaaaccaaataaactaaatcatataaaaaaaaaatataaacataataaacacctaaaaaacttcaaaaataaaaaaactaaaaatacaaaaataaaaaaaaaataaaaaaaaactaactaaaactaaaaaatatacgaacccaaacaacactattaacactaagatgaaacttaaaaaacgaaaaaagaaaagaaaatccacacatagatatgcaacatcaaattaacaaatgaagatgcccaaaaattaaagatgaaagagcatcaacaaagtatatgaaaaggaaacaaaagaatctcaaacaacaaacctaaaatgaaaacaaaatatatatatatatatatatgtcaccctactcagaaaacaaga

SEQ ID NO: 93424 - DNA, 1115 bp, Cannabis sativa
  modified_base (730)..(737): a, c, t, g, unknown or other
gtggtatttcctaggtcgagaataccctcttctaattcctcaatttgtttcaatcggtttctctcatcttgaactcagggttcaagatcttcataattcttctcattttcttttgccaagatcgccatcaactgatgtccgactttcctatgctgcagctcaatgccatattaatcgtgagccatcatgtggtcgcctcgcaccactcccacgccatctggtgtttggaatttcaaggataggggcttcatcaaactgattgcccctagtccgatcagtgctggatgacccaacaatatgttgtaagccgagggcaggtcgacaactaagaagtcttgcataacagtagcaaataaaggtgcctcacctaaggttaaggctagctcaattatgccaaggctagcgatgatgtctgcagtgaatttgcaaacgttcatttcagttccgtagttggatgtttccctgtttcctgagtctgtgtgattcatagagagtatagcagaacctaaggttgtgggtttgggtttcctagattagggtttcaagcatgtgatttaccgggttttattatgtgattagggcatcagtctagaacgagactttccgttcaggtcggccagcacacttgaatctagaaagacggtaagaactgtatataatgtgtgatgtaaatatctcaatatatgtatatgttatgtgtatatgcatgcttatatgttgtgattcatannnnnnnnacacttgtacggttgcggtacagagtgcatatgtaaggtttatgatgtttgaaactacatcgtggtgttactagcacatgtacaggaaggtataaggtgtctgtggtacaacacttaacagtactcaggtgcggtccataccctacctacactactacgaaggtatactgagtgcatgtggtacgtggtacatggtcgtatccttagtagaacgttcttactcatctgttgagccttgtaaataggtgtatgggcgcctagataaaagtcggtgttatatgatatcttatatgattttcttactgagtctgtcgactcacagttctacttccatgtgtaggtaaaggaaaggctaaagctgaacaagagtgagcctgg

SEQ ID NO: 93425 - DNA, 1060 bp, Cannabis sativa
  modified_base (403)..(412): a, c, t, g, unknown or other
aagtggttgacgggcactggggataaggccatcagcaaaattgggcattttgtatatgagtacttcatgttggatggcgcgggcattattcaaactcggttccagtagatcccaatatatcactgccctcccctcactcttactcttagggatagagctctaaagcttgctcagctaccgggggatgaccgaaatatcatccagttgacctctgaagataactttgtgaagtacgggctctatccgaaggacttcattcctaagccagtgaaggggaggaagaggaaatctggtgctggacgggttgaatgagctcatccgaagaatgagctgattcaactaaagcgcgaggctaagttgaaaggaggtgcaagggcaaagcaatatgctcaggagcccttgnnnnnnnnnnatgaagctgaggaagagcaggtgactccgctcaaaaggaggaagaaacttccagccccgcccaggcctattgaacatgcaattcgcattaaggagccaagttcgcctactcgtctgccttctcccgtgctcggaaaagggaaaggtgttatgtctgaaataagaggcttgtcgggtgatgatggacttttgagccttactcgggcaatcatcttgcacactactctgtcttatttttaagcttcttgactattatgctttatgtttctgatgtctgttttctttaaccatgttgtttttgtttcatgcagacatgtctcagaagatgcgtgttcctctgaagaagaggattggcggaagctccagcgcagctcctccagccaagaaatctagaggcggtgaggggacctcttctaaggaaaagatgccggccggagaggtcattgatctttctgagaagctaacggttacaaacccctctactccaaaagttgctaagtctaaggagtctcgaggaggatgtttggacaggcctgaacaaccgaaaggttgttctgagctggtcaagagtggacccgagcagatgcgggcccctactccacctttgccagtgcttccagaggcaaagaaaggcaaggagatgctcgcc

SEQ ID NO: 93426 - DNA, 761 bp, Cannabis sativa
aggtctaatttttatctatcaatgcacgtttcttttcaaaaaaaaaaaaaaaagttggagtttaataataggtttgattttgcatcctctagcatcttttttttttattattattattattattttaatcttataatgatttaagatattgttagtttgttgtctaattttcttaaagcatttctaatttatgttcgctttatacaagaattagcagttcgtgcactcaagatggattacgaactaatttggatggattttttataatattttctctataacgtataaaattttaattatttccaatgaatattgactgtctgcaaaaaggtacctaaattttataattagtgacacttaaccacataaatcgatttttagtagtaaacccttcaaacctcacttttgttagttatttagtccttccattcaaaaggtcttgttaagtgctatagtggacatgtcacagtgtacacgtgacaacttttagtggaggatattagtggcaaaactacttaaactctatgatagtgacacttaaccatataaatcgatttttggtggtaaaactctccaaacctcacttcggttagctattttccatttcctttcgaaaggctctattgagtgctctacgactggaactatcagatctccccttccctcgttctttcttcttcttctgtgacgaacccacaagaccacgacaaacccagggacgaaacggtgaacccagcgaacccctccaactacggtggtat

SEQ ID NO: 93427 - DNA, 656 bp, Cannabis sativa
aaaatcgtgatagtgtaaggtagagtctaaactagagagagaaacttcttctcataatctctgagaagtttgtaagattcttgtaaccttgtaaacaatgatattaataaaaagatatggatgttattccaaccaagacgtagagcattgcacaaggctcgaacttaataaatctggtgttgttcttttctattttactgcttaattcattatcttgaattcttgtgatctcttggtatattgtctcttgattatgtagcttgtttgttggtactgtaaattgaatcgtaagtcattgattgttttattttgcaaaacaaactggtatcagagcttggtttgtaatcatggctgccgcaaaatacgatgtcaaaaagtttactagtacgaatgactttggattatggagaatgaagatgaaagcattgttggttcatcaagggatgtatgaggctttgctaagagaaagtctcttcctgattcgatgtctgataaagacaagaaagagactcttgtaaaggctcatagtgtaatcattttgaatcttggagataagattttgtgaaaggtttcaaaagaagatacaactgcagtatgtggttgaaacttgaaagtgtgtatatgacaaaatctttggtgagcagattatatctgaa

SEQ ID NO: 93428 - DNA, 882 bp, Cannabis sativa
  modified_base (825)..(838): a, c, t, g, unknown or other
attgactcttgttgattcactaaacgaagaagagttcgacgaatattattgtgattcctgcgaagaagaaaggaatccacaatttcgtgtgtacacatgcactgactgcaaatatacaacgcacgtacattgcatgatgaccgaggtatgctaatgactaatattattcttaattgttaattttctttcttatcttaaaattttatgaaatattactgacataattagaaaatgattactgaaagatttgtcaactatttatactaataataatgattaatttttttattatcacatacatatatatactatacacatataatgttacactaagttgatgaaaaacaaactattaattggtatatgaatacttttaggtaagtttacagtacgtctttaaagagacattttgataaactttctatttgtttcgtcaaatatactgaagaatttttagttaatttttttcataatcatgtatgtgataagtaacagtttaataaacttaattttcagcactctaaacaatttgaaaagttttaaaaatttacaagtggtcctatatagttataacgtacaaggttataaaaaaaataaacttattatttattttcctagatgcaaaaatagttagagggtctactacggaatttttcaatactttcattaatgtcttttttaaatataaatatgtcaatgtgatcacaaaaatagaaatttagcaacccaattttcttttctattaaaaaaaagtttttttttaacaaagtattagaaaaagcaaattcttgaggcaaaaaatgagggaaatttacatggtatacnnnnnnnnnnnnnntttttacaaaaatactgtctggcgaaattttttatttttttact

SEQ ID NO: 93429 - DNA, 670 bp, Cannabis sativa
atggaaggactgcttgaagtatgttttactccccacgatgctttcttcctttgatcttttcaagcaaagtcaaagcttaaatttttatgcaatttcagccttccttcgtagaagtcgaagcttgccccataaaaatttaacatgactctcacgcaccctgtaatgtttcaccctctggcttctgaaggaaaagtcaatgtttgaattttttgtgcactcttagcctttccaagtgaaagcgaaagtttgccattatagaattcggcatgactcttgcttattcaaacgaacaacatcgtaaggaaaattgcctgtgcaaagacgaaggcctcactttcccttcgggaaaccagaagcctatagtgcgaaggcttatactttcccttacaggtccatgccatggagtatcatttagggccagccatacaacagagtttttacctacaaccccacaacattttctcatgaagaccgagagattactgctacactttcaagaattcctctccaagtggtcacgaagaggaaagtcatggcttggacgaatagtatgcttcctagagtaaaagcagaaccgcacttatacttcctcttcaaaggacacaaactagattccaagcaaatgatcgagaatttgagaccaaagttcctagctcatttggggggtatg

SEQ ID NO: 93430 - DNA, 674 bp, Cannabis sativa
ccagttaaatgattttgacttaggaccaaatatattaagtttctcaagtactttccaatttctggaggaatagaaccagttaaatggttttgactcaggtacaagctttctaactttctcaagtttttgatttctcgaggaatggagccagataaattgttttgattgaggtttaagtcttttaggcttctcaagttgccaatttctggagggatggaaccaataaattggtttgagtgaagagataaataggacaaatttgttaaattacccaaagctttagggatagaaccattaagtttgttatttgaaatatcgagaaaagttaattttgttaatcgaaataaagccgagggaatcggtccgctgaggtagctggggtttagatctaggtagagtaagttctctaactttcctatactgttaggaatggaaccattgatttgattatcccacaactctaaacgagtaaggttgatcaaaagaccaatggactcaggaatggaaccaatgagttcattgtaagagagatcaagtactttcaagtgagaaaggtttgttagtgaaagaggtatctcacctgttagaacattgtaggaaaggtcaaggtggatgagctttgtaagatgagctatctcccgtggaataaccccaacaactcctgctttagatag

SEQ ID NO: 93431 - DNA, 1088 bp, Cannabis sativa
ttttgacacttctccaaaatcactgatccaccccaagagtaaacaccatctcataagtagactttctagcattaacgcaagtctagaaactttatttggcgtagcctaagagtactaaaataccacccttattgactaagatatagttcctcttttgagcttaatatttatttgactgtcttccagtgttcctttcctagaataaactaatacctacacataactcccactcaacaaaatgtgtcgggtctaatgcatatcagagcatacatgagacctctcactgttgatgcttaaggaattcttttcatgacttttatctttttttgaaatagttgaagctgttcctcagataaataaaatctatgtctaaaagccaaaagactttctttagagttagccattagaaaaatgctctagcatcttactaaaataagttgcttgcactagagtaagtaaattaccaggtataccacaaggcataggtttagataattttaaacctatgatactaggatcaggatgttttgttaagtgcattgaatagacttataatcagaatttcacttcttgtccttataatagaaaacttttggttgctccatatgaatagctttaaccatagttttcttggctttgcttcttagttccttattctgactatccattgcttgtttaaactaacaataaatttttgtcacaagtgtcttccaagtcataatagggtgggtgtcttaaaatcctcccactacgagaaggtatcgggactttttgtctaggaacattagtggtattaacctcatcgattgtgttaatacaacaaagatagtgggaagtttattcaactattatgcttagtttgtatattgtatattatacgctaagtgttctaatgattcaacatgtcttatttacatctcttcatttgtagcaaggttgacgcctcgctttgcatttctaacgtagaatggtttctcgtctacgcgcgagacaatagtttgtatattctaatctcgcttaagactttacagtcagtaagttgtaaatatactctatcatctccacatttaatgagttattccctttta

SEQ ID NO: 93432 - DNA, 519 bp, Cannabis sativa
aagaatttaaagaatataaaatggggcgaatcccacaagaaaagaatgctcaggcagactgtttagccaagctagcctcagatagcgagattgagaagctgagagtggtacctgtcgaacacctcgcagaacctagtatcaaagtcaaagaaatggtagccaccaacgtacaaaggccggattggacggaccccatcattaagtacataacaaaggagagctgcccaaagaaagggttgtatctagaaagctacaatatcaagctcatcgatatttaatgatgtgcaatgttctttattgaaaggggcttagcatgtcgtacttaaggtgtgtgtcagaccctgaagctagaaggatcatgcaggaggtccatgaggggttttgtggagaccacaccggaggcccaagcctctcaagaaaaatattaagataagggtatttttggcctacaatgaagaaggattatatagactacgttcttaagtgtgatccatgccaaagattcgcaaacataccaag

SEQ ID NO: 93433 - DNA, 880 bp, Cannabis sativa
  modified_base (253)..(267): a, c, t, g, unknown or other
ttatatttaagagtaattgactaaggataaatgtttaagtttaattctcaattctaaataaatattttagtttaatttttagtggtaataatactaaaatatctgtaggtacttgactgttaagtaaattgtcacttggcaatctctgattagctcaagtcattaaattattattttaaaaaaaaaaaattaaatgtgaataatgatttaagtggtcaggtatctacggagtttcaaaaatataacttaagtnnnnnnnnnnnnnnnaattaaacttaggtatttatgctgcaaattactctttactttttatacacttaactctcctattttttttcttgtggtaaaatctacttaaatttattttgtttataaatttgaggcgtcagtttcatattatcgttaaatactaattgaataactactgtgtatacctaaaagtaaaattttgaagtcaatacagtaataattcaattggtatctaacggcggtatccattacctagctggtacctcaaatttagaaagaaaattaaacataaagggattttgaaaaaaaaaaaaattaaatgtaaaagatcaaaacataaattttttttccacatataaccctatatttaatttgtgattagaaagtacttcgtgaaaataataatactcacggttaaaatttcagagtcacatgaaaacataaaaagagaaaaataatacaatttgtgtacttgtctttgtccaaaaagaaatagtggttcttttcttccataatagaaacattattgatagaaattaaaaaaattattatatgatattttaattgtatttatttgtaattattgctccaaataaaaattattattgtgtcacgggaaaaatgaattatt

SEQ ID NO: 93434 - DNA, 613 bp, Cannabis sativa
cagagcatgctgtaagtgccgtacagatcaaagaggaaaataatgtccaacacccggtatattacatcagtaaaagactcagtgagactgaaggccgatatccattgatagaaaagctcacctatttcctaattctagcgacgagaaagctaacgccctactttcaagctcatcctattagggtgtacagtgaccaaccgttacgccaaatattgcgaaagccagatgcttctggacagttgctcaaatgggcagtggagttgggccaatatgagattatcttccaaccccaaacaacgattaaaggtcaagccttaattgaggaatcatggtctcaatagcactaagttatctaggttctcgaatgggaaatagaaataccttagcctagtaacagtgaagaaaagtcgacttggaagctacaagtggacgggtcggctacagatcaactatacggagcaaggatcgcccttgtcacacctgagggtagcacctacacgctgcagtcaaatttagatttaaagcatccaataatgaggatgaatatgaagctctagtcgccggtataaagctagcctgggaaatgaaggctgagcacattgagatatgcagc

SEQ ID NO: 93435 - DNA, 946 bp, Cannabis sativa
gggtgtgatcgtaacagagcatggaagggatagatgaggagtgacatttggcaagaaactcggcatagtgattcataatatggcttaggcgactgcaataatggcaaaagtaagaaagattctcatagcgaaactcaagccaaacaagggtagccatattggtgaagtggaaatcggttccacgaggaaggggttgggtaacatctatttctctatggacgtgaagataagggccccaagtttgtttaagtgaagccgtgtccacttctataaagcggccgaggatttcaccaagcctttgagtgaaggcccgtgaccgatgaagaaaggggattctgaaaacttgaatccaaaaaggtgttgaactaagcatatcgacaatgactgtggatccaatttcaaggagagtcatcacaatgagcttgtaattaaaatgccaatcctagccaataaggacacacctgcgatcaccaaaatagacaaattccatagtgaagaaatttggttccttcaccaggacattaatagaataccgttcaggctacatttggtgaaggcacttcttgaaagcatcttcatttaaatgacgattagaaaacaacttgatcgcaaggaaagcagagggctcttcccctgcatcttcttcaggctcatcaggtatctcaatgagagaatggattttggtttctgtgtcagtgaggttaagagtagagttgagagtttgagagagatcttccattgcaaagtctgtcaaggatgatgtgaaaaaccagaacaaaagtatgtcatagtgaaggacatgaagcacacgagcagcagtaaagggataggcaatgtgggttaggtaagagtaaactgattgggggggatatttatagagggttaggcaaaggtctgcaaattaaatgtaaggatttatagcaaaaggaattaatcaagcaccaca

SEQ ID NO: 93436 - DNA, 758 bp, Cannabis sativa
cccccacaattttgaaaatttatgagtccatatataattatattatatatatactatatactagtgaaattaattttttttaaaaaaaattacaagtataaattgaattcctaatacaagatgtgtatgagataataattatttatgaatttttaatatttttttgataaaataactagtaattacataaaaaaaaaatttttagtatttaatatttaaaataaaagattttaaaaattacaccgtataattacactcaattctcataagagtatgagaattagatagtataatgaaaacttctccattactcttccattacacagttatagtataattgcatgattagacaaacacacaattttataattgcattactttcaattacgaattgtaatttttttttttggtctttttaacaaaccttaaaatttcaattttatttttagtttaattatatgattcataaattttaaaatattgtataaaatatttataaaaataaaacaatataatatatttttctcaattaaaatttacacttttcgtatgcacctgttgacattggcctttgttgcccttaatttcgcccaaaatacgtggaccaatgcgactacgacacatggatctgagaaacataactctgataaatcaactaaatctttttggatcaggagtatcaacgaaaaaatacctctcggagaagatatgaaggctccacatactccctgaggtcagagccatggtaaggcacctcc

SEQ ID NO: 93437 - DNA, 653 bp, Cannabis sativa
  modified_base (526)..(538): a, c, t, g, unknown or other
ttttgttatatggtatattaattttattatatagtatatcatttaattttagatcatgcatgtttagttttattttattatatataggtgtgatatataattttgttaatatgatatatataatattttaatactaatatattgtaatattttattttattttttattaaaagtatatatattttgttgtatggtatatggtttattgtctatagtttaagattatatttagtttctattttattatatataatttttttagtatgtatgcatattttaacagtggtatatataattttgttagcaaaatatatatatattttttagtactaacttagtattgttataatttttttatggtatataattttattactacaacatattgattttcaatgatacgatgtatcaaatattgttatatatatataattatttaatgtagttattcgtttttgttacaatataataatatacaatactaaatttaatttagttattatagtttttgttatagtgagatttnnnnnnnnnnnnnactcgagaccagactcctatttaagggacacgtgtatttaaatttccaatgaaagctgaattgtccgtgagagacttcacgaagtttcaacctcgcccaggataaagccagtgag

SEQ ID NO: 93438 - DNA, 1176 bp, Cannabis sativa
cctaaatttatattttttcgtactaggtcgtgctggtgcatcttgaactcgtgctgatttcttagacaaaaaatccaacccatatttaaagttttattgtggtttatatttatcttttccatttttttattttattagatgagatggtacaagaataatgtagctaaaggtgttaaattaaatcctgaccgttctttatgtccactaactagagaaaaaagtgtagattaaatcataatattaaaacattgccattattatttcaattcaactcttgtttagttcataaagagaaagaagaaagtagatctcatcttcctcacctccaacctacctgaagagatcccaacactacaagtaaatctctctctctctctctctctcttgttttttccagttgtagaaatttcttctgctagaatcactagttgactcagtttttcttgctttgcctttgactttgagctatttagcttaagaaattttgcatatagtaaaggactgaattttctttttactagtgaactcacaattcttagagggaaaaaaattaattaaaagagtatgattgagataaaaattaaaaaaaaaaaataagaacaacaataaaaatgtaaattttatagggataaaaataaaatgatatggaataataatagaaaagataataagaatataaataaaaaaaatattaatttatgacggcaataaaataataagaggttgtgtgcacttataaattatacacaaacttagtatttaactttgtaacaagtcacttttttacgagtgagatctataattgattgaaatttttcactaagaatgtatgaagttggtatgtataatttgtatgagcacatatattattactcattattaaaacttgtgtacgtatcacattcaagaatcaggagtagactaattgcatccgaacaaaaatcagaaaaataatatacattttagttagttacgatatatatttataataaaaaaaataatatttggtataatgattaaattagattacatatatgatagaggttaatggttcaaatctcaacatgaacacttattacacctcctcactcttgggtcggccactgatcacgttactgtgtgtaatattttgagttttaggttaattataggtcgagttatggagtcgaagattga

SEQ ID NO: 93439 - DNA, 940 bp, Cannabis sativa
agaaaccatgatgctccttagacatgaaaaatgatcatcagctacattcaaactcaatagaaatgccaaaatttgttgttgatcacgctcgttaaaaagatctttaacaatatataaatctcattctttcgtataagtacacatcaacgagctcaccatatggcccaccaaatattaggcatctgaagtaataaaaggacacacatcatccaaaagtcatggctaatgcaaaatatcaaccttcccaccaaaacatattgcccaacgaacctcatacttaagaagctcctacgattcaaagatgctcttctacacaaaacttgaattatttccaagggatgctaaaagaaaattacccctgggaaaatagccaaccttatataatctactcaccaaagagtttgtttttgtccgtaaacgtcacccttgctttcccaacattacaaaattaaagtcacaaagattataaaagtccattccacttgtaaacatataaaattaataattaataaacattatcaataataatataaacatatcttacataatgtcacatttaattacagtttcatatatttttataaatacatttttaaataaataatcaacatgttcaaaaaaaataattaaataaacataaatactatacttatttcaaaaaaaaacataaatgttttacttttaaaattataaacttctaataaataaattatacttattttattgaacattatcataataaacatactattaataatatcattatacacattaataatactagtcaaatatttaataaatatatatacactataaaatataaacaaaatttacaaatatatttgtatacatatattttctttaatattaaattttaataaatatatgattatgataatatataaaaatataaatataatttatgtatttatatattgac

SEQ ID NO: 93440 - DNA, 659 bp, Cannabis sativa
aaatattttttccctctaatcacaatgatttcatactactaagatgtggatattaagattgttttagcgttaatttttgttaaaatgacccattaattaaaaaattcaaaacgttctacttttcaggatatattttaataattttttccttactcttatactcgttaatattctctaaagatctcaccctggaaatctcgaaaaatattgaaattttagagggacgaagccaagagcgttacacattacttttctattggaaaaattgagacaaaaagtagttttcaagcactaagaatcattttaattgaaatagtaaaaatctcacatttctgatagtggtatacctttgtgaaatgtggctcggacccatctcgaaatatttttgccctctagtcacaatgatttcatactactacgacaagaatatgaaagttgtttttgcattaaatatggttaaaatgacccctaattaaaaaattgaaaacgttctactttttagggtaaattttaacaaattttcgttactcttacattcatcagtgtttacttaaaatcacaccatacacatctctaaaaatcgtcaaatttcactgggaggaaaccaagagcattgtgaatcacttttctattgcaaacattgagagaaaaagtagttt

SEQ ID NO: 93441 - DNA, 563 bp, Cannabis sativa
aaaaaaaaaaaaaatctttttgtttttttattgaaaaaacaatttttttaaaagcatcaaaatgtggaaactaagttctacctaccaacactcaagaaccgaaatcagtcaacagacacagcgcaagccgtgagttcatgggcaattccgttcaggtggcaaggcacccaaaagaaacaaagctcccaccaaaaccagcaaccttgctaagagcttcattaaaaatgttcctctccctccaagttataaccctctaggctctaccattactttacaatctaaaaataagacaaatagttagactaattcctacactacgagaaatgagaccttttatcccactttttatacttaacaaaaacaaaatgtgagctaaaagatagttgaaactttctaccccacttttagatttggcaccttaaagacaacagctaatttttttagacaagggccctattcggttgaacaattaaaaaaaatcgaaaaataaaaaatgagttcaagattaaatttttattgggcaaccaaacaagccctatataacttatgtatatcaaaggact

SEQ ID NO: 93442 - DNA, 621 bp, Cannabis sativa
  modified_base (49)..(50): a, c, t, g, unknown or other
ttcatatttagggtgttaaacaagatacttctgagtagatctaagatcnnggtaaaataaattccaacagcttaacctagaagtcatacaactctccatttctctcattctctttctttcgaaccatcaacccaacaaggaaggtggtgttttctttgctgaaatctctggattggtttaaggtactctaaagcaaggtatatctctttagcaattctatttaagttttactcaagtttaggttgtgttttgagtgatttaggttcaaattaggggcggtgtgtgtgtgttcagtttgggatcattttctgaagttaatttatgattatctttactgttttgagcttaattagagggttgttgtgctatttgagttaattgaaattcaagagcttaagatggagctctaatggtgatttcttggtttaagttgtttgttatacttttagggttttagggttcccagcacagaaccggtcgacctgttctaagggaccgttaaaccggtcgactggttggtacccaggaaccgaggttccaattgggaaccgggattccggttgggaaccggtctgccggttgggacttttttccgaaccctagttttccctatttttgtgt

SEQ ID NO: 93443 - DNA, 500 bp, Cannabis sativa
ccctttctctctcatccaagctccctctctcctctgctttctccgtctcgctcaacccccagtggcgtcagcagtctcgtcgcctagtattgattgtctccgctggtcttgatgccaagcctacgatccttgtcgctaagaagctcggtgcggctgggcttgatctgctcaaagactttgctaacgttgattgctcgtataatcttacccctaaggagatcggtgttggctgtgcgtggagctgggaatggggagtcgagtcggctagggtttctagggtttctcttattaccaatcttcttccgcttcgtaccgcgacgatagacagaggtaatgctgggtgtagctaaggcagtggccaacaaggagggcatgagatcactctcgctggttcgaggtgatggagccggaaggtcttctgggtcatcaacttcgccttcgttttgattgagatcaaaagggttttggcgatttcttgggtcttggtgggtctgatggtg

SEQ ID NO: 93444 - DNA, 580 bp, Cannabis sativa
atgcaacataaaatgcgatttctgatctttattaattagtaaatctgattatattgagatgatttttatttatggcacaaaacccaatagcctcctactcccatacttaattaattttttcaggaaattaaatggccagaaattaaagaacaaaagattatagaatttctacatttttaggtgtacatagttgcatatcctacccaccaagtgagttgggaattggagtgtctccaaatttctggtcactttttgaaatgcagctcaaaattttaaagaaaacattttttttgaatagttcatttgctttcatttaatttgtgtttggcccataggcgtacatgaaaagggaaaagtaaaaaatgaatttaaaggaaaagatggttggatttggacacccccagtttactaataatatcgacacaggtggtctgcattccaagctcgtggaatctctaatatgtccagtgttttcaattgatatgccccattacgtactttgtgccagattttgtaaggtccttccccgatgggtcctagaacccccacttttggctatcgagaggctgggaacactctt

SEQ ID NO: 93445 - DNA, 726 bp, Cannabis sativa
ttttttttttttttacgtttttacagtttttttctttttttttttacaaaactatagagattgttcttagttttttttgggaaaaaaaatattattttagttgctgttgcaattaaataacgtaaaaacaatagttttctgtaaaaaaaaaaaaacaagtgaaatcctgtaaaataaattcgtaaaaatgtaaataaataaaaattaaaagtccatacaaatataaaaacaaataaataaattatattttaagtgttgtgtaaatttctcaataattttttcgaaggcccactaaatctcagggtacaattgaaacttgaaaactaaaaatgaagcgattaattaattaaaagaacactaatgcaatgcagtagtgattttggataggaaaatttgattttttatggttacatttggttaaaaaaaaattctaaataaataataactaatatttgtaggatatgacaacttttatgatatccctaaaataccctctatttacatcacccctatttacataatcagaccccccgtcagaccacccatcagaccatatctgctaccaattttttttttatgtttttatacataaaaaaaagaaatagcatcaggtgaccatcggacgactatcggaccccatcggatcagatctgctaccaatttttttttatgtttttgtacatacaaaagtagcatcatgtgaccatcggaccccatcggactacc

SEQ ID NO: 93446 - DNA, 629 bp, Cannabis sativa
caaaactaagtccataatttatctatataattaaaccataaatatgtgtcaacttgatagaacatcccaaatataaactcccactaaaccaacacaatcttaaataatacatacatatatgagcaacaagctcctagaaagtcttaagtggtatatccttaatgatctgaatctgaaaatatggagtttatttttatatgttctatagacaccttattactttgaacttcattttaataacaaatagctcaaagttaatgtgcctttgaccttgtagagctcatgttgttactaaaatgcaacctgattgatttattatcacaacatatatcatcaagtgtgtaagtccagaaccccacatcatcatcctgagcccaccgtcatttctgggcccaagacagataatttggacaaccttgttaacaaattcaaggcctttttatttccttagaagagagaggccctattggtgtggactcacaatggttccaagtgagccaaaaccctgtgactatgggcttaaaaaagaggaaggccatcgataatgtttcccctattattgggcccttatttaatgacccaaatccttcttctaagggagatacgtccactttggagttggcttcact

SEQ ID NO: 93447 - DNA, 678 bp, Cannabis sativa
ctcccaacgacgaggtttcacgcgacacttcctcactgtgttgcttttcttctacttccaaggccacgtatcctcttgccatagttaaggcccttgcgagggataggccagggttcactattatcgccttctttaattcgaaccatgtaccaacccttgcattaacgctttcgttgccactgaatcggtgcatttcgggatactgacgtattcttcgctaaatctgttgataaaattttccagaagttcgtcgaggcgctggtgtattaacattaggtccgtgtccaccttagcggtccacacacttatcgcaaaattggcctagaatctcaggatgagatcctggtacgaatttactgtgccggatggtaggttgtggaaccaacgtagagcgagtcctctcaatccttgcgtgaaggtcttgcacttgattgcctcaaagtcctctagcgggacagagatggttaacattttctggttaaactgacatacgtatttcgaggggtctcctgtcccgttatactctggtaatttaggggccacataatgctgagggcatccacgcgcaggctgtgattcccaaagggtgaaagggttgacccctccattcgagcccattcgttgtgtactcccatctggctttttgcttccaatgctattaatttgttccacatcatt

SEQ ID NO: 93448 - DNA, 747 bp, Cannabis sativa
tatacttaccagctattacctacggggtaaatgccctccaaaagtaacaaaccatgttgattataatggacctcctgaaaaaaaaagaataaccatgcacattatgttaaaaaaaatatgatcagattgctttcaaaaagctagaaatcaagataacaaagcagtttttacatagacttttttgtaaatcctaactcatatctagccaaactgatatggtacaaaaataacacacaatattttttaatgaaaaaagtaatttgtgaaaggaaaactaaacttattgggattttgaactaaattatgtctttcatcaaagaatataattcacactcaatggtcgattatattctgtcaagaacccaaaactctagtaactaaaaaattaatataaatgaagaattaacaaaataattgaacttaagattaaaaaaggaattaataatatataatgcacgcaactctttaactagtattactatacacttaatgatttggctccatgtttgatctattttcaaaagttgctgagttcaaatgtgggaatgcatgagattgaggagctttcaagaacttcatgggtacctttgaaccattaatttcaccattcttcaaatcacacaaagtcgaaaagcaaaaaaatagtaagaccaaatgacagtttttggaccatataacatgttgcccgtaaccatgaataaaagtgaaccaaactatcgctccagtagactaacaaaacatgatcat

SEQ ID NO: 93449 - DNA, 517 bp, Cannabis sativa
taatgtccaaggtcatgggttctactcccataacactcttcttttgattttttttttatatattttttagggccccaaaatttaattcgtcttgggcccatatatttttcagggccggccctgactgcatcacaccatattttcgcagtgtgatttttgtgggtttaaaatctcgcggtgtggttgtagtttgagaaattacaaaaactgcatatgcagtttagtttgaaaaaaatatcacaaccggcacaacaaatacctttagaaaaaactaatgtagaaaatgatgatgaaaataaagaagaagaacaaagggagaaagttgaataaagcggtaacatgtttagagttgtggaacaaaagaaaaaaactaacatcaacgtgaaagaagtggcaaatgtcactcaacatagtcaaaaagaaaatttagaaaatcaaacaagtataattgaaaactaacattgtacatagtataaaagtaaattataaagtgtcacagtataattgttaaaaaaag

SEQ ID NO: 93450 - DNA, 680 bp, Cannabis sativa
gactttgactccttcctttcccatgccaaggctttctttgagtagatctgcctctactcagatttagttcaccattagagccaccattcctttctaacttcatctctgagtcctttgattttaaggcagagataacctcatcaagagtgatagaggttcttccatacttaattgttgtttttacttctctgtaagtttctggcagtgcattaagtatgatgatggcttggttctcatcactgagtgcctcattctcccctgaatttgcaacttcaatatgcattctcaaaaactcatcaagattctgatctaaggttttggattggttcatcttgaaaccaaaaatcctttccttgagataaatcttgtttgtcaaagatttatattgaaattgctcttctagctttttccaaatctttgatggggtttcctccttgtctaccaatctgataattgcatctgacagattgaatatcaagattcctgtagcagtttctaagtattcttcctgctgaatctttgaggttccttctggccattcaataggttcatctagcacccttaacaatttttgttaagctaggagagacctaattttccttctccagattctgtcgtaacctgtaccatcaaatttatcaatatcaacttttatgttactcatattaataaaattgaaa

SEQ ID NO: 93451 - DNA, 575 bp, Cannabis sativa
ataaaacaaaaacctgcaacacacatgttagaaataagtaaagagaagaactccccctacaagcatgcataacttatagcaaacataaaaatgaaactaaaacttaactccccctcaaaataagaaggttcagagttacacaaaacaagatttttgagtatctactctttccttttgtgtctttcaaagctgctaaagttctaaaaacactaaagaaaaaaaacaaatatgacaaacctaagactaaagaaagtatcaatgttcttagaaatggagacaaaaaattaaaggacaaaaaaaattgatattcaaacacctttggaactatagttttgagagagaatacatgtaatttttgaaatatacaaaaaaagaagagaagagagtagttttgacaatgaaaacttagattaattctctcttctcatcactttctttatataggcttctcttaggcagtgacggactaagaatttttactttgtggggacttatttattattaaaaaatatttatacttatattataatcactcttactagatttatttgattttgtgggggcttttctactat

SEQ ID NO: 93452 - DNA, 6041 bp, Cannabis sativa
  modified_base (5703)..(5707): a, c, t, g, unknown or other
agaaaaaagaagacagattttcaatttgcaagctcagagggcggttagtggtggattaaggagatgtcaggaggtggatgtagcatagtatggttcaggagagatctaagggtagaagataatccagctttagcagctggtgttagagcaggtgctgtgattgctgtctttgtctgggcacccgaggaagaaggtcattactatcctgggagggtatcaagatggtggcttaagcaaagtttggctcatcttgatttctctttgcgaagttttggcacttctctcatcaccaaaagatctgctgatagtgtttcttctcttcttgaggttgtcaagtccactggtgccaaacaaatactcttcaaccacttatatggtcagtattttctttcgttatatatttttcacagcataattaatcagcgtggaacttggaacttgtgtttatcatcaatctgttcagttttaataatctcgtatagatttgtttcatttggttagtgaatctccaaatcttgttttactttcttattgaataaccaaatatatcttgttatatagtatttgatgaaattgttcatggactccaatgttctttctttgattttgattaaatattaactgtttgaagatttgggtgtatggtatttcgcttaaattgaaaagggggcattctgtaaacactgcttaaagatgtttagctttttcattctacaatttttggaactaaaaagaaaaaccaggtgtgcccatttttaatgttttgtgaatgtgtttgttatttcagaccccttgtctcttgtcagagatcatcgagcaaaggaggttttgacttctcaaggcatagttgtgcgttcctttaatgctgatttgctgtatgaaccatgggaggttaatgatgatcaaggccgcccattcacaaccttcacatctttctgggagaggtgccttagcatgccatatgacccggaatctccacttctcccacctaagagaataatttcaggtttgaacattgattttatctttttatgttctttgcttacttctacaacagtttcaagtttatgttttcaggttgtgatccatattttcgatgttgttgaatttttttaggtgatgtatcaaggtgccgtcctgatacactggtgtttgaagatgattcagagaaaggaagcaacgctctcctcgctcgagcttggtctcctggttggagcagtgctgataaggctctcacaaatttcattaatggaccactcattgagtatgcaaaaaatcacaagaaagctgatagtgctacaacttcacttctctctccccacttgcattttggggaggtaagtgtgagaaaagtgttccatcttgttaggatcaagcaagttttgtgggccaatgaaggaaacaaggctggtgaggagagtgtgaacttgttcctaaagtctattggtctaagagaatactcaagatacatgagttttaatcacccatacagtcatgaaaggccccttcttgggcatctaaagttctttccatgggttgtgaatgaggattatttcaaggcatggaggcaaggtagaactggatatccattggtggatgctggcatgagggagttgtgggccactggctggcttcatgatcgaattcgggtggtagtttcgagcttttttgttaaagttttgcaacttccttggaggtggggaatgaagtatttctgggatacactcttggatgctgatctcgagagtgatgctcttggttggcaatatatatctggtactctccctgatggcagggaattcgaccgcatagataatccacaggtatggatattaaaaattccagagaagagttgaaacacaccatattcttttgagtttagatatatatactctctagagcaatgaattaaatatatgatttcatgtttatttgttgtatacagtttgaggggtacaaatttgatccacatggagagtatgtaaggaggtggcttcctgaactttcgagattgccaactgaatggattcaccatccctggaatgcaccagaatctgtactgcaagctgctggaattgaactgggattaaactaccctctccctattgttggaatagatgctgcaaaagccagattggaagaagcactatctgagatgtgggagcaagaagcagcttccagggctgcaatagagaatggaaccgaggaaggtcttggagattcctctgacaacaacgacggtgtgattgccttccctcaagacatacaaatggaggagaaccgtgaacctccaaggaacaatcctcctcctccaacaactcgacactatgaagatcagatggtcccaagcatgactacttctttgttcagggtcgacgaggaagaatcctctgtggattttcgtacttcagcagtagacagccgagctgaagtgccaacaaatgttgttgtgacacaggaacgaaggagtgaagtgttgaaccgtggacctgtgcagactatcactcagccacagtacaatccaactgcaatgcagtatgttgctgaggattccacagcagaatcttcaagtactactaggagagagcgagatggtggtgttgttcctgtttggtctccttcagctaccagttactcggagcagtttgttagtgaagaaaatggtattggcgcaagttcttcttatttgcagagacatcctcagtctcatcaaataataaactggaggaggctatctcaaaccgggtgtgaactattttctcttatctgaaaacaaaataaaaatgcgcattatgtggctgctttttgctggattagtctgattgaaaagtgattaatattctctcaactaataactttttttttcttttttttctttttccttatttgatatgtaaaaattaggtgaagagaaagaaaacatccatacttgggatagcaaaaaccgcaggtgaaaaatgcagtgttgactgtatctaataggcgacgcgacgtaagaggtggaagtttgctcgagatgggattaagcaacgcatcggacctgtttcttcttcttgttggctagtttggcctggaacggcagttgacctctaatccgtattatctccttagtgtaggaagcaccggggcaatccttttgtcccttgttgtatcatattatgtagctttgttgtatagtaaaacgttgttctcataagagagagtttaggtaagtaaaagatagaatgtgtagtcctagaataaactcaggcttgtgctttaatccccagatgttttatcgtgacgttttttatttaagtatccaggttttcttcattcgttttgcatctaatttattgtcgttacttgtttcattaagcaattatttccatgaaaagtattgcattaaaaaaaaagtaaaattacagatgacatttgattgcaaaatggaaacttttaattctaaacatcatcatcaaaaatctaaaccccagaagggtacaatataacttattcattaaatctaaacatctttttggtttaactttaaactgtctatggctcagcctgcgtacacatatgattgtttatacttttggtggtgctaccagatatttctggcttagggactctaacaatgctgtagaccaatgtggcagccatggctccaagaataggagatacaataaagacccaaatctttgtatagatccccaagacaatagcagggccaatactcctagcaggattcattgaagctccagtaatgggtctgcaaaaatgcagtgttgtcatgtgaattataccattacatactgaacaaataagacaggtttagtcataattcttgattagcacctttattcaaaactagtaatatctcaatttttttcaatgatgattaagttatcctaaactaaattaagacattatttaggttgttagattataaattatattataaaaattatttaatatagtcataatttagtggttaaaaaaatgaaaaaagttacccagcaacaataacattgaccaaaagtacagctccaactgccaatcctgaaagatctttgcactgtattttttttttcatcaaaatggaaaacaaaaataaaaagcttatgttaatgtgaatagtgaagtagtgaagttactgcaaaatagaccaatcaaaacaattcatacccctctgtgatcagtggcaacaccacagattgtgaacatcaaaaggaaggtgattatgaattcccatgcgatggcttcaaggtcagtagttggagcagagtagtgagtcattattgtacgaatattattactatcttggtcattgaataaaactctgagggtcaggctagccagggttgctccgaccagctgtgaaacgacatacataggtacctatacgacaataaaaaactttaatattgagaagacagtgttattagttatttacatatgaatgaatgaatgtaagtgttgttgtggtggtcgatctcacatgtttcaaggggaattttctggcaacagccaaggcaatagtgactgctgggttaaaatgggcacccgagacatgcccaagtgcataaatggctgccattaaaacaagaccccaaactattgctattcccacaattgttaaaggttgtattttgttgacaattgcagcagcacagccaataaatatgagaaagtatgtaccaatgagctctgcaaccatctacttacacaaagacaagtcccaccattaaaactaaaatatataaattaaattatagtatgaaaaagaaaagaaaaatgttaccttttgaaagctagaaggaggtttctcaacattaactgtgtattgttggaagcccttagatttgccttcctccatgaaagattgttcaatggataattcaagtttaggggaaggcccaacaagaattgaaggtgaattggccatttttctcctttttgggttcttacaagttaaaagtaataactgttactactaatgctactaaactaaattatgtgaaatgccacccttttggatatattcttatatgctaagtttctggataaaacaaaaagaagcatgttgttatgtcttgctaagaataattacttgagacgttaatgactaaatcaacaatgaactaatttttggatgccaattgagctattatattatgaataataaaaaaaaaagtgacggtgtagagattaacaaagggcatcaaaaatggaatgaaacttattattatttatgtggatgtttcatttgtttcttacattggtgtctagttataagaataagacaatgatagacaaatagttgtgcgtatagaagttctcatcttgatctgaatttctttgtcacatcttgggttggcctcattctctttggggtttaatcaagcacttaaatagtaatagatatagtctatggactctataaagaaggggccggctgctggtgttgattgattgacaacatctgcagcatcttcaaaggactactaaaatggtgatatattgatgtattttagcatatcataaaataataatcgggcttttacactttaaaagagttttttttgcatttttacagaattctacatacaaatctctattgcaactaacaaaacaacttaaatcgcaactaaaaatcgtataacaactcacataaaaaccattagggaaaccactttagaaactcaaatcgtaaatttaaannnnnaaattaaaaaaaaaaataatacatgatttaatttcccataatattattagtactaatcttactaaaaattttatcaaagtaaaagcaaaatataacgtaattaaatttaccacagcaataaaatttatatttctatttaaaaatataagtaattacttatattatgcccccaaagaaagcatgattcacaatacacaacactcatccatccacgatttctctcttaggtttttaataaatattgctgcttttattaaaaattcagagagaggaaaagaatttttttattggaattgaattaatgatacaatgaagaatcatatatatatatata

SEQ ID NO: 93453 - DNA, 1027 bp, Cannabis sativa
atatacaaagaatatgaattggtgacggcgattctcaaatatcgcagaacagaatgtgatacgatgagatagaatgcaatagaaacaaagacacagggaacaggctactcttttaacagtcaaagtgaatccttttattttgaattaaagaattcggaatcaatcaaatctccccaagtaggattcgaaactacgaccaatcggttaacagccgaccgctctaccacttagctactgagaaataataggaggttagatctcaaaaaattgtagaaaactgaacaattatacaatcactactagataaattttttgagtcccttttgtgttggacataatagcctgggacataaaaggggtatttttctagtccaaaattattggactagaaaaacatttctagtctaaaaatgttggacttaaaaaggagtcccacaacatgaaacttaattgttggaatagaaaaatatttctagtccaacaatattggacttgaaaaacgatctcacgctataaacccctttctagtccagctaagttggacttgaaactagattttttttttttctaaattaaatgctgcaaaattaattttattttttttttatattatattatattataaataattatttatattatataatatttttcttttcaacaaattatttataattaacttacctcaattaatacacataaaaaagtataaatatatatataaaaaaaaattaaactattgtagatatcacaaagtttagaatatttgataaagatatatacataacaaaattaacaaatattgtattagaaaaaaagaatatatatttaactgatattgtaactaaatatttgtcatgaataatttttttaaaaaaaattaactaatgacccataatacgatgactctgcaagtgtcgaagcatatctgtcgcccattcttctctcatctcgtcaatcatagcttttagatatggctttttgtctattagctacaaaatataagagaaataaattaattatataa

SEQ ID NO: 93454 - DNA, 1167 bp, Cannabis sativa
tcatgcatatgcctcaaataggaaatcaaataacactatccgatcattacaaaatcaggcaggggctgtttcaacatcaaaaaatgacatgacagacattatctgttcctactttgatgagttgttcacaactacaggaactgatcatgatgcattaaatcaggttttacacactattcccacttcagtaacaaccgagatgaatcaacacctactgactcctttcacggctgaagaggttttgaatgcattaaactccatgagcccggataagagccccggtagtgatggtatgtcgtcaatgttttatcaacactattggaagattgtagggctagatgtaactaatgtggtcttaaaagttttgaatgaggatcatgacatgagtgcattaaacaaatctataatcactctaattccaaagatcaaaaagccgaaagctatgggtgattttagaccaatcagcctctgtaatgtgatatacaagctgatttctaaagtcttggttcttcgattcaaagatgttctcccgtcagttatttcagaatctcaaagtgcgttcctctccaatcgtctcatcacggataatatattggttgctttcgaacttgtccaccatcttaaacataaaactcaaggcaacaaaggttattcagcgcttaagttggatatgagcaaagcatttgacagagtggaatgggattatctatctgcagttatgggtaaaatgggtttcgatcagagatggatctctctaatcatgagatgtctttcatctaacagcttttcatttcttctgaatggtgaggtcgtgggtaatgtatggccaacaaggggattgcgtcaaggcgatccgatgtcaccttacttatttttgatttgctcagaaggcttctcacggctccttcatcatgaggaacaattgggtcatctacatggtttaaagcttactagacatgctccatcaatttcacatctcttatttgctgatgatagtcttttgttctgtcaagctgatcaagcttcagctttagcaatcaaaaatgtccttgctgcctaccatagagcttcggggcaattattgaatactcaaaaatccatcatgtcattctctcccaacacttcagatgtggcgaagaatttttttagtcaaatacttggcatgcc

SEQ ID NO: 93455 - DNA, 574 bp, Cannabis sativa
tttgtatatcttaaacacttgttcccatccctatttttcaatacaaaacctcagtctctcaggtgtgatatctgtcaattctctaagcactctcgtcagtcgtcactctttcattccaagaccacatcaaccctctcacccattctcactcattcacggtgatatatgaggaccatccaaaattcaaaatatcagtggggcacgttagtttttattactagttgatgattatagccacctaagtttgacattcctcatgaaagaaaaatctgaaacaagtcatattttctaaaatttccacaaaatgatccaaatttaattctaaacaaacatccaagtgttaaaaatcgacaatgctcgtgacttctttaatttgtacttggatcatatttgcataccaatgggattgttcatcaaagttcttatgtagacacaccacaacaaaatggtgtggctgagcgcaaaaattgtaatttactagaggtagcccgatctttacttttttcatcccatgttccaaaaagattttggggtgaagcagttctcacagctacctatctcataaatagaatgc

SEQ ID NO: 93456 - DNA, 561 bp, Cannabis sativa
gatattagcgacaatttttagttatatgctcatgtctaattatgggtccaagttcttaattcctaaagaacaaatactaaaactctcttcctaccttatggcaactctatcacattgaaggctcattgtggtactggtactgtaccttaaaacatagggtaaataatctaaggcacgaacagctaaatatacttaagtattaaactcaatttgaacagcgtggttaccaatctagtccattggccacaactaacaaatttcaacactgaaaaattaaaaagaaaaaaaactctttacagtggagacaaattaagaaacctacccggtcgcggtgttggagaccagaatcccttcagtgatgaggaatccaccttgggtggatctttgcgtgtagtaattttatgagagttacctggtgcttcatatttatcaagataaagaactaagcagttaggtaccttaacattacaataaattattactataatctcaatctcattctcatagtaagtaatttagcatgggaaagaaggcgcatatatatacaaaaaatacacaaca

SEQ ID NO: 93457 - DNA, 799 bp, Cannabis sativa
  modified_base (349)..(351): a, c, t, g, unknown or other
tggccaatctcgaacagcttcgattttggctggatccaccatgatcccatctttatccactatgtaccccagaaatgagacacgagataaccagaattcacgctttttgaatattctagatataatctgaaaaaggatccatgaccttgacggccacatcaatttccttgaaactttctattaccccctgatgctctggaagcctcagccttccatttgtgatgagggttgccactgttggtccccttactgatattaccactagcaggtggattcgatgccgtgacgacatcctttgcagtctgctcttttgctacatgctgctcagcctcctcagcaatcaagggtnnntctaccactttcttgtacaaagtgtcatgtgaagtggtaattttcaagtcccgactgattgtagcattcagtcctcgagcatacttctattttctagggaaatcgataggcaccagatcaccagcaaattttgacaaccgatcaaactccagagtatactcggccacagacatcttttcctgagtcaacttcacaaaatcttcttaatgtgaagtcctcacagcaacattataaaattttcatcaaaaagtttcttgaactcttcccatgtcatcacactgacatctcgggtctgacccattatgtcccaccagacacagacatggtcttgaaacatgaaggccgctcaattcaccctctcagttcccgccacccccatattattgaggatacgggtaacagtgctcatccattgatcagccttaataatatcaatacctcccagaaa

SEQ ID NO: 93458 - DNA, 915 bp, Cannabis sativa
aaaaaattacattatagaccaaaagattgaaaaaatttacaaaaatacattaacacaaaaaaaaaaatttattctttaaacttttttatttacaaaaatacatcttcagtaaaaataataaactattttcttagttattttatagtttattaatagttatcataagattatttttttggttattttatattgttttatagttgatttatagttgctgtgattgtttttagtaattttttttttactttttgttgagtaaagtgtatttttgtaattgaaaattctatgctgtaaaattataaataaaacataaaagagtagttttattgaaaaattttccttacttttacattgcaagttgtgttgtgagaaaaagtaactgcagctgaactttaaaaaaaaatgaactggtgttataattacaaatatagcataattttttttttatatatttttaattatttctttccaaaaatataaatttatatgcgtttgataaaaataatttaaattatacttttatcacatgtaaaaaaaaatcaaaatcccaaaaaccacaccaccaccaaaccactaccatttaccaccaccaccaccaccatcaacatttatgtaaattcaaacaaaaaaaatcaattttgaaaaaaaaaaaaaaaaagaatcaaaaccccacaaccaccacaccaccactaccaagccactaccattaccaccaccaccaacatttctctaaaatcaaacaaaagaaaaaaaaaatcaaatttgaagaaaaaaatcaaaatcccacaattttttatctttgctttatttgaactcattaacctcaatcgaaaactttggtttcaccaacctcaatcattccttcttcagtccatcttggttgtggacgaacgactgtccatcggacttggatca

SEQ ID NO: 93459 - DNA, 1353 bp, Cannabis sativa
aattggagagttgttctttatgtcggagtcttcaatgagcagggagtggattcttgactccggatgcacttatcacatgtgtttgagttgagagtcgttttttgattataaattagttgatggaggtaaagttgtaatgggtaatgatcattcatgtagagtcatttgaaccaagaaggtagccatcaaatagtatgatggtagaattaaggtgctgacgaatgtaaggcacatcttggagcttagatgaaacctcatatgtctgggtgtgcttgaagatgaaggatacaaatacaagtccatgcatggaatcttgaggatcactaaaggttccttggtagtgatgaaaggtgaaacgatcaatgatttatacattctctaaggagaaatcccaaccggtgaagcaagcatggcaaaagaactagaattcaatatgcaactgtggcatcacagacttggacatatcagtgaataaggcctcaaagaatcgcacaaacaaggtgtttaccgagatttttggaaaccaataagatacaacttaagaaagatataaaatagtaaataatagacatgtaatttttacgtggtttgtgcgttaacaatccctagtccacaagtctatggtattagcctttgaggtgagtgtttaagtaatacaagtgtttataataaaaaccctagctctgtatttcctttgtttctcttgaagaagaagaaagttaataggaattttagtagatgttcggtaagtatgaaattattcaccccttatgcatagaaaatgagggtatttataggcttacaggttggtaagggcatttctttcacccacctaggattttgtactactgaatattgtaagtgtaaaagaatacaactgtaaatatgaccgtctggcattggagaaccttcttcatcgttaggtgcataaaggcagtagttaataccatttggataaaggtcacgtgttgctcaaaggttttacttttgcagaatactctctagacaggatattgggcaaactgcatgtctagaggtacgtacgcgcactaccatgacttggcatggggggacaagattttatcctgtgttaaaacaaggtgtaaccgttggtaggtcaatttccatatgaatctgacatggctatctaccttgaggtagcggttaagatccatgaccagtacgtagaggtcttcacttggaagccacttactcaaatcgtgttctaagacttctcaaagctagggatgattatggctctgctgtctctaggagatgctacttgtgctgcggatggctctccccatcaagtatccattaaacccctcctagattatcaatattcctccgcaa

SEQ ID NO: 93460 - DNA, 631 bp, Cannabis sativa
aggagctcaagtcatgtttcactagcttagggaatcaagcccacctcgaggagcaagatgaaatatataggagctcaagtcatgttttctccatgccgctatataaatggggcatggagaagacgtctgcaagtggtctggaaaatatgtgtcaagggctttaaacccattactctctgattatgcactgccccatgttcctcatgacagctgtataatgaagaatcacatcaatcaccaagggcaaggacctatctcacctaacatctagggaaagcctatgtgttgcctaccaaacagacaaacatgccctattatccaaattcaggagcttatgcaaataatgctaaaattaacacagtggtaattttttcactatctttatgaggctataaataccctaactacattttgagaaaggtgtcaaaaaaatgatgtaaaaaccctctgtaaagaactactacattaatatcagtcactcgtgaactaaggtttattagtgccaaaatcacgtaataattcttcgtattaaatttcttctaatcattaaattaactctaattaatagttgctgaaaatcttggtcaacattttggtactttaatttggagttgtaggaagctttccgtag

SEQ ID NO: 93461 - DNA, 543 bp, Cannabis sativa
tatgacaatttatttccacacattagcgaactaactctaataatttcctatcggagatgggacgggaaatcccttaatggggtgggtatgagacagggaatcccctaataaaaaataaagtttataataaaaatttaaatataaaaatattaaactacattaaaattaaaatattacacattaattattattcaataaactaattattatccaaaatttaatttaaaatttataaaagataatactaatatactaaaaaaaatacaaatacaaatataaattataaatataaaatattattataaatataaaataaaataagaaacaagtccctgtcacggcagggagcgtcaccctatccacaccccgtttatcaattaggaacaaaaaataattctcgtctccatcttattttcattttgacggaaatttctcaccctattaaaaacaggtccctgcaggccattcggaaaaatatgcatctctaatccgaatatataaaaataataaaaaaaaagggggtgaatatttttttttttggaa

SEQ ID NO: 93462 - DNA, 588 bp, Cannabis sativa
ttattctgtatgtcaaatcatgtcttctttcttattcttcgtttatcgtttttgagagtttcagcgtccaatgatttgtccccttcttttttgtttccacagtgtacataatatacgtaacatgcatgataacatcgataagagttttaataaaaagtagaatatgtaaaattcaatattcgactattatatcatgaatatttgttttggcatgcccatagcaatattggtatcgtatttgtttctctatttattacaaatagtctcaaataataatgtatgtgaaaaataatacgtgtttttatactatgaaatttttaatttttttacttttttactgtaggtattttttttttaaaaaaaatactgtatatgttttatactgtgtatcgtgttaagtttttattgttgttctacatacggttgttttttagttgttccattgttcttttagttgttctattttgttgtgtttacagttgtaagaaattctgtgacactaaaattataaatttttacccaaaattcactatttttgtaaaaactccaaaataataacatatctaggattaatagattactcttctt

SEQ ID NO: 93463 - DNA, 1107 bp, Cannabis sativa
ccgagatccaagacccctggactgctccatcctaaacaaatggatcttcaccttcgggttgaaaagtcaccattttctgcttataatctatactggccgaacatttgaacaaaaatccattcccgttatcacgtcaaactcagttaattccaattctataaggccagcgctcaactccctatcttcgatcctaaccgacatagacctaaagcacctagtagagataaccaacgccccactaggcattagggttccaaaccctatttctaaaatattacaaggccttaccgaaaaagattaattgttcacataactatgtatgaacgtatagctcccgaatcaaacaacacaaaacaaaagaagtcgtttacagggagctgacctgccactacagaagggttcactgcatcattcgcttgaacattagcatacaccggagtaggaacaaatatcgcttcctgctcttgttcttctttctccacttgtggatcaatttcttttaaaatgcccaaccataccacattgaaaacatacttttcggttacattctccgggatggtgtttcatacaacatgggcactcagggtaagagtaaccctggtgtcctcctttggcttgaaaccttcgaaaccgcttattctgtcttgaacccactactgatgatgtaggtttcctcttccgcccaatcagggagctcctaccactaccatcataacctgggatcaggcaggtgatatcctgaccctctgccataatctctagaggtctcggaataatttctcagggccttcagcccaaaaagcattcctcatatttgaatctctctgaaagactgaagattcatgcttcgctggtaataccgaatcagaaatgattggcatatgcggtaaagttactacaggagacctttgttgcttcaacctctgaatctcttcttcatgtcgttgaatcacagcttccatttttgcaaacctttgctccaaatccaacggagcctgtgattgataaccatcactcctgtcgaaaaccctccaaggactttcaccttggttacagggacaacttggactccattctctccaaccgttactagccctggccatttta

SEQ ID NO: 93464 - DNA, 606 bp, Cannabis sativa
tctctctctctctctctctgaaataataagacccccttcgaccactgtctgacccaaagcgtcgaccatggtccccttcgacctagagccattcaacctagtctccttgacctagagcccttcgactagttcccattcgacccatacccagatacccccactactacaaatattaaaattcgtgacagtcttaaaaacaattttttttcggggaccgttgctaaaaaaattaaataactatttaaaaccgtcagaaaaaatttagtattcctgacggtttaaaatcgtagtaaacaaaataggcaacattttttaataaaatacgatttttttaatggacccttatacccgacagtttaaaaccgtcgggtagactaaccgtcgcctatagtataggtgacggtttttaatcatcgtgtataagggtctattaaaaatcgtcacctatttctcgccacatttcccacgtgcccgcttattttttttttatttcccacatgcccacctatttcttctccatttcccacaccctgaaaagaaaatcttaactctccaacaccccacccacgcctccgcaccatcgccctcctctctcgccgtcttcct

SEQ ID NO: 93465 - DNA, 608 bp, Cannabis sativa
aaatgtatgagaaaatgataataaatttttttgcacatattttgtaattaattaaaataatgtatacaaaattgtaaaatgcccaaattattttactattacttcattttctctaaaaaaatttcagctcacatcatttttttattctagtattttattttttaaaaaagaaaagaaaaaagaaatgtagttttcaagagaagaaaaaaaaaaaccttctgtttctataaaaaaaattcaattgacagtattttttttgttccagtattttactttttaaacagaaaagaagaagaaagaaacacaattttatattttttttatggcatttctccttatatataataatatttttctatattgttaagttttttaagaaaaaatgctatattttgtacacttaagtttttatgccatatatatcaaaatttatattttttcccatattaaatagccctttatttaaaggtgaaattcttctctttaggaccttgtgtgagagttaggggtccatagtagtggttacgatatactgaatccaaccctccttcacatgaactacctccactgtgcccatttatcttatttaaataattgtattaggttaa

SEQ ID NO: 93466 - DNA, 575 bp, Cannabis sativa
catgtttgtctttttagctaacaattgtgggttgagataagctagatagggaagaagttagtttgattttttcaggggatactcatgttctgctcaggaggatcatcccacctgttcatatacaaacaataaacaataaacaaatttgaggttaagaaaaccttattaaaccgaaacaataaacaagttcagtatttggatttttgatagattgggggtttggtttatttcttttgcttcaatgttctgaggtctgtaaagattttgggcgggacctaaatgctaagaataatattcagtataagattagctgtaactccatatttttgctcttgtttatttttttttttttctttttcttatgctgaatttgatttgatttctgcaacagagtcacaattctgaagtgcattttcgatgcaaatatttcctttagcacatcacatgtctaatgttttataaatcttatttgtccactacataaaaatctatacactgaattatatgttgtgcgatcttttctcccccggaatttttatagataaaagtgtttttaattttgtgaacagcagcat

SEQ ID NO: 93467 - DNA, 892 bp, Cannabis sativa
agggcataaaacccaacagggtctgggttggggtatgaatcctggtccgagtctaggtccgggtttgggtccagttctagatcccggtatgggtctgggttaaggttaggtccaagttcgggtcctgggtgcgggtccaggtcttggtctgggtcaaggtctcggtccgaatcaaggtctcgagtttcaatctcggtctagggcttgtttgggtttgagtcgaggttcgtgtccagatccctatctaggtccgagtttgggtttgggatcgggtcccaggtttaggtcctggtctgggtttgggtccaggtctcggtcccgttctggtacacgaatgtgtttcggcccgagtttttgtctcggtttgggtctggggctaggtctgagtttggttctaggtttcggttcgggcggaggttcaggtctgtatttcggtctcggttagggtatgaggttgggtaagtttttcggttctgatctgggtttgggtctggttatgtgtccgggtcttagtttgagttcgagtttgggttaggattctgttctaattcccagatccaaacactgactatgggccaagtccaagcatcgagtcccggatcctaggtcccgaggtgggtcctaggtcatgatttgggcctgggtcgggtccttgatcctgatccaagttctgaggcccaagtttcggtcctagtttggggtccccatttcaggtttgggtcccccatctatgtccaggtcttaggtcccgatcgcagtcccagtcccatgtcccggtcccggtctcggtctcagtcccaggtctcgatcttggtcctaggtcccgagtctcggtcccattcccaatccgggttctagtcctagtcctggttcaggtcttggtcctagttcg

SEQ ID NO: 93468 - DNA, 989 bp, Cannabis sativa
  modified_base (920)..(926): a, c, t, g, unknown or other
taggggcaaaccattaagccatttccctaaacaaagaatacaaggttattcatgggcagttgatgaacttgagaaagacagtctacacgttaaaggtctcgacctctacatagacctcattctccgcatcaaaagatctcatttcctgcagctgagacctcattcctagcctcaggaaatttattaacacaagagattggctggtccaaagctcttcttgtgcaagcttgggtcatgaaccatttgggttctttagtagaatccatgaccacgccaactaggattaccttcttcttggattccttgtcagcttgaggaagaattctcaacttgatctcaaaatctatgtccattcctgtagaggcaaagataaaagatcagtgaagcaaaaaaaaaatatataataataatctaggtcagatcaccattcgcgagggatgatgcttaccctcgaaaatctcttgtgaggatttcctataacgatcaactgtgtctctttggatcaaatcaatcggaagatcttcagtctttgaatccatcgttcccaatttaaactgtgatttgaagtttttgggaacatatggagggataagtttgtgaacttggatgagtcatcttagcaagagaatgacaattaaatttctggatgaaactcatcaaaaaccaagagcatattgagcatggcaagcctaagccaccattttatacttaaaatcctataacgggaaggccaaaggttgggaaatctaacgtttgggaatgaggcagaagaataaaagacggttcatttatactaataatgaccctcaaaactgtaaaactgccaagattagaggatgcattttttcaaaagggattgtgacaaaataccctttgtaattatgaaaaaagcaccttttattaaaaagaactttttaagnnnnnnntgttatacccgaaattcggctaccatgtcaatggaggacacgtgtcaagctaaggggaatatg

SEQ ID NO: 93469 - DNA, 522 bp, Cannabis sativa
tgaaatgggttttatttaaggcacaaaacccaacaatatatacatacacacatatatatacatacacatatatgtatacatacacatatgtacatacataaacatatatatacatacacagatatatatatatacatacatacacacatatatatacacacatatacatacacaaaaatacacaaaacatactcatatatatccacacacactcataacacacatatacatatatatatatatattacacatatatatacacaaaattaaacaaaaatcaatacacacaaatacaaattaaaataaaaattagaggttatcttgattgaaaatggaaaattcagcggtggaagcaaaggctcgggtagcggtggctggaggtgcgggtggtactggtcagaggttaccttttagtttttgtgttatttttttttaagaaattataattagagagggaaagagagattgagggagatgggagagagagagatgatggtggtgagagtggtgatgatgatggtg

SEQ ID NO: 93470 - DNA, 580 bp, Cannabis sativa
tggggcattaatgaaccttagtccacaagtcactatattaatgagagtgtttattataaaatatttttcaactgatcccctttttatacatcattagggtatttataggctcattatggtgaaaaaggccgctattgttgtgtttgtatgaactatgctttgcacagtttcctaaatttgatcttagggcatgattgcctacttttataatgtatttgggttgtctatagacgtttggtgggatttgacttatcccttatttatgacttgacaactcatttatgcaacaatcaatgtcaattgatgtatagggtctcgtaaaatcaaaaaattatgggtttaaacccttaaacacgtatcttcagtgtaagttgtcagatgattttccctatagtcgcattaattgtgtgcacaatatttttttcctcaagtagtgtgcttaactccgtcagtcctcccgtgcccttcttcgggtcaatttcacttgcgaagaagaaaatataagggatatcctttatccaactagaccctcccagaaatgactaatttgtaattacttatttggaataatagactccga

SEQ ID NO: 93471 - DNA, 896 bp, Cannabis sativa
tccttggagagtccctaatattttggtcctcgaagaaataaactgtagttgcacggtctagcactgagtccaaatatagatctcttacacatcttgcagcagagttagcgtggttacaggaactgatgcaaaaaatgaagtatgaatgccaacaacaccaataatttagtgtgataacatgagtgccagcgtgttcgcatcgaatccagtatatcatgcgcgtaccaaacacatagagcttgatttacactttataagagacaaagtactacataagaaactcaaaattcgctacattctattgcatgatcagatcgcagatttcttgacaaaagggctctctccaagtcatttttaatttctggttaacaagcttggactggcaaagtcacttcttcgcttgaagggtggagttaagagaattgaaaaatagcatgggcattttggtctatcctaaattcacccgtagtttgttggagtgcaaaggtgatggaatcgttcttttatttttgtgccaattctactagcattggattgtgtaaatattctttttgctttaacatgtttacaagtgtatgctattaaatgattattgtatttctcttttttttttttttttctctcttaattgaattttcgttctattagattttttaacaaagttttgaatgaaacatttattatggatatacaaagggaagtataaataatatatggatcatgtccaaaccttccaattaatttttaattgtaattaccattattcatttttttagtttttaattttgtagctcacattttcgtggaaataaaagatcacctcattaaaaacttaagaaaattctctttctgttttattttctcattttatcctcattttcttttcttattcttca

SEQ ID NO: 93472 - DNA, 768 bp, Cannabis sativa
gagcgtatggacattactaggataaaggagtatttattgaggaacagaataaacaagaggtataaggttggggttcaccacaaggaaaagaacagagtttcgggtgagggacgtctaagtctaacaaggctaagggtgttaatttggactatgaggatgatcacattcccaaaatgataggagatgcacaatttaaattaaatgtcgatcctttgaaattttaaagttttgtagaggaagccgagaagcctatttacccttgtttactgagttttttggcaacaaaataaatatagagctttagaaagtaatgaagacgtaaatagctagattatagaaaatagattttacgtggttcaggcgttaattatccttagatcacacgccgaacaacttcttcgagcttaatgaacccatccgctcgatctagaaattcggtcattgatcccacagttagccttttggatatccttccacaattctccgagaggctcaatgtccctcagtattacagccaatcttccttcttcagtcagccccttaacttttgtagccttaatcataaacctgctaatataagctctggggggttcccctagccttcgctttacttcgaccatgtctttaaggtgcgagggaatttgacgagaggagaaaaattgtgcatggaactctgaagagaaggcattccatgagttaaaccttcctggaggcagcttgaaataccattgatgggcggcttctgacaaggtagcaggaaaaattctg

SEQ ID NO: 93473 - DNA, 541 bp, Cannabis sativa
tttattagtgctcctgtaacagttgatttagttcgttaataatatcatgttttcttttaaaaaaaattaatttatattcacattggctttgaaaagtaaaaattttcaaattgtttaaaactgttaatatttgttatagagctattttgctgtaatttttttttttttttcatttaatttcataaaactgctgtgctgcaattttagccaatttaattttcaccaaactaattttatttttcaatgaatggtgaatattcttaaacatatattccctttcacaacaacaacaacataataataataataatatagtgtacctaataagtaatcaagagttaagagtaaagtttcatcaattttgtttcataattgtttgaaaattattttgcccaaactattaatcatgtgagccacatggggaattttctgttaagctatttcacaagcataaggatgtaattgccagaaaaacaaaatggaccaaattagaaattcataattaactcaaggggtaatagtgctaagaaccctaaattta

SEQ ID NO: 93474 - DNA, 615 bp, Cannabis sativa
aagaagatgagaaaatagggttttctgagaaaaagaaatttaaggtatttgagattattttggttaggatattatttgagaaattatgttttggttttttttttcctgaaaaatccttaacagctcgtaaagaatcctaacttacgccaattgtagcaatatttttgcaaaaatccagcaaaaatattgttgattggtcctttaacgtgtactacatatgctaaaattttgctagaaaattactacagcagggaaacttctccaaatcaacgaaaaaagcctattatttatgcccgattttgttgtagcaaaattcaatcaaaaatataggaaaaactttaaaccttcaaatcacatccaaaattccaaattatgctctaaaaacacctaaagcaccaaacaaagagtaaaatccacttaaaaattaaaaataaaattgaaagtgaaacaaaataaaataaaataaaagtaaagcaggcgagagaggaaaaaatgtgtttttaaaaattttaaaagcatcaaaactatgttttcaattttgaatttaaattaaaaaaaaaatagaaaataaaattcagttgccaaacacactttcaaaagtcatttccataattt

SEQ ID NO: 93475 - DNA, 706 bp, Cannabis sativa
ttattttttagagaaaaatattaccttcccattataagagcaacgtcaaaataacagaaaaacaacactcttgttaaaaaaacatttgtagaaatgtaaaaattttgttatttttatatatttatgagctaaaatttctatatttatatattaaaaaatttgtttaatgaaatatatttatgcaagccctaacaattaattaattggtgcaaatagtcaacaaatttaaaccaattaactacgtacgtacttattttactttttgcatattaattgtatagcatatatatatatatatgtatataaatacatatatacatatgttcatgctgcatgtgcatgtgcatattccatacacgattatcgaattttcaatctaaattaaatcatcaattaatgaaatatatatataatatattttacattaattaaaaatttattatctcaattatattacttttatcatatttaagctacgcataatatactctatatatattgccatgccacaaaaactaatttcactttacaatttttgtattaacttgaactcctaattattattatttttattatatattatatatatataattataaaataaaaactgtaccacatacattatttatattttttaccatactaacaaattttataaaataaaaataaaattttcaattttactaaaatataaattcaagcaaaa

SEQ ID NO: 93476 - DNA, 781 bp, Cannabis sativa
  modified_base (462)..(480): a, c, t, g, unknown or other
tctgtagttttacagatttgaagatttatttttttggtatttgtatcatttttgtatttgttaattgtgatatattttccatgaagtttgtgtattttttcagatcagaataggtttttttttttttctttttttctatgagattcaaacaaacaaagttgtaattcctctattttttttgtggtattaaaactaaatataatcttctgtatagaatttttattgagaaatttacgccaaatggcattaatttgattttatttgcaattttgattccgcttatattgatgtggtttatactttagggtgattctacaatgtaccctcttaaaatggatgtgctgatacacccctaatttgtttcggtatctagaagaatttttaatctaatttttttcatattcatgtacgttatatctatttaagatatcctacgtaattttgaaaaattcagaataattnnnnnnnnnnnnnnnnnnnttcaaacagtctattttacactcgtataaaataaaatagtcacgggtgcaacacgctatttgaacgtagttttcggcgtgtgaaacgtttccgaatttcttaaaattttgcaggatgtcttaaataactatgacgtacatgactatgagaaaaaattggaccaaaaattattttggatgctaaaacagataggggtgcatcaataaatctattttaagggggtacattatagaattttcctatactttataccgcttattttttgaaagttttattgacacgtataccaattgtttaatta

SEQ ID NO: 93477 - DNA, 718 bp, Cannabis sativa
atgagagatttttttaattagatatatgtaaaaataatttcaaacaataactaataattaacgatcaattctacagctgcctattgattgggttgggcctcagttaacatgtgggccgaagcccaaactattgggtcgtattgattgggtttccctctctttcatcatcttcttgtaaggattctaatctgatttgtgaatattgggtgttcgaaccattcacatctcttctctcttctctcttcttcaatcctcaattcctcatcttcttcgtcctcgatttcgtttcgctggtagatttcggtttcaactcttcttcttctcctctctctccatttcgctggtagatttcggcccggtatctcttatctctttcctatggtataattgtggttggagatttgttcttttgtaaaatgggttttatgcactcaaggtttatttttacttttctaagcaaatgttggtgttccaactatgaaaactatgggagctgttccttctgggcaaatgttgccttggattaaagttgtctaatttaatttttcacttttttttttcttttgttttgttatcaattgttcaaattcttgatatcttatctctgtcaattaacgttattatatttaattgctaaagagtggagtagtagtcattgataattttcatttggaaaattttatttttggagatacataatcagctgggagatgctatg

SEQ ID NO: 93478 - DNA, 2286 bp, Cannabis sativa
tatatagatatagttttttacatctaaattttttgaaatatacccaaacatataaaaggaaattattagtaataatctctcttagtctattttatttttcaaaatactttattaaaatctcactttatttattttaccgcacacttttatatattacaccgtacattaatttttttatatcatttaaatattatatctttacttatattttaataattaaaattaaaaaaatgaccaaaaaagtaaaataaatacaattaattaaagaatgaaaggataaaaaaaattataaaatatatttagctcaccactatttattgagctatatgtaaataaagatttcttggaattggaatgagatataataactaaagttttaaagcatttgatggggatcaattttaagcctttagctatttttctttttagcttttagctattataaaacacttaatgagaatgctccaaggattaaaaatagagaccaaccaatagaaacaaaaagagtatctttcgaatttttcgatatttatgagtcattatttgtgatagtcacattgtcgagattcgtaagggaaaagaccaagtaagatgtacaatttttcacattgtctgtgtcaagttaagtatgatgattttaagactgtatgaaattacacaattatagatgacttaaataaattaatagggtactaacaagatatgcattgttttatgggcagcctatcactcataatacaccgaaaataagtttaaatagtctatcccacatgcatagaaaataaaagaaactcacatgcaacagactatatattttcaatcttattttcaacgtgttaaattttttcaatttctcaaaattttacaaaatatctcgaaacaaataacagtgtgaaccctttctttggctttttgtgatgtgtggttgtttggttgtgcttgatttcggagtttattgttgctctaattggtatataaaaataaattattttaaaaaattatggaatagacatgtattttgttttttaatatataataaatattagattctaattctatcatgtaccaaataaatacatttttttgagagagaatacaattataaacattaacaataggataattagaattctcaatcccaataatttagtggagcaaaaaaaattttttgaagcattaatgaaaatataattttattgagaaaaatacaaattttgtgagaataaaaataaatatatgtgagaatacaaatgaaaaatataaattttataagaatgcaaataataagataaaaataaaaaaatatatataaattttataggaacaaatataaaaatatgtaaggacataaataaaaaaaataatttttatgagatcaaaatgtaaaatattcaaaaatttatacacaaaatttatatgaacaaaaaggacaaatgaccccacatgctctctttcttttgccattgaggatttttctgaatcttaacatgtaataaatactttatcaaaaaaaaaaaaaatgtaataaattgtacttctcgaattttttaggtttgttaaaatttttaccgagttattgagattgttagacttaagaattttcgctcaatttactaactagcgcatgaaattgattaaagttaaagagacacaattttagtacatagacaatactcgtgttagatatccgttagcaaaataaaacgaaattggataattttttttttgaaattctaacaattataatagtttgagcaaaaattttaataaccttaaaaattttagacgatataatttagtacatctcatttttttttatttactattactataattattttaggttcaaaacactattgagaataatagtacggatttgatcctatgtatcgaaaatgacatacacatacaaaaaattatttatatttttgttcacatgtgaaccttatttggtggctatgattattatgtaacagctaattttaataaagataatcttaaaataaagaatttttcttattattctctaaataatattttattttagccctaacatttttctatttttatgggaaaattttacatgtgattgtgaagtcaatcaattttctctttagtcttcacatctattctctttgtgaataaattgtctagtagttgtcaagattttgacattaacaaaattaattcaatataaataattaataatagttaattttttaatttttaaataaaagtaaaaatagtacttcaataattattgtattttagtggaaatagattgtt

SEQ ID NO: 93479 - DNA, 686 bp, Cannabis sativa
ttatttaatttccaaattaatcacaaccattcaatagtaatccaatagcttagaaaaatgtaaccatgatggttacaataaaaatgtaaccattgaaacctcttccaatatctaatcacatagcatttaattatttttttatcaattataactaaaatatatatatatatattttaaaccacattaactctaaatctaataatatttaggagctctcccttttcatcctttatctattgctatcatttttttgtatagcataaagcaaattaaattgttggttaaagcattaaacattgaagcttaaaccaccaatttaaaataatctctatttttctaccacatacacaatatacataattatttattgttatgtctgattaattaattataataatttatattatatgtagttctaaaaatttcaacacagaaactaataattgtttgactggatacatgcatggtttagtatcttaatgcaacaataattagaagaactcgatcgaagaaaaaattggtgaattcgttgcaagtttgacattctatggtaagtttctttacaaaaatttttatttttagtgttttcatccttatattttccatgataatcttttaatcttatgacaagattttgataattggataaatattatgtttggtgtgattttgtaaaaaaaaaaaaa

SEQ ID NO: 93480 - DNA, 519 bp, Cannabis sativa
accatgggattgagatgttctgtggttcataaccttaaaaagtttttttttaaaaaaaaaacatgctaaaggattttaatacaaataaataaattggtgacattcctgatacatactacagttctcttcaagagatgaagaattttcaagaggcattacagacaaaattgaggttggcaaaaaagcctttgttgatttctaagctgatttacttggctctaaaatgtcaaataggaaaattattaatgttaagattgtccaataggggagcattgtaacagagagataggagattcctatttttaagtaggccttatactaaataggaagttagaatggccgtgttttctattttggattcaaaatctctgagaccaaatggtttgaataatacattctttaagagaacatggagcattggttttaaggattcactccagctataatttcttttttaaatactaaagagctattgaaagaaataaacaatattaatttgccattggtgccgaaggttaa

SEQ ID NO: 93481 - DNA, 722 bp, Cannabis sativa
agaaacctgcaatagtctgtttaaatatttaagtttctatgattcaaattacaacccaaagtatctttaaaaaaaattacaacccaaaataatacaaattcttctaactttcctatcccatctctctctttgatcctcccgtgtctattacctatgacatgagccaaacttttgaaaaaaaaaaaacagtgaaaccttttcatatttgaagatgagctccaatggccaaagcggcagcggcggaggaggaagcagcaaaggatcccattccctagctttcagagtaatatgcagaccttcattccattctgatccagtcccactccgtctcgatctacccgatctccttgtaggcgaagacatatttaacgatccgatcaccgccgcacaactccatcgccttctccctatcaatcctccattgtcgattccgatctcacttacctctcttgattcctcctccttgatctctccaacttagtcggtctccctggactcctcgtccttcatcaagattttagagctatttatttgggcgaaactttctgtagttatattagtatcaataacaactctacttttcaaattagggttgtgattgttgaacgataaaaaataaataaataaataaataaatttattattatttcattattggtttttaaaataataataataataataaaaaaataaatatcaaaataggatctcaactccccact

SEQ ID NO: 93482 - DNA, 1358 bp, Cannabis sativa
ctaaacatgagacaaagacgttggctagaattggtaaaggattatgactgtgagattctttatcatcctgggaaggccaacgttgtagctgacactctgagtaggaaaggatagagccaaatgaatatagtaaagcagatctccaggcaattagtagatgagatgacccgagctaagattgagttcgttgtggggcagttggctaacattaccctgcaatctgctcttttggaacgaatcaaagaagcacaattgcaagatctgaatttagtgaagtcccgagatagtgttttggctggaaagggtagtgactttatagtggatgatatgggaatgctacggtttatgaaccgtgtttgtgtgcctatggatgatgacagttaaaagggaaattctgaatgagtctcatacgactcctcactcagttcatccaggaacaacgaagatgtaccaatatcttaaggccatgttttggtggcttggaatgaaaatgatatagctgaatatttttcaaagtgtttaacttgtcagcaagtgaaggctgaacaccaaaggcttgcaggtttgctgcagccactgaatcttcgagaatggaaatgggaggacattgccatggacttcgtggttggattgcctaggactacaggacagtacgactctgtgtgggtcatagttgacaggtttacaaagtcaatgcattttttaccctgttcggacgaatttctccattaatcagtatgcagaactgtatgttagagaaatagatcgtcttcacggtgtcccaaagtctattatttcttatagggatccaaagttcacatcaagattttgggagagtctacatcgagctatgggtactcaatttagattcagtacaacattccattctcagacggatgggaagttcgaaaggactatccaaatcttaaaagacatcctacagacgtgtgtgttagatttgaaggatcatgggtaaagtaccttcccctgatcgagttctcatacaacaacagttatcaagcgacaatcaagatggctccttatgaactattatatggaagaaaatgcagataacttattcactgggatgaagtaggtgaaagaaagttcttgagacctgaagttgttcagagaacaagtgagacagttgacaaaatcagagcgctaatgctcgcagctcagagcagacagaagagttatgacgatccgaagtgtcgggatattgatttttagttcaaaggtatggtatttctctgagtatcacctatgaaagacataaaacgctttggtaagaaaggaaaacttagctagaggttcatcggaccttttaaaatccttgagaggatagggcaagtggc

SEQ ID NO: 93483 - DNA, 1186 bp, Cannabis sativa
ctttacccacaaacactgttggatcagcactgtcaggttcaaacaccaccatctttcgcttacattcaattgtttccccatctttagacaagaattccattcctaggattatataaaaatcagacaattgtagctcaattaggttggcggttaactcataaccgtcaatctaaaaagataaagacctaatccaccgagtagatacgactatttcttcgagggtaacagagtaccaaaacctgaagcatacacatcacacgatttatgaaaactttcaattactctactcgatacataagaaggagtagctcctgaatcaaataatgcagaataagaacaattgtttatggacaactgacctgtcaccattgacggactagcatcagcgtcatcctgagtcatagtgaacagatgccccggattttggttgttgttcttctttggttcatccctcttcgcctgcggataatctcagataaaatggcccaccataccacactggaaacatgacttatcccagcactcaccttgatggtgctttttgcatttgagacactctagatacgatctgaatgtagacccgtgaccttgacggccacctctgtttcctcaaaactttttgttatttctcagtgttccagaagcttcagctttccatttgtgatctgggttgccactgtcagtccccttactgatactaccacccacactaggattcgatgctatgacaacatcctttgtaccttactctttaattacatgttgtcctgcctcttcagcaatcaaggctaactcaaccactttctgatatgccgtgttgtgatcagtggtaatcttcaagtcttgcctaattgtggcattcattccccttacatacttttgtttctgggtgaagtccgtttgtaccagatcaccagcgaacttggatagacgatcgaatttaagggtatactcggccactatcttcttcccttgggtcaatttcacaaaatcttccatatgtgaagttcttacatcaatgttatagaatttttcttgaaacagggtaggacatggtactaacgtctcaagtctgacccacaatatcccaccaaatgcgggcatgatcttgtaacatgaatgcagcacaatgaactccttctgttcacgtcgaccccatgttatctagtgttggaaattattttac

SEQ ID NO: 93484 - DNA, 523 bp, Cannabis sativa
ctatatataattttataaaaaaatttaaaaaatggactaataaatggtaaataaaaaaagttaaatattaaaatttatctggattcgccacgatttttttttttttaaattaaaatttgtcatgagtgaatatttgtacatgaggttgaccaataatgtatgaaaattttgatgatgagtagaaaatggttgtagtagaataatattttacatataattagttacatgtaaacacaactaacaaataattaatcgactaaaacaaacgtgaaactatatatacaattgattagaataaacatatatataattaactgagtcaaaattgagtaataaataatacttcaaaatattatagttaattttagggaaaaagaaaaatactaaaaggcacaagaagtaatgcctaacactatctaaacttattatatatatatattgaatctagtgtaattaaatatcgaggaatacataatttaatttaatataactattaacagtcattttcacaaagcaccacctc

SEQ ID NO: 93485 - DNA, 875 bp, Cannabis sativa
ttaatattcacataagacaatatagggttttctaccaaaccccgcgatataaatacactaaaataaaacttatattttcggtctaaaacatgtaacatattatagagctcgttccaagcttcgaaacagtatatagaacgtccaaaatggagacccgagtcaaaagttatgacaaaaatgcgatttataatttcctaagaatttttaaaactatgaaactcgaaaatctcaattttcgcactcagtgaaacactactaaaacttatccaaatcactccaaacttcacaggacgcatatataccataaatattaccatccttccgtaacagaaattaaaatcaaatccttaaatgaaaacgccattaacgttcggactaagcttttaaaagttcaaaactcaatttctaactcaaaatcacctcaaattcaacaagaaaacatcgaagctagtcccatgactacccaaaaataatcctataaggtcagaaccttcataactattctaattcacaaaacccctaacgagaccaattatttttaaacttaaaatgaaattaaacaataccttaagctctccctcttcaaggatttctatcctgctactaccggtgcttagcttgctaggtttcaagtcgaaaatcgaaaaaaaatagatataggaggagaagattttgatgaatgagggagaacgatagtttcatttgttgttttcgtttatgtttactgtaacttataatatatataaacgataaaacttatcatatatataaaagaatgttataataataatataataatataatattaataaaaacttgattattaatagttatcttattattttttagccactaagaaacctctacgtctaggg

SEQ ID NO: 93486 - DNA, 573 bp, Cannabis sativa
  modified_base (154)..(182): a, c, t, g, unknown or other
  modified_base (399)..(405): a, c, t, g, unknown or other
ggtaaaatatttccaacatgtgtagggtattgttatgaccctgcatgagcccaataacgtcacagagattttgtaactcagtagcatctccaatggttgtttgaacgttggtaccgagcgaaacggctatgttatgaatgccctggttgggtgnnnnnnnnnnnnnnnnnnnnnnnnnnnnnccaggcgcgatttcatctatagcagtcgttacaccgtgacccacgtttgccggctgtccaggattaacagctggcaaaacccttgtgtttcctgagttctgcgatgcaggatccaccatctatggattgtctagatccccctgacccctacgagtttgcaccaccatcgtatttgttgaagagcgattcttcatccttctctcaatgaaagcaccannnnnnngacctcgcttttagccaacaacaatgagtcttatttagtaagtgataagtgatttatagaatcgatatataataaaacaaatataaagacacaagaattttatagaagtttagccccaagcagttcggtaatagcctaatcctccttatttgtattgactcaagaaca

SEQ ID NO: 93487 - DNA, 1098 bp, Cannabis sativa
tcccggatccaccgtggagtcgccgaagaccagtacggcggaggctgcagtagtatttgttgggcttccatttgagtcgtttagagcttgagcttgggaaataaaccatatggtcttggggttttcaacaaagatgagtagaattactattactagtagttggggatgtttattaattagataatctaccatgataatgattgagagatagtgggatttatgcaaaatgaattagagactataatttgtctcccacacttggacttagatttctctttcttgtttctgatattgtcttgtttgtttatatatagttggaaatgtcacaatattcatcatgacgaaaatgccctttgttaagaaatatacttgtttgtattattgtgttttgttttgcttgtttatattatttcagaaaaaaaaattgtctatattattaagtgtaaatgtcctatttccatggggttgatgtggtttggaaaccaaactttacttattaaaccgaaggcttgtgtagtctcaaactctcaactaacttttgcatggaagtactccctgacattgacagctgatagtttttgataaagtattatttttttttaataaataatagaattttattaataggaatcaactaaaataacaacctacaatatatatttctattagagacacaactagaatcagaattaaaaaaacaattaaaaaataaaatcagataaaaaaaattgcatcatcacaattaatcttaaggaaaattgtattctgtttcatccattgctcaaaagatacaagagtagaaattgtttcaacacgtccattcaacctcgtaacttacacaactcaactattatgtatggtacgtaactacactactaatatctcagtcacagagaacttattgttattcctaacctttaacagggatttgatggtgagtgatcaaagaacaaggaagaatcaacaacaaaataaaacaaaacaaaatcatgtcacacatacaagactaattcaaaattatgtcacagagataagacgaaaatgctcaaaactatgtcacataaacaagactaaaatactcaaaaccatgtcatagag

SEQ ID NO: 93488 - DNA, 596 bp, Cannabis sativa
acaaaaattttgtgtaaaaaagataaaggaaagcattttcttaaaattctaaataatgttttttttttttttttgaatggagaaagattttatttaacaagaacgtttatccatacaataaataataaatctgaaggagcattaagctcactaaatatacaacctgactaaagatacaacctgacaaaaaacaagactttctcgcaacacagtgtgcggccttgtttgcagatcgcttaacaaaagaaataatgtttttttaatgtcccatctttatgaataaatttatagttgttctagacattaagatactaaagttctttgaaattccattttcccccaactagagaattagtaactacttacctcttccattggacccatgtcatggatatctttcttatctgttggcaggaatcttactctaacattttggagctgtagatatctgtccttaaaagcagaatcatgtgccatgaagtcaaagtcctgaacaatcaataaactatagatggttatcatcttatgatagaaaatgtattataaaatccatttaatccaaaattttaccattttgaatttattgtcttaccctc

SEQ ID NO: 93489 - DNA, 4750 bp, Cannabis sativa
taaaattattaatataattattcttttaaaatataattttgtcttttcactttatgagaggttttgtctctaattttcttttcaaaatagagaggaaaaaatattagtgggtttccttactattttttttttctcaccaacaactcaatttaactcttcatctcatttcttttctttcttctctaccgagcaaaaggtaacagtaacactaatactaacatataaaaatcataaaaaccgccaatctattccccaattaatatatatacatctttcaatattggagataagtgaattagaattagaatttgtatttttcttttgtgaaaagatatgtgaaatactaagttatgcttataactacatatatactctgctgcttttatattctattaacaattaacatgcaattaaatgtttgtgcaatactttatatagtgcaaataaatatcgatctcatacattattcttttttttttcatttggaaaatacaaaatctgacattgttgattcaattacaaaatggtcactcacttctaagacttcacagagcctttgctaggggtccctttgtggtagctcagtcttgtaattttgaacgttattcacattgcgaaaagaagaaaaataaaaatatacacgactaccaaattgtatcaatgatgatatacttactattacaaaaagtatttccaataaagtgctgtacatattgctctaccacatattttcacaaaatgacatttatgaaaagtgatgcaaaatatgtgctaaacataatacttttattgcatctttgtaaccctttatttattattaatgattttactcatttataggtaaaacttgaagctaaatatttttttggagctaattttacacaaatattaagataaaatacattggaaataggagatgataaagaagatgttattggtagtactctttagaaaataattattaagattgacctcaaaaaaaaaaaaggagaaattatttaggttgaagaataaatagtatgggtatagtagttagttgttcccatcatgtggggtccagctcatcacttccacaaccatacgcttacgatgtgagtgaatgataaagctgagagatcacgtgtttattcttgtattccaattccaaatccaaattcaacccttttttcaaatacaaaataaatacatacacacatttcatatataatcaatcctctcttctcttattatcttcccactctttttcactttcaaaataaagttttcaaatacatcactcactcactcactcacactctatatatgtttttcaaattaattaattaattaattaattgtagttactcctcgggtaaaacacaattaataaaaaaattacactctttaactttcaaattactctaacaaaaaaagtaatattctccctccatccactcccttttaaattaattatacaaaatgacttcactcacagacctatctctacttgtctttgtttgttttgttgtgcgtataaaaatattgaagcatttaatggtcaaactttcaaaagtaaaatttaagtaaaggagggtgtttctgtaattaattataaacttttttgaaaaataagtgatgtgtttgtgtgtaaatttttataatagaatactcaattatctattctagctatattttttttgtatatcctagattggaaaaattaattaaactaaatgtagacgtgacaacattaattagggaccgttttttcaaattcaattgtgtaaaacacgttttttataattatttattatcatgtatatcttgtatacagtttttaatattatcattttaattattaattaattagctacccctttgaaaataaatatatattatcattttcgttgactacttattacattaataattactatcataagatcatatttcttcaatcttagattcatgatcatttatttttggggtgagcatgcactgatcattatatcactttgttatttttgttatcttattattaagtttgagtaccaaattattacaccacacactgtatataatatattgtcagtatttatttataaatctgttttctgtaaaaaataaaagaataattaatatacttttttatgtgtacggaatattttgtcttttttaattagattattagttaactttagaactacatctgattatattttaatttaaaaataaaaaataattacaaaaaattattgaatgataagtaactgcatatatttaatacaacaacttttaattttctgatcctctccatatttccaaaaatatatgtatctttccaaaattataactgttagttttttaataaattgtaacagttaggacgttatatacacctgtaataaagtaaataattaaagataattatctgcatttatggataattagtcatacaactacccgttttaattaacctacaattgttcatcaagttgaataaatttgaaatcaaacctgataaaaaatagggaaaaactgaatatatatttattttttttaaaaaaaattaaattaaaaaacttgttaattaatttttaatggatattggattgttagtcatagactgataatgataattagtataataataaatcatattctctagtggcaaatagcaatacttattacattttctgacagctataataataaaatacataaaaaaatacatagctctgatttaacactaatcaaagtacaatcgtataactagccttaagatcaaaattttataccttaattattattataatttcacacccaacaacagggtaacagaatatacttatattattgatttatttccacatggcaatcagagatttgtccacttgtcagaatggttgtcttttagtgtaccggatcacataataaattaataataaaaaagaagatgctgagctgagctgaactctttagctgagtagcaaaaataaacttaaataaataataaaaaaaagatattattataaatggatgaagttagggttaatcgcactccattaattgtaactcacacatatttttattttttatttatttattttgataaaaaaaataattaatatttttatcttttaatttttacatttatttattaactattattactcgttttatattaaaaatagaatataatgtataatatgataaatagtaaatgaatagaatatgataaatcagtattatagtataaagaatacgtatataaagttttgggtgaaattttttaattttttagataaaaaagatagaaaagaatatcttttttataaataaaatagttaattagctgtattttctgggcagtcaaacagtcaccctaaaaaaactgttgggaagatttttgtattatataaaagcttctcttttgtttaataattttttttaatattaaacctactgccccttcttattcattctcagattttttttttttttctttctttttcaaattcctaacatcccgctcattctcagactttctctctctatatcttcaagcttttccatttggtctatggaggacttggagcttagaagaggagagtttcaggtcaatatttttgtttttgacgaatcaatattatacatttacgatgaaactctaatgtatctgtttattgatctttccaattttggattttggtaattatattatttatctgggaaaaaatcgattagggtttagtgagtttttgatagttagattgtaatgatttttggttaaaagattggggatcgtgtttgtatggtgtttgacttgtggtgtatttcatcgttagcgtaatcgagaggaaaaggggaaagggaaagaacactgaagttcgacgattttggatagtaatgtgtcgaacactttctttctcttcttcttcttttcttcttcttcttcatcatgttacgtttttggtccgaagaatcagaacttatttcatcagaacaattcttgtccacataaactttacttctttaaaatctttactaaagctgagctttcttttttggaaaagaaagagaaattagcttaatttttaaacacaaattctaaacaaaattacttacttacatgtaaagattcaaaattggtaatggttttggcccaacattatgacctgattttggtttcttacaaaaatattacgctcgatgcatattatgcataaattaccgaatcaattcatactgcacatttcaatggtttaagttttcagatgttttatgtagtttttgttgtcttttttttccccatttcatgtattggcttgttgatttgctgattcaaattcactttcacttaccaggtttgagaaacaacctacgaatttgaagcttacttttttcttaaccagaaaagatgaaaagggggagcttggtaaatactaaggctagagaatttccgggtagaataacacgttctcgaacagcggccttggtagtatcagggcagctgcccccttccaaagcacctattaaacagaccaagaagagggcttcgcctacaaatctaaatatggatgagaataacaacaatgttgataatcctcatcttcaatgtaagaagaagaagagggttatgcttcaggacgtgactaatgttttctgtgatcgaaattttttcaacaaaactaaaattcaggtattgttttcactagatatcaaatcttatttgaaagttgtcttgtcaaattagttttttttttttttt

SEQ ID NO: 93490 - DNA, 585 bp, Cannabis sativa
ttctgccaccctctgagaggcatccgaagttcctgttatttttcggggaacaggccctaagggaaaccttacctacaggtttctaacattgcttagagtatggtaggctttaacgatagcttggatgggcttgtctttccccccgaaagatgtcccagtaaagcccaaatccaaagggtcgacagcttccccaagccaaggcaccaaaaaagcaaagtctttgactccaaatccaactacacccaattcgtcatctacaacacaaccactattacaacaacaacaacaatgatagcaacattaataaggacaaaaacaatagtaacaacagcaacaacaacaacaacaccaacaacaaattccaccacagtaacaacaactaactttgtcgcctcaccaaatacagatatttccatcctagtatgctccattttttacactactgtcagcacctcagcacccaacagggcaataaccccttagacccacttccactgttcctccttctagaccatgcacatccttggataagattccccctccgggcttctcatttcccatgaggccaaccgttcttggtcataa

SEQ ID NO: 93491 - DNA, 708 bp, Cannabis sativa
tgtgttaagtttttactgttattctattggtgttttttagttgttctactgttattttgagttgttctgttttgtgttctactaatgttttttaaaagcacagtatttttgaaaatatttccgtgtgacagtattttttgtaaaagttaacctaaattctagtcttttttgtaagtttttttttttttttttttacattttccctttttcctcaaaaatgggttgtttctcagtcaagatgaaaatgtgttatagtttgggctcatcacaaacatccatgacatgatatcaactgggcctggcccatattacttcgaggcgtttaccattccatatggagctttgaagtttgaacagtgctcaacggtcattttttttctcttttcaaaagctggcatcggaagtgaattgaaagtgagaattccatattattgataatctgtttaaattgattttccacccgaaatccatcaatggaattggaaaaagcggaggaaaatttctttagaactgcatcacaatccgactctgaaaacggctccgatgattcggacgaggatccaagttacagcattatggaagaaactcagataaaattttccaaactttcactcaagaagaaaacaaaggctaggtttgtgtctaaaatcttttcttttctttctcgtcttttttcataatggattgagacttacttttgttattgtg

SEQ ID NO: 93492 - DNA, 684 bp, Cannabis sativa
agaaaactacatgttaacacaaatcctttctaatctcttattaataacaaatcaggttagattgtaatgggttttatttagggcataaaatcccaacatcttagagaaaatgagccttcagagaattgaagaatgtccaagattttagctttctccgtagctttgacacccccaaaaaacacctaagacttggcttcattagatgtcagccatgtcacctccgcaaagttagtgagagcctctttaagatgtgtaaccgcagttggagtacccttgcaaaaaaggataaggtcgtccgcaaaacaaaggctaatcaagtttagagttttgcacattggatgatacctgaaagtcttcttagaagcctctaaatgaagccttcaggtaagataatccatgattagcacaaacagtaaatgtgacatcggatccccctgtctaagccccttccttcctttaaaactttcttgcagtactcttccattcatcattaaagaatacgaggtacccttcaggcaagtcattatccacagaacgaatctagaaggaaaatttagagctacaagaaactcctcaaggaagcctcaatcaatagtgtcataagctttactcaaatctatcttgattgcacatctaggagaacccccctccctgccataactcttgattaagtcctggaagatc

SEQ ID NO: 93493 - DNA, 500 bp, Cannabis sativa
aaaaaaagttgtattacactctctaaaaagttgtttcatacaatttttagaataacctagtagatttaaaaaaaaattcgaatagttacatcaaacagtttcttatttcatgttgaataactcaatattttttttttggaaacaaatgaatgagaatgattaccattcatgtcataaaagaaaagttgattgctaattataacaccctattacaatctcttagtcaacctctacgtccgaaatcacacgctggatttttttttttttttttcaaaattttttcatagcagtatttgttgtagttacagtattattcttataaattttttaaaaaatcgtaatagtttacagtaccaaaaataaagttcttgatatttcaatttatcacacgtgttcgaaaaatttcaaacatattttcgggactataaactatttgaattttttaaaaatttataagaacgatgttataaacattgatgaatattttaaagttaactaat

SEQ ID NO: 93494 - DNA, 504 bp, Cannabis sativa
tatatttctttttctttgatttccctgtgttgcttggatattttgcacccgatgtctgcatttgtgaatcattatattcctttcgacagtcatcgagggggcctctttccaactgttaggagaccctcattcacctttttgacttagggtttgatgtgggggctaactattggatttcttatttttctcaaatgagtgaaatcctccatgatcttcacaaacacgatttctttgggtttgactaagatattcttaatctccaccaggcagactctatgtccacacccgcagctacggagcaaaatcttccaagaaggggccaaagaagctggcctccttggaggaggttatgaagggcccggtcatttacaagaagttcgcatgccgttccaataggtgggaggctggcgaactctattcgacattgacctacgtccatcaactgcaaaaggttgttattgtggttgggattaagccctcaggttctggagtgtaccaccatct

SEQ ID NO: 93495 - DNA, 596 bp, Cannabis sativa
aaaatatgctgaagctgccagtttgcttcagtagtcgtgactagcataagccatagttgcgacctttttctttggtcgcgactatggttgtgactaggtgattttggcagagagggtgatttttcccatttgcctgtggtcgcgactagccctttatgtagtcgcgaccaggtatgaaacacgagatttttgaccactttttgatatttttctaatcaaggcacaaccctaattcctatataaggggctcgactcatctgacgatcatcatcagaaattagccccgaaaagtgaatgaaggaggagaggaggctattgtgacgatccagagcaaaaatcaccaactagttttctttcttaaactcgtgaatttatttatgtttatttccgttctagatttaatcatggatgttaatattgttttcatgaactaaattcccaattggggaagatgatgaatcttgattaaagtttttgcctagtacaaggcaactgccgttcctttcatcttgttttgtgaaattatctatatttgtgtttaattccatgtttaactttgatcaccttttacctgttctatgatctcaattcaaaat

SEQ ID NO: 93496 - DNA, 577 bp, Cannabis sativa
caaactatataaccatgagacgtgccatattttttaggaaaaaaattaagagatcgaaacaaacctttttcttccattttgttgaaagcatcgagagcgctacttgtgtccacatcacccaacaattcactcactttagttgatgtcctgtaccgaatatactggattagtataaaattgaactgctggttacaccaaaggggaaaaaaatattaacagatgaggagctagaaacaaactttgcagactgagctcgagccttgagaacatctttcttcgaccttgcctcctgtatcttgctctctaaaagctgttggaaaagaaaatcttaaatgagaatcaaccatacatagaatatttcaagcactcagctcttccctattggcaaaggggtaaaaacttaactagatgtatcaaaatgttttccccttcagcacatcatctaaaactaaaacccaattttaccattttaaccatctacgccttttctttttgcctcaataatttaagccataatgttcagattaggccagccagaaatacgcattacaagaataaaatcctggtactgaccctt

SEQ ID NO: 93497 - DNA, 679 bp, Cannabis sativa
aggagagatttttcacaaattatatattttaggggaaagaatcagtattgttgaaagttcaggggacaaggtttctaatctacaaagacacattagcatttaaatgaaataatgggacataacctaacaaaaggattaaatttttgtaaatgtaaaagttcaaaagaaatttttaataagctgtatattcagaagacaaaattcctaattattcttcttagattattatattatacttaagactaatgaatattcatatccattaaaataaaaaataaaaacaattctaattaagattccaaacaaacactcccaattaatatatgataagtagttatgcaacaacaaatgtattatttattttttaattcaacatttattttttatttgtttggtttttttttttatggtgattctagaacttttcaaaataaataaataaatgtttctaatttctcaataggggatatttatgtgacctgcagtgcactccaaggcatctctacaatcaaataaacttgttcaaagttgactatttgctgtccacaaacacaaaagtcaaatttaataaaacaaacaacagtatttttttttataatgggcaaatggaatttggaatacacaaaaggctgtttgacattttttatttcttttaaaaaaatgtgaaatagtttttgtt

SEQ ID NO: 93498 - DNA, 536 bp, Cannabis sativa
  modified_base (93)..(94): a, c, t, g, unknown or other
ttatgtagtttttttgttgattttatgttgtttttatgaaaaactgtaaaaatgtaaaaaaaattctttatacgtaaaaatgtaatttttttnntttacaaaaaatagtatcttatgttatctttatatttttttttatttgagcttataagatgagtgtgcgggcgtagcccatttagtctaacttaacataatattttttaaaaaatatctctaactaatcataagacgctatggccggtcatgactaaagcgggcacttagggcccactcctatcaggggccaaatataaaaacgaacttttaataagtatacttagtttttaataatttttaaaaatactatttatcttataaaaaatgccaaaaaaaaattatttttcttacaatctaaattaatttagagccggccctagcaccactcataaattaatttacacataatgataattaaatgttattttgtaaagcattaattttaatcttacctaatttttatgatgatttttataattaggtaataggaaatgtgagaa

SEQ ID NO: 93499 - DNA, 629 bp, Cannabis sativa
gtttttcatttcatgatttgatttgataatgtattctgcacataacgaattaattgaaggtcttctctttaatcatggacttccaacattgtatctttgcataccttttttcttttcctttgaaatttgaaaaatatggcctttaaacatgaatgattttctcttaattatataaaattttggaaaaaatattccaaattcgtaaaatctattaaaaaaatattatacatggccttgggttaaattaccttcttaaaggtattttaatctttcttaatccacaaatacgttttcctaagactatgttcgaaaactggattttagtaaaaaaagaacaataatttttttttttttttttatgttgaactgatagattgagaataaatttggtgattagttgttggtttagtaaatgagtatagttttgtttagaagagaaatgtatgtaagtttgtagtttttgattttttgggtgttatattgatgatgagttgatacttgataattgattgtgataaattagaaaatagttgtatataggcaataagaagagtaggtaatatgtttgaaagtagtaggacacttgatttagttttcaagcttggttacaatatgcaatcttggtgggg

SEQ ID NO: 93500 - DNA, 605 bp, Cannabis sativa
acaagaaaaagacaatacaaattttaaaaacatttttatttctatatttataaatatatatatatatatatataaatatgacaaatggtaagggcccttaggatgtgatttaatattgggtctataatataggaaattaaaaaattatatttttacaaataatatatttttttaaattccaattattataaacacaactgtaacgatttgcagtaacagattggaaaccagtcacaacataacacaaatttccataatcaaaatagaaacagaaataaattgtacaaaatttaaaaacttgacacaagagaattatacgtggtataagtgttctttcgaacactactagtctataaggttgcctagagaatgaaatcaattagtaaagtctcaaacaattacaaatacaattaacttaaacaagattagactccctctaaagctttgccatcatcctttgtaatttactttataatctaatttctagacaccccaccaaacaatgaactccctccgtctttgacgtgtgagtgcttacttcctcctgaagtaaggcttgaactagtcttatcctaaagacgtttctcttgttcaatcaagttgtt

SEQ ID NO: 93501 - DNA, 633 bp, Cannabis sativa
ggctagctttagttggattaatatcttcattttgcttgattggaagaagatgaagaattcttcattcttccataatgggtgtccacacttcttcaagaatttaaaaaaagagtttgcacatactcatcaagcacaattttttagtggaaacagactttgcagaattttaagggatgctcatgttaaaacagaattaagtagtcaatgctcaactactcaaattagccacgtcattctcacgttaaacttttgaaatcaaatacatcaaaggaaaaacaaatgtcatttttgatttcatctctcaaccaagcgaaactactaaaatatgatcaatacacaaaaagaaaaaaaaaaatccaatcaccttagtctacatagctaacttatctcttatcatttctacaccctcaatgatgcaaaaaaaaaattgtcaaaaccaaaaacccaagggttatagcaatccaaagagccctagaacttcattcgactctcaccagggcatatggccagattattgttgggttttatgccctaaataaaactctttacaatttgattagttatcaatataagaaatttgaagtgattgatgtttgcgtgaattctacatgctaatggtttaatatgttaaat

SEQ ID NO: 93502 - DNA, 556 bp, Cannabis sativa
aaaataattttttttctatggcccactaaaagtcagggctggccctgattaaaaccccacatgggtattgctcttttctcagttttatagaaagtctataatgagttttataccctcaatgtttattgcttagaaaaagaaaaggtcagtactatcactctttctctctctcatagaaacaatattctcttgtctttgagtatttgattgaaacatgtgttttcatgtcttgtgtttttgcttattgtggatttttgaggttgaaattaattgtgtttttgcttctcagccggccgtggtcggagaagatgaacctcgaacataccgtcgctgtcgtggtcggagaaggtctcgcccaacactttctctctccccggcgctgatggctcgtcccgtagttggagaagaaggtctcgccagaagctgatgggtcgtggtcggagaagaatgtccagccgccaccattttctctctcccctgactctagttccacagatttagggattttggttttttttttttttttttgagtgaaagggattttggtttttgttta

SEQ ID NO: 93503 - DNA, 529 bp, Cannabis sativa
aggaacattgaagatattatatataataaaacaacaccagtaacaaactaataactcacaacaaccaaaaaaataaaacaaacgtacaattctctttctaccacaccaagaaaacctgtttcgtggtgatgtgtatatatatgtagcttttataaaggattatatatgtgtatcatttataaacgataggccatatattgatgagaattgcttaaatgtatttgtagtgtctagcactttttttggtatcatattgttattaatgtaattaagtattaaaaaaataatttttagagaatttcattaatcaatcataagacgatacttatagaaagtgtttgacaccactgatatccaataacaatgctctatattgagtgatactggtaattattttatttttttaaaaaaattaatatatatagtagaggtttgaatcgctatattatttatattttgttatgatttttttataataggttgcagcaaattattatttaataaattttatatttagaattaaagtaat

SEQ ID NO: 93504 - DNA, 665 bp, Cannabis sativa
ttttttttgttgaggttaacagagttaaatcaaaattaacgtagagttaacgtttggcgttactatctaaaaataaactaaacttaaaatatcccaaaaattattcgagctcgactaaaattttcaagcgtggcttctttacgattgagggttggttttacagtttgccaacgccgatgacgatgatgatgaagaccacgatctgtggttcgatacccgccaatcgaaaagtgatatatatatatatattctcttaatgcaaaaaaaagaaagataaaggaaggtcgccactgttaaggcagcaaaaagctcttcaaagctattttccatggcgtttcattcttttattcttcattccctctctccaggtatttctctatttctcaattataattttaatatatacttgtaaatatcattgtatttgattgattttgaaactttaccttttcatcttcttccaaaagagttcgatgaaaatcgtgaaaccctatttcgatggtgcaatatttattatttgttaaagaatgtaatattgcagttatggatattgatttgaggtactcgttttttgaatcgctgttaattctgtttatggattgtttagtttatagctttgcgtaaggtagggcatcttttgaaatggaggatcaggggcagcttaa

SEQ ID NO: 93505 - DNA, 727 bp, Cannabis sativa
ccacaagctgtgtttcttgtgaagctgtgtttcttgtcatccgatattgacctagaaggaaaatgacgctcaccaaccaagccatgtccaggagggtccacaagctgtgtttcttgtgaagtaatgtgtgccccaatttcagtggtaagatcctctccttctgtaggacctatcaaagatcaggtaatgattaatatatatatatatataaatatgggtatgcatgatatatgcgtagtcacatatataaatgtgaatatgacaaagtgatgaaggcataaaaaaaaggggggccgacattatcaatacataaatatgtaataaatggatatgcatgataagaaaaaataaggtagagtccatacccttttcgtgatcacgattcttactttgatagactgaccatatgttattttggcgcatccacaagtcacaaactttgaggataccccaccctgcctctccttacatgggagttggaacaagtcatacgaacgttttgaaacttgaagagaacctaacaaacatgattttgatgccttttctagactccctgccttacgatcatgaggaacatgttggtcaaatcaaaattgtctagccacacgatcaggttgatatgaaataaaagaccaagaaagagattttgagttatcttgaaggcacaacaaccaccgaggaagacaaatagcaaaccaaaatcctataccgccacgagaaatattca

SEQ ID NO: 93506 - DNA, 594 bp, Cannabis sativa
ctctctctttaattttctctttcttatattttttttattttactttatttaattagagaccattaattttgtataatacattattaattaattatttttttaaaaaaaaaattaaactatatgactgtatatgataactaataatccagttaattaatctataacagtttgatagacttatgtataaaagtgagtattaaccgattattgtttaatttattttatgtacaaaataaatttattaagaaagattttaatgatgattacacgtgagatacggtaatgacatcaggtttaaatatagtagtgactacaaatgagctactgtgataacaattgcttttgagatatttctttgtgcactttttttatataagaaattgtatgatgagtttcttttctagaattctttagacctgtaaataggtttattattttttcaataaatatattttaaaaaaattatatttgaaattatttggtatgattttattgttcaattaatattcacatatgtaatttaaaattttcataaataactacacgtgaaacacctcctgtttatttcttaacaactaaaattaacattgttaa

SEQ ID NO: 93507 - DNA, 985 bp, Cannabis sativa
ttgaccaacttgctactattttatggtgtctagtattttttagacatgtcatattgtgattgactaacaatactttttaaaagctattatattaaattatatgagacccaatacttagttagaccaataacaatattgacacagggtactagataccactggtaccttttagcatttctcttctatactatactatacataatggtcaacccatattacttagactctatttaaatagctttatttaaaatcaattaaaatagtttatgtcttcaaaaaaaaaaaaaataagatagtttatttttttttaacctttattacacatactaaataatataactataaataaaaaaaataaataaaatcttatcacatattgatatagtgtatactaaataaaatatctatatttacataataatatattgaatttaatgcgtcggtacaaaagcatccaatgccattttccacttagatttttatatcacacctaattttttatttaattttctctaaacatcattttcatacctacttcaatagtaaaaaaaatatgaatgaagattcaaatttggccccaccaaattaatatattgtggacaatttttttattattattctcaaaattggagaataatcaacataaatattgaatctaaacatattaaaaataaataatattgaatttaattgtctttgtgttgtgtaagctttacgaagttttttttctatgatttctttatttggtcatcttattaaagattgtaagaaatttttttgttcttttgagaaatgtttctgttatttttaataaacggtcaattaatatggtagctcacatctatgttcgagccttcatattatactctgattgtaattttaatttagaatttgttccaactgatttgttaccaggattagtagcaaaagttaatagttaatgaaaatggattttctataaaaaaaaaatgacaaagaaaaactt

SEQ ID NO: 93508 - DNA, 502 bp, Cannabis sativa
ttacttaaatatctatccaacattcttaatatgtatattaagtacaaatacatacatgcttgagcatatattagattccaatataaattaagaatcttataatttttatattctaaggttgctttaaagacaatgacttagacaatttattttctttagctacaagcctttcgcctggtatagtatctttcatgccaaaagttttaaaaactttattgatatacctcttttgttataattcaagaacatatcttgaattccgaatacaaaatgggcatatcatcagtggcaagtaattttttttaccaatataataccaggatcatattcttactcccactgaacctatgatatatacacaatcatcaaaagattttatctcaaaaagcaaatgagaatatttaatgaaaattgtgtaatcattgacgagaagcgtacttgagtttatacatagatttttctaatttgcaaaccatattctttggatctttggacacaaagt

SEQ ID NO: 93509 - DNA, 940 bp, Cannabis sativa
ctaagtaggtttcttagagcatgagatgaatatagatagaatcttgaatcttgataaattcggcaatgattaaagcagtttagagttgactttaacctaagtctacaactggattagaggttttcgagaattaacaagatgctacaaaatatttgttgagggatgtttacactcttagtggaattaagtcaaaagaattgaaaagaggttaactattgtaccagtgttaacattgtcggtcattgaggaaaaatttgtgatttagtgtgacacctctaaacaaggattatattatatattgatacattccaggagagttattgcctatgcttctaaacgattaaagaagtgtgagtaatagtattccaattatgatattgaattgatagcagtggcttccgctttggaagtttggcacttttacctgtttagaaaaagtgcgaagtgtatacgaatcataagagcctcaaatactttatcatttggaaagatttaattaggaggcagcgacgatggttagagctgattgaaaattataacgattctctaccactctggaaagtaaattagtagtgaatactttaaactgaagaggtctaggacaagtttgtaaaatgaaaaaatttcaccaaaggttggtggaaatgtaaccagaatacggattgagttcgtggttggagaacttgttaatattacattgtggtttaatctattggaaagaattaaagtggcccagcaaagtgactctaaactttagaagtacaaggaaaggcttggaactagaatgacaaaggactttttgatttcatttgaaggacttttacgatataaaggcaaggttggtatatcagtcagataaggatgttgaatagtaggttctaaatgagtttcatattacatcatactttttatacttggaagtagccatagacttcttggt

SEQ ID NO: 93510 - DNA, 4414 bp, Cannabis sativa
ttgcttccgtacttcaggagaattgtggattactaccatctctgcccgacccagttcactttgaagggcctcaaatattaatctgccatgttcattctttatgcctcacatgtatgggacgagccatccccgcatgacactaactggccttttgatctaaaatcaactgcctcttatgccaagttaattttctaaatatttggatgaatttagatcaactcaaattgatattgataccatactttgcatttatagaacataaaaaatataaaggtaatataataatacaatcacaaccttacacgtgatttttaatcattataaataaagaaaatcttctcaaaatcagagctaacaatattagtgggacaactgtgattgttgcctctggattgcttcattccaataaacttggggacacctcataacaatagggaccatgctacacctcatcctataacatttggttcgtcaaaatctcgtaaaatttaacatggaaatattaaaacttgaaatagtcttataaaggtctaagagaaatagaaagcaaaccttaaaaccaatcctataattttacattgattctaaacctcactgcagaaaatgaagagaaatccaaccaattttgaagcgctagatggaaagataaaaagacttgtatttttccaaaatggaagaaattagtgtgtgattagttattaaccaaaatagaattaactttgctctattctataaggaaaaacctccctcttcaacaaacatttcctaaaacccaaaagatacagagaatctaccaaagcaaacatgttgaagaatcgaaagatgactcattttaatcatggggaatttttaccatagtaatcaagttataacttgattttaatcattttcccaagaggcttgcttcgatgtgacgagatttaaatttgtaacccatccttattatatttgcattgatggattacaaattcgcatctatcattacggatggtttaacaaatagcactcctttttaaaaaaattgaaaaaaaaaatagcattccacatgtgctcccaggattgtgagaaaaaataataataaaaaaatgaggttcctcatattactaggaaagcaaaaactatgggggcacaaaagaattgtagagactccaaatattagtattgaaaacaattaaatacactttaaaataaagaatttatgttacattacaaattgcctttaataattctataaaagagaaagttggacaaaaatttttgctgcagctccttcaatgaattggcctttgaaattgatctccagtttcatagtaacagtcaaacctggtctcaaaaaatcattgaatctgtgtaggatttaatcatttaggctttagcatgaatataaggtttacagttttatcatatgtccaatcaaccaagttgtttcaagggtttggcactattaacaaatgttgcacttttattgaagccctgaagaagaaggatccgaattgcttctattccatcttggaatgtaaaatttaactgcaaaacaattcattcggacattagaagaaacaaataaaagaaacctttggttgttaaaatccagtaacaaatttcatgttattgctaggccacctgtgcatctaacacgagagtctccgcctaaagaagattgatgacatggcaacttaaagtgttctattatttttcaaaaatcgtaaaactaacgattgaataaattccttgtaaaattactggataaaataaaataccaactttttcagaagctttactgacatatgtcttttgtaaaagatttcaaacacgtggattgtgtgatgaattcaatcgggattgacagctgcgttcattatttctctcttttttttttggctggacaaagaataaaaaatgaattctttgtaaatttattggataaataccaattttttttcagaaacatataaaaacatacgtcctgttaaaaaatttcaaacaaggattgtgtgatgaattctaatagggatcgacaaaaaataaataattaacaaagctgttcatctcgattagaactcatcacacgtgtttattatttttcttagtcttaatgaatgtttttgtgtaacccaatatctgggctatcgatcagagtagagagtactaaactaattgtaatctgtagagatttccaaggtctcaaatacttcgaaactgtaacccgatttctccttaggatcaataatgaatttcttcagccacgaccctgtacctgtacctatggaatggtatctggtatcagagccgtacacggcatagaggacaagtctataagtaagaatacggagctgagtgttgtaattgtgcctgatattgagggggctgagaatgaggaattagacccagaaattaatcaagatcccattctggacgtatctgaaatcagtgaagcagtggaacaggcctcacaacacccaagagatgataaaaggcacgataaatgaaccagtggtcattttaatagacccaggcgcaacctataatttcttatcaaaggaagtgatccaaaatatgggattaacagcgaccaatactggtgcttatggtgtgattattgggtcaggagacttggggatgagagagggcatttgcaagggaagagcacctcaacttcaagggcctttaaaccttggaagtacgaacttgatattgggaatttagtggttggccactctcggaatggcacatacaaattgaaaactttagacagtgaagtttcagctgggaatgagactgttgacactgcaaggagagacccttctcttggcaagacattagtttctcttaaaaccatgctgaagactattataagtgaaggttcgagagttttagtagaaccagaccaagtcaacacgatgatagacgagacaccaacgatagcagatttatgaaggatgtcactgctgagtttgaggacatagcaactttggtgttctattagttttcctagtcagctaagtaattcttaatgaatgttttgtgtaagcctacttggtgtggtaaatggggagagttgtttatatttggggtatcgatgatgagtaggagtacgaaaatgattgtaatcttgttagaaaaaagtttctcggtaaagatatccaaggtctcgagcacttggaacttgtaacccaatttcaataaaaaaattctccagccatgactttgtacctatcaattatgccaaccaaaattagacttaacaaacctcttcacgttcttgtttattgaacggtcgaagaacaaagttgactgcatccattttcccaggaggtcgcccaatacctagaaaagtttcattatattattagggggaaaagaatatacaaagggccactttggtgcctatatatacataccaattctcaaacgaggaaagtcgcgactcccttgaaaatgatcaatgatactcctcatcctacaacaagaaagcaaatcataaaaacctaacctaggcctcctctttttgtttaaaatgtgcatatcatcttatgagtttaagatcaatggaaaagtatattccttgtatttaactttctttatacttgtttgaagaaatttttgtacacatcaaaaagaacaagaataaaaagtacgaataaaaatctcttttcttacaagtctcctccctctctcaccactcaaaatttgacaaatcactcatactttgacatatttacttaaataacatcttcctagccaaatgatggtttgtcaaattttaagtgttgggacataaaagagtaatttggagaacatttctattccaatttaaaaagcaggcacatatttcaatttatgattaaactactttagacgagaaaaacaaatggcttaaccaggtcatgttatgttggaaatagacaagagaaccaataaataaataaacacaacacaagaggaaaatccaaatagcatggggtggaaaaaggaaaattaccagagaaactacgatctaatcactgcatacttaacaaagggttgcaaaatatgagataggggatgtaattttaattttttacaatgtaagactatctccaatgcatgcacatttgacatttctatttccaatttaaaagaaggcacatatttcattttataattaaaatactttagtcgaggaagacaaaaggcttaaccacatcatgttatgttggaaatagacaagagaaccaaataaataaataaagagtttttttgcagctaaactctctcaactatcattccaacatggactatttatgtgtacatctagtacacgtgacacgtttatattggtacaccttgcattattatttaaaaattataaaaaaaaaaaatttcaaaatttataatatttttttatttttataattttatttaattttaattt

SEQ ID NO: 93511 - DNA, 698 bp, Cannabis sativa
ttatattattttataacacattgttgttcttgattgattgttcgaggtggagaataattattaactgtttttaaattcgtaattttcattggttgtttgttttctttttatgctattcaattgcaactaaaagtcccctttaatttttatttgatagtgaataaaaaattaattgtagagctcgtagaatgacccgtacttactttcatactaaaatagttcaaagtattggaattaaattaattagtaaatttgatacgacatatgacagacattacccaataatttcaatagtttagagagcataatttggtacatgttaaaatttaagggataaaaattctaattaggcaatttatttattacacttacgctaatatataaatatattcatgtatacacacgataaaacaattctataagcttttaactgatatattctatatagaggaagacattgtctatttaattatcgatgttggcttgttattaacatctttcgaattgtttggaagataaaaaatcttaattatgttagttgattattatgttttaacattttttatatcctattacctcaaacaaattgaacagatcgatttttcctttttcttattttagaatctggcatcgaatgggcatctggctatatatattaattcctctattacattttgaaataggaaaatagaaaaact

SEQ ID NO: 93512 - DNA, 1041 bp, Cannabis sativa
gaacactagctctaatcactagtgggaaggaaaaaaaggaattcagttggtcaataatactagttgtaaaagttattagtcagggacatctaaatatacagatatacttgaatattatcaattcttatcatgaactaaaaagtgggatgctcgatttataccatcaaaaacgtaagcctgtatctgggaacgtgtgttgctaagtttgtagaatgcatcactagctttgtctgcaagggctcggtattggattgatgcaacaacattgacaaagacattgtcctaaagagcacatgagataatcagttaagatgtaactgcataattaacagaagtgaaataactaaaaacaatgacccatgaagatatttcctttctcccaccaaacaaaggcctttgcaattctaaaatgctattaagtaatatagacaaaaataacataatttagttttgatcatccatatttgatgagactttttaagaaggtacagaaccaccacacaacagaatggtggtaatttttttgttagaaactgtttaggacagccaattgaaaatccataaaattttgtttggtagcaactaaagacatgcagtcatccgaattattcccagttacaagaagcaaaccttagttttggtctcacatcgcacgtccaattgctgcaaacgaagagtgagatgtccagctagctgacttccaagaaaccatgggaggcaatggcatcctggctcaagtacatcatcaaacttgccaaatctctcctttatagctactgtagactggtcaacttgtacacaacagaacaaattacccatcttctcttctctctaggactggaatagagattacagacaatcaattctttgtaattaacttttattagagaaagagaaaaatcaacagaagcagaacacagaaagaaaactaatcaaaacaaaagtttcaagaaaactaataacaaaaacagaatctaatcataagcaacccaataacgtttttcaaaaacaagagcgtagataactaaacaaaacagattg

SEQ ID NO: 93513 - DNA, 543 bp, Cannabis sativa
aaagtggggcgtacaagactcccagctacaccaccattccacactcaaagagattcttcctgtaaaactgggcatcataaaacttgagttccacctcattggacaaaatatcatagtagaaatagattttgcctcttttcaagggatgcttacgttcaaaaagattaaagcaatcaatgcttaattgctcaggttattcacgcggtttttacattacacgtttgaaatcgaacacatcaaaggaaagacaaatgtggtttcagacttcctttcccgaccatgcaaaactactatagatatggtcaatcctcgaactgaaaatccaatccctttcaaggagaatatgtaattaagttattgttatttattgtacgtttgagttagtagaaagcctatatatatagtctctcatgtttagttgtaaagggacacaagtttagatatataattagaaaatattaatgttagttcattataccaatgagaagatgtatcaagtaaaatctttatagtaaatgtcaatctcaatagtatatcttacaa

SEQ ID NO: 93514 - DNA, 1159 bp, Cannabis sativa
attatatgaagaggattgttatttggtattagtggtgcctaacattttctcgacatatcgcgttacgagtagttagctatactttttaaaaattattacattaaatttgaaccaatagttatgaaaattttagacactactattgctatttagcatttttcatatatgaatgatattatatatataactttgcttacttcgatttttgagcaataaaataatgaatttgcacaaggtttaattagaagcttcgccgctcgaataagaatctgaggctcgaagattagagagaaagctatggcttaaccatacatgtatatatgtatttatatattcttaacaagtaacatatgaaattgcctcattttgttagaaaggaaattaaagtaaaaaaaggcttaatttgattgtacgtattttgtgtcaccatagattagaatatttgtttgacttttgagtctagctagtaattaggacaaattaggtctctttccagttcaaaaataatggtcagtttatttagacaaaaccatatgtaatctgagcctagttagcttcaagacaaacaggtattgtcctttgtataatgacttaaaatcgagaactctctaaagggtccctagtctataaaattatatgatatctaattataatagttttatataggtccaaattttcatacatcctaaattggactagttatatttatagggcacaatataagcaaataattaaatttaatgtataattaattatcattatcaacgacatatacattaatttgtctggaatatatatagaaatagcaaattaaaatctaaaagataattaaaggtatccaaatgtgtatatattgtttgtagttagtaccaatttttgatttggtcatgttttttttgcatatataatttgaagtttaactaatcccgatttagttataagaaagcaagttattataaatgctttatagtaatattaatagatttatcttaacctaagcccaaatcatcaacataataatatttttcaaaacactatttcatgaataagaatataaaggagttaaattagactaatgtaaaaatcaaacttttatgagggagtaatctcttagatttacgtggcacacccgatttggttgatgatatgcaaaattgct

SEQ ID NO: 93515 - DNA, 866 bp, Cannabis sativa
agaaatgaaaaagctagccttatacggtaaaactctggaccaggccaactcccatgattaagccctagggtcgaccaggtctcaagcaagacctcctaggctgtccaaggtaagttttgaatcccgatgtgtgtttttctttcgaaactccaatatgtgcctcatatttttcatgacttaaagagtcaagaatcacaagaaggccaaaattccatcaaaaagtcacattgtacattccaaaactatcataaggatcaatatagcaaagagactacaaactaaatgataactaaaaagtttccaaaagcttaaaactaattaagggtaggtataaagaagaggcatcaaaaaagagaaacaagacgtatatagagaggagatcaaagatctaaaagtatgacatgcaaaatgccaacacttggctagacgaggctgctcgaaagatactactataaacaagatgaagctacaaggtccctatccgagcagatgtttgaacagggacttggggcaaatgttctcccaaattatgtccacctatcatggcatgtccatgtaagccaagacagagtacatgcagaatgcaaccttgctagtagcaagacagatacaagatatggaaaaattattaagcaacacttagcttgtatggccggccaagatctagggacaagctagccagccaagaagtaactttcagaccaagggaggttccattcgaccaagggaacatgacctctacaagggaaaagtttaaaaagttgtccttcacttgccaaaggctggcctccacatccaaaggctggtctcctcttgttaaagctgacagaacatgatctgtgggatcctggcaggcacatgaccta

SEQ ID NO: 93516 - DNA, 1192 bp, Cannabis sativa
aagtctcacccacaagccaaacaatttaatttgttattttatggtttgtggtgagttttatttaatgttttttttatgaacttttattttaatgttaatttatgttttattttattttcttatttgaatgaatgtttatgttattttatgttttatggtttttttcaattttcgagttcaaaatcgacaatacatcgacattgcatcgatatatcgtcgacactgttggtcgacttaatgtcgacatactatcgacaaaatgtcgacatactatcgacaaaatgtcaacagcttctcaaataacttatgtatgttaatttgttttttcatcgacatgctatcgacaacatgtcgataatggtcatcactgacctttcctagaagaatatcgacataacatcgatattccatcgataaagcgtcgataacatcggaaaacccagctttcgacagaaaaccagatttgccaaatctcaaccatttcagaccaaaaaacaccagttctaaaaaatacgacacatataacgaaagcaaactacataaagtctaacaaaatgcttaaaacacaacttacccattataatggtgtaagattcttgagtgatattggggtgtgctctaattttccaccaacgcccaccaaggaacaaccattgaacagggaagagagagagggacgagagagtgggacgagaaagagggaagtttttgggaagttttttcagttttttctagagacagagagtggtgcacgagagagagggaagagagagggaagttttcaatttttaacaatttttttttttaaaaaaaagggtaaaatgggaagttcatgtaaccaatagaattaatttgtacaaattagtggagggtataaattttgatatgaggtattttattaagggcaaatagtgaaatttcccttgccaaatataacaattgcgtggccgtatatatatttttactatttcatatttgggtttattgatttatacattcaaagtatttttttttccatttatacattaaactgatataatttacaaatatacgatactttacagtaaatgtcctaattgcaacccacacagtcagtgacggacctagaaattttactttgtgggggtttatttatcactaaaaaaatatttatgcttatagtataatcacttttaataaatttatttaattt

SEQ ID NO: 93517 - DNA, 653 bp, Cannabis sativa
tatgtttttattatatataatctacatattatataatttatatacatatttataaaaaataatagaaagttcaaactactatatttttttatgacagatgatttaaactttaaattttatctttatatttatctcattatcacaataactaaaatataacaattgaatgtgaaaaaaaaatatattagtgttcggtttgtacgggttaacccgactaaattgacgaattcattgggcggggagaaactttttttttcttaattgggcgggttgcacttagatttttgtaacccgatctttacattgggttaaataaaatgtaacgtgaaccgaccaaaccgaccgacgtacacccttaattatcacacaatagaattggagtttttttttactcacaatactctaccaatttttgtcaaaagagaagctaattagttgtactcgaactccatactgaaattagccaacacagtttgctttcatttgtcttatcttatataggttttgttttagattttaagatgagtaatttgcggtataaatacttaagttttatattttatgccgagtagcaaataagtacctaaatcgtatttttggtggtaaaaatatctttcgtcactagtgtggaacttctgtaagtacctgaccgt

SEQ ID NO: 93518 - DNA, 774 bp, Cannabis sativa
aacgtatttgtaacaaaatttcactaaatgtgtgttacataaattatcaaatattttttttaataaaaattagagagaagttgaagaatatctcttttatatattaattaaaaggataactacataaagtactatttttttgtaaaaaaattacatttttatatttaaagattatttatttttatatttttacggctttctataaaaataacacgaaaataacaaaaaaattacgtaaaagtaacatgaagataacgtctaaacaacaacaaaaaatagcatacaaataacaaaaaatcaacaacaattaacaagagtgcaacacaaaaagactgtattttttgtaaataaaattaaaaaaattgtaaaaatatttaaaatttcgtgaaactgtattttttagtttttttttttattgtttttgtatatttgtgaaataatcccctaattaaatttacctccaaataaaatttaattcaaatatacctctttttataagtattaatgtacttaaattattctgacaccctcacataattaaaatataattttaactataatagattcatgttctttagagatggatgtgtaggtttgttgaaaaattagggtaaattttttattagagaaaaatagagaatatcgtaaagtgataggagtaaaattagtagaataattgagaaaaaaagtaaacataataaatttaaaataaaaaaaaaagataaaaatgaaaagtatcaattcgaaagaaagagatatatagtgtaatttatg

SEQ ID NO: 93519 - DNA, 574 bp, Cannabis sativa
aattagaattcaatttttaacattatttcaatttaattgtaattcaaaataactattttattagataagattagatgttgtcaactcaagtcacaataatttatttattaaattaatgcaaaatgttttattttatattttttatatatattttttaaaaggaaaatgcaatgtaattaaatggaattaatgtgcatcttcttattcgaatggtattatgtaacttctaaccatttttctttagtttttcaataaaaggaagtaaagtcatcaaagctaaattgacaaaaagcagcgagactgttagtccgagtaaattgactaaatttgtgagcagtttagttaggtagataattgttactgcaaatgatgtttgacttcgatgcatgccatgccatgccaaagtagaaggggtgacaacatatgtcgtgtcgtgttctgttcgtgtgaggtgttgatctgttttttgactcgggtctattttctcaatcttaattcgactcataaaaaattgtgttgtattcgtgttgacccacttttacctatttttctattattaaagctaacattgtag

SEQ ID NO: 93520 - DNA, 699 bp, Cannabis sativa
acgcacacacacatttgagataccgtctaaacatcgattaataaaccaaaaccagatttgaaaaatgctcaaactcaaataacgattaacaaaccaaaatgcagtttttacaaaaaaaaaaaaaaaacagatttgaaagaatgctcgaacatcgctgcggctccccactatcaacgatgaaacctacaaaagaaatagaaaatttccagatctaaaaaagagagattctgaaagagtgatagagagagatagaactatacctttggtgcagcgtgagttcaacatggcaaaatgaggctaacggtcactaaacacaagggtgggtcattggggcttggcgtccatcgcggttgggtggttgttgggggctgtagtgggaaagtgaatcgagaaagagagaaggaaaaagggaaagatagaatgaagaagaagaagaaagagatatgcaactgtaatagaagaaagagaaagggaataagatatatttaagtgtaggattttgctttaggatttgtagaaaggactttcgcccatttacatttttgactatataatgggtttgcgaggctttaaaaccgacgcaaaattgaaaaatgtcagtttcaaaaagtcacaaaatgtgtttgcaaggctttaaaattgacgcaaattctatatatatatttttaaattcttccttttgtctcgattatgtaatta

SEQ ID NO: 93521 - DNA, 682 bp, Cannabis sativa
catatgcaacgcccttgttatcagatacttagtttatataattaatatatctgcaatgcacgagtgcattgaacagaaccttttttagaaagaagcgatgaccattctatctggatcaatagagctccgaatgagacaagagattttatgatagagctggttgtgttttcaagtacttttaaattggtgagaaagcttgctgatgattccattggtctcctcttaataagacagcattgtaagttccattgcatcaagcatgtgaattttaattaaaccaatatttatatttcatagacatctagaatctttacacggtcagtcttatttgtttaaaattttgcaaaggattatatatacaaatatatatttcagtagagttgcaaacaaggaagaagcagtgaacaacctatctggatctacatatctccacaagagacaagagatatttggtaagtaaatgcaagataattaaacgttaataattattgctcaagtccccatgtgacatcaaacaagctgcaattaaattattttgataagtaagcctatcgtttttgtttttggtttgattgataattttatttttacggtagccatggtagaaatactactttcagtactcatgtaataaatgcttcaccaaaaaaaggaagaaacatagagagcatcaaatggacaa

SEQ ID NO: 93522 - DNA, 625 bp, Cannabis sativa
taagaggagtgttactgtcaatctcctattataatcttttagttaacttccatgtccaaaaatacatatcggattagttttaatttttttttcatagcgatgttcgttttacttacaacattatccctgtaaattttgaaattttttcgaatagtttacagtgccgaaaatacgtttgaagttttttgaacgcgcatggtaaaatgaaatatcagaaactctgttctcggtattataaactatttaaatttttcaaaaatttataagaatgataatgtgactataacgaatatcgctataaaaaaaatttaaaaaagatattccgacatataatttcaagtacagaagttaactaagaagttgtaattaccattccttattaaataaagattaattaagatttttttctctcaaccttaacatgtaccaaattatgctgtgaacttttttggccgttaaataaaggcttatacacttattattacttgcaatatactcaaaataaaaccatctcagtcaatgcttaaaccctctttaaatacgattctctcttctcattaacaccctcccttcctctctctctctctccaattaaactcttaatctctctttctctctctaatta

SEQ ID NO: 93523 - DNA, 561 bp, Cannabis sativa
cagctagaagaccaacatatgataattatatttctctcacctcaaaaagacaaagctaaaagtggtttatcatgttaacttggctggagatatcatgaagtattttcctttgtttggttgtatgcttttatcatcttcttacacttaaaagtagaaaaaaaaaaaaaggcacaaaagtaaaacaatgacttctttctctgttcaatgcagtaaagaggttttcctactcttaaaagcaatagtaaataaatgaaattctctgattatatatgcatatatgtttgttacagatgccgttattgcagcactagataaaatttcttatccaaagccctcttaggaaatagtacatgataagagtttattagtcatttaataaaataaaattaaaaattaaaaagagtgaagtaatagcataatatcttgttcctattatcatagtcattttagcaaacaccttagctacattcaatcagactataaaaaagaggaaactggtgtatcgagttggggaagatgcagccaaatgcaaaaaaccccatcatcagaattcaagaaaaa

SEQ ID NO: 93524 - DNA, 710 bp, Cannabis sativa
tggaggcttgaagcggggacgttacaatgacaatttttagagatgttagaactatttgattaagcatagggaaattgatcgctcatcatagataacatctctagagatgtagagtctaccatttgaactaagatacttgtagcctttgtgattaaggctataccctagaaaactgcagggtgtggatctgattggagcttgtacttattgtagggtcttatgttaggataataagtgcagccaaaggttttcaaccagctatagtcaggcttgaagaacttctagaggagatttatttcctaatactagtgttggaagtctatgatgaaggtagacagaagttctaaaggcctcatcccaaaacttaaagggtaagtgtgcttaagcaagtaaagcaagaccattttcaataatgtgtctatgctttctttcagcaatgtcattctgctcataaatagttggacaagggtgtatatgagttattcccatttcttgtacgtgactaatgaatgacctatattctcctccctaatctgttaaagacatttcactttaaatcctagttttaactcagcctcacaattaaagttaagaaagacctttaaagccttaaatttattctttaacatgtatatcctagtgaacttagagtatatatcaacaaaatgaacataatatctgtatcgatttaaggagtcagtgtgtgaagg

SEQ ID NO: 93525 - DNA, 666 bp, Cannabis sativa
cacctgtacatgctagattgtagacatgacatttattgttttaggtatgatgccaggctttgtcccccacattatgccatagtatagagcatgcgcacctagttgtacctgcccaatgatccaacgaccatcaataagggcaattcaaaaagggaagaacttgtggagacacttataagatgatcgtacaatacaagctgacatctttaaacatcatgttatgaattggccacctactaaataaacggtcagattcgccttagcaagatgttctcaataagcatgtgaagggaaaaatggcctataaatacccctgcattctaggaattaggggcaactctttgaaattaaaaacaatgtattttacttataaaaactcgaaaaaaattcctattaagcttgttcttcttcaagaggaatgagaggaatatagagttccagtccatagtgtaactactagtgatgttcaccacctgccgatatgactaataaaatagactcgtggactaaggatagttaatatctgaaccacgtaaaaatgtcaaatctattttttattactttatttctttcttaagctctaaatattggtttccaaaaatctcagtaaatattttggtgatttaattgagagctaaggatagatagaacatgcatgatgttcat

SEQ ID NO: 93526 - DNA, 560 bp, Cannabis sativa
  modified_base (59)..(69): a, c, t, g, unknown or other
cccaggccccacaattttggaggccccgaaaaaattaaaattaatatatatacatatannnnnnnnnnntatataaatatttaactcaataaaatatatgaaaaacgtgtagcacagatggtaagtggagcctttagtagccttgaggttctagattcgatcccttcctcaatcacattttagatgtgctaaaatatattttttatatttataaggaataaaatttatatttattatctatttttttttttaaaatagataatatttaaacacattttttttttcaaatgtgctaaaatatatagcacttcaatagagatgttcttagtaattaaatattacttgatctctattctttaaaatatatataatttaaacacattattatttttttctttcaaatgtgctaaaatcaggaccgtcttaaatattttgaaggccctgatctaattttaaaaattaggcccctataaaaaaaatacaatttttaaataacatttttaaatattatcatacggttatatattttacaaaacaccaaaaaacttcaattaatttat

SEQ ID NO: 93527 - DNA, 542 bp, Cannabis sativa
  modified_base (434)..(457): a, c, t, g, unknown or other
ttatttttttacatttatatgagtttttttatgctacatttttataaaaaaatatagaaatctcatatttataaaataataataaattttgctagaaaagttactggcgtcagaaaagtcgtcgttgccagaaaaggcactgttaccgaaaaagtcaccgtcaccaaaaaagttgccaaaaacgttaccgttaccgaaaaaattattgcaaaagtcactagaaatagatgtttcaaacataaataaaaatagaaccggttctacaacataatgaataaaaacaaataatacaaaataactcaaaccatttataattgaaatataaccaattttgtaacataatgactaaaaacaagtaacacaaaataactcaaaccagttataattaaaatagagccggttctataacaatattataatgaataaaaataaannnnnnnnnnnnnnnnnnnnnnnntataactaaaatagaaccagttatataacatactgaataggtatttttagagtagactagcaaaaaactacgtgcgaggcacgta

SEQ ID NO: 93528 - DNA, 531 bp, Cannabis sativa
taacttttatatttatagaaaaaacttcttttagttaggttgtattctattttgttgtttaaatgctcactaatcattgtaaattatagtatttttacctcataaactttgacaataatgaaattgtatctcctctgaaaaatataagtaattcattttttttaaatttctcaaaatattaattaaaatcttacaaactaagaaaaaaataataattttgaatgattaagaaaatttaaaaaaaaaaaaaaagaaaaacaaacttttgaaacaccattttctccatacaccataatttttgctcgtatttcttttaaatcttctagttttctaacccataacacatatacactatatataaaaattaatttattttaggatatgaaattttttcagggtttttagagaacgacggtcggctaatggcgacaattttaaggcttttgacgttgtcttttaacttgcattgaggtatacatcactttaatttatgcctttaagcttatgttacatcttttagggtgtatgatt

SEQ ID NO: 93529 - DNA, 573 bp, Cannabis sativa
atttttattttgagggggtatgatttgatagttgtcaaattttaggggtaaagttactaattgaaaaagacatgggaataagggaccgaacctaacagaaggactaaatttctgtaaatgtaaaagttcaggagaatttttaacaagccctaaattttagcaaccaaaatcagtattgtcgaaagttctaaaggtaaaattgctaattattcttaattttttaattattttacttgaaaaaaataaagtactattggagatgcttttaccacactactagtgtctagtactgtccaaattttcttaatatttagttttagcacaacagaaatataaacttctctagctagctaagccagttaaaattcggatcacaaaaacatcatataatatcaaacttaaatcaagtaataatgtgagattaatcttataataacctaaactaatttaattaccatgttatatatatatgactctgtaagcagctaacttgaacgtacataactttttttttttagggaatgtaatgttaaatattcatatgttctcctcataatgatttccagatattaa

SEQ ID NO: 93530 - DNA, 519 bp, Cannabis sativa
tgaattttgatacctgggatcccggtctatatggttattaatatataaattattaaaattaatttccgagtttattattataaaatgcgggcgttacattattagaacaacaaaaaattagccaattttggccacaaatttataacaaccaattaattgacaagatatatatacatataattaattgcctttaacttctttttttctttattattctttcttcatgagtacataacaattatactatacatatgcactaactaagcgccaatcaaggccagtttaatttaattatacatatataaataaatgattaaataaataaaagcaacattataaaaaaaacttacctttagtgacaattttttaatcatagtactaattttttttgactaaatgtgacttttaaaaaaataattgtgattaaaatataatatttaaatataagttgtcactaatttagttttaatcacaataaatattgtaactaaaattaaatatatttaatcataataaatt

SEQ ID NO: 93531 - DNA, 763 bp, Cannabis sativa
ccaattttctatttttgtgtgagactctttgtcgtaaggacaagttggaaaggttacgagttgcggtggggtttgatggattgtattttgtcgatgcgagaggtcatagtggtggggtggccatgctttggcgtaataatgacgatgtgcagctgcttaactattcttttcattatgttgatattcagatctcggaagtagcttctcttccttggcgtttaacagggctttatggagtacctaatagagctattatgtataaaacatgagatttattgagatcgttaaagttgaaatcttcccttccttggtgtatcattggtgatttaaaaaatactactagtcatgcagataaaagaggaggaaatagatatccgcaggtgctggtagatggttttaatcaagctttgtctgactgtgatcttgttgatatggagttaatcgggtatccttacacttgggagcgtgggagaggcactgattcatgggttgaaattcatcttaatcgagctcttgtttgttctaactggttccagaggtttcgtatggctcagctacataatctggaagtatctgcttcagatcattgcccgctgcttcttgaaccaacggtgcgttctgtgacggtgccatttcgtcaattccgttttgaaaatgtctggcttcgtgaacctctgtgccgccagcttgttaaagatagttgggacctttgtgaaggtcagcatgttatgaagaaaatctcttattgtggggaatctcttca

SEQ ID NO: 93532 - DNA, 586 bp, Cannabis sativa
aatgcaatgtatctcgatacatatcatacatggcgatatatgtataaacggtgtgcctattagagttgtaaatacggtctgagtttttgacacgacacgaaattgatacaatttcggaaggtgagcatgatccgacataaaaaaaataagtttgaacacgacacaatactataaattggcatgatacgacacaaaaaaataaacttaagcataacacgacacaaaagcacaatagactaacccgaaagcataacacgttaaaaattcttataataataatagttgctatatgtgctttcaaaaagtatacacgtggcattcccaactcataattaatcatttaaggtctaatcaaaagccttattaagatagcgtacccaagatatgtacagaaggatgggcctcacactgacctatttgaggcacaagataaaaaggagtagttgagactctccggatgagcatctgggatacaaccaaaagggcattccaagaggcgttccatgaacctagtcctggatggcatggcaaagccctctgacatcgaattccatcgagtgcacccactaccaaaaggaaatccccc

SEQ ID NO: 93533 - DNA, 930 bp, Cannabis sativa
ctagtcccattaggtatcctccagaaaggcctgccacaaaggaaaatcctacgactatgcctgaaaagaataagaaggcctaggatccacataaaattcgttctaatctcccaaagtggaaaggtctggagggtgtagatttccaaaaagaaaaactagcctctaggaccgtggaaatcgaaggagcgtactccatgcatcaaagccaggaaaacaaaaggggtctttcaagaaagatccccttaatgatcttcgacacaatctcaatgccaaagacggggacctaagggcacgtcttgaccaaagaaagaaagctccgtcagaaatatactagaagttgagctcccaaagaactttaagatgccttaaatgactatgtatacaggttacatggatcccaatgatcacttatctagattcaacagagtcatgacggtcatgaggttcagcaatgagactaaatgcctgtgtttcccatggacattgggaggatctgtataatagtggttcaaaaagttagaatcaggatctatggattgttggaataaattgtaaactaattttagaagacaatttgttgtagctagaaagataaaccttgaagttagtgccttgaataacatcaaacaattaccaatggaaaccttgaagaacttcatcaagaggttcaaagaggaggcttccaaagccaagaatgtaaatgacagacaaaatttggttttattgtaggatagaattcggaggggaactcccttcgagaatgagttgcaataagaaggtgcaactagcgttaaagatttccaaaagagagcctagaagtatatcaacctggaagaagcccaaataatggttttcaggggatattatcatgctggatgccctgggtatgcttctgaagtgcaattcccaagtatcacgcttcttgccact

SEQ ID NO: 93534 - DNA, 759 bp, Cannabis sativa
attttagagcgttagcaaaaccttaatgcaacttttgagaagcataaaaaaccataatcatatttcaatgtacatggctctagatgcaagaaaatttactatactattaattatttgacatgaacaaatttttcattggaaatctagaaaataatgacaatgcaacgggataaacattagctacagtattgatgcatttttttagattatacctgattttgaattgattgggagctccacatttatttattagagatatttttatgaatctaaaaattgaaattaggaggattagtttgatgcaattaaaattgtaattcattgttaaattaatgtttcaaacaagtttttctgttctttctttcatcaatgcaaaacaacatttgtttgaatggattttggtctttttctcaggtgaagtcaccaaaattaatgatggttttttggttggttgggtttcatttcggttttcttgcggggttgatcgatctaagcttgcatcacaaggataacaaagtgtttgtttttataaatgacacattccttgaagaagactatattaagaacttcaagccgcaaagaaaagtagtgttagaggaaatactttcagaaataactccatctagtgtccatcatcttctactcaactagaggattatcctaccctctcggttgaaccaatgcaagttgatacaactgagaaatctaccacttaagttcctgttcaaaaggtcgcggctcctcgtcgtagtgggaggg

SEQ ID NO: 93535 - DNA, 946 bp, Cannabis sativa
ttttgttttaaaatttaagtggggtttggttggatgtaatagaatagaatagaaagaaataattttatttatttatttaatggtattttaaagtattaaaatatcatgtaatgactatttttattttgaacgggaagaaaataatcattctaatacaacatgtgaaaaaatttcatgattttttaatacattttaaatttaattttattatattcatattactatttttattttcattctcattcttattattattcctatatttatattcaatctaatcaaataccactttaattttagtaattaaaggatagaagcaaaaactctatcaaacaagacctaaatttagtaaagtataacaacatgttttcacaaattgttatgaattgacatgttgaatgatgtgataatatttattaaaaaataatccaaaatatgaaacataaagtaataaactgaaaactattgatgtataacattttttaatttagcatgggggaagcttgtattgcaatctaattaactataaaattctcgtcacactatgtatataaaaatttgttggatcttgaaaaaataattttttttaataaatttaatcacactatccagttatcaaaattttaatatgagattaagatttggtagttatactaagtgtattaattaattgataaaattatataatttaaatatttaatgtttatttataaatttacagggtgttgcgaaactgctcgatcactggtccaattcctgagttcatcggtcaaatttcttcattaatacacttgtaagtaagtctatgagattgattattgatctgcagcaaaggaacataattgattgttttataggtaatagtaatatgattttttttttcttgaaattaataaagaaaacattgatgtatattgagaaatagttttcccaagttaatttctcc

SEQ ID NO: 93536 - DNA, 946 bp, Cannabis sativa
acgaaatgactcttggtttctttcgttggtctatggtgggtaatgatattttcaatcttgttctttcattctttgaaactggttattttcctccaagtttaaatgctactaaccttgtcttgattcctaagaagaagcatcctttaaatatggtggattttaggccgattgctctttgtaatgttatttacaaaatcatttcaaagtttattgcaaataggcttaaagctatccttccttctattatttcggaaacccaaagttccttcttgcaagggagattgatttctgataatattatgatctcctgcgagattatgcactatcttaagaggaaaagaagagggagagatgggttcatggctctacaacttgatatgagcaaagcttacgacagattggaatgggggtatcttagagctatgcttgaaagaatgggctttgatggaagatggataaacttagtcatgtggtgtgttagttctgtgtctttttctattgttcatggaggtcatgaaatggaccctattgaagcctctcgtgggataagacaaggagatccgttatcgccatatctttttattctttgtgtggaaggattttcatgcctcttgcaaagctatgaaaaaagtgggctcttaacgggttgtaagatatctcgacaagctccaactatttcttacatgttgtttgcggatgatagttatatttattgtaaagcaacggaagaggaagtttttaatatcaaagagttgctgcttacgtttgaaatggcttcaagccagaatattaatttccaaaagtcttcagttttttacagctgcaatactagtcctggtgtgcatgaggctatttgtgatttacttggtatttttgaagctgatgaaaatggttcttttttggggttatcgtactcgattgagaaaaataagaacgctattcttgg

SEQ ID NO: 93537 - DNA, 565 bp, Cannabis sativa
atatctctgtgatatgatcccagaattatagggattgcttttgtgattcatgatgcaagtgttgaggttgataagtgtttgcatgttgttcggactgtccactgcctggctaggaaggcttcgtccgtgaagatatatgcgatgttttgttcgacatatctctttcgaacagataggtgaagtcgattccatgtgtcaccagtttgtgatgacacatgagagtgtcaaaattgggataacatttgccccccaagtctgtacgggacttctgaagttgcgtgtagacttcatccaagctgcctttgcattggaatgggtgacacatgttaggcgcgtctgttcgtgattcgatgtaagggtgaccaggcgtctctttagttttcggctaattaatgctctgacttaattagtgcctcaaaacccggtatttcgcatcacgctttgatggttacacttgattaattttaatttcccaatatttgcttttgggagggaaccgaagcgtttgaggcatcttgaaaaaattacctcttttcactaattgcctataaataaggctgagctt

SEQ ID NO: 93538 - DNA, 856 bp, Cannabis sativa
  modified_base (44)..(50): a, c, t, g, unknown or other
agagtttaatttgtcataacacctttagatcgaattattattannnnnnnttttgacaaaaaatcagtttagaatcttatttgtactattttaaaaaacacatagtctattttatcatttaacaaaataaaaaatctatttaataacttttaaaaaaacacaaagttgaaaataagatttaccctaatataaattatgtttgtatagtctatagtaaagacaaaaacaaagccggctcaaccaatatgcagttgcaaattggaattggagttggaattggaatttgcatgcatgcacggcccaatatcccaaaaagaagtatatgtggaaaaaagaagccgcctttattaaataagttgttattacttattatctgcatccctatatataaaacctataccactacattttttatttgtttttatagagggggattttttagtttattttttttttttattatgtaaaattatttaaaatattatgtaaaattttaaaaaaattagaatgatttataatataaaaagtagtattcaaccagtttattttatatatgtataaaataattaaagattttaattttattttcagcatattaaattttttaaattttttaaaatgccttaaataattacaagtttacaacattatacaaacataagaaaaattagactaaattattattccaaataattattattattattattattatgtgttcttttcttctatataaatagatttttgaagcttgttttggatgcatgttacaattatgcagccgcctttatagacggtttatatatatataatactctttcaatgaaagttcaattgttccaaaaaaaaaaaaaaa

SEQ ID NO: 93539 - DNA, 748 bp, Cannabis sativa
ggtttctttctcattctatataatactacttcaaaatcaattttaattatggatagatatttatctgggtattcatgtataaataagtcattcatgcaacattcaacattgtaaaaagagcatccacaaatatttttaggatagattatataaaatataaacttacctgaagaaaaacatacaaatctatgtatatcaatttataaaattaagaaaatgacatgtgacttttgctcctattctatagaagacactacttaaaaatacacaacatagtaaacttacattcctataacaaataacctctatcaatatgcttcttacatcaaaaaattataggtacaaaccaattagacatatagcaagctacctccaccaagtccaactgctattttcgaatagttttgaccaagtgaatgcattgtcacaaagaaatatgcaaccacagtaccaattatcgtggaaactttttaaaaagactttaatgtatacatgagttgattaactgattttaaattcataaggaatagaaaaaacattaagttttaacaatatcatagtctaaaaagaacaaagatatgacaaattaaaaacataaaaaaatacaattaaacaaaaaaaaaaatctagaagcaagtgagatggtatacatatgctggacagaaagttttaattgttcttgctgtgagtagaaacaaaattgctctcccctccattccaatgtttgtcatactttgaggaagaccat

SEQ ID NO: 93540 - DNA, 875 bp, Cannabis sativa
tttcacaaaatcctccatatgagttgtacggatggcaatattgtaaaacttttcttcaaaaaagttcttaaactcttcccaagtcacagtattaaggtcttgagactgacctaccaaatcccaccaggtgtgggcatgctcttaaaaaatgaaagcagcataattaacccgctcagttccaactactcccatattatccaaaatacgagtaacaatactcattgattgttatgcctttatattatcaataccacccaagaatgttggaggttgcagtttgacaaaccgtttaaaaactgaatctctatgtggttgaagagctgatttaggattagctatcactggggccaaaactggagaattcacttgttctaccagagttgcatgaaccagttgcctaatcgggtgaaactcttcttcttgacgaagtatgatcgcatttcagtaaacatttactgtcaatcggcaagaggattagcattattcatatccagagtaatcctagaattttacggaggtgctggtggtgtcgatgaattggttggattatcatcctgctctacagactctctctgtgatatagttgatttaatatggtccattctttcaaacaaccctgaaatcaacaatcccaacaagtcatacaccaattccacatttacacacttcatgccaaaacccttaccaatacatataatttctttctcaaatataacttatttacactcacaattaatgatcatgattttcattatatagcaaatttttttagatgctcatatgttgcctattaccaaagcaaaaaatatttaatcacataagcaaataagtatttactctcaacacttatcgcaccatgagtcgagcttatcttt

SEQ ID NO: 93541 - DNA, 552 bp, Cannabis sativa
cttcatcgtgtgaaaactcattttcaaatagtaagtgatttattcctttctttctggtcttttctttttcctatgttatgatcgctatttgtaattaattgcatctttgttcactttatttcattttagtgatttcgatttaatttctcgggtaatttttagggttttaatcagagggaaaacttaggtttattccaatcgtaagcttcgagttttaaacaaatttctttcagaaattaggattgttctttttacagaaatatcccaatctggtttcgaaatttcaactccagaattcttagaaatagaatgctctaaggatttaactcttccatttaaaccaaacatccagaaacctcaatcctttcttgaataaatgatgaaaagattagggaccatttaataaaaaccaatcaggacaaagttgctaggcactataggcaattttcacaagagataactgagggtaaatgtcgtttcttgtgagatgcagcttggccaaaacctcaatttttatcttctattcccctcgcgagaccaatatttttaccc

SEQ ID NO: 93542 - DNA, 884 bp, Cannabis sativa
  modified_base (55)..(55): a, c, t, g, unknown or other
  modified_base (826)..(837): a, c, t, g, unknown or other
ttttagtcacaataagtattgtgagtaaaaacatatttagtcacaacaaattgtnatttttgtgactaatacctttagctacatacggaccttgtagtcacaacatagtagtgatattttacaattagtcacaactttttaacttttaaccacaatcttttggttgtaactaaaagtaaaacattttgtaattccacggttggagagatggaacctattaattatcactttttttatttttcttttttagcaaaggatcaaaaataaaataggaaagatatcaataaattaatcaaagaaaaaaataaaaaattagtgccaagtaaagcatagaaaaaagaatcaattaagcaaataacaaaatatatatatatatatatataggaatcgagattcaagttggtcaagctcacccaaaatatgcgactgccattgctgactgacttggactcttggctacggctgaaaatggtggagaatggagattttggcgaagaggagaaggcggtagtaagtgaggtctggtttgagtttcttctttgtacgtctgaatcacgtaggataaaagggttgtaaaacccttttatcctgacttttatttaaaaattggaataaaaaggttttacttaaatcatgtggggcgagtttggctaatgaataaaaattgagtcttgaactcatttttttcttttgatatttttttaatgttctatcaaatagagttcttatctaaaaaaaactttagctgcatatttgaggagtcaaatctaaaagtaggattaaagtcttaatatatatatcttttgggtgactattcaatggttannnnnnnnnnnnaaccatatggttacattttttttaacctgtaatagcaggttactaat

SEQ ID NO: 93543 - DNA, 901 bp, Cannabis sativa
aagttctttgatagtgatgaaaggagaaaaaaatcaatggtttatatgttctccaaggagaaactgtcccagccggagagacaagtatggtgaaagggctagaattagatatgaagttgtggcatcacagacttggacatatcagtgaacaaggcctcaaagaattgcacaaataaggtataattgaaaatttaaattcatgtaccttaccattttgtgaagcttgtgttttagggaaacaacataagctgaaattcactccgacaatgcataccactaagaagatactcaaatatgtgcatgctgatctttgggggtcataaaaagtgcctctgcactccagtatgcaatattttctttcaatagttgatgattatagtaggtgtgtttggacctacttgttagcaactaaggataagtgcttggaacagtttagaaattataaaagttaggggtaaaaccaaacaaatcttaaaattaagaaccttaggacagataatgggtttgagtttattaactccgaaattgacaagatgtgttaagaatttgaaatcactaggcatagaacagtagtgaagaccccggagcaaaatggggttgctgaaaggatgaagagaatcttgttgaacaaagttagatgtttactgttcagtttcggattagaaaaaccattttgagggaagctctagcaaccacaacctaccttataaatagaagttttagcgattgtgtacttacacagtatatagtatttttgaaaaaaaattcacctcacaataaaaaagtaaaaaactaaaaatttcaatatgtagtgtaaaaatttcaataaaatattatattttaagattttccgccagttttgattaatgaaggttagatattttttttctttatttttttt

SEQ ID NO: 93544 - DNA, 1522 bp, Cannabis sativa
  modified_base (50)..(67): a, c, t, g, unknown or other
tttaacatagtattatataaaaatatgatatataatccaatttaatatannnnnnnnnnnnnnnnnntaatacgacgttccaaacgagccaaaaaatataaaataattaaacgccgcaaacgagcaatacataatattatttaataataaaaattaaagccagcacgtaatatcaaacacctaagttttggtgaccaaaattcaaaacatttttttaaaaaaaaaataataataagttttttttaaagaaaataataataataacaagttttgtttctttggggaataaaaacaaaaccttcttcccacttcgaaggtctctaaataattatatgtatagatataaaaatgatattgaaagtcatgatataaattaaagaccaagtcttagctgtttaagagtgacccataactaaaggtcgtgtggactcatgtgtgtatatctaactttttcgaagctgcatgcacacccaaaaatcaaccaaatgatactatatatgtataatgtataattaaagattatttgaacacaataataatagataataattagggattttttcttttttttttttgacgtggtgaacagagtcacacaagattaacaatgcaacaaactagagtcagtggtggaacctcctcgaaccaggatagctcattgtctaaccgaaagtcatgttttgccaaaccatgagctgcaaaaatctaatcacgagccacatgggacaaaactgcctccggaaatttagacaataaagctataacaacttcatttttaaactttaaaatagtttttttttttttttgttgtatttttacgaaattctacataaaaaccctattgcaacgaaaaatcgtacagtctctattgcaattagcgtttgcaaacactttagaaactcaaaccgtaaatttgaaaaaaaaaaagttaaaaaaaatagtatacgaggtaatttccctaataattaggtatatatgtttgattgattcatagtaattatcgtaatttaatagtataatactatcaatcaagtctttctccctagatttctaaatcagaagtaattttatttttttgattatcaaaagtatagaattatgatgagacgatatatttatagagttaagaataagacttacataatcttactggatctgctcatcaaagactttaattagctagaaaagtacacacttctgcttcaactagactttccacacatagatactaagcccattaactattgatcactaacaatatgagctgacacaacaaaaaactatctattcaacccatattatattaaaactaataaaagttaatgtggcccaaataagaagtctaaaattctctcatttaggctacatattaattttaatacatatagtatatatcaaaataattttgtttgaaaatgactcatagattgaacaacagaaaaatatttgtggccacttcaaaaatgataattttttgatagcatctcaatatatcctttgatattgaactatgacaatcata

SEQ ID NO: 93545 - DNA, 581 bp, Cannabis sativa
atccatttcttaattccgggtattacaaagagacttacagaggttaagtcttggagctcgaggtttagggttcggagatccaaaccaagaagaagacttacacggagaaaagaagaagaaggagttagtaagatattcagagagaaagagagaaaataaacattgtaaatgaaatggattaccaatcgtacctgtgatttggaatcctgctttgtaactctttgatcttaaagatctaatagtggaaacgagcttttctaaggcaagctcgaagaggatgtacccagcaacatttggggaacctctataaaattctggtgcactctttctatttttctttttgctcttactattattgttatctgtttgtgtatggatttagggttgttttttatctgggatgggatatattggatttctgggtttgagttgcagcctttgagtttctttagaagaaactcgaagctctgctagggtttaaagttttgttttgtgtttctgtgcatatgtttacttttagagggtttgaatggttatgttggggttgggttcaaacgacttagcatttttgaatagctcat

SEQ ID NO: 93546 - DNA, 716 bp, Cannabis sativa
tagtccacgtttactctgatccggtcgggcctagggagcccccagcgaattatttgaattctagagccatcatcatgagagtgagtcgagagcccgatagagtaaatcctccagtgactaaggaaatcctcgttaactttcttcagcatattctgcataggccaattttcattattgtggtagtttttgtttcggaacatccagaggttgtggtagagactagcaacatagatcaagaactttgttttcccaaaagcttcttcattgtcctaaattaaaggaggattaagtatccaatttaccacctcaacactagagtgaagagggaaatcactaatgcggatcttccaactgctggaaagctagaggaaattagtaaccgcacacgaggagaaaaaaatgatcccatgtgtcactctcttcaaggccgcagagggcacaactaccaattggattgttaaagataggggtgttcgcgatgcgggtggtgcaattttttcaatttctcaaaccgcaaaaatcgcacctcaaaaaatggtgcggtgcggtgtggtttatgcagtttttgtggtttggactatcattaaataactaaactatcacaaatacaaaaaagtttgaaatacttgtcaaaataccctaaggcttgaaaataaatatgaaaagaaaaagtttcaagtttcaacaatacaataattagtgggcttaggttggac

SEQ ID NO: 93547 - DNA, 838 bp, Cannabis sativa
cttcaatccataaatggattaaaccaacttgcacacctttcgatcattccttggtaacacatacccttctggttgttccatatatatagtttcatcaagatttccatttaggaaagcgatcttgacatccattttgcatatctcatagttatatgcaacaagtatgaaaataagaatgtgaatggatttaagcattgccacaggagagaaggtatcatcatagttgatgccttctcgatgtgtgtatcgtttggctacaagcctagctttaaaaggtctctaccttcccttcaatattttttcttcttcttaaaaatccacttacacctaatgggtgtaatatcctcaggaggaatttcatatacctagaccttgttggcgcgcatggagtccatctctgaatccatggcattgttccacttgtttgagtcaaggtcatccattgcttttttgtaagtcaatggatcatccttgtctgtgtcagagacaagaatatgtgcttcatgtttgtagcagacaagttgtttcacaatcctcccattacgatgatgtactgtggtttcctttttaagaactgtgttaacctaatttttaaaaaaactgttttgattaaaaaaatataataaatttatttgtactaaaactatatttacttatttattatatattagaaaaataaaaaaaatataaaataaattaattgtaataaaataaacaatagttaaatctcttatttttttaaaggctaattagtaatttttctccctaaactttgacatgtagtaaattgtgcctcctgaacttttttggccgttaaaaattcccccgaactattgag

SEQ ID NO: 93548 - DNA, 521 bp, Cannabis sativa
gacaatagctggagaggttatataaaaatatatagcgtctgttattacaaaataaccgacgccatgtgtattttttcataaaaattaaaaaaataccgatggagtcggttattacaaaataaccgacttcgtaggatttttttattaaaattaaaaaattatcacctacagagttgattattacaaaataaccgactttgtaggtgtttttaattaaaatttaattcagccacactctgtggcgtcagttgatgattaatttactgaaaaaagcatctttaaaggcatgtcatgtcgtattagaactattaaattttgaatacttattaataaatactcaaattattattatacattatattataaggtttttaatttgttgttgtttcagactagactatttgtgcttgtcttatcatgtcgtatttttttatgcgtggtcgtgtgctcatgccttatgagttcaaaccgtgtaaaacaaactcgaccagtattttcagctttaggtgtgactatatcta

SEQ ID NO: 93549 - DNA, 533 bp, Cannabis sativa
ttttttattattattattatgaatagaaaaaaaaaaaaaactaactagattataattgtttttctttagcctatttttttttagaaaaaatgctcattttagtaatttttttcattatgaagacccaaaacacaacaatcaaatcagtttaggagcaaaaggcaacaactatatttaaatggataattataatttatatatatcgaaattagaagatggcatcgacattatatatgtacaatgcaatttctttcatattaattatgtaacacatcaaaactcatgaattgtcacctatttccaaactcattacaaaccaagtaagaaaaacaaaatcgataaataattatacaaacgaaaatgaaacacatgtatattaaaaatcaaaaatcaaaacccatgaaaaaaataataaacaaactcaaaacctaccaacgataaagggagttccgatcaacattaaaattaagttttgtcaagaaagaatgcgagaacctcatattacagattttttttacttaatatataaatgg

SEQ ID NO: 93550 - DNA, 852 bp, Cannabis sativa
gacttattataagcaggacaattgcattgttttgttttcagtattttccgaagatataccactttgatttgacaattgtttttatctctttaggagaatatttattagatttaagcactccattatttagataattctcaccattattcatttaatgaaccttaaataacagtatagtactattcctaacaaaagcaacactacatttgttagaaagtaaaaataattatgtaaacatatattacaatagtaaccttatacttgtaattacattctattctattctttattgagagtaattgtgtaaatactagtgtaactacacaacataatcattacactaaattaaaatataaggtcggtttagatacgagattgtaaaaaacttatgaatttatgatgttttatttaagaaaatagtttataattatacaaaaatatttgtaggtaacttggagaatatttttgtaatttctttgtggtaaaatttgatgatgatagcttcagaattaagattgaagtgtgagacatgacttgataaaacattgaattagcttcaaaatacaagttgaatcgcgtcaatcggataataatgggttagttatggctattttactgaaggtagttcatgatttaacgtccaagttgacatccagcgtccatgttgatgtctcagcacctaggttgacatatgacatcaatttggacgctgggtaagtgtaaaaatattcaaaggaagtactttaaaatgcctaagtgatattttgacatcacttagcctgtttctgttttttggtgaagctggtcaccagttctcggagatgttgttcttttgcagaaatgagagactca

SEQ ID NO: 93551 - DNA, 942 bp, Cannabis sativa
atgttaagtctattttgcgccattttaatagtttttatctttcattgttacacttgtttttcttttctttgcaattttaagtgttagatgaagagtttatgcaatttttggaagagtggcattcttcgtttaaaaaggaaaaaattacaaaatcgtacaaacacgaaagaggctagaatttttgagattttggagggtgtggaagacgactggacttgggagaacaccattggaggctactctttagtttttctttcatctcatcttgaatttttatgtatgtctatgaatttctgtgtttagaatgaatactatgaactaattttattttttgaactgttaattggatgtcttgaatccttatgatgaactaatgcaatttgatatttcttcatttatttttcaatttcttgcattccatacttgtttgatcgattatttataagccacttgtaatccttatttatatgaatttgaataaaaaaaattttaaaaaaaaagtcaaatttaaatttgctttgattgaagggaatttataatttaaataaaaaatatctaaattaattgtgtaatagtttgaattattttacttaatatgctattttgtgattaaatttaccataaaatataggcatatttatgtgctccaaccaaccttcactcaaataatgtatatcgttaaataaggtttggagtgcgattatcatcaagattcatttcacaagtctaaagaagttttacctcaaaataatggaaaatttataaaaatactaaaatttgagttagcttttataaaaatactgtcacacaaaaatcttttcaaaaatattgtgtttttataaaacaaaaatagaacacataacagaacaactaaaaacaacagtaaaacaactaaaaaataactgtaaaacaacaatgaaaacttaacacagttcacagtat

SEQ ID NO: 93552 - DNA, 1073 bp, Cannabis sativa
catgagaaataaaatctcaaagtagatgtagccttattactatggagatatagggagtgaactactatatattggttgtgtttgttttacaatacttatctactttgtcattctcactaatctagcgagcaggtgtggcttagaaatctagtaatacatctaagtcaatagtttaacactagctggaccccagggtgattgaagtatgaacaaaacatcattagtatcaatactagttttgaagggttcaaagatgataaattcatcttggtgactcaagctaaccaagttttctacattcatgatcccaaaaataaatcttactggaaagtaatccaagaaattcatcatcaaaatgtgtgggatattccatcaattgaagaatatttggaggatacttagatgttatgcatggtacaacttcatcttatttctaattatttattgatcttggtctattagtagaaatcaactttcaacgtataggggctccaattgagtttgtggatatagataataatccactcgagcaggaggacatggatgaagtggaagagtaagaaatggatgaggtagagaaggaagacatggaagaagtaatggacgaagacaaagaagaagcagaggaggaagatgtatgtgacaatcagcacaaccctaaatttgataatttaaaagaaacttataatgatgatgattattatagtgatgaataagtggtaatttattatatatattgttaattggtattttaatacattgtggatattaatatcattataatgcttggttgtattttcctttattacaatgatttaatttctcattcttttagtcatatttttgtataaataggggtttcccccattagaataaataattgagaaatttttattcagtttctctttctctttctctcttcatcttctttttctattcttcttacatattttatattattttataacaatttaaaacaaatcataattaattaaataaatataaattttctattattattacaaagagtaaatgtaattttatttcactccatgtttcttttttttttcttt

SEQ ID NO: 93553 - DNA, 651 bp, Cannabis sativa
ggtggaattgtcaagacaagtctaaatttttgtttttgaagattattcatagatgagaaaaaaaaattaaacctctcatttgttacataaaatatttattaagatactagatacttctagcaactcataatatttataagtccatttagccacattatgagcaacaaaattacaagttctacttatactagcgaaattacaacccgaaacagtacaagaaatcctaatgcaatggttacaaaaattattaatttctcaccgaaaagtaactctattaagagcattgatagtagcttcataatcactttccaccatcacataggagttgtcgtgcttcactgctgtctccaaggccaaaagacaagcttctgcttccccttgaagatgatcgaaaaattgaaatcgcttggttacaacccgagagagctttcccaagtgatttccagcaacaacatatgcacacatgtcaccctgtctcactcttacatcacaattcaccttgatccagtccctaggaggcggagaccaaccctggtcaagaaccactgaaggatgggaagtatagaaacaccgtagtctacataacagtaagaaattgtatcaatataatgctcaatgttaaacaggttattattatgtaccttatcattt

SEQ ID NO: 93554 - DNA, 742 bp, Cannabis sativa
ttttttttttttttttgttagtactacaaaatgtagaaggtgaactacgtggagaataaggtttgtttgaaaagaatttaataaataaataaataaaaagaagtttgttgaaatgaatttgacattcacatgttggtcacctattattattattattattattattatttgtgaaaaaaaatttagcatattcttaatcatattcttctagttgttaaaatttttcattgaactcctactgaactatttaaattgttaaacttaaaggatttttatctaatttcatttaattttactgaactactactaaattatgctctcttaattttgattcatattagactttccttactaaaattgaacaaaagtctttaaattcaacaatatcaataattcaagaagtttttttaacgactataaaaattcatcggacgtgatttagcagatgtgaaaggtcggaaggtaaaaatcttaattagctttattattattattattattattttgttgaataaaaaagggaaatgctatacaaattcctttcctgccccttcagtcactttgacaatttataaagatcttatacctaaattttttaattaggttatcggtaatcaccttaagaattcccatcacatatataacactacctacagactacaacaagctagcctttagaaggtcaattattttttaatcccttcaagaggggttgtggtggtttattattatcattattatt

SEQ ID NO: 93555 - DNA, 506 bp, Cannabis sativa
  modified_base (133)..(136): a, c, t, g, unknown or other
aaaaatagacatcttcttgaaactccatgtgccctcttgttttaaatgcaacttccaaaatctttttgggttgaagcagtttccacaacatgctttcttatcaatcgcatgccatcctctgtacttaatggtnnnntcccatttaaaattctttttcttggtaagtcattatttccagatgctcttcggatatttggcagtgtttgttttgctcgagatgtttgtccacatgttaccatttcagatcctaagtcattaaagtctgtctttcttgattattctcgtcttcgaaaagggtataggtgctattgtcctgatcttaacaaatatcttgtttctattgatgttactttggtagaaaatacacttattttttgtctacatctactcctattgatgtaacaaatatcttgtttctattaatcatttgtcttcttcttcttgctcatttattgcttctcttgattctttcttaaaattgttcatgaagccatgtctcatcctgg

SEQ ID NO: 93556 - DNA, 558 bp, Cannabis sativa
  modified_base (511)..(531): a, c, t, g, unknown or other
tatattattttttatgttactttgctgttattttgattttattttcttgttactttcatgtaattttcttgttaattttttgtgtttttgtagaatattataaaaaaaaacataaaaaaaaaaaaatcaaacataaaaatatatattttttttaactttttacaaaaaatagtatttcatatagttattttaataaaaaataagaggatataaattttttgagaactccaaacttatataagtttgtagtatttgaaaagattatttgcaggagcaaatttcatgctttttttttcaaaacaatttccagccaacctatataatatatggttgttatattatatgttaaataatatagtattttagattaaaattataaaataatatatatattatcattacgaatataatatacaatatgattaggagttacatacatataataattattatataatgtgtaacaccctaactagtctatgcatgttatgtgatttttaaacgtactgtnnnnnnnnnnnnnnnnnnnnnaggtttatggaaatcgtgattaattaa

SEQ ID NO: 93557 - DNA, 575 bp, Cannabis sativa
gtacttcaatttataattacaaaacttgatataaaatttaatgtttatatctacacttaatattataaaaaataaaatacttaatgtaatttatagtataaattatcgaatatgatagtaggttaaattacaggaaattaaaatattataattttagtaaaacattaatcaatcacccataaataaaatatcatttattgaacaaatcaaaataacaatacaaatatttatttataatacatgtgtaacacctaaaataatttataaaccatgtagaatttttagatttaatgtatttgtagaagaaatcatatacatatttttataattgtgtcctataactatgggtaattaattacttgatcttcattttaggtagttttttattttagcttgatatgattttttgtccgagatttaaggagaattaattccttattctgcatgatttgataaaaaaagaaaactatgctaggcttctatgaacatgttgtctgtagggttgtacatcggtcggtttgggcggtttatcctatatattttctaacccaatctaaagttcgggttgctaaaat

SEQ ID NO: 93558 - DNA, 2038 bp, Cannabis sativa
atgcaaacggtgttcaggaaaaagtttaatgcagatggaagccacaaatgctacaaagctaggctaggttccaaagggtttcatcaacaagaaggctctgactattcaaaaactttcagcccttttgttaaaccaatcacaatcagagttgtcttacccattgctgtcacaaagaattggccaattcaacagcttgatgtcaacaatgcattcttgaatgaggagcttcaagaagacatatacatgcaccaaccacctgctttcattgaccccaattatcccaatcatgtttgcaagcttactaatgctatttatggcctgaaacaggctcttaaagcctggtttgacaagctgtcatctgtcctattgtagcatggttttcatttttctaagttagatcaatctctgtttataagagttacattaactagttgcatctacattttagtgtatgttgatgacatccttgtaatgggcaacaataatgaccttgttgatcagttaattcaagagctaagtagcacctttgcacttaaagatctgggcctagttgactactttcttggcattcaggtaactcgaaactctgatggaattcacctgtcccaaacaaagtatcttcaggatctcttaaccaaggcagatatgcagaatgttaacactcagaacacaccaatgaatagtggtcttaaactctctcactatggaagtgaaccagtcaaggatccaactttgtataggcccatagtaggtgcacttcagtatgctacaacaaccacgcctaaactctccttctctatcaacaaagtttgtcaatatatgcaagcacctttacaagcacactggacagcagtaaaacacatccttagatacattgctggcacattggactatggtttacacatacaaccagcaccagattactcactcgaagctttttgtgatgctgattgggcctcggatcctgatgacaggagatccacatcaggatattgcatctattttggaggtgatcttgtggcctggaagtctcagaagcaggtcactatcagtcgatcttctactaaagctgaattcaaaagtttggcaaatgttgtttctgaaatatcatggcttcatcctcttcttacagaacttggcatccctcaatctggtgtgacaaccagagtagtgttcttcttgcagcaaatcctgtcttgcatgctcgcacaaagcacattgaaatcgacttgtattttgttcgagacaaggtccttcaacatcaaattcatgtgaagcatgtggctgcatctgctcagcttggtgactacttgacaaaaccaatctccagctcaaggtttactgatgttctagacaaactatgtgtagtttcaaaagctacactcagtttgaagggagttgtcgaggatactaatagttagttagttattcttgtgttagttaggtgttattcctactgttacatgttggttactactgttatattctctgtatatatagctctctctttgtaatcatcattcaatcaataatacaatcaattgtttccaagattctcgttcactttgtttctctcctctctctctctttctcctctctctctttttgttatttctgttattgtccatatcgttacaaggagaatgtagtcgtttcttgtgttcttttgtttttagaataaataagatttatgcttgaacgagttttgttcccaattttttttatttgtgaaaattctttgtaaattataaaaatttgttgcaaatgccttttgcggttgcattatcgtcatttatttgaatttgttgatataacattaacataatgtttatctggtccaatttaagaatctagacaaaaaaaaaaaaaaataagtacataattaacagtctaataataaattataagagtatacatgtacatttttaaagctacactatttatacgtttaatgtcaataaattgaattttaagtagtttaaaattattaaataaactctaatactacaattatacatataattcatagacaaataaa

SEQ ID NO: 93559 - DNA, 756 bp, Cannabis sativa
cattcaacacattatcactgaattaatgtttgcaaatcctatgacaaaaggcttgccacctcataaattcaaggatcatgtagagagcatgggacttggtttccttttctaatttgtaaaaaaaaaattattattaatgaaactcttatttttatatattctcatatttatgcgcatcttaaattttacttgagaaaatttagaggaccagaatcaatataagatttaaggtttatttgcttaagtacattgccacataaagtacattgttatatgtattgaatatatcgtaatacatgacagataaaacttatcatataatgaggaattatcgctatgattcatatgtttattatgtaatgagaaacgttaattttaagtggtaaatctaaatgatgaccaagtggatgatattataatacaaaatcattcaaatttattttgcattatcttgctgagtggatttgatcacaaatcaatatgtgataagtatgattattctaaatatggtcaattttttattatcgaattattcatttttcgaattaatttttaaaacattctgataattaatgtggcacagacactgatgaagtatctcacctatagatacattgtctcgatccttgaactcctcactcattctgtgcaaaaaacagtaaattccatctaaaacagtagagagcttggaagctcaattatccaatctgaagcaacattgatattgaaacccaaaaatcaatggctagaggtatt

SEQ ID NO: 93560 - DNA, 629 bp, Cannabis sativa
tacccatttcgattatgattctgtagagtcaaatacttcaacatgtggtgatttgaagcggtcaccaaccctcattcgcaagaacaaaaaccctagaaaagaatagttttgagatacgactcttaccattacggctgaaaatctattttgtaaccaaattaccaatatattgtaccaatgtgccataccccttaacattatatattgtaccaatgtctcatcaacgcagcacatggaaaacatcaacaaactgccgcacactcagccattgtacctcccgctaactcgccaatttgaagcttctctcgtggaatcgatgctcaaatcggtagtctttttggcaattcttctgcggcgattgctatacgacttgccgattcattaataaaactttttttcctttttcttcttcgtaggttgactctccaataattagcatcaaatatccgttcaaatattaatgggatttattttattgttattttattattttatcaaataaaaataaaaggttaccatgaatttctcataaaacaagaattaatatatagaatagatatatatatgatcgttacgtgccaagccacgtactattagttttatttaatattttagttttttattttaat

SEQ ID NO: 93561 - DNA, 686 bp, Cannabis sativa
aataaatattaatatttatatatatatatatttataaaactaaaattactaataccgttaaatttgacggactattcttgtattcttaaaatatttcgttaaactaataaaattcgttaaataaccacattttatatataaatatatatttatgtaattatgatgttaaaagaggtgtgttatcttactttttagagaaatattaaaggcataaggtgatgtgatgtgacatattgttgttggtgtaatttaatattttgtctcattctcagatattttgattaataaagggtaaatacttattttgttttttttttttttatcaaaatacatacttggtaccctctattttaagtaatgatcacttttgtgtttccgaaaactacacatttactattattctaattttttaacattttcgaaattattctattttaatatattactgaattatttttaattgatttaatatagattttaaatccctcacaaaaaaataatgtgaaagtcaaataaataattattttttctgtatttttttgatcaagctctttaactaattattatcttaaaaatttgtttaatttaagaatgtagtatactagataaagtgttagccaaaaatatatcaaattttcaataccaataagtaacataagagtagtatatttcatgattggtatttg

SEQ ID NO: 93562 - DNA, 686 bp, Cannabis sativa
aaatttaaatttatttttttagaaaagaaaaaagataataacattatgatttttatttaaatattacacattaaatttttgcataacaaaagatatatattttctaaatttaaaaataagggtaagtactgctattaaaagtacaatttaaaactgctattaaagaataattattatttgttattcaatttaatttttatatttacaagctaagaacaaactatatttgtcactcaatcatacctatatttctattcaaaactgctattaaaactacaatttgaacaattacttactcttaatcatcattaagaaaaaaactaaatccaactatttttcttaatcttcttttaccaatctcacatctcattttctctgcatcattccacctaccattagctgcataaatattgtgaagcaaaacataaggtgtggagttttgaggatcccattcagacagttttgtacagattttttctgcaactaaaacatttccatggatgctgcaaccacccaaaacagcctcaagtgtgcttgtggaaggtctaaaaggaagcccttcaacaatttcgtaagcctcggtcaagttacctgttctagctaagaggtccactaagcaagcgtagtgctcagctcggggcgataccccgtgctgtgccattgagttgaagaccctgcagccttcc

SEQ ID NO: 93563 - DNA, 524 bp, Cannabis sativa
attgggcctctgggccttgtaccatcggctcttgaaaacctggcctatccctttaatcttcagcccgtttcacaaaatgacaaaaagtacataaacaggacatttttaagaaatatatgttttacagtttttcacctgtatagattttttaccaaacaatggaaaaaaaaaaaaaaaccgcttgtatttttttttaaaaaaaattaaaattggtgaaattattaaaaaaaatggacatccctatttttttttaaaaaaaaattattattattgggtatttatgaaaatatttcaattaataataatagagatatgctctttggggtttatctgggccaaagtccaaattataccgcaattatccaagaatgtacctgacctgcgataataaagggaaacttacaaaaatattattttttcctcaaattttacaataatactgtcacacggcaataatttcttttttactgtccaagcccttttttttttctttcatactatccagacctaaaatatttactttt

SEQ ID NO: 93564 - DNA, 1027 bp, Cannabis sativa
tgtaggatgagtagcatcttccattgaattaagtatcccactgtttgaagattgtctcctgtaactatgcctacctagagagcgacaaacatatgattagccatttacattagtactcaaatcataaatttgtgtaatagcattggaataaatctcttttgtaatttatttacatgtccagtattcttatttagatcaagtaatcaataaaaaaaatgacacaatacatatatcattaaagttggcgaagctattgttgagaatatgcaataaactaccttaacaccagtagtcgtgcattgcactcacaattttctgtttcattattttacattagaaacagaattgagttgcattctaagttgatagcaaaatttaaagtttgtatatagtaaaagatttgcaaaattgtactctatttgagttttccgtgaagaacaaaatgcacctaatgaaacagtcaaagatttgtgcatttgaagtgtaagcttcaatggcgtatttttgggattcctcagctctatttttccaataatcgtcgtactcgaagatttttgattgaaccaatattgtagcaaaagttaagaaaaagaacacatatgtgttaaccatggtgttgtttttatataaatataatatatagaaattaatggcacctcagagatctagtgaataacgatgaagaagactattatttagatagctgtagatatggattttgaataatgaataaattgttttttaaaaaatacttttttaaaaaaaaaaatcacccaatagagtacaaagaaatcactcaataaatttgttagagagatatgtgggtaagatattttttttaattttaaaaaaagattctttaattttttgggtttaattattgggtttatttatgtgttaacgtttaacgttaacttaactttgttaacttaatcgtgtaaggctaaataaaaaaagaaatcgttaaaccaagaatcgttaaacaagaattgccgttagataggcacttttaatatataaagactag

SEQ ID NO: 93565 - DNA, 574 bp, Cannabis sativa
ttccaaacccaggaaaccccatttccagcttcgaaactcaaggccaaaacacacctaaatcaccccaaacatgcatataacttaaaatcatattccatacattaatagacaccataccagggcattagaacccacaattcaagataaattctcatccaaacatacatcctaaaaatcagattaacaatactcaaaataagcttcaaacattgagctaaaatcatcatattttcatataaagatgttgcactacaaagtctcaaaataatctcaaaaacctagcattcaattccaacaaacttactctaatttcagttttccaaaccccaatttcaacctaattaccacacaacatattcttaatggaaaacataaaatttccaagcttaaaccacatacaaaacacccaatttcacaatcacaacaaacatgtatttaagaacatcatcacaagaaattcatgaacatttaacttcagattacatcacaaaattcaagcaaaaaagaaggtggaaagctacctcaaactcttcaacaagataagcacccgaaactccacaaatcaagcttgaac

SEQ ID NO: 93566 - DNA, 842 bp, Cannabis sativa
gggcggagatggggttgggacagaggacaaggagggtggaggaaaaaggaggaggctgggatgaggaggacaaagcagaggaggaggcttagaatcgaggttgaagacaaagtgagaagtgctttaattgagttggggttaaagaaaatggttgaagacaaagtgatgagattagcgtcattggacaattgaagctatagtttttagcgtaggttttagaatgaagggaagaaggttagcgagcctttttaacagacgctaaaaacaattactttttttttttaaaaaaaaaaaaattccctattagtgtcgggtgttgtattagcgtctaataagtaaccgacactaaataataattttttgcgtcgattcagaagtgacgcccaaatgttcccttacactattcaagtcggtcaacgcaatgaacagtagcgttgaccgacgtaaatagtgttttttgtagtagtgacgctaaatcacattttggggacaggttttaaaccaaaagttttcctactgaaagttaacatggcaataccctaaactatcaaggaattaaccaactaaagctctgaaactaacatgaatcgacagcacaaaaagttcgggaactcagctgctgatccagttaaccggttctacagggcctgtaaaatcggttaaccggtttacaccaggtaaccctaaaaatttgaaatcttgcccaattcgtttccaaaccaaaccaaaccttccagacctatttaatataccccaatgaacatattctaagcaacaaaataacataacatgctcaaaatcaaaatccaccattaaagactaaactgttggaaatattttac

SEQ ID NO: 93567 - DNA, 666 bp, Cannabis sativa
tgatgacttgttcgatcaacttccgggtaagactgttttctccaagattgacttacgaatggattatcatcaattgagaattcaggaagaagacattttgaagacgacatttcagaccaggtatggtcactatgagttcttggtgatgtcgtgcgggttaacaaatgctccagtgacctttatagatcttatgaatagggtgtttaaagacttccttgataactgtgttatagtatttattgatgacatccttgtatactctcagatagaagcggagcatgaacaacatctctgaatggttttgcaatgactcagagatcatgtatataaagttcaagaagtgcgagttctagttatcacaagtgtccttcctagggcatatttttggaaaagacagaattatggtcaatcagggaaaaattgagtcagtgaagaattggatgaggccaatgacagttactgaagttcaaaattttctcggattgtcaaggtattataaacactttgtgaaggattttctaagatttcaatgcaactgcaagaattgactaagaagcaccaacggtttgtatggtctgataagtgtgaaacacgcttccaagagttgaaacaacggtcgatcacgacaccagtgttagctttaccatcagatcaagaaacatacac

SEQ ID NO: 93568 - DNA, 536 bp, Cannabis sativa
gtattgacttcggtttctgaaattcgtactcatttttttcttctaaattccctcccccaaaactattgaactccactttttttatagccaaaaaatgataaaataaaataaaaatcactgaagagaaaaaacctattctccttaggattagaaaacctattatgcttaggattataagaggaggtgagttttctgctgtgtcgactgacagtattttggcgataagtctcgatattgctcgaaattggaagattcaagatatttcggaaagataaaagggagatctagaatttttctgttttgactttttctaaaatctaatcagaacatagttgaatttgggcttgaagtttcagctttattttcttacacaattttctctattttatgtatcttctatttgtgagattttttttttatcttttttccatcttattcctttggtattttctaatcttcctgtattttaaatctgcaaaaataaaagatagaaagcataaaattgctccaaacaagaatagaactaaattaaaaac

SEQ ID NO: 93569 - DNA, 735 bp, Cannabis sativa
ggttggaactcgacattggagagtatagttgctggagtaccgatgatttgttggccttattttgctgatcaacaaatcaatagtagatttgtaagtgaagtgtggaagcttggattggatatgaaggatgtttctgataggaaagttgtagagatgatggttaatgatcttatggtggagaggagggaagagtttgttaaatcaacggctgagatggctagattagccaaaatgtgtgtgaatgaaggtgggtcatcttattgtaatttggaaaagttggtagaggatataaggtgtgggaccaagtgaaaatattgccaagtcttaaaaagtgggcagccatttgattttgatatgtatcgtttttattcatgtattttctcaccatgacttttttgagtgtgtagaaacttttctagctaagatcaacaattatagcattctcaaatttttaataaggacttgcttcttttcagaaatacaaaaatttaatagtacgaatttttaaatatttttataaatttgaatttttttaacacatatttacattattctgttttttctttggtactatttttattattttttatgttatttttttgtttttttgtttttatagaattatataaaactatttaataatctgtgttttacgggaatatttttttaaaattatatatatgaaataaattatgtcttttatttattaaagataattaaataataatattttat

SEQ ID NO: 93570 - DNA, 1595 bp, Cannabis sativa
cctgccacattagtgtgtaacattgtgtctacagctagacttgcctaatcctttctaatttttgctatgaaggaatgaatgaatccatttcaaaaaaaaaagaaaaagaaaacctgctacattagtgtgtaaaacagtgtctctaatagcattctttcaaatacttctgctaaacttatccatttatataccatagatttaaagtttaaaacatccgatttacatattctgttgagtgcactatatcatacattcattgatcttattttctaagcaatatataactttaatgttgcatttacaagacctacctttccgtgcattccctcaatagcctttttagattcttcctcagtttcatagctaaggaaagcaaaccctcttggcctttttgctattttatccatcaccaaattgactgtataagaagaaagaggaaatcctattaccttcaaaaaaacaatcttttaagaaaaaagagaaagatactattacattgatatgtaacagcagtagaaccaacaagcacagtacagcatctgattttaccttcaacaagctgcccaaaattttcaaaagcatttcttaaactctcttctgtggtgcggaatgagagccctgcatgaagagattattagctgtagcttttttttttggctttctctaacattactactacaatacagatctacttagagatgcataatgtattctaggaaactagtaacaaattatagttagtttaatacaaattcaaggaatgttctggcaaaccgttaacctgcatcaacataactacaaatataagaggaaagaatagtgaaatatagctacaagttgtgttaggtgtgcaaccaaagtctcacattagctaaatatagggaagatcatgggtatataaggatgtccaatatgagtattgggatgctttttgggtagagtttaaaagcaaattcatgagggctaaggtccaaagtagacaatgtgaagatagatgatgtccatgagaaatgtttttcatgcaaatgatatagaataggcataattccagctttccagtcccttcagtcaaaaatggtccaaacttatctaccttgtaaaatgtatggtgtcatttgaaaatggttcggctgttaagatagatataataccagtttttcaatccattctctgttcatatctccaaatccattctcttcttatcttagataacattccacaacttccagccttccatccctcaaacatcagaactttcacatcataatggattagtatattctacgtggtctacaaccaacagttcagaatccatagacccataacataatctgataagcatatctgggaaaaatcttaattcatctaaaataactattcttcccagtctattagcaatgcagaattgagcctaaactgttcaaaattcttccattttagctctataaaatcatttcaacaaccatagactgcaacttcaactcaaaatttcagccatgctcacaccattaatcaatagccatattgaataataaaaaaaaaaaagcaaggtcgaaaaccaaaagaaaaaaactagcagaaagcccaaacatgat

SEQ ID NO: 93571 - DNA, 645 bp, Cannabis sativa
acagaatgcaataataacaataattaataagtaaataacaaatttttaaacatcgataatattgaagtggcgacaatgacaataaaaattataatggtagataaacccatgatagtggtcgaagactatgagattttttgagagaatttatttgtgtctgaatttttttaaattacatatttaatattaatgattttttattattaaaagtatgaactaattgtgtttaataggtgttttaaacttacccctagacccctaaaaaaaaatttaacagtagacaaattatgatcaaacatttaaaaatagtgtacaaatctgtatctaaggaagccctcccaaaatggtttaaacatcctccttttttttttcggtgaatatcctagtcttatttggctaataaagaagctagacttgtgtacaagtaattaacatattagtaattcgtttttttaatgtttttttaagggagagacacttttcattggatattattattaaaaatatttaattataaatttaaaattttaaaataccaaattattaaattttgatctcataacaaataataaaagataaatttaaatttttaatgttaatatttaatttaactaacttaattaaaaaaataaaaaaatatttctt

SEQ ID NO: 93572 - DNA, 543 bp, Cannabis sativa
tataatattattttaaattattatatatatctttatgtgttttgtagtttattattagtaatttttaaatatttttattttatttcaaattattcattgtctattttaaattattaacatgtataatattttaaattttatgcagtattagtgtaatattacccgccccagcaaggattttctactctgtctttgctggggaatatgcaaggatggaggcggagatgggtattcaaatattgtttacgagaatgggaacgggggaacattccctgcctatacccatctaatttccatctctaattttattgatacaatttagtatcgtgtcccacacattttaatttaataattaatgtagaatactaataaccattcacaacatatcatatataagtagagtgtacaagtcgaggattattatggggtaccaaggtgcctaacactactatgaagtgtcgctttataattggttgaaaattctctgtaatctttattaaaataaaatatgtaggacttaatatttaattgcatcagatgtca

SEQ ID NO: 93573 - DNA, 654 bp, Cannabis sativa
aaattggtacagtatttaaaaaaaagtaaaataataaactttaaaaaatagggtaaaaataaaaagaggacaatataaaaggggtacagagtctactttccttttttttttcttagcaaattaaaataattgatgtattcttttatgaattatttacactacatgctgaaatttccaatttctttactttttttcattggaggcagaatttttttaaaaaatactgtgtaagttttatactgtatactgtcttaagtttttactattgttctacggttgttttttagttgtttcactgttgtttttagttattctgttttgtattctaccattgttttataaaaacataatatttttgaaaaaaaatcggtgcgatagtattttgtatgttcccttcttttatcaaaattttaggccgtatttctatttctgttccttagtggattttacgagacacatctcgaaagcccaactatcctcttaagctaattatgaatgcagactatatcatggtatggtatccaagaaaggcccatatttagattagagaaatttgggcccacactgctccaacagtcactgtgtatctcgtgacgtgttgggcttgtaaaattgtaatgtaactgtgtaagagaaggggtttttttttttttt

SEQ ID NO: 93574 - DNA, 518 bp, Cannabis sativa
ttagatttgttcataatggccccttctacgttgatcctctagttcagccactgtgtatatgcataatcttgagaagcacacagcacggcagctaaaatctttgcgttgttcgttaattcgtacgtacgtaatagcacatatgtcggctttgtgtaagcaattatctctctctcatataaagctggaaggaacaataaagcaatcgaggactctttagttgggtttcaaattgaatgatattttacgtttcaatggaactaattgatcattattaacagcaaaaaagcaaaaccactttatttaagtggtgactaaaaaaaattattatagtttagagatgttagcaattaattgtttatggatattattgttagtatttgattgaattgtattttatataatatttttatgattttgtgtttactcaacgattctgaattattaaagtggtaaaattaagtgatcaatattagaatatttctaattaagaaaataaaataatattattgattctgata

SEQ ID NO: 93575 - DNA, 753 bp, Cannabis sativa
taatttatatttgcatttaaaatattttaattgaaaataagaatatttttatgttatttgatcgagagcagatgacatctgtataattttatgttattttcatgttaggagcaatgatcaagagcagatgactatcacgagctttcacaactagaaaattagactttatcttcagttattagactagtttattttctgttaaaaaaatcttgctaccgaagactattaaggtaaaaacataagtcccaaaaacactgaagacgtatgagggacctatctcttcagttgttacaaaataatcaaatacataggtggagtcgaagatagaaatcgagtaggtaaataccctacgtcttcgatctttctacctatgtcttcaattatttggtaataactgaagatgtaggtttcaatatctcattggaaccacccaccgaccttgttaaatgccctacattcaataatttatattagattcaattaattagtataaatttaataaaattcaacttgaaaaggaaaatcgaaaagtatctttgcagcgtttatgtccttttaaaggatccaaatgaataatcttccctgcacaaacattctcaacaagcattcagtgtttcctaagaaatcaataagaaagtattatgttttagctagttttaaaaaaatgaaattaaattttaaatagtccttagatagtagttgtacttacccgacattccaaggagtgatgaacatctaagatttatgattcat

SEQ ID NO: 93576 - DNA, 690 bp, Cannabis sativa
aaggaactttttagtggtattaaagatcgtatctggaaactcatgaatcaatggcatgccaagcttttttctataggtggcagggaagtgcttctaaaagcggttgttcaatcaataccgcataatgagttgtttcagtcttccgaagaagttttgtcaccaattagagtctatgatggctaatttttggtggggttctaatgctaataattccaaaatacattggaagaaatggaaattcatgtgctcctcaaaggctgatggtggtatgggttttcgatcgttcatccattttaatcaagccctattagcaaaacaagcttggagaatactagattttcctgattcgcttttagcaagagtgcttaaagcccggtattttcgaaatggagattttctaatggctcggaaaggcactctaccatctctcacttggcagagtatttgtgatggtaaggagttgttattgaaaggccttagatggaaaattggtaatgggcaaactgttagatgtgcaagggatccttggttacccggtaatactaccttcactccctatcattatggtggagatcctctttttactgttgagcactacataaattcaaataggcagtgggatattcagttattgcagcagcattttggtgacttggatgttcaacgtattctttctattccgttgagtcc

SEQ ID NO: 93577 - DNA, 536 bp, Cannabis sativa
tatcaaggcattgtgatgcctcgtagtactttcctagctcgtgagaactgttagtattcagttttatacgtgagttataacttttgattttcctctcccgtcagataggtaataaatcaaaaattatagttttttgatcccttcttcgtcaaaaaggtttggtcaaggtgttataacgattcgaccccactttcgtcaaagtggtttagtcagatagtttaaacggttcgactccactttcatcaaagatgtttagtcgagaacctttgaattttaaaaaaaattgaaatggcaggtttgcattatacaatgtatttcaagatgaattctagttaatcatacataacccttaagtaattgaaagaatgaaactttgtaattacttaatacaaatgattctctttattcataactaaagtttaaagcttacatcagtaatacgagttatatcatttatttattgatagtagggtcgcaaatgttctacattccagtaaaattttattagcgagccatcaggttgagccaatttatag

SEQ ID NO: 93578 - DNA, 591 bp, Cannabis sativa
tagatatttacatattaaattgattaaatgcaaaagtctaaactgcctctcaaaactagatatgttccactagtttgttcggccgttaagggcccaattcacaggtagcttgttggtgacatttttgggctgtacatagagttctgccgggttaatcctagccgcccatagacctacaggggaggtctagccacccaaggcctgcaggatgaggtcttgccgcccaaggcctacaagatgaggttgggctggccaaggcctgccggacctggcatgtcactatagctcaaccaagaggaggcgaacctttggatgtggaggccagcctttttcaagttgaggacagctttgtacaccgtttccttgtagaggccaggttcccttggtcgaacagaagctcccttggtctaattgtcacttcttggccgaccaccttgtgtacagatcctagccagcctataggttcaccctgaccagcatgtaggctgcttttggccagccaaggatgttggtatagctccttgagggctcacttcactccattcaattatttcttgacatttttgctataccttgcatggagaccctgtt

SEQ ID NO: 93579 - DNA, 833 bp, Cannabis sativa
aagaaaataaatataaaataaaccactaatatgtatattatatgacgtaaatatttgcatatccaaattatatatatattatgtatttatgtatatgatatttttaattatgtaaaataggttgtaaaaaaattaatgcatatttacatacttatttttaatgtatgtttttgtgtatatgatttggagaatccgaattaaggcattatgggatagtgatgttgtaactgcaaagagttttttagatgtgttataaacaggccttgtaagttgtaagtattaaaattcactctttaagagatagagaaaataggatgtatagacaatggttccaccaattattttcaaatgtctggtttgtaaggattgtaaagaggggctatttgatataaatagctatatgatgtacatgaaagtttaagatgaaatacatttgcttatgaacattattattaggtatgagtggtgccttgtatttttctagacacgttgtgttgtgattgactagcgatactcgtactaaaagttattatattaaactatatgagacccgatacttagttgaaccaataataatattaacgcatagaaaaattctaaacaccactaatatcctttaccattaatctgtgcttatttacccaaaaagaaatgcacgtttactgcctttttctcgtgaagatgatttgctaataagtaattaataaagtatttgattgagctttgaattttggccttaattaatttcctgtaaaaactttattaaattaaaatatatttgacatatattaagttaattataatagatcgaagtaatgataagtatttataag

SEQ ID NO: 93580 - DNA, 511 bp, Cannabis sativa
ttcatatctatccttgctcagtcacatgtggccaaaactctgttgtaattgtaaaatttattatccagttgtgcaggttgaatcgctttttgttcatgaaattaaacaaataataaacatcacataatataaagagctcgctaacagttatggtttggtttggaattaaaacgtgagaaggaaaataattttcttcttgtttatactacaacattgtacttctaaacttattttgaatggatactagattcatctttgtaattgcatttgcatttgcatctctaaacattgagtattgattaaattcttaactgttccaagctgtactcagataattttgatgctgctgcttacgtttatggtctgtggtcgcaacagtgatacgttttttttctcgattctgctgggattgaaatattgtaagaacttccctttgtgcaggttgcttctttggagaaactctacaagatatttgaaagatgctaatatgaatacttagcatattgcattt

SEQ ID NO: 93581 - DNA, 1015 bp, Cannabis sativa
acacagtataaaacttactcagtatgttgtgtaaataaccattttatcttcaactaatcagtatgaaaaacgattaaattagtactttaaatatattgaaaaaattacaaccaaattttttttgaaaaattacataaaaaatgtcaacacggaaaattttttattttcacgcttcaattttttttttaatttacaaaaatacctttttagtaaaattaataattattttttattattttatagttaatttataattgtcgttagattgatttttcgttgttttatagttattttctcacttttttgctcagaaaaatgtattttttgtaattttaaaatttttccagtgtattgttgtaaataaaacaattagatcaccgtaaaattataaataaaatataaaaaatatggtatttttgaaaattgtccaaataattttctattcatattacttaatatattttgggataattagataaggcgctattttttttttaaaagaaattacattttttaattttaaataaatttttatatttttacaatttttttataaaaacaacacaaaaacaacaagaaaactatattaaaataacatcaaaaaaataacaaaaaaattaacaagattacaaaataaaaaaaccgtattttctgtaaataaaattaaaaaaaatcgtaaaaaatatttaaaattctataaaacagtatttttataatatctttttttatttttatgtatttatgaaataatcgcatatatttttccgtctcctattttcataccaaacagatgattcataaggatgggcttcctttccataaaaaaaaaaggatgggcttcgtgttgtccaataactatgggcttttaattttggtgccaacaaatcggggtaacttaaaaactaccctttttattaatcaattaatcaaatttgcctctaattttataattatttgaaatatacctctttttatatgtattgtacctaaaataccctgatataagagagtcaca

SEQ ID NO: 93582 - DNA, 816 bp, Cannabis sativa
aaaagtgggaatgacttgcaattttcatgccaagaaattagatatgttaagtttgacagtgagagatgaattcggagagatctagaaaggattctaagattggtgaggaggagcaatcggaggtggtggtggcccttgaggctgggcagaggtgcgcggtgggttgtcgatgattgaaggattcattatcgactttcgtcaatggcttcctgataccatataagaacttatcaatacaagcaatatttggtcaatgaatacaaagaaatcaaaagcttgtaaaagttactgagcttatgagtttggcctttatttataggtatagtagtacaagagagtagaaagacaataacagagtgtacagtttgaacagaaaagaaaacagttataacagaattaactaaaagaaactaactaaaactacttgattgtattaaatattaagtaaatttctacgtgacaatccttcattggtccaatagtcataaatttttaactttttttaaaaaaataatttatatgtaccgataagaaaatgacacgtggataatgacttgacatttaacgttcaggtacctacagagttctagaaatataacttatgtattattccgccaaaaattaaacttaagtatttacttataactggatgttaaatttaaatatttatgcagcaaattactctttatataaactagtgaaacaatatatgctcgacacgaactacttacaaaaagaaattataaaatatgatatttttatattatatatttaataagtaattatattattaagctatatatcataaataactat

SEQ ID NO: 93583 - DNA, 1578 bp, Cannabis sativa
cttagttggtcgaaggaaagagagagaggaaatgcttgatggtgaaaagagtagagttctctaggttttcttttcctttttcttttgttttattttaaatagatgaaaagaaatcagattatttgatatatataatctcataaaagacaaaggacattactaacaattgaaataccaattcaagcctagtcaaaagtcaaatgccaaaagaaagccaagggtagtttggttatttcccaaatcccgctaaattctcgatacttccaaagtctaactacaacacccggataccataaaaaaaacgtgactctctactggcccaacgtctctttccactgcttccaaacacattacagagcaacgaggaattcatacaaaatatcctaattaattatatcaaactcaaataaatctccaggatatgcatattataaataatatttaatctcataaataaatcctagttatttattaatccaaagtgttaatcataagctgtctttacaggatcaaatccgatccgtatagattagattcaacccgccttatacgaatcggatctgatccgacccaattcttttttttttaaaaaaaaatttcaatttatatctaaatttataatttttttttcctaaactattttttttaagaattaataatacattatttttttttctatttatttttattttatttgccaaaatcattttttaagaagtattgttgttgaagatggtgacaaattgttaggcatggaagagtttcatttgggaatttgttggagtttgtgtcaacatttttctcttggagacccgtataatgtcataggagattggctttatgggagaatttcaatcaaaattaccaaattcaagacaatgttttcatcaaattaacataacaagtaattaattatataatttggttgttatatctttttaaatagataactttcataatattctatcattttttttattctaatttaatattttgtttttcttttcaatttattttatacgtagagtaatgaagctatggcagtttgcatgaagtttcgaaagcttagagagttcaagtgctaaaatcatattcatttaatcttatttgtaattttaaaatagtcttaattaatgctctatcagtttattgttttcttcaatattataattggtgtgtaacttttcttttttaatcatggaagatcaacaatcttaattttgtgttgtgatttgtttaccatatacgtgtaaagatttggagagagaaaaaaaaatgatcttattgctcaaattaatgatccaacggaccaacagtaccgaattagtttttttttttttcatatatatgtatgtggacttttatacataaaattagaaaattttgaatttttatgcttaatttttatatttaattaaaaaaatttcttatttttatatcatatgaattgagattgttccatcagtaaaaaaatttaaaaaaaaaagcttttttagtaaaaaaaaaaaatgattttaacttaaatatttttatatgaacatattttttatatagtgtaaaaagagatattttttgata

SEQ ID NO: 93584 - DNA, 610 bp, Cannabis sativa
gtatcaagcaagacataaaaaatagaatgtttttattattttgcctaagaaaatgaaggcacgtacatggtaaagattggtgaagaaattaatatagatgatgacttgtatataaatcatgtataaataagtacacacagaccttgatataagttgtaaatgatgttttttgttgtaatacaactcaactgctgacttagcaaaataaataaataaataaatcaaccatgcgtgtatttatcaattaggtcgtcataaaaaaaagtcattacttcataaaaattaaaattaattaacatgggactttaatctacaaaagatcttcaagaagaataaaaaaagtcttctccatgaaatcaaatcaattagcaatatttgcatatatactgctcattggattgctatgtctaaccacacatacctcccaaattaataacactagacaacacaagtacttattctatacaatagattagaaaattttacaataaactctttaagagtgatgtattaatgtgttctcatcaatttcagtatctgagagatatttttaatctattttttttttttttataattatgtatatttgttagattgtttttagtattat

SEQ ID NO: 93585 - DNA, 1962 bp, Cannabis sativa
tagaccattttagaggtgttcatctaacttaatttgtactattttgctcatagtttatgattcgatttacactaagtactgatttcatatttttgatcaaaaatctgcataataattcaaatccaatctaattctcaaaaatgcagatttaatcggttattttttaatattgaattattgaatatttataaaaaaaaaattagaataattacataagacactattttttataaaaaaaaattacattttaacgtttaaagaatttttttttaaacatttttacggttttccatataaacaatacgaaaacaacaacaaaaatacataaaactaacatgacaataacatctaaataacaccataactcttagtatactcagtacactgaattggtagacacctaagaacacgtatacttggccacaaggctagacgttcactactggagacttcctcctctttattaggacaattcgcaaaaagatcttaataaaaggtgtgagtatcacaacgacattgggtaaaattacaaggaaaatcattagccctgagattgatgttctgtgaattattatgacaagtctccctaaaactacaaggaaaatcattagccataatcgggaagtccctccaggagaacaagctacaccgtcccagctcgaagagtcaagtttatccgaagatagttcgaaccaaagtcactgtttaaatgcaatatgtaggaaacatttgcatattatcttgaaaagacgtgttagaagtttaaatccatcattctctgattttacactatccaatatgctttgagacggtgcataatgaacagtcaaatcatcaacaaaagctaaaagtctatctcaccaaacacctagagcaagtctacgaattatacaaaatatgcagacatgccatattgtccaaatttaggaaatggtgcaagtaataatcatacaattacgacaatggtaaacttttcaccatctttatgaggctatacatacccctaacaacgttcagttagagggtcagaaaaaaatagcgagacactctctataaagaactactgcattaataataacgacttgtggactaaggcacattaatgctccaatcacgtaaaataatttcgtattaagtttcttctaatcatcaaaacaactctaatgaatagtttccaaaaacctcgttcaatatatgtttgtaatctattagggggtttgactagaaattattattatttttttgctaagaagctgaaattcactaagccaaacacacaaagtttgttgagtacatggggactcacctcccaaaaacgcaacaagccattacacgaatgggatagaccccaccttgcaagagcatgcgcatccttattaaaaacacgcgaaatccaactaacaacacaatcgccattcaccaaagaaacacagtttagaaaaagaaaagtgtaaactcccaaacggagactttccaacaattaaagatttgacaagctgaacattatccgaaaagaaatcgactcctccaaactgcatttccaaggccaagccagcaccaaacctcagtgcctccagttcaccgtgaaaaacactctaaacctcaaccttcttcacaccacaggtcattaccgatcccgagttatcaaaaaacacgagcgccacaacccctacaccgacagccatagcaaaatccacaaagcccctaactctaccaggtttaggaaggccccatcgcacctcagccacacctcgacgaccttcaataaccacttgctcttgggccaacagccgattatgctcaagaaaatactcctcgactctcttatgcaccaagtccatatccatgggcaccccacgatgaaaaatctcattacggcatagccacaatttatggtacaagatagcaccataaagaaaaaaacttgccatttccaaattagaaaataggtgctgaaacgga

SEQ ID NO: 93586 - DNA, 734 bp, Cannabis sativa
agtgtgaacctcttttcaaagaggtagtcatttcttctaaaccatgtcagccaaataataagaaggaaaaggttgaaatcatccatattaagagtgtcaaaactcctaagaaaatattctttaatgccataatatttatttttaacataaaagtgatgaagtgaagagttcttccacgcagatttagctcgggaacatcctaaaagggcatgagtaacagtctcctctctattaccaccgaaggagcagtgaggactatcaataatacctctcctaaatagattaaaagcacaaagtaaaacatggttaaaagctttccaaacaaagtgtgtgattttaggagggattttgatagtccaaactgtcttccaccaagttttaaaacaatcacgtgaagaaggaggaggaggaggaggagaacctaaaacagctatggaattagcaaaatgatagggagagtttaccgtgaagttgctagaaggatgatgcccccaaatgaggcaatcgtcacctaaagggtcgagaggtacatggagcatagtgtctatctgataagaagggggatactgctgaagcttgcttctgctccaacacccaagatcatcaatgaaaaaagagacagtgaggttgtggggaaaagtttcatgtaaaggagttagagtgttcaaacctggaacccagcgaggatcaaccaataagatggaattcccttttcacactttctaaaccagccc

SEQ ID NO: 93587 - DNA, 583 bp, Cannabis sativa
gcctatgacgaatttattgactcgagcagaactgttatggggccgttcaagacgaaggaagcgatcccccataagctgtttggattttacaagttcgtttttagcaacacattagatctggagtaagtaaatgttattttggtatttgtgattatcatatacttataaaaatctttagcagttacattcattataattgaatcagatatgtgcttgtaaaatttggaaagtttgaagtggataggaggtgcatggcatcgttgcgacccttgcgagaagttcagggatctgtaagtgtgaaattggttactaaatatgtttcatttattgtacatgtctaaatcgtatttcatcttgatgcagatcattgactatttttctcaactaatgaacaagtacaaacgtgaaacacggctacctgaccaacctcgtgtttggtacgtgcccacccacatctcgatatttttcatgcaacttaatttaatttttgtactaatttagtttggttggactattacttgtttctgttacttgacaaaataaacaatgcatttgcaacaaaaactatgggttcgtttaatgt

SEQ ID NO: 93588 - DNA, 529 bp, Cannabis sativa
tagattagtggggatcaccatgacttgcaaaaggtactacacctttgtccaaaagcttatttctccctatctctaagatctaagggaacttactaagaaatagctttgcgaattatcaagtcttttagaatttctagcaaagtacttttttaatagaaacttctcatccaaatgagcatattagactctttttgtaatgctcatatttgaaaattgactaaatcagatttaaacttattttattttatttataaaacctcgtaagtcggaatcacgagtctcaaattgttgtctaaaatacatatactatatatagctacataatataatttttttacaaactacagggcaacaacagaataaaactcaaaatgcgatatcgaaaccctccaggttgcactactgcgatatgtacaatccttaccaagccccatctcattgttccttcagcttagcatggtagcaaattgatgagtcaacagactcagtaagatatgcataaaacatatataaacaatgcaatatcggc

SEQ ID NO: 93589 - DNA, 836 bp, Cannabis sativa
ttttttttttttttttttttttttcaaccggtttagccaatcccccagccacaccaacataataatcaaacaattaagtctataataatcaaacaataaatgaatgggctgagatgcaaaatgcatagtgcatagtgcaaaatgcaaaatttgaacttcacattaatctcagaatgatttccttgcagccatgtacctccatatttacaatcccagtggaactcttcacatacattcttctccacccactgactgcatgtaaaaagttcaaaaatactacttgtaatctttatccaagtgaatggagaacaaagaaacatacaatacaagggacattaatgaacgagacttgtgcagtccgagtcaatacaggtttggtcccaaccttccttggtagccgcagaacaagcttcacgaattgcccgaattctagtgaaaaagccctgtttccaaagaataattgatttctagcttgcaaaactgccaccaaatccttggggtggacaaaggaaaaatcctgcaacttaacttcccatcttgagccgaaccgcaaagcattctcaaaagggcactaaacatatgcatctctgattcttcactgtaattacattacagcactgtaagctagtctccatagtctcttcctcacttttcagagtttcttccaggcaaaccggtcgttttggtcgagccaataggcagacttgatgcataatgcaagtggttgcatcagtgttttcatccattttgtaagctgttaaatgtacatttaaaaataataagaatatgaacaaaaatacagccacaaacaattaattatcggatatcataaaagt

SEQ ID NO: 93590 - DNA, 644 bp, Cannabis sativa
acacacacacacacacacaaaacacatatttagccaccaaagactcatcagaacttggggaccaaaacacatatttagcatcaagataacttggggaccaaaacattccaaagcttctttaagaagactcatcaaaacttagccaccaaagacttttcctttacccacaattaataattacccaaaaaaaattgtaacttaacaaatatagataaacaaataaagaaataaataacttgagtcaaactccaacataaagtatatatgatgaatatgataatattagatttttttgatgaatcaagtgaatttcattgctcaagcctttttaatttgtacaaacaaatagcattctccaataagaagaatctaagtaaaaataaactttacaaggtatctaaccattctttgtcactaatggatgctttctttggctatgtacaagttattctattttttgatacatcttttactttccaaactatgctatctatacttggaatggagttttgccacaaaatttcatttccagctcgccataaggtatacacgagtgctgccaaggcagcagctaaatacatccttttaaccttgctaatcttagcttttcagatccacccgacaattcgatgaagggtgttgga

SEQ ID NO: 93591 - DNA, 736 bp, Cannabis sativa
atatataaacataacaaaacaagtctttgaaactaaacacagacaacaaaaactatacattaatcttttaagttgcaacatcgacatcattatttcgcattttgtccttaaagactcttcagtggatgatttggtaaaacaacaacaacaaaataaattaaaagatgaaacaactataaaacaacttataaacaacgttaaattaacatagccatttacaatgtttagataaaatctctaattcataaaaagatataacttagatcaataaaagtaatatcaaacaacttataaataactttttgaaatttacggtttgagttgctccagtaatttctatgtgggttgctatatggattttagttgcgatttaagttacttcgttagttgctgtaagggtttctgtgtagaattccgtaaaaatgcgaaaaaaattattttgaagtgtaaaaataaaaaaaaccctaaaaaattatatataagaatgaaatatacatttgatctattgagttttgaaatatatttatattatatgtattagatttttaaattactaatttttttacattaaaaatagtaattgtatatataatttttaaaattttatataaatatgtgtgggttagatgcatcaattatttttgtatgtcaattaatattcgatctacactttaaagattggattgtatttgatcttgaagatttaattggattaactattttatgaacaccccta

SEQ ID NO: 93592 - DNA, 3657 bp, Cannabis sativa
  modified_base (1081)..(1082): a, c, t, g, unknown or other
aaatagagaaagaaaaaaaaatgaaaaatggggctttgcgtgatgattgagtaattatcataagaggaaagatttcgttttcaaaggaaaacatacaaatattttttacatttttttatagattttttttgtcttatagttatatatatattagtaaaattaattaattttcaaacaatatttgcttatatatataatttggttgcagctatataaaagtttgtaatgtagtttgaatgggaggcaaattttcaaagtcttgcccaaaagatgagtattgatttgatcgttattaagaaattttttaaagtatactgttcttgttatattgttattattatgatttcatatagaattttatatattttaatttaataatttatacattaactaatcatatttaatagtgtttaattaccaatataagttttttataataatttattaaattacactataacaatacaaaattatcatttcaacaattaccaaccaattatagtaaacaaattttttcattttttttaaatagagatgtattgttaattttttgagggtataacaattaattaagtattaaattattaattatttgatctatatataacaatgagaaagtaaaacaccaaatatggtcaaaattattttgagcaagtgttcaaatctttgttgaatttgctttaattgtatttgtatgagacacaaagcaagcaagtgacttttggagaattaagttgattctttcatatttttataaacccaaaaatatatttgtcgtttcttaatatttatgttgttttgatttgttgtcgttttggggatttcatgctctttcttaatttttggtcgtttttgtaatttgttgccgtttaaatgacttattactaattgttcacaccatacacatacagagatcgatcataactccaatatcacactcacaatataattatatcgatactataaaataataatatcattaccataacattgacatatcatagtcattacatatataatctggcatatacaaccctagctaccattgtaacatatacacattcataataataaatcacanntaatatttcaatacacaaataatttaaattatgcaattcaacacataaaaactacctaattttcttaccttaaattcattgaaactcctattaattaagtttgtgtatgaattccacacatttttatcagttaaaattcaacttattttatcatttaaaataaataaaaatatatttttaatcactaatcaatgtcttagtagtacgaatatattgtgactaatgtgaaaaatgtgagatgtttactaaatttttatataaacataaaaagatttgaatactaatcatcaacttcaccttgagcagcttgactttcttaattttcttcaatactttcaccatcactaccttgaatttcttagacaatttaattttcacattcacaactttaaattttttggacaatgttatttttaccttcatcaccttaaatttcttggacaatgttcttttcaccttcaccaccttgaatttcttgaataatgttatctttaatgttaaactgaagtgtatttcccacttctatacgaccacatacagattgccaaagaattgaggatattgatgaagaacccaatcaagaaagggaagaataggttgaaattgctacttattcaaatcctcttttgatgatggcaactgctgcagctcaagaatgggaaaaacttcatctgcctccgcctccgcctctgccagttgaggtcgccgttcagcctccgcctcaagatctacaaggaattgaggatattcacgaagaacccaatcaagaaagaggaaatgaggatattcacgaagaactcaatcaagaaagtgaagttgctactgattcaaatcatgcgactgctgcagcgcacatccctaaaaagttgtagaattcatacacaaacttaattaatatgagtttcaatgggtttataagagtacgcaatgcgatagtcctagtcacattttctatttaaggaagaaaaagagatctgcatgcacacattccaagaagaatttggcagtctgtacgtggtcgtatgaaagtaggagatacacttcaatttaacattgaagataacattatccaagaaatataaggtgctgaaggtgaaaataatattgtctaagaaatttaaggtggtgaaggtgaaaataacattatccaagaaattcaagatagtgaaggtaaaaataacattgtccaagaaattcaaggtagtgaaggtgaagacattgaagaaaattaagaaattgaagttgctcaaggtgaagttgatgattttcaaatctttttattttggccaatgttgctgcagaagaatggaatcaatttcgcccggttcatgccgttctgccttcgcctctgccaataatacatataaatcttttatgtggggagaaagtactttggtgaaaaaattaaatattttattttatatcggttgtaattatgtgggaatattaatattcttctacataacacctaaaaatgtgactattttgtaattactatgatttttccatctatattgtaatgctaaaaaagaatcatgaattatggtgcattttgattattttttttttttgaagtttttctctattattttttttcaagtatattgcattttatttctttatgttgttttgccataaatatacaaaatatatccaccatttgttccatttttgtaataatgtaagtataattattaattttatgttttgtaaatataatctacatatcctttttcactataatattatatatttttttatataataatgtaaaattcaaataaaatattatatattttataaaatattttaataaatattataaaatattttagtgatattggtagttaaattacctgaactttaaattttttaacacttagctacaaaaatcaatttttaggggcaaaattacctaaactctcattctattttgttctataccccttcgttcaaaaatcacagttaagtgtcacagtgtactacccacgtatttttagtggcccacgtaatattaattttaaaaaataattataaatgtttaaaaaattaaaaaatcagaaaaaaaatattttaaaaatattttcattttgagatattggcggctaaaccactcgaactttaaattatttaacacttaactacaaaaatcgatattttgggaggcaaaactacctatagcctaccccgcgacctaaactcccattccatttttaactctttttctttttattttctttttttcttcttaattgaaaaaaccttagcacccaatagcctaccccgcgacccaatgttctccgactcccctctcacacactctctctcacggtgcacaacgtcggccttctctgaccaccccatgttagacgggccacagaactgaaccccacgatccaaaaaatcctaaccccaatcttccatcctttctctctcctttgatctttctccgatccccctctattttttttcattgagtctgacccccctccaacgaccaccacgaagagagagagagaagagacgagaaagagaaagagagggtatgggaagaagaagatcgagagagggaaaa

SEQ ID NO: 93593 - DNA, 701 bp, Cannabis sativa
atggaggagatttcaatatttacatcaatatgcaactatcatgttaaatttattttaaaaataaaaataaaaataaataaataaaaaacttgtaacctgatagtaacctggtactttatttccttataaaatcttaattgaaattagttatattttaaattaaattactaataattattaattaatattttacaatttgttactaaataaaaatctttgagaaattaattttttttgcacttaaattattgaaatatttataataaaacttattataatttaaaattattacacccataacattaattaataataaaaaataatacgaatgacctcttattaaatgaaattctacgctcaatcttattatcaatactttaagtgtcaaataagtgtgtcaattcatgataggttcaagtgatttatttttttttcaaaaaaaaaaaatctaatcacaattataaaattaaagataatttttttgctgcactcgacatatctgtactttattccacctctgtcatgtaattttattttatcagagagacaaagtcactttattcttccttatttgcagttctaaatatattgtatatgtatcaattaatcagagtggaatcataagaaaaaaaataattaaaaaagtttaaaagttaagcatgcatatatcaacaaggtgcatcttatttttcggtagccca

SEQ ID NO: 93594 - DNA, 645 bp, Cannabis sativa
agtttagggggaatttttaacagccaaaaaaattcagagtgcataatttggtatatatcaaagttcggggagaaaattactaagtagcctaatgataatatgtgatcttacacgtgcaacccgtccaaaaactagtatatataaagaaaggtataaaaaaggacatgtggcattacatatatgagttttcttctcaattctctatttttctattttttatttatttatttagtttatactcattatttttatttgcttatatttatattaaatgttactaattaactacaaatgtaacttataagaaacctaatagtcatacattttcatgaatagtaataaattacaaaaataaaaaaaatatataaatatgaaaattttatgaattataataattacaaaaaagttaatgatgcttttaaattaaatatgtatataccttttcaatttttaattctctatttttctatttttttatttatttagtttatcctcattatttttatttacttatatttatattaaatgttacttttttttgtttttgaaattagcgtggtgtcattaaataaaaagaaactagacctcatggtcgttacataacaggttctccggtaacatagagaccgggatagatccaaacat

SEQ ID NO: 93595 - DNA, 2044 bp, Cannabis sativa
ttgttatgtttcattaatggtgatatttatcttaaaagttttagaagttgcttatttgaacatcgttttgatatattcaagagcttacttttgcagatttcagtcaattttattaataaatttgggccatggggcccgttgaagtagaatccatacttttcatttggtctataacgtagtgggcctaagcttacaaccaaattgggcttaagcccattcatatctctatttccctctccacacacacgtcattaatttaatgtattgccatggttagtataataaaatataaacacaagtcatcgataattgtgtttgaattcacaataatatttaggtaaataaatataaaaagttaaatattattaacaagacgttttttcatctaatagactatcttaattaaatagcaaagtgagaaactttattattataatttcttttaaataatattagtgatgatatatgtacttaaaatatacaccaaaacaactttaattttatttattttcataacatgattaatgatatatgcactaaaacattacatacactaatgcaataattcatttcaaccaattacatttattttaaattcataaaagtgttttttttttattttacactttaaaataattttttttaaatatttttatgaaaatctacataactactcacatattaaaagaactacgaaagtaacctaaaatataattttttttaaaaaaaataatatctagaataattttccttattaacttagtatcacatctgtaattttttttttgatggatttaattttatcaaatataaatatttatttaattatcaaaatttatattaagaaccaactattcatgtgggggtgtgtacaaaataatttgtatatatacaaactatatatatttattcaattatcaaaatttttattgggtattaagaaccaactatccatgtggggtgtgtgtacaaactatgcatatgtatgtatctaatatctatcactattagttgtgtcagagaaagatttatagggtacacaaatagtccaaacttcaaagtaaaagtttggtttaagaagaagaagatgaacaatagaagcattatttttgtgaaaagagaatataaagccataatagttagtactttcattttcattgtaaaaaacgatgtcgttttgcacttttctttggcttttgtcggtgaaataatgaaacacaaaaaaccaaagtactagtgactattattgtgacaagagagagagagggaaagaaagagagtacacaaaaaagataaagccaagactgtttttgttatgagaattttgggctttttggccttccataaatgcacatttcataaccaaaagctaaaaaagaagaacttatagtcatatagacatagactagtgggtgcaaccatttaaattggtggttgctatgtctttatctcacaaaagatttcttattctttttagcttaatagaaatgcaactacggtgtttcgtatttttgagaggtgtaatattattattaggtctcacttattttactttaataaagattataaaaaatcgctaatctattatatgacgtcaccttataatagtattagttactttagtactctataataatattcttagattattttacttaaaatattatattgttattattgtaatttttttaataatttctataaaaattattaactcctagtgaaatgttgattattgagaaagggaggaattgtaaaatggggaaaaattgtgaaaaaattaatttcaaagaaaaaatcagtaataatgtaggatattagtggagactaatagtaataataaatatatatatatatatatatttttttctctctctctcataattctattatttaaaaataaaagtaaaaccacatggccactttctactaggtgtgaccacacccattgcaagtgcatactaatttgtgcttgacaatgacttaattgagataatgtgaaaaggacaatagtattattggtcaaaacaatgtaatatatgtc

SEQ ID NO: 93596 - DNA, 648 bp, Cannabis sativa
  modified_base (180)..(184): a, c, t, g, unknown or other
ttgaaaagtatgaacttgactgacttattgactatatatttataatagatcccattaaaataggtttactgatgcaattcctaactagtttagaatctataaaaaaattttagtctaaatttttttatagtcgtgtaagttatagttatttaagtcattttgcaaaattttaaaaaattnnnnntaatttacaatatagaaatcaatgtttaaactgtctattttacacgtgtataaaataaaaatgtcacgcgtgcaacagactctttaaacactattttcgacgtattgtagaatttttcatatttatattatgccagtactatatttgcgtgcagcaaatataacgaaatttacaaagccacgtttttgtttgttctgttggatgctataatttttattacatttacatgtacgcatataaaattagaaaaaccatgtatattaatttcgtgaattttggtatgccaattgttttttttttttttaattgaataaaaagagagaaattaatatcagtgttattagaatattgacacatatatattccattcaaaccatagagctatttttctttaatcataatagcgcgttcatcacggagaaacatctgggtgaatgtttgccacataaataggtaagattata

SEQ ID NO: 93597 - DNA, 551 bp, Cannabis sativa
atatatatataaattatatatatagcaataagtgaccttcaattcaattcattcaaatatccaaatatgatctcattgacccatcaatccattaaaactaaagatttgacaacctaaaacgtataaatgcggcaatatatatatatatatttatataatgtcctatgtatataaatagttttattttatatttatatatttaattaattaattgttgttggaaaagtttatttattttctatatatataaattagttcaatatgtaataagaactaaacaattattgttcattataaaatttctataattattttttttatacattattttaaaattaattgtaatgtcaagtgacactctagcactataaaatagtaattatagactcgattcataaatttaaataattacaaaaatatatatataaaaaaaaacatatattttcatcaatatataatatgtgatgatgttaaccgacaataatttgaggaagatatatgaactgaaatataataaatagagtataagtttatagggatatgattttgtc

SEQ ID NO: 93598 - DNA, 770 bp, Cannabis sativa
ctactgctggctcatgtaaaatttgctttaaataacttaactagaatttcaattccaacaactctaacaattaattaggatgctcatcttatcaaataatataccaatgcatattaacttcagtatcgaaataatattataattattttactcattcaaaccaatgcacaatccaatggctaatatgcttgcatgcttacctctctccactaatgttgacaacatttttcggaaatcaaaaggacttttcaggttagaaattcatggcttagatactcaataaatgaaagaaattttggctaaaaaataccataagcacattagaacacacaaacttttcaccaattaaaatttttcaaagtgttcccagacctaacaataattgagattttttaacaatttccagacatcacttatccttttaacaataataggggtggaagaagttattaatatatggagttcaaaaatcttttacattgaactctggattatattcaaaacactacagaatctctataatacataggggtggaagaagttactgatatatgtagttcaaacatctttttcattggaatatagattatatttaaaacaccacagaatctctataccacacatttttttacgcgtacatcacacatattttcattagacataaatataatatgtaatttaaactagcaaactagtagaacttattcttgatcatgtatgtgttctaatatatatgttacaatagtaatagtaaattgataccactgaag

SEQ ID NO: 93599 - DNA, 566 bp, Cannabis sativa
gttggaattttctcatttttgtatcaagcaaagttattcttgcacaaactggtaagcctttcctcctgtgatgggttaaggtgagtctgataccccaaaatagatgtgagttagaccttggtctatccattattgtggaaactcaaaaggggtttggagagtgactaattgttcttgctctatagcacgaaggttaattggtcaaatttggtagatttgacatattctttgacagtttttgggttttgcttgatgagggtttttatgtatctgataaaaaggctttgtggtttggaaaaatcttgatatggatttattaagggaatgtcgaatagtaaaaattttccatcatcgaaaagatatgaaacttcatcaaagcatttattttgctaacagaagattgtcgcaatgttgggcttgttgcaaaaggcatgtatacttatgtgtaatgtgttaagagttggttggaagatgctataatattagagggcgttgtcaggagactaggatatcttaataggagaaacaaagagaccgtgaggccctgatgttgggttttatgccct

SEQ ID NO: 93600 - DNA, 801 bp, Cannabis sativa
attccgttcaattttactaatgtgccaacatatttaatcctacaccatatttaatcctaaggaatcaattttgacacatctgccaacattctgatttatctaacaattcatcttgaccgttcacatctactgacaaaaaactacggaattgtgtttacaattaggatttttgccacccgaactttgacatatactaaatcatacccctaaaattttcagaccgttaaaaatttcccccaaactattgagattgttggattcaaagatttatgtccaattccgttcaattttactaatgtggtcataatccatgtactaaatcgtgctcccccctcccccacccgaaacttcgatatctaccaaattgtactcctcaaactttgacaagtacaaaatcatgttcccagaactttcatccacgtcaaacttacgctagtaaaattggacaaaagtcgttaaatccaacaatttcaatagttcggggagaatttttaacaacctaaaaagttcaggaggcatgatttgatacatgttaaagtttaagcaacaaaaatcctaattaaccttacaattgaaccttattggcacgacataggctacaacatacataatatgtgccaacaatgttgcgcataagcgtatagaaaacttatattgacacctttcatcatgcaccaacatataaatttgcactcatgttttttttattttattttttcattttgctaattacatgatatactatataaatatattattaattattaaagctacagaagagttacacaacaatactaactg

SEQ ID NO: 93601 - DNA, 853 bp, Cannabis sativa
gggcataaaacccaacacactaccccctgttgaatatgatgcttcgaccatgccatccaaccaaaggcaagccagtgtgctctctcatccctcgtgggtatctcatactagacacctctcactagtccactggctagtatcctatcaaaagtctcgataggaataatagatgcaggagagacccacttctctccttgtgatccatcatcaagaacagaggctctgaagtttgtattaagacatggtccagacctatcaccaaaggctagcctagcctgttcaatgactgcccatcgacgtcatatgcacctagagggcagttgggaaggacaacataagttctatatgtcctccccctaacaggtgcaatctcctccacctcaaacccagttttagtactctcagccccttggtcaacatcaggcacctctccttggctgacttccggatctacatcataacggggttgtgtggcctcctctacaactctaactctgtccattgttgcaacattggcaacatgagggtcatatgtgacacactatgacatgattgttttgttttggccatagtatatcactataagtccagaaccactcagaagggaacaaggggacagactaaatgctatctctcaaaagcaaaattgacaggacctatgacacaacggttgtcacctccccagatcaacactcgaaatcacctacatagaagagacaatgggaggtgagcaacttgacaaagctacaaacaaaggtctagtcaaatgtacgcaagggtactttctaggtaaatcacattgtacaaggttgggtatcagtaaagtaccgtcttaagtacacttacttagaca

SEQ ID NO: 93602 - DNA, 661 bp, Cannabis sativa
ttagtagcatggatattctcttacagatcctattaatcccattatttctctttagcacgtttcaaactctttacatcatattcttacaaaaaaaaaaaactctttaaatcatatatatttatgaaataataaagtgtatttcttcttattcaagctaattgaaaaagaaaaaaaaaacttggtgactactcaaacaaacacagcccagggcaaatatgtaaatccaacatatataattaaagaaagaaagaaaaaaaaaattgaattttgaaggttggcttaaatgccaatttttcatttgaaaaaagtaagggcatatcaaaattggctggcatatcactttcttcataagctacaatgtccatatccattgttttactatgaaaatcaaagcctgtacaatcacccttaggtagcgatcgatgttggtcggcgtaaacattgttattactattttcgttcctttaacatagaaagatttaacactctttttttataagtttctgataagttgagtcgggttgaaaaattataaatacaattaagaatcattaaaataaaattaagatgtaatgaaattttgaaaacccaataactatgatgattcataatatgtaatacaatactccctttattgtaatacaatattattattattatt

SEQ ID NO: 93603 - DNA, 1004 bp, Cannabis sativa
tgtgtgtgtgtgtgtttgatctaagagatagagtttgatctcttcgatcttggaaccctagggttttctttctttgagagagacgacagctcgagaattggatctcgaaacttctgattgaaaatcaaaatccttttgctagggttttttctttcgtgtgagacaacttgtattggattgggcattgggctttgagggtactactacaaaaattactattcccgacggtcctaaaaatattttttttggatcgctaaaaaaattaagtgagtgtttaaaaccatcaagaaaattagatattctcgatggttttaaacactcatgatgcattcctgatggtttttaagcgtgccttaaaaattgtaattttttctaaaggggaattaccgacgattaaaaatcgtgacctatactatagctgacggatttaaattgtggcctatacattttaaaatagtcgtctaagttattctcaacagtttttaagtgtgccataaaaattgtgattttcttaaagggaaattaccgacggttaaaaatcgtagcctatattataggccacgattttataccatcgcctatagtgttattcttggcgatttttaagtgtgccttaaaaattgcaattttttaaaagggaattgctgacggttaaaaattatcacctatagtgttatatgccactgtttttaatcgtctataactagttcaaatctaaaaaatttcaaataacgtattttctctcgctccaatataacacgttttagatctaattttttttttttttttcaaatgtatacattttcaaaatgtcagtctctctctctagagttctccctctctctttctctcttagatggcgatccatgagctccatcactcgtctcttgctctctctttcacgagctccaccataagcgaaagcccattcaagctccaccatggtcagccatgtccacgagctccaccacgagaaccagcgtcacttctctctctctctctct

SEQ ID NO: 93604 - DNA, 584 bp, Cannabis sativa
catctcttaaaaagaccaaagggtgaaaaatcactgggcgtgtgacaaaatttaagtagctcttctcttccaggaaggagggttgaagacatattatatccctagtgatctttaatgcaccaaaaaactacgtgcttggtagattcatgttaaatttttacgtggcagactttggcttacgcaaggaaaggttaaagttgcatgaaaattaaagcaatgacttttcttcaggtgaaacagcactgggcatgtcacaaacttcaagcaacccttccctttttggaatgagggttgaagatgcatcataccccaagtagtctttcacgctcaaaaaagctacgtgcatgcatgagtactcatgttaaattttcatgtggtagacttcggctcacgcaaggaaaggctaaagtttcataaaaattcaagcgatgagttcactttaaaagacaatatggtgaaacatcgctgcgtgtgtgaccaactttaagcagtccttcccttccagaaaagagggttgaagacatatcatgtctgtaacaccctaactagaataggcgtgttaacgtgattttaaacatactgtg

SEQ ID NO: 93605 - DNA, 650 bp, Cannabis sativa
  modified_base (46)..(52): a, c, t, g, unknown or other
aaatctctcaaaattttatagggtgtcttaaataactataacgtannnnnnnatgagaaaaaatttgactaaaatattattttgagtactaaaacaggtaagggtgcatcaatgtattcattttaagggagtgcattatagaattccccgaggcttattttgattgattatgtacctggaagaggacgaagttaataaggtagagaataaggcgtgggcggttgaaccagaaaaggtcgtccccaggttggaccacaggcactccttttacaacttctcctctttcttgaattcttagccccatctttgttataatcacttgtaatttcgtccccaccaataggatcacctaacacaatttatttataataataaattaataacttaaatatattaatagataattctacaatacactcttttacttttttgaaagaagtttattaaagcaatttctatttaccagaaaaaaaaattatttttatagttatttattttgtagttatttaagactgtaaaattttaaaaatttcgaaaaaatttaatatataaaaatagatttcaaatagtttactgcacacgacagtggcggacccagaatttaaagtgaggggggcgtaaataaatttaaaaaaaaaatataaagtgta

SEQ ID NO: 93606 - DNA, 653 bp, Cannabis sativa
  modified_base (534)..(539): a, c, t, g, unknown or other
attatgaattggggttgtcccacacccttagagattgagtatctttactcagttaaggccgttctattaaggaagaatgtcgcagtgggctttttctctcttggtgctcatgctagcaaaccaaaaattattgtagacttgccaaataaggtatctttcaaggacaacttcttctcgacgtctggtctctaccccattagcacaaccacgtttcgcaaactccgtaagtgattgttctcttcttaattatttacatcagtcttcctttttcaagtacttggctaatatttcgtttgttcttacagctcttctgacgagacctactcctacccccgagatggttagtaggcacaaacgcctaatgactctcccttacagtcttcgatcatgcaaattccttttgaacgaagttaacttccgatcggcgggccttctcgctgacaaagaatacacttgtgattacaagattcccaagtattcctcttggaaaaaaataattgttcacccgaggaccaggcctgggatcgcttggcnnnnnnacaataccttcaaagcacttccccacgggaatccggtgaaggagcatcccgaggtaatcaatgtggctggccacttactatacttaaagctgagcgtaatacattagttacctt

SEQ ID NO: 93607 - DNA, 766 bp, Cannabis sativa
ttggattttctttttgctttttccagtgtctggtgaagggagtgacattcatttggccctggtgaatcctgaggagattcctgaggtatcgtctgctgaagtaccccttactgaggagattcctaaggcatctagaaagaacattccacttataaaagtttaagtaaataatattgttgattatcacgtcagtgtaaattcagtacactgataaatcgtaagactaagtattttgaagtatataatcatgattatttttcactgtgtagacaacactataattatgaataactatacgttcaagatttaatggaatttatatattgaacatataatcacgaaattaatcaagtgaaccatgcaacataaaataatttctgatcttttattaattagtatatttgattatattgaaatagttttatttagggcataaaatctcaacaaactcccacttacattaatataaaactaaaagtgtatttcaattaatctctgcatctttatgtccagatcaagtgaagtatgtagtattattaaaatatttactcaggttgatttgaaaataaattaaaaatttattttcttagtatatatctttcaaataaatattatgaaaattgtataattcaagttagtctaaaattaattaagaattaattttcaacttaaatttctatatatataataataatcataattcaaaattcaatgtattttaaataaaacacattttcaaattagtattaaaataaaataaaataaa

SEQ ID NO: 93608 - DNA, 565 bp, Cannabis sativa
tttatccctcgtggatttcaaacccacttcttgtcccaaaatcaaacgactcctagagaacttgtatcgactttttaaacttgaataaggtgtgtctaaaagattatttcccactacccaggatcgacaagttagtggatgcaacagcaagatatgagctaaagacttttatggatgcatattctagatataaccagatcaaaatgcatatctctgatcaggagaatacaagttttgtaacgaatatgggactttattgttataaagtcatgccatttggtttaaagaatgctggagcaatgtatcaactactagtgaatggcatgtttgagaatcagattagagaaatatggaagtctatgtcgatgatatgcttgtaaagtcaataaaaagtagagataacactaaggatctcgcgaaatgctttgagatactcagaaagtttaatatgaagcttaatttaaagaaatcctcttttggggttttctcgggaaaatttcttgatttcatagtaaatgcgagaggagttgaagctaaccctgaaaaaatcaaggccctaatcgag

SEQ ID NO: 93609 - DNA, 937 bp, Cannabis sativa
aaaaaaaaaaagtgaaatatctttatcattatacataaaatgtggttatctaacaatttttgttggtttaacgaaatattttaagaatataaatataaattgttaaatttaatagtgttagtaggattagtttaataaatattatttattttagattaattgtacgtataccaattttaaattaatttaaatatctatattaatatattatttgtaatattatgaatatgttcaattttaatgttctttaaactttttatttattttcctaatattttttaaaattttaaatatttaaaaaaaaattaaaaaattaattaatttactttaatttataaaattttaacaaaaataaaaattaaaaatataactaagtaaccttgtatatatataaacatataaatataaatataaatacaataaaagaatttaaataaaattgataaagaaaacattatttatcgtattgggctaaaatttattacttcatcggcccataaaaaaaataataacttctaaaactaaaagccttgaaattttgtcatttatctaagtacttaaaaatatgttgatattcaagttaacatttcaatttgagttatttttgttaactgtctttcttcttatttaaaaatgaatattgctaagctagaggggattgggcattttcttctttaagaagacaaattgaatgacaaattataatattcgtttttgtataatacaatattcaaactaaatctctatggtttcaaaaaaaaaaaaactaaataaaaaaatggaaataattcaaactaagtctattggaaagttttcaataaacaatctactagaaaaaaatattattgaccatataaaatgtaaactaaaaataaatagtttgtgtacttaacaatttatatgtcttgtagattatttttatttgattttttttttt

SEQ ID NO: 93610 - DNA, 997 bp, Cannabis sativa
atatatattagatttttaaattaatatctttttacattaaaatattaattgtaaacattttttctaaaaaaatataaatatgtgtaaattgatttaaatcgattactttaacatatcagtcaaaattcaatccatacaagtgcaaatattcacactttatagattgaattgaaattagattagatcgtgcagattaaattttatattttataaacccacgtttactaaacagtattaagaatcagaataaattaatagagaaatgtaacggaataaataaaaaaataattaaaatcaatatttgtaatatattgtttactaaaattttttgaaaatagaatacttgtgatttatcttgtttactttattagaaaacgtaattggaatgcttaaattgactaaattgtccttttgagttaaactatattatagagtagttattttgtaagatatattttgaaggacaaaattatcattatatatttaatattaaaaaataaagtaaaaataattaaaaatccattacctttggcattctttataaaattggtgggagaagttcttcttttcttttctctcttatttaatcaaggactccctttcctaattttaataatgtaagtaaataattgtgaaaaaatgattatcttactatttacttattagtaaaggtaatggaaagattatttatgttcggaaggagcgtaaattctgtatcttaatctttattatgctgttagttagacaactaatcaaaacgaagaagatgacttattctttattcctaccttaaacagctaaaccaatgatggaagtcacaatatatctcctttactcagcatcattgattgtaacatcaatgcaatgccctttagagtacaagaccttagaatgataaagcacactctagtttttcatctgaaaccttctgcaacaagccttcaggagccatcctaccatgtcatcttagaaagtaccagtgcatgcaacttgcaag

SEQ ID NO: 93611 - DNA, 1526 bp, Cannabis sativa
  modified_base (1495)..(1500): a, c, t, g, unknown or other
ttcgcggcagcaaaataataatgaaaagaataagttgctttgtttactaaggttgaccgaaaactaaataatataacaggtagaaaaagtaagagaaaagaaaagaatatttaaataattaatgtagtaattacaatgataaaattgagcttattttctttattaatggatatttgtgcagccgaaagcctgccagcgcttaaatgagtcaaactactttcaattagaagttcatctttcggtaggtaaacatgccaatgcaatctatattatttatttttatcttcatcatcacatgcaaacttttttattctcctatatttatttgtatacataattatattaattatttcaaaacataaatatattagtttggactttggaatgagtttgtaggagaataagggaccaacaaataattcacctctgtaattcttgttgttaattattagaaaattattgagttaaaattacgatctcattctaataatcaatatttgtttcataattttattctgcaatacacgtgatgaggagtcttgttttagggctgtattattagagcatctaacatatgaaatacttgggagtggagtatattcttatactaaaatgatgaatcatgcatacatcaaaatatatatgtataaaccaaaatatttacaaattgaaaaaggggtccacaaaagcaattggtcaaaatctctatacattaggctatggaagaagccactatattgactttaattagtttttggttttggtgtctaaattctttacatattagaaattcaatctccaaacataagaattctcttataattaaaaatgaaattaggatagtttttatccacatatcagatagtgggctccatgagagagaaaacgcatggcagatgggttcccacttcttatagaaattgaaattatggtcatatctcatatatgaaaccaaaaacgggctttgacctgaaaacatggatagacgagcaaagtatatgtagttgtccttatccacaactttgacccattcttacaagggaattgaatgattattctatgttttagctgcatgaaattatcgtgttttcatctaaatgcacacttgtctttccagctacaaattgtcggttgaatgatattgtataatttgcataattttattaatatttacaattcttacacatatataatcttaattaaaagaatagcaaaaatattttattttatgcgattttattgtagtcgtacattttttaattattaagtgtcaatttaaaaacatatagtaatataatattagataatatattaaatgagctaaagaatatctccacacggtacttaattatcacttaacaattaaaaaagaatacgacgagaataaaattgtaaaataaaatacttttacttttatttttttgattgggattatatgtaaaataattataaatataaggatttcaacgccaatatatatatatctttatatatnnnnnntgcctatctaacggcaattcttggtt

SEQ ID NO: 93612 - DNA, 1645 bp, Cannabis sativa
  modified_base (1603)..(1605): a, c, t, g, unknown or other
aactcaactttaaactctaaaaaatatgttttattaaaaacttggcatttaatattaataaattacacatttattttaaactttaattttacaatgcagatccttattttaaactaaacattttcatttacataaataatattcaaataaataaactaagtaaaatatcataaagccttaaaatatgtttctaatcactaacttagctccataggtcgagcagatcataacatgtacatcagctgcctcgctctctaactcatggtcgcactaaatttttcttacttgtacttgcaccatagaatacccatgagttacaaagactcaacaagaaaatcattaaaatacccaaacaaaataatgttcatagaaacattccaaataatttaaaataatcataaaatatcatataattcataatcattttacaattcaatgtaaaatcaattaatcacacatataatgattaattcgctataattgttaagtaacataattaaaacttaattttataattgttgtctaatgaaacaacccaaacacttacctattaaggtaaccaattaatattattacttaatgaagtaaccagttatctcatgttgtctaattagacaaccatatacaccatccaatgggtctatagagtattaactctattatctcgaaaatcaccctgatgatgtggcatagaatcatatgacacgtggagaacataataaaaagtggaaaatatcaaaaccctctaagactttcttggaaatgttggtcggccatattaaccaaatgatatcgcccagcctcaagcatatgttggacggaaaatatctaccaacatcatgcatcgtcaatagcctgcacttggaaggactccctactagagaccttcatgagagacattgtccaagttcattccttaattgttttcccctaaatagttggaggaaaattcatattttcatgggatcgatttaacaaaatgagagaatcgtgggattgatcaaaatctcatgattctctctatttattttgttattaattgtaaatatctaagatcatcttccttataaatagtgactccattccactaaatagggggattcaatattctaaaaaagagtaaacattctgtagacatatttgtaaccttaagagatagctagaaactcgcttgactaggttcatgtgatcttgctattctccatagaaatataattaaaaggggagtaggctattaccgtttaaaagggtcaaacttctataaattcttgtgtgtctgactcaaagaaagaggatacagagccatgtgtgaaaagaatcatagacacatagctatcggagcatttcagaatgcctcagatggaattgtacgaaggaagaatggaccctagggaccatctatccaagtacagctgaatgatgtgagtggcaaaagctagtgatgatgtgaagttcctatgcttttcattaaccctttcaaaatccgcagaagactggttgaaaaggttatctcctggattaattcgtaactggaaggatttacagacaatgtttagaaaacaattcatagcaacaaaggattttgacctggaagttaattctnnnacgaacattaaacaacaaccaggagaaagcctcaagaagt

SEQ ID NO: 93613 - DNA, 637 bp, Cannabis sativa
gcgatactccctaaaaactattttattaaattatataggacacgatacctagttggaccaatagcgatattgatacataggagggtgctagacatcactgggccctttaacgtttctcatatatttatatatatatatatatatttatggagggttaataagttcaaaatcatgattcaactggtgggtgactgaaccggccccctttcatggtattatagttgtggtgtatatacagattgattttgattttaagtcaattaattatattataaattatatatatgcatgttttattatgagtactcaagaaataaatatatacctatgttttgttttctcttaatatcttaatttttaattatttgttaaattaagaagtaaaaacattggagaataaagaaaaagaaacaaattaagtactcatacatataataaatattcaagcacatatattatatagttgtacttaaattaaattaattaaatattaatcaataattagggtgtgttgttggatttctagcttattattattagtactaaaatgtaggaaattaaataggctgctctttttttattgcatgtgtctaacagctaagaataagcatcaattaatctttgttttgttattata

SEQ ID NO: 93614 - DNA, 1554 bp, Cannabis sativa
cttcaacctgctacagcacgaagccaagacgcctgacgccaccggccaaattcggtccgcgaatcccaagcaccaagatcggcctaaagtgtgaaaagaaggagcaaaaggaacaaatcataatcgtagagagaaagagtcgtgaagacatatatgttagaatgactatttaatcccctaaaaagggatatgaaaaaaaaaaaaaaaaaatccaaagtttgaaagtccaaaaagatgaataaaaaaacaaaaagatttaaatatatatatatatacttaattaataaacaaaagatttaagaaataatcaagaaaaaagttttactattcctataacattattaaaatgcttatgtatatatgttcaagggctgattaggaccactgagaactctagttacatatgtggatataatttatattgtcacatttttgtggtccactttacaaatagtattcccaccaaagctaaaacacttgtgttcagaatcagcaattaaagacactcctcattaactaatagttatacactcaaaactatctttatcaccccaataatgaataataatataggcaatagacacctttaaaggatgttttcatacacaacccaaatagtttatttttattggttgaaaaatagagtgaacccaatctctatttcagcagctattttcggacccgactcgacccaggtttttcaatttttcagtttttttggcagcggatcgagacgggtggttgggtttttcattacagtgaaggtcacttgaaatttagtggaccattgtaataaaaaaatatttttgaacttttatttaaaaaataaatattgtatttttaaaaattaatatagaaaagtataattttaaaaggattttttttttaaatctcggttagatggactctaaacacagacttaacttacttatgtcgaataccgagcctaagtacagtgatgattacaagctatatatatataattaaggattaattaagaatattgagcatgtcaaaaactatctttgatttattagctaatgtatataaataattaagaaaagaagagtagtgcgcaatgcgcatgcaactaagaacattatacttatatatgaaaatgataaaagtgtgtaaagcatacaaagacttcaattttatgtatatatagaatccaatacagtactgagtactattgcttcaagattcttcctccaaagtcaatgaatcaataaatgaatagtattattgtccttccttattatgcttattgttcatatataaataactcttttatattcatttctttttcatgaaagtttactcctttatataactttctatggatatttaaagaaattatttcaatcaaatagagctacatttgagtcatgagaatatgacaatttaggaaataccattaccaattttgggatatacagttgaacaatttaaatgggccttcataagtaatttttgggctttggcgaaaataccaagctataagacccaattttgggatttacagttggaccatttaaatgggccttcataagt

SEQ ID NO: 93615 - DNA, 785 bp, Cannabis sativa
attattttatcatttcaatatatatttaaaaattatgaaaatgtaaagtagtttatttctaaaataatttataaaataccaaatagtatcttaaatattataaaatacattttaaaataataaataaatatcattatattaattttgttaataaacttaaaggcaacattttttatatttataatattgtttaatggtattttttttatatttgattataattattaatttctttaatatatttacaattaacataaaaaattgctaaaaagattaaggtaacttaaacaagtaaccaacatcatgggttactaaaatgtatttttttttattttttcttttaaattttgttaattatctctgcataaagtataaaataaattaaaaggttgttctttattttaattatcttttttaatgatagtaaaaaaatatatacttctcacatgttaaaataatcaccttaaaaaataaatcacaatagtatcattttcgaactaaaataattagtagagtaattggaaaatatttttaaaataatagaattgattgagaaagaaagataaaacaattataataaaattatagaaagtgagaaacttatatattttgttcattcacatgaggaaagaaaaaaaaatactagatggacggacagatcaagaaatagagtaagagatgagagattattttgattaagcggtataacagtaccttatttggatcaattaaattgttttagttatttttaatattatttttaatattatgtataatattaaaaa

SEQ ID NO: 93616 - DNA, 515 bp, Cannabis sativa
ttaccgtaaatcgtcatttttcatcatttttcagtttttcttgtttgagcattttcattttatcatatttgagatattagaaaagatttgagatcaaacggacttttaaaacccgagttatgacccttttttgcccactgtgctgagaaaacggcagtccgtttttcccagtaccagagaaaacggactactgttttctacaggaaacgtggggatgggcctttttgtctttccaaactcgatttttctctccataaaaccattccaaacctttttctaacttcatttctgatttcctaaccctagttggcagccttctaccctcttctatcaacatttctcttaccaaatcgtaatccctcttttctcttttcaaaatcctatctctctccaaattcaattatctccaatggcttcagcatcaagacaaggaaagaggacaaggacttccatgcaacaagaagagctaaggagcaaggctaggcatgaactcttctcccatggaaaatgggcaa

SEQ ID NO: 93617 - DNA, 827 bp, Cannabis sativa
aacatactaacaagttgtgtcctcgatagtatatgattttattaataatattactcgaaatataatttattttattaataatattacttgaaatataatttttacgggtctaattatattttatttaattttattgtgaaaggagtgatatggtaaatgataggcaaattaaatatacattttttaattttaatgattaggaaactaaaattaaaatttttaaaagaaattttaattcacctagttttttttttttactcgtccacaggaattataaattaatgtaaaaaagataatattttattctattattcattaatgtaaacaaaagtaaaaaaattaatttgtatcaatcaatcaactactatttattattttactgtaaaaagttatattctgaatgatattattaataagtcataatataaagttcagaggaaaaaaaatattaattattctttgccttatctataaataattagaagttttatacagacagacgtgtagatggatccaaatataaggaaaaaaaagtttaataataatttaggataaactaagccacttatctcatatgaactttagaacacaatttttcaattgctattaggtacctaaaaaggagaaacactatgttgatgtattgtattgtaattgaccagtaattctccatattatatattaaattaaattgtgtgggacctgatattaaaatgtaccaataacggtaaacaatctcttgtagtacttggtaccttatggtcgtttgagtttgcttcaaactaagagaacatgtgatacgaatatggtgtgtaaactgtcgtcgg

SEQ ID NO: 93618 - DNA, 690 bp, Cannabis sativa
gcccaacagagggaggcacaggcagaggagaggcaccgggaggagctgaaggttcagggtgaggctatggccaaagccaagcacgagctgagagaagccaaggaggccgtggaggagctgatcgccaggctgaaatccatggagtagctgcatcaggcagacttgtagtcgacggccaatttgaacgttgaggtgaaggagctgagggacatcaaagatcaagccttgaagaaggctaaaagagatgagctcctagcccctgttgtctgcaagcattgtaccaagcgcttcgatgatggcgttttcatggcttggcaaacaaatggctagaacatcaagctcgatttttaccccaagcctgaagaagtccttgttcgcttctgggagacgaagaagaggcttgacgccttgctcgaggagcgcaaggggccttgtcttccatctcgcatcgattaagccaattatcatttgttaccgctatcactacctttttttttctttttctatttatagtctcttttcccattttcagacaattttaatttttatctttaaggggagacaattttaaggcccgtccccaagcctttagagtttttttagggcctgttactgcgtccggacatctttacatatatgcttaaatacatattttgatttaattttgctaagcttttggcctgttttata

SEQ ID NO: 93619 - DNA, 597 bp, Cannabis sativa
tttttacacaatgatgtggcagaatactcaggtgacacgtgttttgcatttcctgtatctgggcagaggtaaatgttctgaacagactccatatagtatgacagtacgtataattgttgtggtattttgcaacacgcaagtatacgtatcgtttaaacaagtattactcacgaagagtgaggtcgatcccacgagcattgtagttaagtacgttaaaattaaaagccaactacctcaagaatcaccctttgttggaagccaaggcaaagaattcagattcttggttttggaaaaatattgtaaagtctatggacatctttcttgacgcgacttgtaaacgtattggtgatggctctaccataaacatttggacggatctgtgggttcgtatgggaataaccgttgccctacgcttaatggcattccttgagaagtgtgagagtagtggttgacctttttgggtttgatggggattggacaggccaaaactcttctcaatctatgaagctgaacctattagaaatattgtaaagggtgggaaaccgtgtggggttgggagagacaattgagtttggctcaaagtgttggaaattattt

SEQ ID NO: 93620 - DNA, 556 bp, Cannabis sativa
tgaaaccttcgtctgatgcaaccaccgtgcaatcatacgccaaccgccctgaaactatcgtctgattgtgtaagtgatagtgtaagagatattttggtaattaaaatcacatatgaagtataaatgttgtctacaccttatgaaggtatttttgtaaataaagtgtcaatttatattttctatgttataatgcttttatttaaattaagacttactatttttttttaaaaaaaataatatttaaatttttataatattctaacatgttttattagtgtatatatcatcactctttattatgtttatttatatatgagaatttccaagattttttttttttgcgaaatatgacattttacatctattattttatgttttttttttttatttttttatttatacattttaaaatatatatttttttttgtgtttatacgtaaatacaggaagtaatctaaaacacaatacaagtctacattgcaacttatgcaaagtaacccaaattgtaaaaatgaaataaaaaaaaaaaagtatatgaggtgattttacattttct

SEQ ID NO: 93621 - DNA, 606 bp, Cannabis sativa
ataaaaattattaaaatggggtattttaaaaacttttggggtgtaaataaaatttcctttataaaataaaagactctcgcgtgcaatagactatttgaaccctattttcagaatgttaaatttttttaaatcttttaaaattttgcagaatgtcttaaattattataccatagatgaacataaaaaagaagaatttgcaaaaatacatttcttttatatttcatttacaattttacgacttaaaatttttaattacaaaaatactttgtaaaattttaaaattataaaaataaattttactcgacaaaaggtaaaaaaacaataaacaaaaaattaactttatgacaactataaataaattataaaataactaaaaaatagtttattattgttactggagatgtatttctataaattaaaaagtaaaaaagtaaaaacaaaaatgattgtaattttttaaaaaaatttggattcattgtgtaaattttatttgactaaaatattctctcataccaaataggtaaatggggtgaacaccaaatggtgcagtgttgaatcatcctatagtaattacctaattcttttatcaaaatttatagacataat

SEQ ID NO: 93622 - DNA, 613 bp, Cannabis sativa
agtggtgaaagagaaaatcgtgtccacagtaaagaaaaaccaagatatattggcatggaatcatgcggatatgatcgggatcagtctgaacaccatctatcttgccctgaacattaatgaaaatgcgatgctagttctctaaaaaataatgccactacatgcagtaagggcagaagcagtgaaggcaaaagttgaaaagttaaattctattaagtttcttcaagaagcactatatttttttttgttggccaattcgatgctagtctcaaatcccaacaaaatgtagaaaatgtgcatagacttcatgaatctcaataaggtttgcctaaaggactactttccacttttgttgattgatcggagtggacaccacatttagatatgaactattaagctttatggatgcataccccagctataataagataaaaatccacgaggtagaccaggagcataccagtttccttctatgttgtaatgccatttatattgaagcatgttggagaaactaactagaggctggtaaataaaatggtcaaggtgttggaaattattttaccattatcttagatctactcacaagtatgttgattaacatcctagatatgaactt

SEQ ID NO: 93623 - DNA, 691 bp, Cannabis sativa
ataatgatcatttggtttaaaagaagataaagtgcttatatatatttataaaattggagatttcgtgattggcttgtgaagaagttgtgatgtgaatacatggaaaatgtaattgattttatttacttttcctgttttatatacaaaatatttcacaagccattaatcttatatggattcattgagttttaaattttataagcatacgctcatggcttcattcaggttttattgttattattttattaaaaatagataataatttcagctactagtaatattcaaattttaattttgaaatttattaaagagatctaatattttagttaaattaattaaaataaaatatcaccaaactcattacttttgaatagattaatttaattaaatattaaaataattgtgtgtatgtaatttatgtgtttattaactggcccaaagataagttaatatttgaccaaatttcgtacatatgtgataaatgtgtgatgattagatggtaccttgtgtgaataatatgtttgtccaaagatattacatattgctattatcaatgtttgagcgctgcaacacgagtaccacttacaatttatattactgtctaaagacttaatattaatagtgtgtttggtatcttgagatgtgattaaccattatttgaatttattgttttatttggattcttatatta

SEQ ID NO: 93624 - DNA, 641 bp, Cannabis sativa
aagctatatatgtgctaatcatatatcaccaaatgttatgtctttcttcttttcttttgattctgcagctcttctgaatcagattactctgtctatttttcactctcttttttctttcttttttttttttctttttttttttcagtaaaagatgtttagaatcagggggaagttctaattgttaataagatatacttggaaaaatatttttggtaggaatgaatgagtggtaagatcatttccaatccatagtgctaaattctattcaaaattagcaaaaaaaaaaaaaaaagctcaattaattcctaaattcaacttagttattaaatttttattgaaattatataaaaaaaattattataaataaataaataaactattaaaagtcttaattaataaaaatcattaatcacggctaatgagcaaataattgaaaatagcagctataccttttgaattatcattttatttgcacttactttttaagtttaaattttagtagtaaaatctttcagattaatgaactgttagtaaattgttatttatttactacagttaagtgtcaatataaattgtttacatgtacacgtgacacatttatattggtacacataatattattatttaataattacaaaaaa

SEQ ID NO: 93625 - DNA, 554 bp, Cannabis sativa
tttgtagattttaattaaacttctttatctaagtgaatttttcatatacaagatgaaagcagttagtgatgtttgattcattgtaatggtaatcataatgctaatgaataagttcattatattgttgtttttctcttttcctttttataattcattacaatgtaatgcttattacattgagtattgtagtgatgattacataccaaaattaatataattctcattaaaattacagttcattacaaagaaaaagtaatatcttaataaaaatatagtaaaaaaagtcaaagtctaccctttttttttaaaaaaaatattttatagagttattttggtcaatacacattttattcctgattctaattacaatgttcactctaactacaaaccaaatattgtaatcatttctttttattacattaccattactattgccattaccattaccatgacattacactaaaccgagcaccacttatggaggagccagcttttgtcaacgattttgtgactttaaatcatcgatactggagttgagagccttaagagaaaaa

SEQ ID NO: 93626 - DNA, 543 bp, Cannabis sativa
agtcttgtgaggtctagtacataaggaagcagagccttcaaactttcttttcttgaaaggagtagtcctttcatttgtttccgaagtggtcaacaccccaatgtcccctcccaagctcttaatctcatacaaatctagtttcccaaaatgtttcaagtcatgaagcaactcctcttgagctttaaaaaattttgacaaagctttaccttcttcacatgatgactcggccaaattctctttgccactattaagttgagagccaccattaatcaaagaatttcctagtccaataccctcttggatcaattcacggccatcatcctccttttggtctggcccattttgagaacagcccctatcaccaaagcccattcattaaaaacaaaggaagtattcataaacaccttttgtcccacttccttagaattcattaaaccgggcccatttcttggtggtcccatcggcccactaccaaaatcaacacaatctaacccatttggctcacacttatctttaggcccactcggcccatcacccctccca

SEQ ID NO: 93627 - DNA, 579 bp, Cannabis sativa
atggaaattgagtacaattttttattttaaatattaactgctaaaaaatattattttatgtgtaattactaattaatttgccaaacaaaatattaagaatttgtatataaaaatcattttatatctaaacacatattatattttaaaatatagtgtaattactatcttaataattatactacttagtaattatacagttacttcaaacgtacatataacaaaaattaacaagagtacaacataaaaatatcgtattttctgtaaataaaattaaaaaaaaattgtaaacatgtttataaattcataaaattgtatttttgtaatttttttgttatttttatgtatttgtgaaacaattccaatataaaaagaaactaaaaaatgagaaaaaaaaatatccatagtagtggaaaatgagtttgggcattttagcccatttatcatgggcttattttactgaccacaacatactgaaattctctcatacaccaaatatgatagtcatacaaagagcatcttttgtaatatatataagcccactatctcccctttcacaaagactcatttttctccatataa

SEQ ID NO: 93628 - DNA, 544 bp, Cannabis sativa
  modified_base (84)..(90): a, c, t, g, unknown or other
caagtggctctgataccatgttaagaatcatgggattccatctcaaaaccaattggcaatgggaggagtagcccattcatcttnnnnnnnacaatttatttccacacattagttttatgggactaactcttaatatatttgcatttcgtttattttttaagaattaaatgatatgaccacgatctatgagtaaattgtagtatgaaaacttatttatgtgaattaagctaaataaaataaaaaaatataatgacctttaaacatttaactctaaaattataagatatatatagttccaaattttatcgttaaattattatctatattattacttttcccttgaactctccaattacaatatatcaaagtcttctctcaataatttatttataaatatgaatgaaatgtaaccgaaggagaaaatttataattgtttacaaaatttgaggggaatttctcataaaaaaaaataatttaaggagcaaaattctatcatagtttgggaaatcataaaattctgtgattaaaattaaattatcatttt

SEQ ID NO: 93629 - DNA, 818 bp, Cannabis sativa
atagttgcagctctgaattcttctcgagactttggtttgagtgattttaatctcccttcaaaaaattcattgataatctgctctggactcttttttacacaaatatccctcttttcttttcctttgctagcccacggatccaatcccttatacttggggttataaaataactttacttcaggccttagttcaactcttttatgggccaaaaaaatactaaaaggcccattatgataataaaccaaaggcctcaattccccattatccccagccaaggccttacatttatcctccaacccctttcggcccaaatcaattctagggcccaccacagataaattactgacctggcccattttattaaaaaactctttttcatatgtctgccacatataccttaaattgatacaatcagtgggcattaaagagaaactcacacgtggcccttctaggtccctcaacagtcttctaaagatggtatggatcgttgtcattcccctagattcctgcgatttctttttggaaatcccaatcgcctccacagcattaaacctcgcaagaaaatcagtctcgataaccccacaatcatctccgacctttgaattcttccctgactgagcaccattcaccatagccaccggaactgcagatctccccgactccgactcctctgtttcctctgaaaaaatcgtgacaccttctctgttaatttcattcccatccgttacccaattttcaacctcgtggtgaacagcaagctcgattccgtcgtgcttctcaacgctgacagccatccttactgattcatcttcgtccct

SEQ ID NO: 93630 - DNA, 625 bp, Cannabis sativa
gacagtccaccgtggcacttaactttgatttttggacaaggggtgcagagcaaaatggaactagggtttagatattttaggtgccaaaatttaagtttttacgattaactgttacaaaccataaaattcaggttgtttagccgccaatatccctatatattcatatagttatagtatacgcaaaatagaatttagctagcattaattactctcattctaaaaatgttatattactttttttattattattataacaactttattatatattattatttaaacacaaaattggattattatttctctcaatatgaaaatctttggagtaaatatttgaccatatttgaattggaaattgtcacattttctttttcttttcaataaccaaaaaaaaaaaaaactaaaccatagtattatggaagattaagcatgagggactgagttgagcaaaagggaccacagatcccaactggaatgatagaaaagattaaagataatggaccctctattctcaagttgtttgacttgtgaatttgaatggggtggggtccaaaagcttgtgattattttgaactaccaaacaataagatgtattataaataaaataagagtaaatactattttg

SEQ ID NO: 93631 - DNA, 540 bp, Cannabis sativa
tatcaaacatttaggtatcaattatatttgtatagacaaaagtctgtaaacaaatagtgtattttcttagcttttttttgctttttatttctatctaaaattttgacagttattattttattccatcatcttagatcataatttacttttcttaagtgaggataatattccaagttgggaatcctcctctcctaatgtctcaagttattcttctgcctccatttataatatgttgttgaatccattttaataatcttgttatattcctttatgtgcaaaattcatgcttaaattgtaaatttctaacttagttttaacccattcacattttaatttcattgcattgttttcaacaaccatcaaatatatacttcagcttcacataataggtccttagccattgtgttgtacataaaaggaaaaaaattttgtatggaagcgaagttaacctacctgtttaagaggtgcttcccaagctttttgaactggccctgggtgtaaactttgcaagggattggatgcaagagaagggctggttgt

SEQ ID NO: 93632 - DNA, 1638 bp, Cannabis sativa
gtcactaatgaggctgactagaaaagcagtttttagtgacactccacacgtgtcactgaaaccttttgcattcactcattgcgcgtcactgtaagcatttagagtcagacttaaaacttaacatcaacccacaaaaagtgtcactaaatctttttttttcctttttctttaatttttatttttattttagagatatagtgacataaaagaatcactatcttatttttttttaaaaaaaaaaatacatatttaattttttaattttgattttatacattataaaaattataaatagtaatttaattattaatagtaatttaattaattgtatatgaatactattaaatttaacaattataaatactattataataattaatataaatctgatatatattagaaaatttaccaataataggagattactattttttttccacttttacattttaattttatgctttttatttttataaaacttattttacataatcacctctaaataaatattttataatcaattttaaattttcttcataaatttactaaaaattacaaaataatcactaaaaattacaaaataatcacaataacatacaatagtgtaaactaaatacaaatcccaaaatcaaattctatcaaacaaatagaaactcataattatacatcaatccaagataaactaaaaattaaaaaaaaaataaaaaaaaaatcagctgctatgaacaatacacagttcattatctctttgtctctccctcttgacttaaaataaaaaagccctaagaatacactatttatatgaaccaaatcggtgttaaccatgaacccagaactgcagtgcaccacaaacaacaaatcgtagtcgaccaccatctcgaaatgccaaacgtaactccgaagatccaccgacgagattcaaacacctagatccaagatagattcaaacagttttcacatttaaagagagagaaaaaaaataccgattgaaaagagagatcgtcggaggccatttggccctgtggtcgcacgggttcgccggaggagagacggttcatcttaggattgacgagttcgctgcctgctgacgagttcgctacctgcgtgtttgcacgagagaaacgaccaacatttggcctttggtcgcttcttgaaaaaatagagggagagagcggctgaatgtagattagggttttttttaagtcaagagagagacaaagagatatatatatataaagtattaattttaaatttttatatcagatttttttttatactttatatttaatataataaaaaaaataatatttacttatttttttaaattaaaaaaatatttacttattatttctttcaaaaaaaaattaatatagtaatatattaattttttttatttacttattactttatttattattattttattaatatttattatatatagttgtatatatttttttttaatgaaagtatttagctactttttttttggatagattaaaagatttttttaatacataatatagtgacgcgacaagtgtgttagggtatgtttatccaatcacgtttgacgtgtcactgtaagccaatattttttttaaaaaaaaaaaataatataaattatgggagttactcttt

SEQ ID NO: 93633 - DNA, 849 bp, Cannabis sativa
tttttttttattttaattttttatattttgtttatttttattttttttatacacatattaaattataaattaataactatacatgtcacaaatttgagaaaatatttatttatttatgtactgctattgatagatgacatagatatattttttaaaaaaataaaaataaaaaataggttatatgtaaatatgtgcacattaatgttatatatagatatattatatattgcactaaaaacaatcaacaataatataactttatatacatattgcaatactaattatatatttatatagatagtatacttatgtgagatgtggcataaggtgtttaatttttttttttgaaaaggctcttttttattaattaagaggaattaacaaaatatatgtaacaataaaaaacttatatatatatatgtgtgtgtattttgcttatttatttatttctttttattatgacttgttttctttaaaatatttaatttacaataagtcaaaaattatttgagtaaattagtgggactgacatagttgttattaaaggaataatattatgactagttattaagtaaaatttaaccttattaaaaagatgacatttgtcattaaattaattagagagtgcaaaagatagtgtgatagagagtgtccttaacactcctcttacccaaatattataattagtattcctctaaaaagaaaaagtattttgtgggccagccacttattcataaggtaagaccatgtgaagtatattagagcagctccaaagagactgcaaattgatagtttagtgtatataattgatccaaagaggcagcaaattgtaggattctctacagtgca

SEQ ID NO: 93634 - DNA, 792 bp, Cannabis sativa
ccccagtccaattagtgttggacgacccatcaatgcattatatacaaaaaatatatcaacaaccaaaaattcttgcatttgtgtcgttgataaaggtggctctcccatagtcaatggaagctcaatgatgcttaggttggtgacacaattgcctataaatccatataggctcaccatgaatggtctcaactttgcatcctctaatcccatctttttcaatgtttctttgtagaggatattgagtgaactcccattgtctaatcccatctttttcaatgtttctttgtagaggatattgagtgaactcccattgtctaccaaaacccttttcacccttttatcacgaggggatcaacatgtgagtaccatacatgttttgtatcttcctcagagaaggtaattagtggttcattcgactttgctttcttcaatggttctagaacaaacgctgatatttatataccacttttgggcattattactatttccagcgaggtgtggccctctcaaaattaccaagatatcctcaccctcaatggggggaggttgcgttctctaattgttcgggttattatggttgttaggctggttaggcttattttcttgatttctcatatattgactaaagtatccccgcaagatcaaactctctatctcatctttcaattctcagcattcctcgatggtatgccctatatctttgtggaatcaacagtattttgttgaatcttgcttatgccttgcgtgcctcattggctcgggtttgcaaaatgcgaccctattttcattagc

SEQ ID NO: 93635 - DNA, 1144 bp, Cannabis sativa
aaaataattaaacatttaactaaatttttgttttacttaataacaatttaaaattatacttaaactaaattaaaacaactaattaatttttacaatactaaattaaataaataatttttttgcctaaactaaaatctttcctattcaaaaaacttttctccaaatattttttacctaactttataacatattatattttttaaaacacatcgaatttttacgcattacatttgtacataaataaatatatatacataaataaatatatatacataaatatttacataaataaatatatacatatattcagttttttttttttaaaataaatatatataaataaataaatctatataaaaataaacatataaatatatatatttagattataaataaaataaataaataaataataatttataccttagaagaccagcaggtggtggtggggtgctctgacgttgccgtggtggggaggacggagcaatgggggcggcttcaatggaggacggagtaatggaggagcaatggctactcggtcgtgagagagagaggacagatcgatggaggtgcgatgtgggttcatgggttttgcaacgggttatagagagatgatagagagggaggagcgatttgggggtttgtgggtttcgcaaagggtttgagggttcgtgggttttgcagagggttcgacggaagagagatgatagagagggaggcgcgaggttcgtgggtttcggtctgtgtatatgtgggttatggatgatggggtactagtattagggatttgtgtgtatacttattatttattttttttttaaaaaaaagggtactatacccaatggtttaaaaccgtcaggtataagggtgtattagttttctcgttttacgtaaaaatcatcgccttctattatagtggctgttataaacagtcgagaatacgtgtttttcctaacagttttaaacagtttcttaatttttttagcgacggtccccccaaaaaattatttttaggactatcgcgaataccaataattatagtagtgtaggaatgggctttcggtatgggaccgttccttgagtggccatgaagatggcctcaggcttctctgttaggagggtgaagtaagtgtacttctcctcc

SEQ ID NO: 93636 - DNA, 581 bp, Cannabis sativa
catgtcgtgcctaaattaacacataatttttgttatcggatcgtgctcgtgcctctcggactcatgtctgtttcgtgtaagcacaactccttgctagcctatcaaactatatatttatacctagtgtatatcaactatgtatgattaacaataagccggccatatatatacatgatgtttaggtactgaggatgcattcaaataaatataagagatttaaaacaaaattcgtatgataccattttagactcttcatatttactcaaaagattctttgttaaaaaaaatgattatatgttttggaagtactttttcttgactttgtaattgttaaatttgttcaaaatattttaattaaaatttggttttaggtaactattttgaaccaaagttacaaactatgaccatgagatgagtaaaagtaatttactctattaataattaggagaaggatgttggaatcttgattctagaggtgattgtgcagcggacagtttggtgttttgcaaacattttgtatcacttgcatatacattttaagtaattttctaaactgcacttgcaccacaagtgtagtatga

SEQ ID NO: 93637 - DNA, 725 bp, Cannabis sativa
ctctaatgctctacccttgagggtcctgcttgctaagagaatggccattgatgagatctcttgccccatttgtggggatggagatgagactatggagcacctctttctttattgcaattttgcttcccacctgtggcggtcctccctgtggggtatcatgccgattagggattcgggagctcgcatgtgggattgggttagttttatctagaatcttaagtcaagaggggtggacactgatgagttgtttctctatgcttcgatagtggttgacacgatatggagagctcgtaatgacaaagtccataacaacactatgggtagcctaatgcattatattgactctatctcttgttgctacgcagattataggtcatgtttgtccaggccgctccaggatgctgattctcctgtttggtcccctccaccggaagattggattaaaatcaactgcgacgtcagggtcggaggtgattctatgtgtgctgtggcgattgcgagggatcatacggagtctatcctgtgggtggcgactaaggaatttcagtttgctgactctcttattggcgaagcggcgacttgtttattagctttggagacggcggtctcaagacatcatccttttgttatagtggagagcgattctgagaatctaatcaaagacctaaaaggtgatgacaccttgtgggggattgagaactatactagacaatgtaaaattctct

SEQ ID NO: 93638 - DNA, 889 bp, Cannabis sativa
ttgtcctcaaggtggtaaaactaagaaaataaaactaaaaacatgcacaaacataaaaagataaaaaaaaaaaaacaaaaaaaacaattacagcccaattgtagtagacttttcagcaaagcccaagcccaaattacctagggcaatcaaccttcttcctcttctcaatccaagccgccagcttcttcaacatgtatatttatttatttatttatttattttagcaatggcccaaccatcgtgatctctctcatcctttcttactgtccattgtcatactatttgtaacattatttatatatgtatatttttctttgaaaagatgtatgtatacatatatcttttagcaaaccagtaaggataagacgatggtcaccgttttcgctccgatgttctgcaatccggcgcgaccaagcttctgatcgtcctccagtgaccatttcgtgtcgtccctccctgttaaagatccatagtcgtccccgattaaatatctaccgtcatccacgatcgaaaatccttctccgatctattcgcagtgtgtgaattgattctcatagtgagccaccattaacaacataaacagtctctctgacacgctcaaaaccttatgcgcaaagatcaaatgccatctctatcttctgcgacattggagttcttcgagctgccttcgttggtgtagatcgagaacccacaacatccgatgaagccacgctgatctcctccgctttcggtgttcttcgagctgccttcttcgtcataggtcgaaccaaaattgattgcgatctacctagatcagatccagctgagatgtcagtgtcgacaagattgagagccttctccgatggcttcgtgattctcactggttcagtagagtcgtcaacctcctgaa

SEQ ID NO: 93639 - DNA, 519 bp, Cannabis sativa
  modified_base (274)..(274): a, c, t, g, unknown or other
ttttaaaaataaaaattctactttcatttttgtgattaaaaaattagaaaataaaagtattactaaatgacaccttaacttttaattattttttcttattatttatatatatttcgcttaaatctcattcttttttacagagtctattcccgtaattttacaattttttttttttttttgtgtggatatatattccaagtttaatgaaggaagcaaggtggttattctgcctccaattttaatttattccttctctttttctttttctttttcnttttctttttctttttttagttactgtcattacaatattaatggttatattgaatatattggtagtcaaattaaaattaattttaccatgcattatggtttgaactttgaaatgccacacgaacttttctatgattaacatttcaggaattaagcaaattaattacaattgaatatataactaactaaactaatattcatttatcttaattatgttttaccaaggttaactttgaactatatatt

SEQ ID NO: 93640 - DNA, 722 bp, Cannabis sativa
tggagttcgagcgggggtagaattccggtcttaagcaaacccgtcatgcttggacatatgtcttgtacagtcagttgcatatcggtgttggtagtatttgattttcttgagacgcgttgtcaatcattaagctcacaaaccatgacctgtgctcacaaatactagcacttataaaatcaggacagattttagcccccaaaatgcaagtcaactgtactaattcctggttattaaatctcactcttctgaacaatgtattgtcatgataattgtctaacaacacaccactcttttatctaaaactgaagttcactcaacggattcagttcagctagttgtttcgcagcccaatttcccaacctcatgcacccatgtttcctacaagcatccaacactcttgttagcattggaattgtgggttcaaatggcatctcttttacaaaaacatcaagctcatccatttgattggagcgactgaaaagttcaatcataatctcatagtgctcaagtcgtggtatgataccatagttggtgctcattgaatgaaaatattgactacccaattcaactagatcttcatgcaaacaagcagttaaaacggcttggaaggtgacatgatctggcttaatatttgtttcttgcattaagccaaaaaatttaagtacttctacaccttttttgtgggaacatcctatcattatggagttccataaaactatatc

SEQ ID NO: 93641 - DNA, 753 bp, Cannabis sativa
caaattctgtccatccttccctcaagggtcataatttcaagctggatacgagcttcttgctcaacagagtaatcagtgattggttcttgttgtatacgctcagttgtcttcgcaaagccccgagttgcctatcacagaaatcgaacttttcttggttccacttcttgagatcacatttcgccactcttaacttcttctgcaaacagggttcatttgtactgggattggatttcctccacgctccatcaacaaatttcccacattcatttaggtttctacttgttaaagtagttttgtattttgtttttagaagttgatgtgtaaaagatataaattttattaataattaatttgtatatgtggaatattatttaaaatttgaataagttatgttaactacctaatgggagaaaatttcaacttttttaaactatatataattatgctttaaaaaaaactatatataattatggatatttatatttatgatatattaaataatgtgactatataacataaatttttgttttttttataaaaaatattacaatttaaatttaaacttactacacatatttctcttattacttatcttatattaaatgcggttatgtaacataaaatatttttttaatattacaatttaaatttaaacttattgcacatattaaaaaaatatttttctattatttttttacccaattcacatatttttaaataaatatctttctattattattttttccttaaacg

SEQ ID NO: 93642 - DNA, 603 bp, Cannabis sativa
aaaaaaaaaataaaggaagataaaatgagagggagactagatcagatccatggatgttgtggccatcaaccagatcagatctatggcttttgccaatgtgttgtgcacctccgatgatcctggggtatcgagaagccttcagctttcgcctcaatgccatggtcaggcaaacaacacagtcgttcgaagccttcagctttccccaacgattctccgaacctctcgggcatatgcaatattgcaatgtccttcaaatctgaaaaaacaaaaatataaaatgcattaaaaaaattgaaagctcaagcacacagtcgttcgaatctaccaaaataataaaaacatagtagaaatcgaagaaaaaaaagttacagttacagagtaatgaagatgaatgttaccaaaaagttacaaccatcgctcggggaaatggccatggcctggcagcgccaccgtgcaagagaaaatggagagagagagagagaacggaagcgagagagagacaaggaagagggagaggggttggggttttcggggtgggggaaacttgttttctggttcatttgaaccactagccccaccagtggccggatttgttgttgcacc

SEQ ID NO: 93643 - DNA, 1016 bp, Cannabis sativa
atattctgttaaaccaagaatgttaaaccaagaaatgtcgttagataggcaattttaatatataaagatatacttttaatttttttcattttttatttgatcttttttttcactcactattttttttttctctctctttctcttacgtcaaacttttttcttttttttttttcttgtttatcaatacattgattcttcttctttttctatatgtatataagtgtaatctttctgtctcaagtcttttatctcttttttttttaacactctttcactttcataaaattttattttattattattttctaaaaaaaatagaaactcattctatatcttttttttttttctcttttacattttcttattattcacattcaaactactttatactatttttctttaattcatcataaaataagagaattttaattaatttcttttaacacttactaaagtaattaaaattcttttcatcaaagataattcatatataattattaaattttaattacacatttagtttttttaatttccttctctctttacaagcaagataaaacaaatacattttcttttatatcaccctaattaattttctatctccactatgttttatatttttttttaattatttttctttcctctatactaaatataggattaaatttgggttgttgtaaagttgttttatcattgtattttatattttgttatttttgatacatatatgtattttacttgtttatgtttggatagagtgattaatatttgattaataaaagtaatattttttttatgatattttgtagtttatttgaagtatatttatgaatgatttacctagtgcaattggattgatattttattatttttatgttgtattgtagttgtttttatgtggtttttatgatttttttggtgtcataactattttttgatttatgtgcatttgttatggtatgtgttgctccagaattcgcccaaaatacgtggaccagtcgagaggggacacgtgg

SEQ ID NO: 93644 - DNA, 2670 bp, Cannabis sativa
  modified_base (27)..(30): a, c, t, g, unknown or other
actaatcagattgtaaagagttttatnnnnggcataaaacccaacactatcatgaaacttgtatgttctgaatcgggtgggtgcaatttgatttcattgtaaccttaataggcattcatgaagcttaggatatcatgaccaactgtagcatctactagctaatcgatcaatgaaagcaggaagtagtccttcggacatgccttgttgttcggtttgggtaccaacatggggttggatacccaaaatgggtagaaggcttcaatgatgaagttattggtgcttagccttttgacttcatccatcagagcttgcacgcgctccttattaagtaacctccttttctgttgaataggtcagaagttccgacctatatttagcacatgagtcattgcagatgagattattcccacaatgtcttcatgtgaccttacagagatgtcaagattttccctaagaaattgtatcaaagataattttattttcggcactcaacctttcctgatctccaatttcttgattggaagattctgatcgatatgcacctcttctaattcttccacaggtccaaagctttttgtaggatccccaaaaggaggatctatgtctacctccctactttgggttggactttatttccctttgtcgggctcttagtcagagcttttggcgggtatcttctccttctttgctttagataaagccaggttgtaacagtgtggggcagactgttgatctccccttagacatcccaccccatgcctcattggaaactttaggcataggtcgtaaatcaatgttactgccttcaggttgtataaggctggttagcctgtcattgcatgaaagggtgatggcacattaattatgacaaattgtgccatctgcattcttattgtgggagtttctctaactattagcggcagttggatgtatcccaaaggtacaagcccttggccaaaaaagtcatacattagttgtgtaaagggtgctaggtccattaatttgagccccatattttcataagttgagttgaaaagaatgttggcggaggcttcgttatcaaccatgcacctagcaactatcatcttccctatttgtgcagttatgactaaagagtctttgtgagggaacctgacctgggcagcgtatccttcaataaaagagatggcaagctctccaagcctaatttgcttggagtctctttcttcgacaactaggatgtcgcttttttgctcatggcggagagtccaagcatagcgcaccctagctttgcttgttttgccttctatgtggggtccacctattatgaaccttaggtgactcaccactggtggtggcattgggtccccgttctaggtagcttgtgcctgagcttggccattttagacataataatgcaagtggggattgtttattcttatcaaaaattcaatctcccttttcaaatgtagacactcgtttgtgtcatcaacgaagtcattgtgaaatcgacagaacttatacatgtccctcttattgatgtcattcttgattggaagaggcttcttgtatgggacaacaacttgagtggccatgcaaatagtctcaggagtcttgtttaggagggtgaagcatgtgtacttctcctccttctcattttggttctatggtgtaagggaagcattgtacttcccttttttgccaccatttcggccagaacggttgttttgcactttcctccattattcttattgttggaggcctggctggcattgcttgtactagcttgcatgttaggtaggtctcggggttgcattgcacccttagactaactattattgacttgcccttctatttgggcttttcggacgacttcctccaattttatgaaattgtcaactcattcgaggaactccttcatattgttgttgaggggtttgctaagatttctacacccttaacagaattgacttgaaagaactataagtttgtgtggattgataggtgtaagagtagtttccaggaactgaggcaaagattaattaacgctcctgtgctaactttatcggtcagtgatgaaaattttatgttttattgcgatgcatccaaacaggggttaggctgtgtatttatgcagtttgggaaagtaattgcttacgcatctaggcaactgaaagagtatgagcaaaggtatcctactcatgacattgaactggcagctatcatttttgcactgaaagtttggtgtcattatttatatggcgtaaagtgcgagatctataacaatcacaagagcctcaagtactttttcactcagaatgacctaaaaacgaggtgacggcgatggttagaactggtcaaagattatgactatgagattgtctaccacccttgaaaagcaaatgttgtagcggatgctctaagtcgaaatggcccagggcaagtttatgaattaaagaagattttatcagagttggctgaagatatgactagagcggaaattgagtttgtggtcagaaaacttgctaacattaccttgcagtctgatttgttagaaagaattagaacaacccagcaaaatgattcagagctataggggtaaaagagacgttagaaacttgatcggcaaaagacttttcactttcatttgatgggttattacgatacaagagcatgatttatgtaccggcc

SEQ ID NO: 93645 - DNA, 807 bp, Cannabis sativa
tgaatctgagtatattaatgaatgagatgtcaagatcaaaatttatttttctttccttaccaccatcaccaaagtcaatcctcttgtattatcatcacgtaatcattcttaattttattaatcacgtttataataatagcaatttttttggacttgcactcacagttgtttgatcaaaataaaatttattgcttttgctaattagagttttttcttcttaagctaattataatattttattttaacttcattacttttttattttgagtcaatgtttactatacaatattagcttttgtaatttttaaaaagttataaataatttacaatattaaaaatataattaatgtttcttgaactcgagtggtaaactcaagaactttattgtcaatacgacatgcatagtaatggtgtaaaagggtgtgtatacagcagattgtttaaattaagtttttgattgtacaccgctatataaaaaaaaaagtaatttgcaatataacctttataagtgtttaatttattgcaactaacctttaattttaaaattttagtggtaaaatcccgaacctaaactaatattatattagcacttagcactttccatctatttttaagtgttaagtgtcacattgtactatccatatgtacacattgtattgtctaggtgaacaatgtgtacacatggaacaattttattggtccacgtaaataaatgtttaaaaaaaataaaaaattaattatttaaaaaaaatcttttctttaaaaaaaaaaccctaattccctaaaaaattctctcttcttctcctt

SEQ ID NO: 93646 - DNA, 566 bp, Cannabis sativa
atattagattgtattaggactctaatgttgcaagctggtgtaatgggtatttcttttgtttatagagaagcgaatggagtcgctcatggtttagccaattatgctttggtgaacaaggctagtgctatgtggattggggttaatccctcttgtgtacgttttgctattgagcaagacatgcctaatcctatgtaatttgtttctgtgttcaaaaaaaaaaaaaaaaatgatagttatatttagagattattaatattgtttttataatttaaatttttgagattatttatatttacttcaaatattttttgcttatacttttattagcactttattagcatttgtttttgcaccatttttttgatggtttggatgccttctatggcttttgtgccatctttatggcttgtccctaattatttagggtagatttgtagtatagtcaataggtaagagaaggtttcatatttggtattcatggcttccgcaaacgacttttgagatttgacagataagtgttttaagtcttgatattattatatgaattgagtttacaatctttattc

SEQ ID NO: 93647 - DNA, 738 bp, Cannabis sativa
  modified_base (357)..(357): a, c, t, g, unknown or other
atatttatatttatatatattactatttcacaaatctacatattaatactgtccaagtaataattaattgtttactaatatatgtcatatattgatgtttaactatgatcatcacactttattgattattagtatagggttatttgaatttgggttaattaataccattttaaattttattctttttttactgattcaaccttgtattttttataatggcataaaatagtattataaactaatttttactcaaaataaaagttaataataactcgatatctagagtttttatgataaaacttaagtataatatctgtatctctttttattagaaattatctttaaattggttatatnatttaaaaaattatcaaaaattgatattaggataccatattgtactatttaaaaaaatacaagattcaatttatcatttacaagatagataatcaaattaataatttttacaaacacaaaatccaaaataatattaacctttcaaatttagtactctattttgtaaaaaaaaaatagaaaaaatcatataaatttatataaacaaaatatatgctatagtacttagtatgaaatactaaaggacactaaagacacatacctctagaagatattgtactattatagtgtatttacatattgagttttttatatatatcttaatttaataatcataaaaatccgttaacattcgtgaggcaccaccttgtagtggtacctgac

SEQ ID NO: 93648 - DNA, 1753 bp, Cannabis sativa
gctcctgctagagtctttaaaaaggttgatgctactaggttggcgttgagcaagtggaataaggagcaatatggaaaactggacacttgtataggtcggttggaacaccaacttagggatatcaagaagttgccgactggctcaagaagctaggccagagaggtggatgtgaggagagcccttaatgaggctttataaaagaaagctctttactagcagcagagatctcagatatcttggataaaagatggagataaatgctctaagtttttttttcattacgaccactattatgaaattgataaaataccctggagcatatcttaaacagagatgggatctggctaacaagcataaatgatattggtaaggaatttttgattttcctaggggacatctttactaatccaactcaggcccctatggagagtttgaatcacttgatatcagatcacttatcccctatggagcaggcaaatttgatttcgatcctagatcatgaggaaagtagacaaccttttttctctatgggaaattttaaagccccgagtccagatggtatgtccgccttgttctttaagcatttctggcattgtatagggaaatatttttgtgagggtttggtggactttttcctttctaggtctatgcataaaggaatcaatgaaactaaaagagttctaatcaccaaggttcctaactcgaaaaaagtgatgcaattccgacctatttccctttgtaatgtaatctacaaggttatctcaaaacttattgcaaattgaattagaaaggttttcctaagaattatttgtctaacttaggcaacctttgtcccgagatgaaatatccaagacaaaaatgtgttagtacaagaaatcatccattcgtttaaacttaaaaaaggaaaagagggatcacttgtgtctccctaagtctagaggtgggctaggtttccaaaggacattagaaattaattaggccttaatggctaaatggggttgaacactcattactgaggaccaatctttgtgttgtaaggttttaagtgctaagtaccttaaaggtgtacccttcttgaagtgttcggccaaaaatttagactcgtggttctggaagaatgttgtgaagtctaaaaaaatccttttgaaaggagcttgtaaactcatattggatgggaaggatatagacatttgggatgaattgtggataactcaaggttagaacttctatccccatcctttaaacgggtggcctgaaggattggagaaagttgttgacttactgacagataatggaaattgggatgtctccatactcaattacttattggaccggagacaaccattaacatcatcaaaggtggcacgcctgggggtcaaggtagggacaagtggatttggacgaaaaatccaaatggtcagttctctattaaatctgcttatcttactcaggccttatcgcgtggtcctcataccaatgttgctcttgctctttggaataaactttggaatgcaaaaattttggagcgtcgcaaagtcctttggtagagtattctctctagtattttacctatcaggattcctcttcctaaaaggatgaatattgaggatgtgtcttgccctattggtactgagggagaggaaatcatggagcatctttttctctattgtaattttgcctatcacctctagagatcctccccttggggtgatgctagtgatggactttggggctcgtgtttgggactgggtta

SEQ ID NO: 93649 - DNA, 627 bp, Cannabis sativa
actattatactttgtaatagtaattaaaaaaattattattcgtcctaaatttatcttcggaattaatgaaaatgttcatctagttaaactaactacatgcatgctgacattttacgtggaaatatctaataatttgttatttttttttatttaaaaaaaaaagtcacgtaataatttctcataaaccaaaaatactgttatatagacacattttatataaaatagataaagaagaaatattagacggaaatgtggcagtttaaaatagtttattctgctctaatatttttatcattttttcacattttttaatcacattaaatattaattaattcaataactaataagaaaacttttctaaaaaaaaaaattaacttccacgtttttattccttttttttttaaattaaatttttaatttttctcctttcattttttcttctttttcttgtaacttttttttttttaaaaaaaaaaacctaataaaaaaagcaaccttccacgtttttaaatttttaatttttctcctttcactttctcttctttttcttttttttttaattaaaaatttttaaaaataattattttaaaaaatatcacgcgcgttttgcttttttttttttttttt

SEQ ID NO: 93650 - DNA, 551 bp, Cannabis sativa
tatatatataagtgattgaagaaattaatgtaacattacacatgtgttgtatattagtgttataataaatagtgctaacacaatatatatgttgaagatggtgagattcatctatttcaagattgatccgtacatatgtaacaaaagtcaatttgttgtacaatttcattcaattttttttttttgttttttttttttttttatagaaatttatttgtatcagtttattataattaatattgatataggtttcatgtaatttagtgttgaataagttgtaaatttactcgatcatcgattatgatgtataatattgtttttattaattaattagtttgttaatattctctcctcttatttttttttttttttttgtaaacttctatagaaatgttgttaatattattattattgaacaaattattattaaggctaatttacggtataaatacttttaaatatatacttaagtctaaattttggcgataataataactagttataattctggaacttctgtaggtacctaattgttaagtgttaagtaaatt

SEQ ID NO: 93651 - DNA, 650 bp, Cannabis sativa
aggtagtttttatgaacatccaagaaggggtgttataaaatattatatatatataaatgtttaaatcaccaaattaattatcatcataaatgattgattgtattttcctttattacattaatttagttttttattcttttacctatatttttgtataaatagtaatttaccctattaaaataaactactaataaatttttatttattttctctttctctcatcatcttcatttttttttcttttcttcttatctattttatattattttataacaatattcatattttattcattttatataaaaaaaatttaattaataacttaaattattttttggaaatttctaaaatatatattctctatgtagtttaacattaaactgggatatttgatataaaattatattgaaattaatgaattaaatataaaaagggtaagaagggctcattgaatttgtctttcaaataccattattggataggaattacaattaatctaatattctaacataaatattgttgtgatatgtcaatcaatgactggatcagacacatgtttgttttagtaaattttagggaaagtagacttaaagatcaatatggccaatcaatgaatttagttgtgatcttgtttattctttagactaaat

SEQ ID NO: 93652 - DNA, 1892 bp, Cannabis sativa
tggtctaatttaatatagaattacttattttattttaacaaatattataaaaaatggttaattaaatataaaaacacttcattggctactaaccatcataactattttcaataatataaagaaatgttacgtttccactatacaaccaagtataatataattatcaaattttatatacatattttttttaaaatttcacacattttaatttaacatatatttgtaaaaaagaaaaacttttatttacaaacataatagaagtctgataataatgttgggatgctaatcatctgatgagatttggtataatcaatattaaagcttgttgttgattgatatgcatggtttaaaagacatgtaataaataaattgaaacatgttgaccaaagattaacctcctttattgtctctataatttaaggtttgatatatagccaatatataaaaagtgtctacattataatgaccacctaataaggacagaaatgcttaggtgtgtttgtattataaagggtgttgttaagcatgataattacgttaatgtaatcacaatatatatgtatatgtatccgttggtacattttgaccactacagtgtcttaataatttgtgtctatcttccttaaaatactaccaacagttacaaattacaattaccttgtataccatttttctcttttaatttggtaaattaattaacgttacaaattctaattttatatttttcttttttcaaaataagaatgtaataataactgaaaaagaacaaagaaaaagataataagtaattagttaccaaagcatgatggccgaagcgaatgacagtttaacaaagccccaaagattttgaaaagccttccatgaaaatccagaccaagctcgaccacaagaaccactaaatatataagccagctgagccaccacaatgaaccaccacgacaagttgagtaccacggcggcgccggccatgccccagccgagcttaagcatcacgagccagctgaaaaaaacgtgaaaaaccagagccacagctgatataaccgccataaccataatcttactctgagcttgtaagaacttagctatggggaaattcaatgcgtaagcgaataactgaggaatcatccaaacggagaatagcccagctgattcagatatctccggagtctgaccaatcagtttgagtaattgctctgcaaatatgtagaaaaaacagagtataaccgctgttccattgagaatgagccaagatctttgcatatatatccccaacatgtcgtattgaccagccccatatgcttgcccacaaagggtctctagagcacttcccataccaagcttcattaaaatcaaattcaacaaaactgttaagaatcgttcaacaagaaaaaagaaacgttttttattttgggattaccataatgccgaaggagaagccggagatgacggagttttcgacagagacggcggcgagggcgagagtgctgacgtggcctgcgaagacttgagtgatggcgccgagtgagtattggcatatggctgtgaagatggctggtgcagcgaggtaccatagcttattaaactcagttttgaactcggtgaagaggagtctggcgccggcggtgaaggggcggctgagaaggtgtttgttttggtgggttagttcatcttctccgtatggggagagtaatggctgcttgttctctttctccattaatggctgctctgtttcaactcgatatggtcggtgttgtttcaaagattagatttttgagagaaatgctaatgaatctggtagtacattgttcacactatatatatagagttgggatatatcaattattattattattattattatattggaccatgttttttttttttttttgaat

SEQ ID NO: 93653 - DNA, 1391 bp, Cannabis sativa
taagtgtataaaatctgaaatattaagcatttatgccgcaatttacccatatatttgtgattttaatgaaatagattaaaatattattattatagaatcataacaacacgcagcactttaaaatttataatttatcaaatactcagcttaccatttttctactgttatgctacagcagcacaatcagctgtttttccttagagcacaactttattaaactgacctatatattctataatggtgacacgtataaaatgtaaacttgagactttacatacagtcgtttcctaagatcctacataagcattgtccaatattttatgcctaaagaaaaggacaaaatgaaaactaggttcgtggaagtaacatacgcacatctcatccatttaacatgtatgtaatcaattatatgggctgctttttctataagcaagtggttttttttttctctttcactgtaaatatacaaaatagtcattggtctttactctttagtcgcagtcctaataattttggccagcttttaaagcatgagatattattagcaaatggtattttgcacccacaacaagaggtttttccaaaactgctgggaaaacaatatttaattttacgttttttcgtttcaagtcttattcctttaccaaaagccaactcactcacaaaccttatccatatccccctatataataacagcatatgtacttcttcataattcaaacgcaactcaaccaacaaaacaagcaactaagaactttcccacttctacaaagaaatatttcaaagaaaccaatgagttcaacaagcagagcttggattgcagcagcatgtataggagtagttgaagctttgaaagaccaaggtgtttgcagatggaattctactttgagatcaatacaacaccacacaaaagccaatctcagatcctattctcacgccaagaagatcccaacttctcagtatttgtctaataactttagaaatgacaagttgaagcaatctgaggaatcacttagaacagtcatgtatttaagctgttggggtcccaacaattgaggcccttttgtgtcttctcttcttttcctttttgtaaattctctaaaatttttagtgaaatacatatacatggattaaatcactggatttactttcaatatggaagtttacggatcatggattgaaaatcagggtatggtagagagatgtgcacaattattaaggggtcaagaatgagacacatcactaatccatgaaattggcgttctcaatcactagcatatctaattaagcaacaatattgttgatgttacaatccaaggcagtggagcttgataaaaatgagacataccactaatctgataacattttttttttttgaaagttcaatcttg

SEQ ID NO: 93654 - DNA, 529 bp, Cannabis sativa
  modified_base (193)..(196): a, c, t, g, unknown or other
tgaaatcaagattcagccattaagctactttccattaaacatgtatgcaaagaatacattgtacatcaattggtgattcaaactagagaatgagggagagaaattgaactccaaactgagcacaccagaaactggtttcttgacaccagtcctcaaccaatctcactgcctatctctctctctctctctctcnnnntctctctctctctctcttatttctgttagttgaaatgtgaaccacacaagctaagagttagttgagtctatttatagacaaaccaacctaactaacttaaccataaaaccggtaaagtagctaaaaaaaaacttaaagaatattctgccaagtcttagtttctaggccatattacaacaattccaccttggcatagatacttagacttagataacatgagtatagaaggctgaactttgatggtagatgagaaactcatccaatttccttgatgttgaccaagtttagacagtgtctaaacttggcttgagtgacacattttgtaaaaatgtc

SEQ ID NO: 93655 - DNA, 1002 bp, Cannabis sativa
gtagaagctcataaaataagaataaccttgactctcgcctgccgagaccacattagattcttattttgattgaataaaagattgctaaattaagtatatttttgatgagctgactactctatttaacaagtgacatccttgcatcctgtccaatatgtgacattgtatgtcatttggttaaaaatcttagataataatttgaattatatttatattctttttatagcttctttatttgtttaatgtttacaaatttttccaaaatgtgtatggatttatattgaaccatatgactgatttctgtttattgatacttgtagtgcccactatgtctttatcaagctcaattgtgtcacatctttttgaaaataatctcactggagctaacttcctcaagtggagagagaacataaatattgctcttataggtaaaaattcactgtttgttctaactgaagaacaacctgagatgttaggtgaaaatgctactaaaatagttagagaaagatatgagcgttgggagaaggccaacaataaaactatattgtttatattgtctagcatgatagacaccttgaaaacaaggtttgctaacaatttcacggcagttgagattatgaatcagttgaatgaactgtttggaaaggcgtcgcatcaagctcattttgatgcgaccaaaaactttacaaacacacggatgaaatcaaatcagcatgtccatgatcacctactcctaatggcgcgttatttccaagaggttaaattccatggatctgttattgatccagaaacacaagttagtgtgatccttaacagtctatctccagcctttttgcccttcacatcaaactatcatatgaacaatttgatgtttaacttaattgagttatcaataacttttagacatttgaaagtttgattggaggaccacagaaaggaggtaaagctcctgctactactaccaatggtgctgctcaggttgaagcaaacactgcttttgtt

SEQ ID NO: 93656 - DNA, 1947 bp, Cannabis sativa
gggactactgactgtcacactcagaagaaaacttggatcaaggttcccttacctcctggtagaaaagctataggatgtaagtgggtctacaaataaaaataaaaatttagatcgcagtgtttaaaagtacaaagctaagttagtggccaaaggattcctccaacaatatggctttgacttcacagagacttatagtccagtggtgaagactgctacagttaaaattgtcattagaattgatctatcctacaactggtctataaggcagctcgatgtgaataatgcctttctaaatagggagctctaagaataggtgtttatggctcaacctcttggttttattgatccagaagatccccatctagtctgcaaattgaccaaggcaatttatggtctgagacaggctcccagggcctagttcaacaagctaaaagatgctcttatgtcattggcttctcttgtgccaaagctgatacttctctgttctacagacacacttccatccattcgacattccttttgatttatgtggatgatatttttatgactggcagctcctaagcaactgttacagaacttatttttaatctccatcatatgtttgcactaaaagacttaagttctgttaattactttcttggaattcaggtgtcactgtagaagggttgcacttgtcccaaaataaatatattatgaacttggttgtaaaagctaaaatggacaatgccagaggtgaaaaaagatctgcaattggtagtgattccctttacagatcccacatactacataagcattgtgggtgctctgcaatatgctactataactaagccagaaatctcctatgcagttaataaagtctcttagtttatgcaaacacccctagaggctcattggaaaactatgaagaaaattttaaggtatctgaataggacactagactggtttacatatgaagccatttgcctcactcaccttaacaggtttttgtgacgcacattggaccaattcagatgacaggtgctcaacttgtggttttagtgtctatcttaattggctctaacattatctcctggtcctccaagaaacaaagaacattttctaggtctagcacagaagctgaatatcgaggtttagctcaaataacaacagaggtcattaggattaagctcttctatttgagattggagtcaagattctaaagccaccaactatatggtgtgaaaatcaaaatattgtccttttggcaaccaaacccattcttagaacaaaccatattgaattggaccactattttttttcgagaaagggtatagtcaacaaacaactgcttattcaacacacaccagcctgtgatcaaatagctgatattctcaccaaggcactatcaacaacacgatttcatatgctttgatccaaacttagtctggtttctttattcatactaagtttgaggaggtgttactgatgttgttagttaagtgtgtggtcattaatttgttaactcttgtaattgtatatagttatttataaatgtagttagttatttatgttagcatctcttttcctttctctcattgtatattaatcgagctactgctccattaacgaactgagttcattttctccattcttttctctctctctctcttactcaatctaacaaatcaagctaatcataatggcaaatcttttgtgtgtgatgttaaagcattttgttaattatgtaattaattaacacaaaaactagtaattaagtccaaaaagctaataatacgttaattgttgaaataaattcccatattaactgtacacaggaaaaccagaatattacaaagagttttacaaagcaataaaatactaggtggcctttggcctctaaatacctaggacagaatagcagttagttacaaagtctgataaactttgtaactaactcctctatctgca

SEQ ID NO: 93657 - DNA, 539 bp, Cannabis sativa
tatcggctagccttaccaccaacgttattggctattcacagtgtatttcatacttcaatgttgaggaaatatatttcagacccgactcatatcttgagttagatatgaagccctgaactacagtcaaacttatcttacgtcgaatatccaatttaattcctcgacaggaaagaaaagattagagcataggtttggtcaagatcctttgaaagaacagcaaggtggagaaaaccacctgggaataagagtctggaataagaactcaaaatcgagagctattcatattagatttcggggacgaaatccttttaacggggggataattgtaatgactgcgtattagaatatggattagcaaaggcaattagcattaattattggtattttcataattatgcatgaaattattatattgtgagtcccatttttagaaatgggcattatagataatttctcaattttggagattttatgaaactctataggtattatttgagttatatttgaattatattattattataatttttgctcagcta

SEQ ID NO: 93658 - DNA, 634 bp, Cannabis sativa
ttgagcgatgtctgacatgatctttgcgagatcgggattggctacaatagtagcttgtaaatcagtagtagaaaacacaccaagaattgaaatagcagccaagtatacctcagatgaaacacgagatagcgcatcggcggcgcggttctccaaaccaagtttgtattggatatcaaagtcatacccccaagatcttagtgagccatttttgatgttcgggagacaacacactgttccaataagtattttaagcttctttgatcagtatgaacaagaaacttgcagcccaataaatacggtcgccatttctggatggctaggacaatggccatcaattctctttcgtaagcggacttcgattgggcctgagtggacagagtacggctgaaataggcaatgggacgcccattttgcatcagaaccgtgccaagccccataccggaagcatcgacctcaagtacaaacaaaatggagaaatcaggcaaagctaaaaccagaactgtgcacatggcttccttcaatcgttcaaaggacatttgggctgagggggactaggaaaaagcatcttttttaagctgatccgtgagaggacgggcaatgctaccatatccttgtacaaacttacagtaatagc

SEQ ID NO: 93659 - DNA, 5516 bp, Cannabis sativa
gagagagagagagagttgaaaaataaaaatataaaagagaaatagagatagaatagaaagaaaaaataaataaaaaaatcaattgaagatgattttacattttgcttggaaaactctttcaggttgtctaccaacacgtacttagcttcatagtaaacatgttcctgtggttttacactgtgtgttgtgccactatggggaagagtcaattttccatgttttggttcaatgctcctttgctcattcttgttggctccgatcggcgttaggtgttggtcattctacaacaaccaatttctttgactggtttatggaagtgttggcattaggcaataaggggttggttgaagaagttgtcatggttggttgggcaatttagaaggctcagaatgatatgctttggaatggtaaaagttgtagtgctgctgattttgtttggctagctcgtactactcttcgacaataaacgtgtgcccagtctaagtggctggattcgggttccttggcttccaatcgcactgacacaagagaacactggtccaaaccagctgctgggcagttaaatattaatgtggatggagcggtttttgaagacacaaatgagatcacaactggttttgtagcgcgcggctatgatggtcaaataattgaggcgttttcaactatttcttctgtcagttgccgacccgaaattgcaaaaattctaaatgtcaaagaggcacttagttggataaagaggcataacaagtcaaatgttattttagagacagattgcattttagttgttcaaactattcttagttcggtatctatgccttctatttttggtctatttgtttaagattgtctattttatcttgtttaagtaatgtttctattggtcatgttaaacggtctgctaacaaagtcctgtatggcacgtggtgcttgttattggtcaggtcgtcgttttactgaaagcgatgctcccatttctcttcaggcctttgtatcagcggatgtttctgtctaataaaaattattttgattaaaaaaatatatatatatataagaaagaaaaaaaaaacaaaaaacaaattttgaagctttaacgagtaaaaacattaaaaaagaaaaaaattaagtaataaaaatagaaatgtaaaactttgtttatataaatgtaaaatgtaatgtcccttgctatagtcatatttcttttctctctaacccaataatcaccgaagagagagatatgaagacacaagatactctcccctcatcatcttctcaccgtgaaagcgatagcaatggtaccgaaaaactccatgccaaggtcgttggctgcatgtccggccttttccatctagtctccaattaccacggccgccgaaaattacttacattcggtacttaattaattactctctctttcactacttatttgcttctttccttctttctttctttgttatgtatatttctttctccaggaaaaaggcaagccaaaaacgagcttgttcctactactgctacaaagtcttctaaatccatagataaagaaaagaagcaaatcagctcaacaaacccctcctccacgaaaaatgtcacccagagacactcctgcgaggtaccgaggagccctactttgcctgcggagattaggcggtactcagttaattcgccgcataacttcaaatcagcctcaccagcaggcctagtagcgaggctaatgggattggaagagccttattcttcaactactaagtccatgatattgtcgaaagctaacactgtgcagcaacagctgtcggaatattcatccgccgccgaaaagcgccggcaacttctgggcgccttggagaaatgtgatcgggacttgcaggctctgaagaaaatcataaacgccgtgcgatcggcggagcaattgcagtcacctaccgcttccgccgctgtgttgagaaactcggatggagttaataaaggtttggaggttcatattaacaacaataataatcataatgctgacaagccgagtcgggtttcagttcttgacgagtccactcggtctcctctgagcaatttatttcaatcaaaacgacagtcgttaagttacggtacgtgtttgattaatcttaatagtatttgcatgaccaaatttttatctttactactgagactactatagagcactaacacaatcacacaattaaagagtgcggtctcaataactaagttcaattatatatatttgaaaattttcataattttttttttcttgtggtattttctatttatggagatatatgtatatatatatataaatatatttgtagataaaagaaaaagaatcagaactaaaaaagaaaaaatattattaataaaataagaaggaaaaaaaatacagagaacgggaatcaacaattaattatctagaactaaataataatgtgtgatttttgcaatattcttatcaatatatttgagtggtaaatcattctatatcatggagtttagttttgtattgtagtagtctctgtgtgtgtgcttcctgaattgtgtgtcaatgggagagtgctcttctactgctctgttaacttattagaaccgtaagctatagaaattaatttcagttagtgttggaatgttcctaatatacaatagaaaagtgttacatttggaagttttagggatgaatgaatccatatccttgtagagaaacgagacagaacaaacttttttcatgtaaaaagtaatgaccctgccccaccacagtctacagtccacagataaagcgattttagtattccaagtaagaaataattgcatgcacttaattttcactcataatcatataacattaacattatttctagttagtgggggacagtgatttttaaattactatttgtaattatatatgctaaaattaacaacataggcaattagtttttgcactaaaaaaattgacaacacttagttattaacataaattatgtataattaaacataatttttagtcacattaaaaaattaattaattgtgactaaaaatataatacttaaaaattattagtaatttaattttatttattataaatattgtgactaaaaatatattttaatcacaacaaattatttttgtgtgattaatatttttttatttttaattataaattttaatatggctaaaagtaaagttttaaaattttgaatagtgttgactaataacagctagaagaataagacataattacatattatacatagagctgtaatgattgatataagatgtgacattattgttaaaaaatttaagttgtgttaagatctgtgtcaaaatgactgtgaactgtttgttcaccacaaacatagtttgctggcattcaaagcaagaaaagaaaaagaaaaaaatgtttttgagtcacactgcagaaatgtttgtcataattatgaaccaaaaagtaagaattaacaatagacgactaattgggtagggttaaattcaggagagccgtttcccaatcgctttatataattaggaaaaatatcagctcagacgattaatcagtagtggacctagattatagattatttgacatgctaattgaggggccggtttgtttgtgttattatctttattacaagttgttggtatttggtaaccactgactccttttattatggagtcaaagattatttcgagagagagagaaagagatgaaggcagctttatatagtggcatgtgtttcatgacccctcagtctctctatcacttagaaaagcaaagtacttgttgtaaggtttccagctgcatgcacttttgtcacatgcctgggctggctgcctgtggttaaaattgagcacactttatatcaatacctataatacccttttctcttcttttctcttctaacttcaccatccatactctctattcccatccataccgatggtctttccttgagggttcgatggtgctttgattgttgtccgatagttgcccaatactacccattttttttatgtttttgtgcataagaaaatggtaaccccaggccaccatcggaccatattctacatttatatatgttaagctccattcattaagctcgtcaggaacgcatcgcaccaccatcagaccaccatcggactaccatcaaaccatatcctacatttataggtagcatcaggccaccatcagaccttcatcttcaactttaacattttttatcaacaggaaggcatcagaccaacattgggcctgtcgaaaaaactatttttttgctcaaaacataaatttggtcattttcgaccctaagtaaaacataaactcacaaataactaaaatttatacaatttttcatttgacaatattgctgatggagaaaacatggtagatggagaagtcgttgggtctgtgtgtcgttgggtccgtgggtcgttgggtatgtggtcgcagtggttgtggagagaagggaccaaggttgtgggtgttagattgtgggtctagtgcttggggtgagtttagagagcgagagagggaagggagaaagagataggatcatgtgtttcaaatgggaggggtagaattgagttttataaaatattagcatattctatcaatatgggttaacttaggtttagggaaatactttaatctactaaatgcataaaaagtcaaatttcccctttttaatgtggctttacaagttacaagaatacaagtataagatccaatccacatgtgttgtgctaatgaatttgggccaaccatctaagcccaccacatatatcatgggctaaataatcttgatgttcatataccaaagaataaggaggaaattacatggtatacccactttactttacttgttttaatttttacctcaattttcatattttttaagatatacccatttttatagattatatcgccattagaccctttaagttaatataaattatatgctagacttaagtagagagtgaaggtgaaaagtggatatattttaataaaatataatatgatcagggtatttttaattaatggatacaaaaaagtggtattttttaacttatcccaagaataagggataattttaagggacttttttatttttacatttaaaaataatttttttttaatattttacggaattccacgtagaaactcccataacaactaacgaagcaacctaaattacaaccaaaatcaacataaaaacccacatagaaatcttttcattgtaagtagttgtatttcattgtaatccatattcatttttcaatacaaaatataaacatcttttgtcttatctatttttctcttttgaacttatacatttaaatccaatatttatgaaacatatatacataaaattaaaaaattaaatataaatatatgtatataagtcaaggtaatagttacagaatctagtaggggtgggcatccgatccaatctaacctttttttcctcactcgatccaatctaattagtgattggacttagaaaatcaccatccgatccaatcc

SEQ ID NO: 93660 - DNA, 875 bp, Cannabis sativa
tttctttgatttttgttaaaataataaatgatagagcgctcattttagtaattacattagtttactgaaatatcatttatattaattattttaagcataaaatataagtgaagggtaaaatagtaatattagtccctacacattatagacaatctacagaggatcattaattaatatgatagaaatgatggatgatttatagtgtatctatattatgtatatagagcgttctgttaaattaggagtgcaatttgagtctttagttgagtcatgagaaattaataaattaggaaatttatctattaaattttagatttaattattaatagcttcattttataggcttattgtccctataatatctaggctattgtttaatagtaggtctcaacaattaatttatttaattaattaatattcacattttttatttaatcaatttcaagaattttcatggtgaaaaatagaagaaagaaaattaaaataagtttttattgattaagacatttttttatcataattaataataatatttatattgtttttttatttcataaatattattttatgattattaaaaaaaattagtgcttaaatgtgttattctcatatttcgagcaataaataaatgggttcagtcatataacaagtatatgaaatcccacaattaatgaagctaatggtttagctcgctcattaaaaaattcgagactaatatatacatcttgaaagatatttgtcggggaaaatgccactacagttaaagcaactcgcaatagattaaagtacacacgattgcctcaaataaaaaaaaaaggaaaattatttcctctttaacaatgagcctattcgtttcatacacattctatccctaa

SEQ ID NO: 93661 - DNA, 2278 bp, Cannabis sativa
atgtggtctctctcttgacttgatatatcttgctgtttttcagtttagttgtatttctctgtatttcatcttctggtttgtgctagttcttgctggtgtgttacttttgagtttagactctatctatttaggggttactttccctgtgttgttgggggtgcttttttgcacctgttttggatagtagatctatttaggcaaattaggattttcaccgaaaatcatgcccctaaacttttcaaaccgttcaaaatttctcctgaactattgagattgatgttggatgactcttatccaattttactaacggaagcctgacgtggctgaaagttctgggaacacgatttgttagatgtcaaagttcaaagtacatggacaatcgttctgttagtaaaattgaacggaattggacagaagtccttgagttcaacaatttcaaaagtatttgggggaatttttaacgacatgaaaagttcaggtgcatcctaattagccaactatttatttagtgtattctttgctattaatctgaagtaattatatttcatattttgctaacatctaaagtagttgttgtttagcaattaacattaataagtcagcttacatctttgatcaactattttattatcttatatgttaatattttggttttgagtttgagaattaaggtcaatattacacttttatgtgtcaaagtgctaatttttgtttgctgtagattgtggatggaatagactacatggaataagaggtgatgaaaagaattagagctggttgatttcttccctgcatcaaatttgtaacagaaggtgaattaagtagattatactctttcactattgctatggcagaattctttaaaatatctagtacgttttggttggtgtggaaccaagtaaccaaagccaagtcaaagttactaactttctagtccctgttgacctttcaaaacaattggaaatctctagaaaatttgactacaaacaatacaaaaacacgtaacaattcacaattcacagttagtttttgaattttcaaggtcagtaatggcatctttggagttaaatgatggttccagcaaaagggtggaggaagccggcgatgaaggaaacttgaagaagttagattctggcgagatcaagcgcagtgatagtgagaagaagaagaagaatagtaaaagagtttcttataagatgccaaagcttgcgtgttttggtataaaatctgaatcagatgggaaagggaatttcgaaatggaggttgaagacgagtttcgaagaaggaatcctactcacttggtcataatggttaatggtcttattggcagtgctcaggattggaagtttgctgctacacagcttttgaaaaagtaccgagatgatattgttgttcactgcagtgaatccaattcttctaggttgacatttgatggtgttgatgtaatgggagagagattggcagaagaggttaagtctatggtgaagtgccacccaagtgctcaaaagatttcatttattgcccattcattaggtggcctggtagcaagatatgccattgctgagctttatgaacaagatatcacaatagaaccatctcgggtaaatggagattgtagagaagctaaattcaaaggcaaaattgctggactggagcctatcaatttcataacctctgcaactcctcaccttggtacatgggggcataaacaagttccagttttttgtggcctttacactatggaaaaagtagcagctaggacatcttggtttcttggtaaaagtggtaaacatttgtttctaactgacggtgggaatgagaaacctccccttcttcttcagatggcaagtgacactgaagatcttaaatttatttcagcattgcgttcctttaggcgtcgtgttgcctatgcaaatgcgcgttttgatcaccttgtcggttggagtacatcgtctctaaggcgtcgaaatgaactcccacagctcaaaaagctgtcacgagacagcaaatatccccatattgttaatgtggagacagcaagaactgccagtcctgagaatgaagtaccaactgagctgaaagtagtaaatggaggggaaaatgttaacatggaagaggaaatgttaaagggtttgacaagactgagctgggaaagaattgatgtgagctttagtgggagtagacaaagatttcttgcgcacaataccattcaggtgaaaggatcgtggatgaattccgatggagctgatgtgatccagcacatggttgacaattttct

SEQ ID NO: 93662 - DNA, 953 bp, Cannabis sativa
ggcagctcctttgtagatcagatggggcatgaagcagtggtggcacactctttgaaagttagaagttcctcctaaagtttggaacttcatttggcgaattttccaaggttggctcccaactgacaaggttttaactcatcgtggaatgaagattgatggccattgttgttggtgtaggtcccatattaaatcaattcctcatgccctttgattctgcccaattgtcttgaaaatttggaaaaagttttcctttcggcacttcctccccgagttccattcagaccccatggagatcataagccatttttcaataggctgcccaagtacatgttcctttaatttgctattctctcttggctcaactggaacaaacacaataaaaaaaaggttgcatatctacaccaacactcgggaaaattggttgaagtgggctggcccagagcttcaaaagcaagccttgcttcccagtgatgctagtgtgccaatctaaagggatcgatgtgggatcaacactgtgattcgtgacacaacggagtccgttttgactactgagattcaatattgtaggggtcatttttctgtcgagttagctgaaagccttgcaattcatataggtattcgtcttgcccatagtttccaccttgtcccttgtattctcaaattggaatgtctccatgttatataagtcctgaactgaaattatagtaccaagtaacattgaagtagctttttggtttgttctttttatttatgttaaaaaagattgtaataaagtagctcattgtttggctaaattagccttctctatttggttgtaaccaagtttgaattggagattttcttgattgtgcatttgtttgtgttaaagtatatttgtctcctcaggtttagttttgtctaataaaagtttctttaaaaaaaaaatcacataatggtgtgataattataaagac

SEQ ID NO: 93663 - DNA, 690 bp, Cannabis sativa
aatgctgtgaaaatctggatgaaacagctcagagaacaagctgatcatatagaggatgttgttgatgaatatcgatggcatctagcacaaggtgcaactgacaagagtggattcattggatttttctgcaaaataggtggtcgaatcaaagctttgaagtcccgttatcctttagcttcgcatattaaagacattaaccaatctttacgaagaatcaaagatgcgggccaaggattcgccttgggtcattctctacagagagtacaaggttcaactagcgaaaattcgtgcacagaagagcaagacacacgacttggttctcattttgttgagcaagatgacgaatacttggatgttcctttggctcagaagaaactgaaaagcactttggtggaaggaatgtctgcacgtatgattatatcagtggttggccaaggaggaattggcaagactactcttgttaagaaagtctatgatgaggtgaaacacaaatttgattgccatgcttggatcactgtgtctaaatcgtatgacttgatgatttcattgaagaacacgatgaaacagattggcctaagagctgaatccacatctttagattatgatacaatgatccaagaattaattacaccgctccgacaacatctggagacaaaaaggtatgtaattatttttgatgatgtttgggat

SEQ ID NO: 93664 - DNA, 511 bp, Cannabis sativa
ctacttcttctgccattttatttcgtctgtacaagaaatcagctcaaactttgataatgaaacaaaaaagaaaaaattaaaggagtcttgcaaaaaataattattagaaaaggtgttgagttgctctttttatagtagttgagaagtgggtagtgctagtaatatagtaacctaacctatttttattaggcaaactcacataaatgacttttatacctttcgtcaaatcttaggaatctactaataatagaagaaaaaaatcttaggaatctaaaatattcaaaatcaaaattaaattcatttgtatgtcaaaaaataaataaataaattcatttgtgctgtgtaaatttggagtaatatattagggggacttatttatttttatttttttttttgagaaacctggacctttattaaaacaaaccaaacaaggagtcaggttacaaaggaaggtaaagaaccattccaaatatactcattgtctaatcctaaccccaccctagcacacaca

SEQ ID NO: 93665 - DNA, 644 bp, Cannabis sativa
aattagtgttaaaaatatggataattataaataactgtataattaccttttgtctttatctataaatagttatgttgattgtgttttattattcttgtcattcaatcaacatttttcttaaacattttcgtagaataatgttaaactgtatagttatagtatattttgcactcttttactaatgttgggtgaagcatatgcaagacatttatttcagtgtgttaaaagcgagatgaataatgttaaagttcttgtctttatccttttaacatactaatggatatgtgggttaatgagctacaaaactcattatctacctattctgaataattccataatgtattctggttatctcgagatagattcgttcatttcgctggtctcattaatcggtagttattactcgtgtttcgtcattgcttatgtgatagcgagttcgagtatttttattaactgtatttcccgaggcgagtcatctgaatgcatttaatgatgtacaatttgagctggtttgtattccaactttgttacacgtgtcagtttcatattgctgctcaaaatatgagtataacaattgcaattcttaatattgtcaaaggtatttttaattgtggaagatcataacctaagttaaatgaattata

SEQ ID NO: 93666 - DNA, 797 bp, Cannabis sativa
cgttttacatccctccaatacacatgaaagctcacattgggggtatcttagttttccatagtacaaccaagtacatttactctaataaaatacaaaccttcacttgaagagcacaaaaatgagttttctttttagagagaagaacataagtagacaaatgacacaaaaaaggttttctttttatgaacagaggaaacttcagaaaggacaaacgccaccccttaaatttttcaagactttaacttttagcttcccaaccgattttagcccgaaatccaaatgaagaaaatggaaaatggccacttaaataaaaatatagaagatggaagtgaggaagattgtcatatcagtcacttaatttttaaagtttaataatatttaatagaaaagcaactgattacccatttggttttcctaaatatccctatattaaccccaaccctcagatcaattaacgtttcaatctaacggttacagtacatccactaattgtataccctaaaatgtaataacgggacaaaatcatatccctatatatattcaagaatagatacataataacaagaacatatacatatacataatatgtaacatatagataacaaagaaaagaaaaagaaaaagtattcttgaaattatttcagttagttgagtatatatatatttagtgcatcgtgacctcaaaataattcaagaactttaacaaaaaaaaaaatatttaccgtcaaccgagattcatattgataacatgttataaaattattatgaataacataaaatagataaaaaaaaaaaaa

SEQ ID NO: 93667 - DNA, 626 bp, Cannabis sativa
tgcattttgaagaataaaaaaaaagtagcggtcataagagtgctctaataagttactattacatcagaatattgacaataagtgaggtgaagagggattgtttaattttttttttttttaagaaataatctaaaaatatgctacatctataaaaattattattcatgttatatataataatatttattactttaagtatattttatttcttgtttatattttttttatatgtgaatagattagtattataatttgaaatggtaaaatatattaaaaaaattataaaaaaaatgaaaatttgatgatgtatttagaaaaggctaatgttagtataatgtaaaaatttataataaaattgggaaaatgaagttttaattatgtattttagaagataatgtatacatagaacttgttgggagtattcttatgtttttaatttttgtcaaattggtggcacatgctatttactagtatatataataatatcctgacctattcattcataagctaccaagatgatacaaaatgggagataataatggttgtagagacaatatatgtagcatatattattcaatgctttttcataacaaatgcaaattgaaatataatctcatggaagtaca

SEQ ID NO: 93668 - DNA, 1257 bp, Cannabis sativa
cctcacttgaattttacagttttcacaatttttattggggaatttttaattatatacgtaatattataattattaataaatataccgctcattatttaaatggtacaattatcgttacttctatacgcaatatacaaacaaatgcaagcaattctttcttacagtcaattgtccctgtcagcttcatcttttgacttttgctctctttatgtatgattttgttgtttttttttattttatttttctaccactctctttttctctataaaaagcactgttgtgatatatttttttttaagttgattgttttaatacgtagaaaatatatatttctacattattaccaataagatgttgaaatcaaaagtaatcatttaatttcttttataattgttaaaaataaaaacattaaactcaaacaaaatttcatatataccatattagaattagttgttattgtattaatctaaaaaaaattatatttaagagttacaatgttattaagaaaataaagcgcaaagatagtatttgactttttttaataggctttattatgagattatattatctcatatgcatttttgttacctactaatgaattattttagaaccataattttattttacctactaattagttactttcaaactatagcttatttttatttttaatgaagattttaatgaagatgtatttatgttatttttttttttttttggtatagctacttttacattaccttcaaacatatttgaaacagataagtcatattaaaatataataaattattatgtagcatattattatatataatttgttctatgatatttaagatactctctagtttattttaaaattttatgcaatttagttttttttttttaattattaaataacaaaaaaaaaaaattagtaacttataaaattggttgatatatctaattttgtttacacctaaagtttgactacttgaaaatgtaacatataatgtttaagatattattttgttttcttcaaagtattttataaacctatcaaaattgttttataaaaaataagtttatttagaatataatcttattacgataaaataagaaattaaaatactttttagtaacctataaagttgtgaactttcagttctctaagaaaaacctataattttttttaatcattgatgtattaaattaatttgtttaagtttaaaaagtaattacttattaactaacaaaatataaaagaaactataatgttat

SEQ ID NO: 93669 - DNA, 1101 bp, Cannabis sativa
gccggtattaatccccaacggtcagaatcctcaattaatcccggcaggtcccgccgatattaatgggtttaaatttttgggctgtaaaaatcccgctctcttttttcgaggcgggattccgctggtattaatgcctatccgccggtaatttccctattattagaggcgggtggggtccgccgacattaatataccgccgacaatatcctaatttcttgtagtgtaatcttagattttatctaaacttttaaatatttttttaacatttttaagacaatagagaaaatttattagtttgttctgttattattaattaatatattttaaaaaaataattattattttttaaatatcttaatttaaaaaaaatatgtgacattttagtatgagaaatgttaaaaggcaacctttcgtggtattgatgttagtgtaattaagtagtaggtctcatataactttaaaaaataagatttatgaaatatcgctaaccaattgtagggtgccacatatgaaaggtgttgggcaccactggtgcctaataacaatgctctttaattataattatgtgatacttgatattcaagttatcatttaaaaaaaacgtaaagtagactttcgtcaaaaattaattaatatttttaatgaaaaatttaaacgtagtaaaaagcaattaaaataatatttcaagtatcacatagaactagttattttattaatattattattatatctttttttttaaaaaaaaagcacattggagttattatttttatattattattatatttcttttttaaaaaaagtcaaaatattaaggttgtatattatattattattagtataatttgagttttatgaaattatttttgtattttttatagaattaaaattaaaaaagggagagcattaaggagaaaagagaaaagtagttttagaataatttatatgaatttaaaattaaaaaaataagaaaattaaagagagaaataaaaaatagttttaaaacaaatttagagtaccttgttaccgttttatgtctctactatatactaggtgaatgtacgtgccgagccacgtattgctagtttcatttaagatttt

SEQ ID NO: 93670 - DNA, 1036 bp, Cannabis sativa
caaaactcatccattgaataaagacttgaattttcattccaattctgattctcattttcattgctccatttgtcattatgccaagcaaagaaagttgcctttcatttctaatcataatattgcaaagaactgttttgaacttgttcatgttgatatatggggatcctatagcaatctaactgttgaagggtttagatactttatcaccattgttgatgattgctctaggttcacatggatcaaactcataaaacacaaatctgatgcccaatctgctattccccaattcattcaactcattaagactcagtttgggaaaaccattaaaggctttaggtctgataatgcaaaagaatttcaattcaatgatttgttttccaaattaggaatcatgcattatcactcatgtgtccaaagaccacaacaaaattctgtggttgagagaaagcaccaacatctccttaatgtggctagggctctcttatttcaatctcatgttcccttatgctactgggggattgtattgccactgctgcctatttgattaataggacacctacccctaatttgaaaaaccagtccccttttgctattgtgcactgtaagtcacctggttatactcatttaaaggcattcggttgtcttgcttatgcctctaccttgagccaatcaagaacaaagtttcaacctagagccacatcttgcattttccttggttatccaccaggaatgaaagcatataagcttctcaatctgcatacaaaccagatattttattccagggatgttcagttttatgaacacatttttccctttgtaaagtctgagagtcttcctgctgcatatgatagtttcttttctgctatacttgactctactcagtgttcttctccctgtattgaacctgattctgaaccaattgctatacctactccgagtcctgaatcagcttccttctctgataatgttcctggttctgttataagcaatgaacatattcctaattcttctttttctgatcaggttcaccatccat

SEQ ID NO: 93671 - DNA, 531 bp, Cannabis sativa
aaaccaatctcgagtcagtagcatctgttctatgttcagccatttcccttggctctttgtcttggacaatattagtttgttgcttgtctttctccttttctttctcagtaccttgtttcttcttccatatgaatttcttctctttattgcaggtagcagtagtatgccctaaattagcacaaaccgagcatttagttgggagccactcatactcaatcagctgctcagcccattgttttctttcattaatgaaggatatggtctttggtggatcatgtaaaatctcaatttcaacgaggacacaagcaaacttcaccatagatcgctcttgagtaaccttatcaatcatcgccggtttgccaattgtgcttaccaaagcattaagattatttcttccccaatattgaagccccaacccattcagccgaatccaaacaggtacagaattcactattcgggcagaatgaatttcagttgaccattgtcgaagtaccacaggttttttgacgaagtgaataactccaacttcaa

SEQ ID NO: 93672 - DNA, 690 bp, Cannabis sativa
  modified_base (320)..(329): a, c, t, g, unknown or other
  modified_base (648)..(664): a, c, t, g, unknown or other
gaatgacattaattaaaggaaacgatggtctccgttaaagttaacggaataaaaaataacaaaacgttaaaccaagaattaccgttagatagacacttttaatatataaagatatataagttcacaaatacttttcctccaacctccctagctaatcattatatatgtgaagaagaagttttcaaaggcacatgtgtcactttggttgtgacttgtgagtgttaaatatgcaaataaaaatagggaaatgaacatggtatactaacttttgttatttttttacaaacatactgtcagcggaattttttacttttttactnnnnnnnnnnataagtttcatactgcagtatattgtgttaagttttcattagtgttctactggtattttactagtgttctactgttgttttgagttgttctgctttgtgttttactgatattttataaaaatacagtatttttgaaaaaatttccgtgtgatagtatttttgtaaaaattaacccaaatttcaatattttcgtaagtttccctaaaaatattacacataattaaatttgcatgagattcttggcctcttatattgggccaaaatctccaatttgattttgggataagttgagaaataccccttttattaatcaattaannnnnnnnnnnnnnnnntttatatttatttgaaacatacctct

SEQ ID NO: 93673 - DNA, 581 bp, Cannabis sativa
atccaacttactatgttacaagctcaccttaactcacattagtatgatatcgtcagttatggaactagcccgcacgaagtaatttttggacaccttcctaaaatctcttatagctaatagagtagatgaaacacttatattcaagtcaattgttatttattcttctgatgtgggacttgggttgatactacaataatatataagagtaattatataaggcattatgaattgatatagtattaacattacaaattagaattttctctagggtttctctctagaagttcttagacgccttgatttttttgcctaaccagggctcgccagccatttctcagccttacagcgcgactctgatcaggtcttgttaatttccatactattttcaattttatatattggggttgttgatatcgttctacctacgtgttcttttcttctccatcttctttctttagaggtgcctcaaagatttgatttctcattggctctagatttgatcttcactggtgttaatcctcttagtgtttttattttatttgctatgttattttatgttcaataatggtgttgctactgtt

SEQ ID NO: 93674 - DNA, 733 bp, Cannabis sativa
ataaattatccttgcaaaaaatgatagatcatcagcatacatcaaggccgaccttagcttgatactttgaacccatgaatttcgtctctcatttctgcccgcaaaagaagtcttgagcgaattccacttcaagtgacaaacaagtatggcgacaacgaatctccttgtctaagacctctttccggttgaaactgtttaagagggcagccatttacatacaccaagaattaaactggcgtcacacatttaaggatcaattatcaaaatggttcatcaagcccaaaggctgagggggtccctatccaagaaatctcactccactcgatcaaaggccttggacatatcaagcttcaaaccagtccacgcaactcttctctatttctttttaaaggaatctagaatattatgcgtcatgatccctttttccactatctatctcctagggaccgaatgatacgaacaaaatgatgaggagaaatgaacttaggaaagattttcttcaagcagtttgctaaaagtgtagagatcactttataacaatgttgcataaactaatcgagcagtaatcatcaaaacattgagccctcttcctctttcgaatgggcacaagcaaagtttggtttaaagtctagattgcctctttaatctcatcatgtgacgtcaccttgataagatccccattctcctcccccgtgaacattgggctaaccaagtcaaacaggtctggatccaa

SEQ ID NO: 93675 - DNA, 825 bp, Cannabis sativa
aagaaccacctgaaatagaattacaaacttttattcatcaagatacctctcatgcgaagattccaagcaccataatatgggtaaaagatagtccacaacgactagaacaaagatcaagggttgtgatagaaccgatgacaggagaaacttaaggaagtcgagtgtttgagtggcaaggaatcaatcgaggacaatcaggccataattacaggcatgagcagtgattaaagaaattaaaaatatcaaattttgacgagaacaatccagatggttgggtcatgcaagctgaatgatttttcacgtgccataattatgatgaagaggagaagatcgaggcagcttttatttctctatcaggagatgccttgcttttgtatcaatatgagaataagaagagaacaattctttattgggaagaactgaagaggttggtgttgaagcattttagggacacccaccaaatgggatccatttatggcctgtttcttttagtcaaataggaaggaagagtggggtaatttaagaagaatttcattcgacttttggctccattggaaaacatcccaccgaaaattcaattaagtaccttctacaatggcttactgccaataataaaggcaaaatgaagggtccaacgtccccaaaacgtggacgaggcgatggaaattgctcaagacattcaagagaaattacgaagtacttcttttttgtgccctaaaacagggaacattcaacgcacgacttattagagacctagccccaatacgagttttaacaatatcaagactcctcctgactgtgtccaaggtgaggtgagacgcctta

SEQ ID NO: 93676 - DNA, 1149 bp, Cannabis sativa
ggactcgtttaatttattaattatcttttgattaaaattttatattttataatgcgtgtttgtattttatcatatattaatatcattattatgattttttaagttatatttttgtataataatttgtatattttaaattttatataatttaataattttatatatttaaaactttaaaataatctttattttttatattaggggatttcgcgccctttcctcatcttatgaggagatttcacgttccgtgatagggaataagcatagatgggatgggaacggggattaaattcctcaatggggacagggacaggagaagcactccccacaaattttccgcactgtgtaataataatatataaaatttcaacaattgtataattattgtttatttaactaatttatttgaagaatttggatttattatgatcaatagtataaccttagaaaattaaattataagcaaataaatgtaaatgtaaatgtacttaattttgggggactgagtgggggtttattgttgctttggaaagctgatgtaaatgtaaatgtacttaattttggtataaactttgttgactgctacattacgacttctgatggtcttttatttcatttctcgggtttttatggagctcctgctacttctcaacgccatttaacttggcagctattgaagcgactaaaagatactgctcctttgatgccttggattgtaatgggcgatttcaatgaaattcttcaccatgatgataagctaggaggacctgttcgatgtgataaacaaatagaatgctttcggaatactatagactactgtggtcttcatgatctttctttcactggtgcacgatatacttggcataacaattgtgtgaatggtacaaatgtgaaagagagacttgattatgccttcattaataatgcatggccttctttatttggagcctctgatgttgcacatttgtctttcttcaaatctgaccaccgtgcactgcttgttcctttaactcacattgcaccaacagtctctcaaaggttcaagtctcagtttcatatcgaagcattatggctgtgttgctataaattataaacactacgcaagtatacgcaatcaagtagtaaatctcacacaggtgaggtcgatcc

SEQ ID NO: 93677 - DNA, 728 bp, Cannabis sativa
  modified_base (245)..(248): a, c, t, g, unknown or other
taaaataatttccaacagaaggacggtagtctgcggatgtgtatagactactgggagctgaacaaagagactaaaagaacaaatatcccttgccttgcatcgtagaattgtttgatcagttacaaggggcgatcgtcttctcaaagatcgacttgagatctgggtaccaccaattgaaagtgcgagaggaagatatcgcaaagacagcatttcaaacactgtatgggcattatgaatttctagtnnnntcatttgggttaaccaatgccccaacaaccttcatgaatttaatgaatagagtattcaaggagtatctcgataagtttgtagtggtattcatcgacaacatactcatttattcaatgaaaaaggaagagcatgaggagcacttaaggctaactctaagaagactcaaagagcaccgattgtatgctaaattcaaaaagtgtgagttctggttggagaaagtggcgtttttagggcatatagtatccaaagatggagtagaggtggaccctgagaaaattgaagtggtgaagaactggccaaaaccaaaaactgcaagtgaggttcggagatttcttggactagctaggtattataggagatttgttgaaggattctcgaaaatagccacaccgttgacgaatctgactcgaaagcaataaaagtttgcatggacagaataatgtgaggaaagcttccagacattgaaagataaactcata

SEQ ID NO: 93678 - DNA, 879 bp, Cannabis sativa
gctaaggagaaggagtttcggtttaaccgtcaatacaagagcctgaaaattattaacctttattttgcagatgatctcattatcttctgtaaagctaacaaaggctcagttacttgtgttaaatgtagttttgaggagtttagtaacaagatagggctcaaagctaatcttgctaaatctcaagttttctttggtggaatttctaggtgggacaaggctgatttacttgagatcttataattgaggaaggggtgtttcccctaagatatctcggggttcctatgcgaccaataaagtggaaagcggaggactgtggggttcttcttaagagaatcaaaaaccaggttcacacttgggctagtaggcacctctcttatgcagggagatgtcaactaattaactcagttctcttggggctgaggaattattggatgaatattttcttgctgtctcaaagcacaatcaaggaaatagacaagctttgtatgtgttttttatgggataacaatggtacaagaaataagtttcatcttacctcttggactaatgtttgcttaccgaaggagcaaggtgggcttggttttggtgaaggtgctaagtggaataagactatgattgcaaagtatgtttgggcaatcaatcatcatttgaaagctcttttggttcgatggattaaccatgtgtacttgaaagcgcaaagcttctggttgtatcaactaaaaagtgacactagttggtattggaaaaaattatgcaatattagatcgatgttttctcagcaggaagtggaggatgcaacttgtaaaggtaaattttgtgtcaacaagttataaaagggtctttgtcatggtgagtaatttgaacaccaaagctttgttt

SEQ ID NO: 93679 - DNA, 1336 bp, Cannabis sativa
cagtcccaaggttttactattcatgtatttcctttggtgttaaaatttgtatttggttatgattcacagacataattgaattttttgtctacaatacatgtttatgtagtttcatttttgtttacttggtgtttgaacttaagtattgagttggagtcaacaaatctttctttaatgaattgtaaaactctacatcagaaataatcattggtgcccaactaataatctgttgtacttgcaggattatctaagttttaggattgagagtgatggaaatcttcagggagttggacttttcatatctgttgaaccaaacactggccattaagagcttgaaggttcagaagattttcgacgatactgatttcagttattgaatgatactaatattcattatttattaataattattttctttttctcttcgaaaacaatacgaagaagaagaagcaaattaatgattttcctttcatttatttatttttttatacttatttctatagaagtcctaatatgaaccgagctgttagttttaatatttatacctgatctttctattttatggcatattaatattttttttttgttctttatttattttttttggttaaatatttgaaaaatattatgtgtgaaaatatcttgaattttttaaaaatttaaaattcatattaattttttttaatgtgatttgaataagtgaaatattttatgatatttgaatagtgagacgctatagattatttttttttttagtttttaatattaaaataatgtttttatgattaaatttttatatttatataaatattatataatgtgagataatttaataaattagtataataataaagaatattttttagtgtaaattttagtattgtggttagaatatttttttagtctaaattttagtattgtggtcaccaatgtattgacctttaaagatgtaggattgagaatatgaatgaatcataacactgcctttgttttttaaataatgaatcataaaatttattcttaaacattaatgtattccatttagtatttacttttaattatcaatactattaattatattaattgaatatacataataataatctctaataataattaattatattttttcttcaattatttattgtatcatttttaaataaaataaaaaatacttagtataaaactaagtatacgtgcctcacacgtaacattctactagtatatataaatatgtataataagtatacatttttgtatcttattttttttacagaatttaaacttatttttttttatttaaactactttttatttatttttttttgtttttttt

SEQ ID NO: 93680 - DNA, 626 bp, Cannabis sativa
  modified_base (72)..(73): a, c, t, g, unknown or other
attttattaaataaaaataaaagtcacccatgaatttctcataaaccaagaatttcagttatataggcacannttatatagaatagatatatataagtcatgcgaaactaatttgtgtattgtttagttattaaaaaaaattatgtattgcttgataattaaaaaaattatgtatttagaacatttagacaaattaataaagcataaatatataaaaatgtaatatattaaaacattaaaaggcagagaacttgttcttagttgagcattactaaaaaaatttttaaaaaaaaatcactacaaaaaccaagatctataacgaggacaaatgtcctcgttagaacttcagatgtcctcggtaaaaggtctcgctaaattaaaagtcctcgttagagccttgtcgtcagaaattggtttctactgaggacaatagtggtgttctcgttaaagggtctaccgaggacattgttgtcgggacaagcttcgatatgttgtcggtaaaaacttttattttggcctaacgaacccatcgataccgaggacatttgtcctcgttatagagtcttttaccgagaacaagttcttttttttttttaataaagcacatttttttattcattattaat

SEQ ID NO: 93681 - DNA, 1636 bp, Cannabis sativa
catgacaacaaataagcaacaatcagtttaagtagttaagagatagaactaaaagtctacttttttttagtagggacaccgatttccaatttgtagatttgattagaaggtgcatattagcttaaatattagtttagatagattgactatttcatgaacactttgatataaatctaataagttaatttttatccgttgtagttgtaaacaagctcctagaattcataaagtataaccataacatatgattgtcaatatgctcaaattctctgacttatttattggagaagcaatggcctatttgttagctctggaatcaacaattctttggaagcattcgtttgtgataactgagagtgatgattctgagacggtgatcaacactctaaaggggatttgttccatttggggtattgataactatgtgtttcaatgtaaaaatctttcaaaccttttgattaattagttgtaacttttcgtttatttctagactatataattttgcggcttataatatgactaagtgagcttttgtcagcgatgtaactggtacgatcgatccgtcctccataccaaataaattataatgtaatgaccatgaggtctaccattatctagttttaatatatctaagtattttattaaaaaaaaaataaacaataacatatatatgattgtaaatagatagatcaaattatatatggaaaatgacgtttttataaaaataataaaaaaaatcaaattattagttctatccatttcttgtgattttttttttcatagcatgtattattatgttaatggtagttaatcaactaatatttatccctctgtaaacaagaaaaatacttgaagatgtatatataattccttcattttattagtagaaaaaaaaaagaagaagaaaggtttaaactaataaatttatatattaatcacgtacagacatattatttacgttgcttatgctatagtatgatcaaacatcaatgtatatattttgaaataattaccgtgatgaaaagtcaaggaaaatgtggataccgaatatttgaaaaaagaagttcatcaaaaccaattatttgatcgacagttatctcttccaaactcaaaccatcattgatggagtctttaattttctcctgagacatatgaggtgatattttataaaaataattataaaaaaaattaaataattagttctatccatttcagttttctcgtgctatttttcttatagcatgtattattatgttaatggtactagtatatatgtaattaattaattaataaatatcaacaatcattcaataaactagtgttcaacagtcattttattagcagaaaagaaaaagttgaaattaataattaatatattaatcaagccaacaatcacaaatatcatttaggttatttatagtatcatcacacatgaatatattgtaacactacattgctaagaagtcaaggaaaatgtacgttctgatattttgaatgaagaagttcatcaaaaccaattatttgatcgacagttttctctttcaaactcaaagcatcattaatggggctttttattttctctaaagtctgagatatatgagtgttgaacatgtcaagcttctcttcgcatttcttc

SEQ ID NO: 93682 - DNA, 965 bp, Cannabis sativa
  modified_base (406)..(410): a, c, t, g, unknown or other
ccgggggggcgattgggacgtgtaatgaaaatgttatttattacttgcaaattagaaaacgtctaaactcattgaccttaattaaatatgtaattaagccactaaggctagcttagtagtgagggagggatgggaaaaaggaaaaggtcatgggttcgaaccttggaccttgaatctattaagctattaaatgattgtaaaatactattacgctacactaaaaaaaaataattaaatatgtaattaaggatactgatgaagaaggactgtttagccaaagtggggcttaaaacggtccaaaattccccaaaagaaacaccacccattcttaaacccattaataataataaggggtttttttatttttacacttcaaaatagttttttttgcatttttacgaaattnnnnntagaaactcctattgtaactagcactgcaacttaaattgcaacaaaaaatcgtatagaaacccttattgcaactaacgctgcagctactttaaaaacccaaactgtaaatttgaaaagaaaaaaaaattaaaaaaaataacatgtgaagtaataataataataataataataataataacaataaaaaaaaattactcataatttataccaaattagattcataaaccctaccacaacacagttaaaagaaaatactcttgtactttctatctttcttccctggtagggattgggacctacttttgaggccctggccaatagtgacaaatatgaatatgggtcggtcgtaaacggacgacgctctcctctctctcctctctaataagtatttcatttcagttgaaataagatgccaaagtcaatcctaagacgagtacgataatattaacacaacaaatccttacattaaaaaataaataatcataaaaatgattctgtgattgataattaaaaaattaattacattaaaataataaaaaaaaaattataaaaat

SEQ ID NO: 93683 - DNA, 532 bp, Cannabis sativa
ctttagggttggatgatgacatgttttggataggagagattccctatcctattttctctgttgttgtaaatgactttaatttataataacagtgaatttctcaaaaaaaaaaaaaaaaaaaggttgtgtttcaaattccataatattcttttttttatatatattttttgctctctctcgttctgttcccgctcttatacaagaactaaataaagaaagctaatatgacaacagacaacgctgaatgtggttattagaaaactgttgtttttaaatagcagtgaatggcagatattctatttctcttttcttttctctttctatcttaatctattattttcttctatattagttaacctcgtatttctaattttggacttgttttccatagagttcgcatttgaataacatagccacattaggatgatatgcggaaaaaaaaatcatttaaaaatatatgataaatttataatttttaattatattaataattttgaaaaaagaatacttatcataatctaatgacgtttgt

SEQ ID NO: 93684 - DNA, 610 bp, Cannabis sativa
tgattggttagataatgccatatttagtggcatttactttttatgccatatttatcataaccttaataatttttcccatatttttgaaaatagcccgtctaaaataggggataacaatcatgttggtattgacgtcggctcgttgcttattcaatttattgggttttaagctatttcaattaaaggtgggcccaaattcttccatcaagcagaatgttgaagagaattttcacttttatggttttaattgcaaaattttgtaaaaatatgatttttttacaaaacaattattttattgaaaaaattaattctaattgaaatatatgaaaaaaaaaatagtaaagggtaactcgttaacctaatattattttcccccatactatttcttttaaaaaaataaattcacaaaaaatattttctttttttaaaaaaaaactatatttttgcacacaaagtaaaaactcagtgtaattttcatattgttgaatctcacctgttgtagcagttaacagggcccacgtctaccactccacctgaagttctgaaaaaaattagggaaacttacaaaaaaatattgaaatttggattaccttttataaaaatactgtca

SEQ ID NO: 93685 - DNA, 1149 bp, Cannabis sativa
tatattatatctaatactaaaatgcaatacacataaatcacacaatatatattctcaaatatttaattatacatacacataattttctttattatattgtatgattataaattaatatatagacatgattatatagataatcattatcaaatccaaaattagcttaaaaaataaagaaacattatttatttgaaaatatttatagcaaaaagaaaaaaaaaatcacaagataaaatgcccattttcacaaatatttcacataaaataaaatgttaattggagggcaaacttagcttaatgaaaaaaaatagttcaattgcctagtttaatttttttataattaaatatatagtgaaggctaattgtgtaattcaattagtaaaagcaaagacattcacacttttatataggttatagattatagataatagagatacaaataatgcaaatacaaaataaaatttagtttgtcaaaattttacttaattagtgtgctaattatgatgtaaatatctcacgtaataataagtgatctaaatttaaattgtaatatagtatgatacaaaatttatatcacaataaatgatatgtttttatgtttatcattatcttatttttaatattttattattaaaatttagtgagcatgttaatttgcattaaataattttcttaattattattattttattattaaattttatatttatttttgtattattattattattttatatttaaaataaattattagatgagcaattaaatgatatattaaacattgcatcaattatcccaattttgtcctcacaaagtgcatgcttacatggacagaacatataccacgtggcagttgaactcactaaaaggaaggccaagttagcacctgagcaaacaaagaccccgacactcaaactgggatcaagttacagaccaactcactctcaggagttggacggccacccctcaccgacactatggccggccagcccaggggcagcaccatagtcgaccagcctggccagcacaagggcctggccggccaagggatgctctgcaggcctcactggacactcctgcacgtagacaacaaagatgggctgcaaattgggccccaaaagcccaacagaatagctgaataatatctag

SEQ ID NO: 93686 - DNA, 598 bp, Cannabis sativa
  modified_base (546)..(553): a, c, t, g, unknown or other
gccgggtttggatggcatgtctgtcatgttctatactaattattggcacattgtcggtgatagtgttaccaaaacagtgccaaaagttctcaatgacggtagtgatccttcctctttcaacactacactcatcaccttaatccccaaagtgaaaaagccgctgaacatggctcaacttcagcctattagcttgtgcaatatattatacaagcttttttccaaaaccattgttctaagaatgaagccgcacttaaactcaatcatatcagaatctcaaagtgcttttttgccatctcggttaattacggataatatacttgttgcttttgaactcattcactctctcaaacatcttaagagaggcaagcaaggattcgctgcaattaagcttgacatgagcaaagcttttgatagaatggaatggcactttattcaaagtatgatgctcactatgggattttctccacagttggttaatcttataatcaggtgcatctctatagtttcatactcattccaactcaatgtgtaaagcccgcttagttnnnnnnnnaattagcagttgtttatgtttaaattatgaaattatttatagcta

SEQ ID NO: 93687 - DNA, 579 bp, Cannabis sativa
  modified_base (33)..(60): a, c, t, g, unknown or other
atatgtgtttgtttcatcgttttagaaagttcnnnnnnnnnnnnnnnnnnnnnnnnnnnntgagtagatctaagatcctgttaaaataatttccaacaattaagcatatgatataaaataaaattaagcatagaaaagtaatttaaagtaaatatgatatataaaatatcagcccatatagtgatatttatatattaatataaatatcaattttattaattttattaatattttacttttcttaatatgtatatatatcattttatctctttcttaattaatcactttttcttttcaaatttttcttgctaattttttttttaattttttgtttaccgatggaacaatctcaacccatatgatacaaaaatgagagatctttttaattagatagaaaaattaagcataaaaactcaaaattttcttttctacccattcatgtgtaatacccattaagagtgtacccatatatatatattaagaaaagtaatgtgatttatgattcagaattaatgtatacatagataattgttatcgaatttatttaagagtttgatagaagattttttttaaaaaaaa

SEQ ID NO: 93688 - DNA, 5989 bp, Cannabis sativa
  modified_base (94)..(95): a, c, t, g, unknown or other
taattaaatttaatttttataaataaataatatataatgacactcatctccattattacaaattattaaatatttatttttatttaaaaattannttaaatatactaataaaaaaattacatatatatttatctttcttatttacaacacaaattactcttaattaattaattaaaaaaatgagttattatataaatatgggtgcgtgattaagtcgctacagttccgaaacacagaagaagaagagaaccaactcctaaggaaaacgactgttacacattctctcttcttcttcttcctcttcccacctagggttttcttttcttattgatctcttcaatcttcaatccaggttactattacaattcctctttcttctacgattcatgttctcttcaatgtctgttttcgtcatttgccaatttcacgattttttttttttttgactattttgtatgtgagatctttgtttgtgcatctgattgactgatttgatttgatttttgtactttattttcttttagattttttatcttttgtgaatctcaatcatgacgattcctgattcgggattcatgattgataatggagcgagttgcttgcctcttcctcccgacgaagagaatcggattattgctgagcttactaatcaatctgataagaatttgaaggatggaaatttgtactacgttgtttcgaataggtagatttttctttttaatgtttgggtttctttgaattttcttgatttacattatatcactttgtttgttttgattaattgttcgtattgattgatacatagtattgtttatattgccccattagatgtttaacttgcgtaatttatgttgtttataatctaattatataattaggctcccaacatctgatgtttttcaagttactggtggttatatattctttcttttaggttaggctttcgaatatattgtggctctcttagcttagtttaaatgaaaaggcttagtatctttctttgcttcgtgcaagttaggaatttcatcggtttttttttttgcttttatgtgaagtggaggcaatatatattctattcttctatgaataatttgtaaaaatagctatgaacatttttattagcaaactaactttacataaaattttattaacaaaatagcattgtatggtcgcaaaaacgactatgaatcacactgtgcgaccataaacaactattatggtcgcaaaatgtgatcatcatggttggattgattaaattaagtgaagtcattttgcaaattttagtatttcaaattattagtttgacaaatttgacgttttttttttgccaaatataacaatgtgaagaaatgaaattagcaaaatatcctagttgttctcacatttagaaatggatggtcagtgtaaaatatggttccttagccaatagccacaacaaagttatttttcaaatatttttaagaatttatcattttcaagtatttgatcgaacacgttatgtaaatcctgcagaatgtaattgttcttttcttcagatattcagattgaacaatggtagcttgctaccaattgttattattattattattaaaaatgattatattaaagaagttgttagtaaattaattctggaaaagaataataatatttgcatcatattagttcattgaccataaatttatagtaagcaatcatcatgttccctcaagtgaccatagtttacactgcgtgatcatcatttgcttaggcaaaaattgagtgagattattttgctttctaactttcacctggttaattttagcaaatacattctgttggttaaaaaactaatggtaaaactctgattaggaaaattaattctatatcctttccatagatttaccaatttatttaaaataaaggtctatgcttcttatatacaattgataagtgttgaatgcttagatgattggcatctacatttactagtttttgtgccgtgccggcctcgctaatttaatgttttgttttattttcccatataacattatctgatatttggacttctatctattttgcacagatggttttcaagctggcagagatatacaaagcaagggatgggtgaatcattggttgatgagcagtcttctgaatcccaaaatatggatgttattactttaaggagtgtagatagacctgggccgattgataattctgatatagttctaaataacaaagagaatgatggtgaagaactagagcttcataaattgttggaggaaggaagagactatgttctagtttctcaactagtttgggaaaaactattgagttggtattttatttcttttgctcttattttattacatatatatttagctagtctcctaaagttgttcttagaatctaaggtagttgaataagggtaccacctgttttgtggtcttttggggttttagtgttttgtaaaatgagtatgatttttggagttgcatcaaatagcaataggttatgaattgtgtgcaccacttatttgtattttttgtgctttaaatcatcaggtacaaaggaggaccagcgttaccgaggaaattgatttctcatggtacttttatcaagaattatcttgtagaggtttacccactttgtcttaagttgattgattctagggacaaaagccaatcagtgttaaaattaagcagaaaggtaattttgtgattttcgctcaactatctataatcattaccactagcgcttccaatgatttttttttccattgtctgatcttttggcaagggcacacattgcacttcctggtttctaatcttctgtagtctttgcatttttctatgcttgtttaatgtcaatgctatggctacaatttacactatgtttggtagagaagataagggagaggagaggaaagaagtttatgagtgaaaagtgggaagaaatagaattataagctgtgcagtaggaataggaaataaaagcaaaaagaattgtatattaataatttaagggtaatattatcattttagaagaaaccaaatttctttcagtcttacataccaaacaatttagatagatggaatctatccctcactccaactttatgtatcttatatattttccttgtctcttgttttctttcttgtctaccaaacatagccccattgcttttctaaatcttgtgtcaaatagtttttttttttctttttttgaaagtaaacagattttttttggaagtaaatagatttttttttttgaaagtaaatagatttttttcttttggcttaaaggtctatgagatttactgtttattattttttgttttttcagacctctacaagcgagctttatgagagggtgtgtaaacttcgtggagtagaaaaagaaaaggttaattttgttgtggatgttgttattattgtatggttttaattttttaactttcaactaatttttttcttcttttaattttggtatttctgtaaaatatcaggtacttctttgggactatttcaataaacggaagcattcaaagatgaacagttccaaccaaactttggaggaggcaaacttgcagatggatcaagaagtgagtaatttgttgaagattattaaaatcattggttcaaaagagaacatttctttgagtattaatgtactcagtgctgtaaatctgacaatcgctgtattatacacgttaatttagttacccaacaacaaaaaaaaagaaatctttatgtagttttaaatatgattgaagacatcctcttgatgaattatttatatgcacagattcttcttgaggtgccagatgtacacaatggttctttgttgggcaaggattctacaggaaacgagttggctttggtatctatagaaccatcaaggtcttcagtgacaattgctggggggcctacaatgtcaaatggtcattcatctggatatagttctaatttatatcagggaaatgctgtaagttcgtcattctcggatattgatgatggatatgatgtttacaagtcaacaaaaggagaaaggggaggtttggcaggattgcagaatctgggaaatacttgctttatgaacagtgccttgcaatgtttagttcacacacctcctctcgttgagtatttcttgcaagattacaaagatgagattaatactgaaaatccattgggaatgcatgtaggtttcagttctttttatctttgttccagttttttgatgtggttaacttcaatattaagtagctttgatgctgttacagtttctaaagtaaattgtagctgtgcagggtgagcttgcaatcgcctttggtgagcttttgaggaagttatggtcctcagggagaactacaattgcaccacgtgttttcaagggaaaattagctcgatttgctccccagttcagtggctataaccagcatgattctcaagtaagtattgtatattaatttataataattttatttaatatatttgtttgtcttgatgtttatatatatcacgtttgtataccttcaatgccaaagattaatactatatataaatataaatgtatgattttactatttttcatgatcactatattgcttcgtcataaaattttctcttcgtaggaactccttgcattcctgttggacggacttcacgaagatttaaatcgggttaaacgaaagccatacatagaagcaaaggattcagatggtcgtccagatgaggaagttgccgttgagtgttggaaaaatcacagggcacggaatgactcgttgattgtggatgtttgccaggttagtggaaattgaagacttctttattggaagctatatttcatctttccttgaaccattaattttcctgttctggtacaaaagtattttcttctcttaacatctttatttgttgatggtcagggccaatataagtcgacactggtttgcccagcatgtgggaagatttcaatcacttttgatcccttcatgtatttgtcattgcctctaccttcgaatgtaactcggcatataacagtgactgtgttttacggtgatggaagtggtcttccaatgccttacactgtgagtttgcttaagcaaggtgtctgtaaggatcttagcgaacaattaagtaatgcttgttgcttgggtgctgatgagattcttctgcttgccgaggtaaatttggtttccaatgatatatgctacaatttatatatttatagtcttatttgtagttccagtggttgagtgtctgtaatttcaatatccaggtttatgatcacaagattttccgatatttggaaaacccctcggagccattggggtcaattaaggaggaagaccatattgttgcttatagactttctaaaaatgttgttggaagatccagagttgaaataattcaccgaccgcatgaaaagtaagattacatcactaatctcttggaattgctaagctaaatagcactggtaaacctgtgaaggtttagccggtcccgttttctaaaaaattgcttaaaataagtgacttgttcattaggaggttgaagttggtaaaaacctatcttttttgataaatcgctcaaaataagtgagacttgttcattaagaagctgatgtcggtaatacttggctatagtatctgcttttgagagatatttttttaattttttgtatcgagacattttgtgttgaatcatctatgcagactgcttgttacatttctgctggattttctggtttaaatagtggggttttaatttttcaggtctccatcagacagtgtgaagggttgtttgggaaagcttatcggcaccccttttgttacttatttgaaagagccaatacgtggagctgatgtggaagctgctgttactagattgttatcacctttgaagagagcgtgtccatcgggtaagctccaaaatggcaaggaaaatggatttgataaagagcatattgaagaaccatcaaacagctatgattctaagaatctgtcaac

SEQ ID NO: 93689 - DNA, 544 bp, Cannabis sativa
gctctttaaatttctagaagattaataagaaaatggttatcaatgtgtgtgtgcactcgccatgttaagtagtaatccttcttggaagaagacaagctggatacagccatggtgtgctgggcagtttttatataccccagcaaactaaaccatgcaaaaataaataaataaataaataacatttcaaaaatttaaagggataaagcttaagcattctgtaaaatggacagaactgagagcttttaattcttgtttgaggaaatgctttagtttactgcaatttctataacatttttatttatggttatatgtaagagtgatgccatgcttaaacaaagaccttttatttttagtatattgtaacgttgtgtggaattttgaagttatggtaaaatttgtaaatggaccacattgaaatctgtatcaactagatgaaattgaaattcgcttagtgtctaagagagaaatgttggaattcattttatcttaattcatacaattccaaacagtagtctacttatttagtttcgtgtttaagaaagaa

SEQ ID NO: 93690 - DNA, 2085 bp, Cannabis sativa
aaccgctaacagttatttgatgacgagtcattgaaaataaagaagagccaacgacgaaacaaaacaaacaaaattatgtcacaagaacaagactaataatacacttaaaattcatagaaacaggactaaaacactcaaaactatgtcacagagacaagactaaaacaatcaaaactatgtcacagagataagattaaaacactcaaaactatgtcacagagacaagacaaattgaagtagcaaaaatcgaatcgcaacacatagcaagacacaactccaaccaagccacactatgtctataaaaggccgacgagtctggttggagaaaaaaaagataatctcctataattataaatttaagaatgaaaatctaatattttaatttcgttaatgataaataagagaacctctgacaaactgttcctattttaatttttactttatatattaatcaaatatgtttaaaagaatggagtatttgtaaatgtaaattgctcaaaaaaaaaaaaaatgaaagtaaaatttttaacatctttgaattatattttaaaatttgagttatttcaatagaatacaattagaatatgtaaattatgaacgcagtcataatacaaagtaaaagaaaaaatgatcaagttggagttcgacatgatcaagttttcaagttaaccatataattaactatttttttatttattttttaagattttcttaataagctcttttgaagagtgtatatttctcagtaagcttataaaaaaaaatataataatatatcaaatagttaaaaattagtaattggttacatatactgagaaaggttgttaaattaattgttcaaccacgatcattttttcaattaaaaatgattcaattacacgaaatcttaagaaggaacaataataagcaaacttcatacaaccgcactacttaataagccgtactaaataaatttctattataaaaatagagacataagattaggatgagatatgattctaataaagaagtgattaattaataattatattccatgttgcaagtgtgtaataaggtagtcttagtcttagatgttaatgttttaaagaaacttaaaaataagtaagaattgactaataccatttgacaagtgggatatattatatgtaaatggataactaaatatttataataatgatttcatgtgcttattacttatactatcttctaattttcaacaaaactcacaagattcccttaatttggaagtgtattggcctttgacagcatatctttggacctaacggtgcttgtctattctatgactaaagataatataagcatatatttatttatttatttatttattgaggttgaaaatagtatcttaagaagtttaccacatgtcagcaatctataagatgatcttcttccaataaaattttgaaatttatggtcaaacatgtcatgcatgagatgagatataatagttttataactttacatatatcatcattaaatataatgcaaatggaatggatggagaggtattataattttacaccaactatgagatatattttttgttggggttatgaggtaagagtataaaggtttattctttagatttttctgaaatggaattatgttttcttttcaaacttatactgatgaatattggattgataactccacataatgtaattattcaaaatctttaattatagttatgtgttctttgattttgtggacaattttgtaatttcataaattttgttaaattaattctttgttttgaactttttaattaagagtaaatgtgtattatttattatattttttagtatttattttatataattttaattatgtatacagtttctttttttccctaagctttttaaccttaggttttcttttttcaacaaactgttggaaaaggaagaatttttttggcaacaaatctcaagaattcagaggggcaaaaccgagtattaaaatacttataaattatttcgttgataagctaccaattgattctaggttaattaggatttttactcccaaattttaacatgtactaaatcatgccccctgaacttataa

SEQ ID NO: 93691 - DNA, 999 bp, Cannabis sativa
attttagaacaaaaaggacatcaaaaccccacgtcgcaacgtgtcctcaggctgcagagctgttcaattcctaaactgccacttgtaactaaaacacacgtgtcaatagctgaatcaaggaactacacacacttcaaatcagagctaataagctattgttacattacactttgcggctttgcttaggaaaaatcagactcacaaacaaaattaagaagaagaagaagaagaagaagaagacgaaaatgagtgatcaagatcagccaagacgaccttacatcgagcaagaaccggtaaaatacggcgacgttttcaacgtcaccggcgaactcgcagagaagcctattgccccacgtgacgcttccatgatgcaaacggccgaagcggccatattggggcgtactcagaagggcggtccagccgctgccatgcaagctgcggcggcccaaaacgagagagccggcgctgttagccacgcagacgtctccgacttggctggagccgaaggtgtcaccgttatggagactgacgtgcctggctaccgaattgtaaccgaatcagtcggtggacaggtcagaatataatattaacaataataataataataataataatataattctcagtggcgtgatcttatatctcgcttagtttatgatctttaatttgtgttatatatatattaggttgttggacaatatgctcagccaacacccacggctcaactgagtgcagtgagtgaaataacaataggagaagctcttgaagcgacagccaagaccatcggtgataaggcggtggatctaagcgacgcggcggcgattcaagcagcggaggctagagccacgggcagtaacgtgataataccaggtggcctcgccgctatggctcaatcggcggcgtccttcaattgcggaattgatctcgacgagaacaagattaagctcggagatattctcactgtaagttttcgtgtctaaataatatacatatatatat

SEQ ID NO: 93692 - DNA, 694 bp, Cannabis sativa
taaaaaagtaaaagtagttttgtaaaaatgtttaataaattgataagcattaaaaatgtaaaaaagtaattaaatttggtacctagtgtaaaaatccccttagtttttcatttttacgtcgtactggtcatgtggccttttaagactatgcaagctcctaatctatttggaagccttaggtaagataaaaacaattttacataaaattctatgggtaaattttttttatatttttacattcaatttttttctctaatatttatacaatgttttataaaaataacaagaaaactacatgaaattttaggaaaatttttaaccccgaaaattggtgcttgttgttttcaaagttagcagatcaaggcatgagagacgacatgtctgtaatcacccggccaaagaattactcaacgtaccttggcctacaatgtcactcgaccatgagagtgacaatgtcactcagccttgagagtgacaaagtcactcggtaaaggcattgagaggtcactctgaaagggaaatgaaatgtcactcagccaaggacatctcatctttgtagatctccttctcagctttctataataacttgaatttcccaaatcgggttaatattgagggagttatgctcaaaatacggaagtggtacaaggcttcaaaaaagtcactcggcaataactattcaagaggtcactca

SEQ ID NO: 93693 - DNA, 692 bp, Cannabis sativa
gttcaggttgattttgagcgttcatcccctgtgccgctatgaccgcgactacatcacgttctaatttagcgttctgatggtgtgcctcttctagacgacgtcttaagctgcagttgtcccataaactgggcacctccacaattgggctcttcagcccttgtcccagcgttctggccattcccacagtaagttctcctcgagcgtgttgtctgcgtactaggaccaacgtcgggttgggttctctgggaatgtgtggtttgtgtgctggggccactctaaggttgagtcctcctggaacgggtggtccgtctagaccgcagcttggtagacctttttgagcccatgagctctttcccagaacgatgattagtttcctcctgtggggtattaacatttttttggattttaagccatgaagaaggtggtttttcttcaaaagaagggagggtttattctaagatttttcacagaggctctcaatgaaagcaccaaactactaatgcagattaaccaaatttgagcctcacagtaacgatttcacacagaaaaaaataaaagctttaaaagtaaaagtatgaacacgcaaggttttttacatggttttgcagttaaaattctccatagtccacgagtcaatcttattcagatttttgattgtttctcagggcctcttttgtatgagtttttccgtc

SEQ ID NO: 93694 - DNA, 589 bp, Cannabis sativa
  modified_base (272)..(273): a, c, t, g, unknown or other
cgaagagtgttcctggacactaaacactcaacaactggagtgtttagacttaacaacgaaggcccttatcaagttacataaataactagtaagggagcctacaagctgggaaggtacaacaagaacatggactcgttctcctaccaagatactagaatggagagcaccattgcaaatactactcataaccagcttacaaaactctatgaaaaattagtagttttatctactcaacattagagtacaaaaagcgctagcacccacgacccttnntaggcgtggtctcccactgttcttcaaagtggcctctactttacgaggcgagcaagggcagccacttgacatatacaagctaaatttgtgtaataagcgcttttagattcaatttatgtaagttgcataccaacgaagtccaattaatgaataattgccatatttatattctgtttattgtatctatgcaacactttctcacacattaactttttaaaagttattctcttagttccacatgcgtcctatggttccctcgcaagatagtgccaaggcaaaatctgtaaaacttggtcggtcacacaatccatgataa

SEQ ID NO: 93695 - DNA, 1106 bp, Cannabis sativa
ttgtgccacgaaatggatcaggccattaggaaattctggtggactggtagcaccgagaaagatcgctatcttgcccttgccaactggaattccttgtgtatgcctctggaggatggcggcctcaattttaaaaaatttgaagatatgaatctggctttggtagccaaacttggatggaaattagctaatggggaagagtcattatggacaagggtcttccgtgccaagtattgggagaatggtcttaattccttttggaaccccgaatcccccaaatccttatcctttggagctatactagcttcccgtgatctcattcgtaaagaatcgtgttttctcattgctaatgggagatcaattaacatgtggcatgcaccttggatcccttggttggagtgggatcaatttcgagctgccttcaatcccatgatagtcccgaactccacttttgtttcttctctcttcaatgaggatagggagtgggatttccaactttctgctacttggatggtcccaagtgtagctagttctctcaatttgattcctaggctccccaataaccatgaggataagttgatatggaaggatgctactagtggggagttctcaactcgggtggcctataagtcaatcatcaaaggtcgaagggctgaaaaagatactatttggggtaatatctggaaacttaagatctcggaacgtatgaaactcttcctttggaaacttgggagagatatcttgccttttggagaacgacttcagcgtatttttggcaacgaggtgatgtgtgcaatctgtgatgaacaagaagactccgtggttcatttgttttgccattgcccgcttgctaaatctctttggttggcaagcccgtggggagtccggagtgaagaactgaacttctatagctccctgcagtttttgaagtggttgtttgagcccacccctttgatgcaacatggaaactttgaggtggaggaattcaggaagtttggaatctctctctgctacattctctggtcagtgaggaatcaagcttttcacgaacacgttcgaccctccttcttcatcacctttaatcggattaagagcttggtcgctgagct

SEQ ID NO: 93696 - DNA, 542 bp, Cannabis sativa
tgctggaattatgagtctgggagccatctgaaaaaataaattacaaagcaatattactgtcaaaaattaaaaaaaggtcgacacaacatcgacatcatgtcgatattctgtcgacattatcaaacagtaagaaactacataattttgtcgacaaaatatcgacataccgtcgacaacctatcaatattatcacacagcaaacacagaagcaattaaattaaattgtcaacaacatgttgacatactgtcgacatgctgtcgatattccaagtgaatgatcacaccaattaagcaatacaaaattgtggacaatatgtcgacataatgtcaatattctaagtgaatggtcacactaattaagcaatacaaaattgtcgacatcatgttgacatgaggtcgatattatcaaacagaaagtaattaagtcatattgtcgacaacatatcgacataatgtcgacaaattatcgacattttaggtcaaaatttttaatctaattaagtcgacatcctatcgatacacctacgacatcctatcgatat

SEQ ID NO: 93697 - DNA, 592 bp, Cannabis sativa
cagcatcttcgtatggttctgcaatagctcggagatcataaactctatgtgaagtttaaaaagtgtgagttttagctgtcacatgtgtcttttcagggacatattatcgggaaagacaggaatatggtagacccaggaaagattgaagcagtgaagaattggcctagaccaaaaacagttactgacatacgaagtttcctcgatttaacaggctactatcggcattttgtagaaggattctctagcattgcaatactattgtcttagttaaccagaaagaatcagcggtttgtgttgttagataagtgtgagaaaagcttccaagaattgaaacaacggttgattacagctctagttttagccatgccatctgatcaagaaaagtttgtagagtattgtgatgcatccaagcagggtttaggctatgtgttaatgcaatcagagaaggtcatagcatgtgcctcacgacaactgaaagactacgagcagggttatcacacaaatgacttagaactggtagaagttgtgtttgctttgaagatttggcgacattatttatacggtgaatggtgtgaaatttatactgaccaca

SEQ ID NO: 93698 - DNA, 599 bp, Cannabis sativa
atctactatagaatgcattttgttatctcttatgattgggtttatctaatacttcttaattatccaaaggcaaaaagtcgatatattcatcaaagttcataaagtaaagcttatagtacgtaacaaattttgtttatttatttatttattgaaaagtgttctatttttctttagaaaaagtttgttattaaaaattaaacagaatcatttacaacagaaaaagaataaattttggcttggtcagcatcccgtctaacatgagatatacaaactgaagagagataggataactgatgtgacacaatcagcaccaaattttaacaactagaaagatttgatgtagaacaattcaaagaattaacgagaatcaacgaataagcttctactaagtcaattgacaaaccaagttgtctagcccaacaaacaccataaaacatggcatttgcttccatctcctgagatttataatttccaacaactgatttatggaaatctcgaataataacacccaatcccattttgttcctcgaagaatcattagccgcatcgacatttaattatagtttgttctttagagaggtcatcaaggcttatgtgca

SEQ ID NO: 93699 - DNA, 722 bp, Cannabis sativa
aatagattgatatcgagattaagaaacgatgattaccattatgtaatgtaaaataggttgtcttattagacaatgataaaaaaaaaggttctcttattagacaacgatgtaaagattatttgattaggcaatgataaaagagttttcttattagacaataatatttggataccgaatggttagtattaaaagtgtcatgactataaatagaaactattgttaagtttcctatttatcgattgtttaattagacagtgacagagatatatggatgcaggttaggatatcgacttgtctggtcaggcaatgtgatatatagatgtcaggctagggcatcggcttgcctgattatataatgtgatttatgggtgccaagttaaggcactgacttgccttattagacaaggttatatatggatgccagattagcacattgtcttgccttattaggcaatgagatttatgaatagtggagaatgattttcaaattgtcgaatttaacaacgacagtacacttgattataaattttaaatatcaagatgattttattgaacaacggtaagtacattagtatgccaagtgaggcattagaattactttgctaaaaaaaatattgagaatgattactttataaagtaacaactatagttactatcattagactggtaattgtatataaatgtatatctttatattaactttcattatgtttgtaaatttg

SEQ ID NO: 93700 - DNA, 1273 bp, Cannabis sativa
aaaaatcaagcagaatatatatctaagaaaaatatatatgtatatatttagatgcaagtgtaaaagatatcctgacctaaaaaaaacaaacaggtcctaaataaaacattaaaggcctggggacgggccttagaaattatctccccttaaaagataataattaaattgtctgaaaaaaaggaaaagagactgtaaatgtaaagaaaaagaaaaataactgtagtggtgaactggttgaactggtcagcctaatcaatgcggggaggaagacgagggccccgtcgttcttcaagcaaagcgtcaagccttttcttcttctcccggaagcgaacgagggcttcctcaggtttgggataaaagtcaagcttgatgctctggccattcgactgccaggccatgtagacgccatcgtcaaaacgcttgatgcagtgcttgtaggagacgggggtcaggagctcatctcttttggccttttttaaggcttggtccttaaaattcctcagctccttcacctccacagtcaggttggccgtcgactccaagtccacctggtgcagctcctccaaggactttaacttagcgaccatttcatccatggcctccctggcttcccccagctcgcgcttagccttggttgtagcctcaccctccgccctcagctcctcccagtgctttgccttcgcctgagcctccctctactgggcctcctctcggaatgccctcctctcagctgacaagtcccgccgactcttcacgctctcgtccatgcccctgaattcggacatgacgtacccacgatcaatcagggtctttgagaggcggccggtctccacagtgatctgaaaaaagaaataagaatgaaatcagatgcttcaagacaaaatataagcgaaaagaaaggaacgaatcgtaagaactcaccgcagccagagcagcgctgatatcctgaacctgataaacaaagttcgttgaggcacaagctgcgtatctcttgggtgggaattgagtctgatgggagacaaactggctcgtcatctcggaggcgaaaggggcaagggtaggaccaacaaagtggttgaaccagtccgtcaggggatccatgttcaggtcccagagattcctgaaggcgtcctcacgcaaggtgttttgttgctcctcccgcaagaccttcttcaaggcctccacctcagcatgtccccggctgaactcgtctagggcatagttatgtttggggatgcggagcattttcctttccttgtctgcagggactgga

SEQ ID NO: 93701 - DNA, 535 bp, Cannabis sativa
attcagagtggctataattaatttatgggcagattttgaagatcaaacaaaagaaacatggaattcagttctgcataataatgaaaaattggaggcagcagaggttaataagaatggaaaacaaccaataatatatacatggaaaagaaactcaaaagccttggttggggaggaagatactatcaacagaatagaaatttgggaggatgatgaagacccaagagaggaagcaatcgaagaggacttttcagaaagtgaagcttcggatattgattgtgaggacaatctagatgagaccaatgaagaatatgaagacattttgggtgacattaaagaattagggagtgagaaggataatatgatgagtggaggaattgggaagatttctagtgaagagcaagtcgatacggaaaataattctgtgtcatggtcaaagatggtggattccatggctgatttggggatgaaaataattccaaataaggaaagagtgccaataaaagagtccaaagaagacacaacaagaagaaaatgc

SEQ ID NO: 93702 - DNA, 736 bp, Cannabis sativa
attcgtccaacataatcagaactcccagcctcaaaataatagtagttcgggtcaaagtggtaaaagatcgaacaagataataattaaggtaatgggaagaaaggtaaattcaataataactctcagaaacagcatacttgagacttctttcactatccttattgaagaaatagaaactattttcacagcaactcagtctgtggtatcgtacaagagaccccctccaatctaggaagacataagcaagagagacactactaagtattgtcactttcatggggactgcaaccataataccaacgagtgcaacaatctaaaataagaaatagaattcctcatcaggaagaaaaactatcactgacgaaggtacataaaggccgactaggaccaaagggttgcccagccagataatattcagaaccagttgatgcccccacctgtggacgggcatttataagtgattattaggtgccctcatattgttagatactcgaacaaagctagagaaaggtatgcttgaaccctacaatatgaagagaaagatgaaatactggctatggaagaaaaaaaaaaaccaaaacagacgtgaagagaagaaccagtcatctcatttagtgaagaagactctgaccatgtcatttatttgaacaacgatccccaggtcgttgaattacaaattacaaatatgtcagctgagctcagacaatgatcaacgatggagcttcttcaaatattc

SEQ ID NO: 93703 - DNA, 812 bp, Cannabis sativa
ttctatagatacttgaatcgtcaagggaactggccgatacggaggtaactatgtgcgtggataatggagcacaagtgtctgctaagggtgttggcagagtacgtctaaaatttaataataaatttttgttattgaacaatgtttatttcattcctgaatgtaccaggaatattatttctttatatcttttgcatgaataattttttaatattggttttattaataatgagattattatttctaaaaatggtacgcccatttgttctgaaaaacagaataatggattttatgtgctcaagccaagtgagcaattaattttaaataatgaattatttagagtagtttttttttaatcaaataagaggcaaactgtttcagatgatgatgaaatgtatctatggcatctacgtttaggccatattggcctagacagaataaactagttaacaaagaatgatattttgacaaaactacaagatggaactcttccggtatgtgagtcttgtctagaaggcaagatggccaaatattattttctgcaaaaggcaatagagccaaagaataacttgagcttacacatactgatgtgtgggaacctattaatattcaagcttgaggtggttctgaatactgtgccactttcattgatgataattctagatacagtcatacttacctaatgcccaagaagtctaaaacttttagaaagttcaaagacttcaagagtatggctgaaaaacaattaggtaaatcaataaagacactttgatcagatcgtggtggcgagtatttggattccaaattcaaagact

SEQ ID NO: 93704 - DNA, 589 bp, Cannabis sativa
atgttatgattatgcttttcttactgagtctgttgacttacaaatattgtttatatgtgtaggtaaaggcaaagctaacgctgaacagcagtgagcacgagcgaaggaagattgtacatatcggggcggcctaactggaatatttgatctttgggtcagtaggctttattttgatagtcgctaggtgacaacttctataactaagcattttataaaataattgtaactttaaaaaggggatcccggattatgtaaagtattttcatattcaagttaaagtttaattaagaaattttttattattcacatttttctataagccttttgattagcaaaagagtgcacaatattaagaaatcacgatagcatacttaaactagtagggtgttacaatgatactcacacctcttacttgaatatcttttaaacttcccccttgaggcatccgtggggtttttttttgtagtgcaccatgttgcaagtttctttgtacacattctctcgagtatccaccagattagagtactatgtgtactttggttcatactctttccttactttctttaaagtttcactttggctttgtctt

SEQ ID NO: 93705 - DNA, 746 bp, Cannabis sativa
ggatgtatataaccttttcaatatcacctccagaaaaaatcctatttcacccactttactttggagaagatgttttattcaatatattaattaaagctgttgattacaggataataagtggagaaatgattattaacaattttcttttcttctccatttatgcagattcagaatgattacaaagtcataaacctggatcagtggatgggcttttaccggttttgcaatgaggtatatccaggggagagggcttatgcttctcaagtttattagaaaatttattcataaaattcttacccaataggttaggtgctatactgcatttgaagattttggatgaagctatattgatcgcctctataatagtgttgatagcaaatccacccctttaattccagcatgtagcaaatccacccattttttttacagcttgattaatctcaccgtaaatcaccaagttcaatttttagttccatgtcaggccaaccttccttacacttataaatgatgcacatttagcttagtgtagtttcgatactacaaatgaccaagttctagcgattgaagagcgagttttaaagcaagagattgacaaataaactaattttattttagtaggttgaaattttctatttcgtgtatcgtattttcctatacactcagctttttgcagactcaactatgcacttgatgtaatgatcctctaactttttatgcccctcaatgccatgtgtccaacctaattc

SEQ ID NO: 93706 - DNA, 808 bp, Cannabis sativa
acattggtctctttgacattgtgcgctatatatatattattattaataaatattattgatatatgggatgtggcacctagcataaatatcatatgttacatttttctattaattttctgttattatcattatcattctgttgactgtactttttttttttttttttttaataattaagtgaattttattaagaaagtaaactaaaacatagtagtaaccacaacgggagctactttcaaagaggaccctcagcattcaccttggcacaacgggcccaaacagctaaggcgtctgcgatgccgttaacataccggctaatgtggataaagaacacattatcaaactgcttacagatgtttaagcaagagacgaaaactggataagtcgtctatcccacaggatggtatccagagttaagagcatcgactgcaaccaaagcattagattgaatgtgtagcttcgaaatgtttcgctccctagcttttcggagggccatcaaaattgcaagaagctcaccctcgagggcactcgaaactggagcaaaatctgttgcagcccacagctcagtagcagccatatcccttgtttccacgatggccatccctgcaaccttgtgcatcatcgaagcatcagtttgaaaacagacagtctccacatccttcagaaactccagtagagagtataattttttttgggtcgcaaatctccttcaccggcctagataccacaatttcttgatatatgaaacgaagatcataggcaatgcattccatattaattctagttttctcaaaccgaattttctttc

SEQ ID NO: 93707 - DNA, 555 bp, Cannabis sativa
  modified_base (132)..(139): a, c, t, g, unknown or other
taatgacaaaaatgtggataggtggaccaataaaataatgtaatcatatttcaagatgagttatactaaaaaaagtaagcattggcataaattttatgtttgtaagcggtataaatttaatatttatttttnnnnnnnnaagtactcaatgtttgtaaaactataatttttctataattttatcagtacagactctgttattgtctttaacaaaatacatataaggcctaaattcttgattattgggtctaaatagaaatatgtagtattagttactttcaaatgtttttttaataaattcaaaacaagtctgtactgacgaaattggaagaaattacagttttattttacaaaaatttgatacttatgctgttaaaaataaacattgagtttatgcagcttacaaacataaaactttaaattcttataccgttatttatcctaaaatcaatattatttaagtaatcacacccgattttatttatctcattatgtataacctttgctaatctagaagatatgtacttgtacaataccaagaacaccctctctctc

SEQ ID NO: 93708 - DNA, 564 bp, Cannabis sativa
tatcacaaatacaacaaagtctgagcaacacttgtcgaaagtaccataaggcttgaaaataaatatgaaaaaaaaaattaagttccaacaatacaataattagtaggctttgggctggaccttcacatattggatctaaataaatataaaaattggaatttaataatgtgtggtgcggtacggtttgaaccgcatattaacaattcaaaaccgcaaatcgtaccccaccgtgcggtttaagaaaaattcaaatagcgaccgcaccgtaaagaatgtgaagaatatatcatccacattatcttgttaatttaagcatataagaaaaaaaatagttagaggtgcaataaaatattttaaatcttatattctccattataaactactcattgaaaattcataaattatcacatgtatataattattttcttttttaaaaaatgactaaaatatttttctaaaataccaaaacagaaccacaataactattttggggttgtactataaatttattttgtatttttagtgtggaaaataaaatagatctaattagttggaatagttttt

SEQ ID NO: 93709 - DNA, 612 bp, Cannabis sativa
  modified_base (84)..(93): a, c, t, g, unknown or other
accttacctccagctactccacaaatgagcgccatgcaattcttcgcaaccccaagatacaatcagagcccagccttggctctnnnnnnnnnncattacgggaatcccctaagtaacccctcagcgatgagcagacaagccccgtctcattctgctcctgccgcaaacctgaccggaactcctcagagctccaggagcaagaggtcctcaaaaggcagcaaccggacggaagacaagtgcctaaaaagggggtatacccccccaatatacccaatacacagagctgatggacacacaagagcgagtgtctttcgccacaaggaaaaatacacactaccggaagcctcctcccctataaaggaacagttcgcaaagggatcccagcaagaggcgcgaataccacaacgacattggacacagtaccaatgaatgcaagaatttgaaagacgagatcaaaaacttgatccagttgggtcatctatatgagtggattaaaaatcagttgccccatctcaacccggttctggcagggggcccgtggcctcaaggggcaccaaggggtgcacccagagcgctagcacacataataccccacgagggaacgatccctca

SEQ ID NO: 93710 - DNA, 505 bp, Cannabis sativa
actttcattgtttgttggctgatattttacttttagtgtctaattttcctggagtaattatcactcatgttaagaggggtgcgaatattgttgcccatactcttgctaagcatgctctttcggtggatactgttgtctatagttggaggaagttctgcctccactattgtctattgtattttaactctcagttttaatataatagccttttctcaaaaaaaaaaaaattaatttattttggtgtacaatatagtaattaaataatactttttactaggaaatatgatttttcttttttattaaatttgacgtaaggaaagatgagatatatattaatggaaaagatagatcaacacactcagccgtttctttaaatttataggagcattcaattcattaaaaatacaataacatgaaacaagactatttaacaatatagtaagcggccttattaattaccaaatggtttaacaaaagtaatcaaaacattatttaaagaagacaa

SEQ ID NO: 93711 - DNA, 550 bp, Cannabis sativa
gttggattcgagtttggtctaggacttgggtctggtagagttagggtttgagactgggtcagggtcccaaattcgagtcgcctccgatctcaaggctgggtcaagatcctgggtgcagatcccatgtttggggctatagtctgggtccgggtgcaggtttagggtctggccccggaatccgaaatgtagaaaagaatacgtgatgaaatattatttttaaaaataaaaaaaaacaacatttgatgttttgtgattttttttctttcaaaaaattgcttttaaaaagtttggctaaacacccttattagtggatataactaattaactaaaaattacatacattaaacataggaaaatatgtatcgatgcactcttaattgtttcagtattcagataaaaaattttagttcaatttttttcatagttgtgtatgttgtacttgtagttatttaagacattttatagaattttagtaaaatttgaaaaaattaacatgtcaaaaataaggttcaaatagcacacgtgattttttttattttatatgcatgtg

SEQ ID NO: 93712 - DNA, 836 bp, Cannabis sativa
tatttttatttttaaaatttttataataattattatttttaattttttttgttttgaaatttttaaatattttttaattattaataataggtggaacaataaaagtttaccacgtgtatatttatgtacattgtggcagtcgactttggcacttaacagatcaaagtggacagaagaactacagagtaaaatgattgtcgagtccatgaagtatagcccgagtaagagaatttaaccgtaacaaacataaaagtataaagagtttagccacaaattaccaataataataataattataatattgaaatggctgacttcataacttttgagtcttgatgacaaatcttactaagtcgaaagtacaatgctcatagaccctatagctagttaaaactgatatataacatgtatatatatatatatatatattacataaatgtaaagttaatttattaaatgctttttgaaaaataaaaagcatatataggagtagctatattaataaacgcaagtccataatttcaacactcaggtgtcgacaatatttacttaggaaataattaatctagtttggcccacgttgaaaaattaatcacagtactcataatagaatatttaagaagaccagtcaaattaacaattttgaatatatattcggggatagtattgataaggtgtatatcttagcttagagtaagatagttctcctattaatagcaggactagttatacagtataacctttgaatactctattcaagaataacttttaatttgttataaaaaaaataaagtcccaatttgttgagaatcatgggttccatctcaaaaccaatt

SEQ ID NO: 93713 - DNA, 876 bp, Cannabis sativa
taaaggaatattttaataaaatttcataattatgagtgattgagtatcaaaatgtaataggttaaatgcataattaggttaagagatatttttaatttattgatagattaaactagaattaataaaattaataacatgttaggttctcatttaacaataggggtatttggtctacaatcttgcatacaaaactgtttgaatattttatcgatatagttttttcgtgataatctaagaatactccgaaaacaatctcgatgcatttgaatttctaaaataaaagaggtgtcaccaaaatctttcatttcaaaatacttaaaaagaaatctcttagtttcgtgtaataagcatatattaataataataagtaatataccatcgacatataattcaaaaatatgcacttactctcagtatacttgtgatacatacaatcatcaacaacattcatctcaaaaccaaatgagagaatcacatatgaaatttctggtatcattgagaggaagcttacttgagtattttttttatttgcaaactattttctttgggttaccacacagagttttctggttgctctgtataaattgtctcatcaatatcaccattgagaaatgttgttttaacatctatctgatgtaactcaagatcaaagtgaggaacaagtgctattattatcctaaagtagtcttttgatgaagtcggagagaaagtctctttattatcaatgtcttgtttttgagtagacttttgctacaagacgtgccttaaatcgcacctcattactattttcatccttggttttaaatatctatttacaatcaattgcttttacaccttctagtaatgggataacttctcaaactttattgtcttgca

SEQ ID NO: 93714 - DNA, 996 bp, Cannabis sativa
  modified_base (580)..(607): a, c, t, g, unknown or other
aaataacattagaaaaaccatgatagccccaatattaatggttttaatgtttctgcttcatctcactagatttaatggttgttttccggttgttgtggtgttgtggtggtggttctgtctgtggatgtggaagatggagacctcattttttattttcggtgtttacagtataaaagaaagaaaaaagtcccaaaacagtataaaagttatttttgctgtgtgacagtatttttgtaaaattaagtcaaaatccagtatttttgtaagttacccaataataatatgtagccctaataagccgggtcttaatctctgattacattgtaattttattaaatataaatattattgaaaatatattattatgtactttatataagaaaaatatgtattttgttatggtatatttattttctttttgttattaaaagtactttttgtttttaagaataaataagtattttgtggttctaaacaaaagactaattaggatttttactcctaaattttaacatgtactaaatcatacctcctgaatttttctgactgttaaagatttttcttgaactattgagattgnnnnnnnnnnnnnnnnnnnnnnnnnnnnattcaattttactatttcagtgattgtttatatgataaattatactccaaaatctaccaaattatgccccttaaactttgacatgtactaaatcatgacccttgaattttcatccatgttagactttttttttactaaaattggacaaaagtctttaaagtcaacaatctcaatagttcagggggtatttttaacaaccttaaaagttcagggagcataatttagtacatgtcaaagttcgagagacaaaaatcctaattagcccaaaaaataaatataataagtattttgcctttgttaaaaagaaatatatctttataaatattattttgttagaattttaaaattattaaattattttaatcatttaattactaataaaagagata

SEQ ID NO: 93715 - DNA, 625 bp, Cannabis sativa
caatacttctggtagttccttcggataattccctttagcatatttaggtcatttttcatggtgcctttgagtgtcttgttgacttcctcgacctgaccattttattgagggtgtgctattgtagagaaacttcttatgattacatgtgtcacacagaaatctgtaaacatctagctatcaaactttttgccattgtctgaaacaatcttttgcaaaagtccaatcgcatgatatgtttttcaccacaaagtctaatacttttttagatgtgatcgttgctaaaggctcggcctctgcccactttgtaaaataatccattgcaaccactgcatattgtactccacccttacctttgggcaattgtctgatcagatcgattgtccatatggcaaaagaccatggactttgcatctgtattagcttgttgggcggtgcgtgggggatcttgaaaaatctctaggatttgtcacatttcttcacgtaggccttcgaatcttccatcattatcagccagaaatatccttgccttagtattttcttggatagactttgtcttgctgcatggtgaccacaaaattaggcatagcaaaaagatccattcattcggatcgggtcagtgatccga

SEQ ID NO: 93716 - DNA, 877 bp, Cannabis sativa
atgagtgtaggagttggacgaagaatgtacatgttcgggccaaactagaccaagtaggttggggtctaccagtgatgtattttgagactctgttttgccgcttaggtcagctaatggaataggacttgtaatagtattttgtaaatatttttgggatcccgacttttgtaacttttagtttgtaaagtttaaattattacaagtattttcattccatttgttattaaagtttaattttagctctaattttattagtaatcccgtttaggggattaaggtttcttaagtatcttgggtagcatgcctaattatttagggcgttacaatgaccataattccaggttcaccccataaaagtgttaaccgataagcccttgagacaagttttatcaaaaccagatgcttctggaagattgataaaatggtcgattgaattgaggcaattctatataacataccatcttcgaacatccatcaagggccaagctttagctgacttcttgatagaaggtataactccagaacaaattccacctgatcagcgatacacgaaaatctggaaattatatgtggatggtgcatccaacgaatagggttcgggtgcaggagtgatattaatatcgtcagaaggctttaagtttcactatgctttgatgttccaatttgatgcatccaataacgaggctgaatatgaagccttgatcgccgacttaaagacaatagaggcattgaaagtcaaaaatctcatttgtcatagtgattcgcagctgatcgtgaactaggtccatggggaatacaaggccaaaggcttaaaaatggcgaagtatttagagaaagttcagaagaacttggaaagattcgattactttaaaattga

SEQ ID NO: 93717 - DNA, 651 bp, Cannabis sativa
acggcatagggtacacgtgaaatttgacacgtgtatcctatgccgtcggttattgaataagaaccgacgctatagggttatataaataaccctatgcttcgtcttcttccttcttcctcacgaacaaacctagaccagcccaccagccaccagaaaaccctccccccttcgccaaccaccacctcctccagccaagttctcccctattttttcaccatttgagcccattttattttaaaatcttctattttcgatacttaattccatgcaccgaaaaaagttttgattttttccctatttaagtgtcatccgaacccattagaaaataatggtgggtataactctggctaccgatatttgtttagaaaacgttgagtgtcaacatccattaaggtataaatatagtttctgttcatttttataatgtacattgttttatttttagtttttgtaaattttttttttttttggattttttcatattagtaacattgttgtgttgtatgtgcatagcgcctggattttttcgcggaatcggttgttggattgtgcttataagataaaaatttaaacctcaatatatagtatatatatgtatttttgtattttattgaatatgtgtttatatattgtgtatatattatttatgta

SEQ ID NO: 93718 - DNA, 748 bp, Cannabis sativa
tctctggttcgttgaccaacgagggtcctgtctcgtggtcttctcactccaagttcaggttgattttgagcattcgtcccctgtgccactctggtcgaggctacatcacgttctaactcagtgttttgacgctacgcctcttccagacgatgtctcaggtggcagttttctgtttcataagctccttcacccacagattgggcacctccacgattgagttcttcatccctcgtcctgaggttcaaaccattcccacgctgagttgttgtccgcgtactaggaccaacatcgggtcgagttctacgggaacgtgtggtccgtgctcttaggccatcctcaggttgagccctcttggaacaggttgtccttttagactgggggttagtaaatcttctggagcccatgggctctttcccaaaacgaagattggtttccttatgtggggtgttatcctttttttggattttcagccatgaaggaggtggtttttcttcaaaagaagggagggttttctctgagctttttcacagaggctctcaatgaaagcaccaaacttttaacgcagatttttgttaactaaatttgagcctcacagtagaaatttcaaagaaaaaaataaaaactatagaaataaaaatatgaacacagggttttttacgtgattatgcagttaaaattcggcatagtccacaagtcaatcttacttagatttttaactatttttaggaactctctcgtatgatttttt

SEQ ID NO: 93719 - DNA, 1079 bp, Cannabis sativa
tcccatgggttcgacctcgttcttcacaatctccatactacaataaagattcgtgcgcttgcgagttgataaatgtaaaacgtaccattttggtatacaacaaccaacgggcaaagggtggactttgtatgttgacgaggcatccaatagtgaaggatcaagtggtagaataatcctcatacgtcccaacaaattcaaggtacacgtggccctaagatttgaatttcctgcatctaacaacgaagccgagtatgaggctttaattgcaggattaaagctcgctctcgaaatgaaagtcgaataccttcaagcatttagcgactcacaaatcgtaatttgccaagttaatggagaatatctggccagaggaggatgtttggccaaatatctttcctacacttgtgagttattacaaaaattcaaaaagataattattagtagaatacctcgtgcttacaattctcatgcagatgctttggcctgactagcctcaatgagagaagcagaattactcgacgtaattcatgttgatgttttaacccatccaactattcatcgagatgagatgatggaagatgatacagcaaaaaggtcacctggatgaccataattattgactacttgaaaataggagcactccctggcgataagactaaagccaaaaaactacgatatcgagtcgcttgatatgtcacttatgaagacaagctctatcacaaaagttttagttaatcgttgcttaaatgcatcgatgggaatgaatgcttttacatacttcgagaagtacacggtggaatatgcggtaaccatgcctgtggcaattcccttatgaggcaaggatattactggccaacattgcgggcaaatgaaactagcttcgccaaaagatgcgacaagtgtcagcgaataacgacttatgtaaataggccaccaagccaattgaattctatcactagtccttggccatttgcggtttggggtatagacttaattggtgaactgccaaaaggaaaaggaggagtaaaatatattgtagttgtcgtggactactacacgaaatgggctgaagccaagcctct

SEQ ID NO: 93720 - DNA, 521 bp, Cannabis sativa
  modified_base (50)..(59): a, c, t, g, unknown or other
cattccaatgtaacaagagaaaaactttaatgatttttttatcaattttnnnnnnnnnnttaaattttatttcattccattcctatttctattcccattcttcctattccgatatttttattcctgtcaaccaaacgtcacctaaatttataattccactactaaaaaaactatttttaatgataattttttactgagaatataatttttttattaaatataatttctaatcacaataaaaaagttacttaggactaaaatatagtatttagatacaagttatcactaatttaattttaatcacaataagtattgtaactaaaaacgcatttagtcacaacaaattaattgtgattattatttagaattaataactttattagtcatagaccttttaatcaaaatacagtaatggtaatttataattagttacacttttttaacttttaatcacaaattttattataattaaaagtaaattttttatagtgttcgttctcccagcaaaatctcaaacatgt

SEQ ID NO: 93721 - DNA, 644 bp, Cannabis sativa
ttttctctgagaatggtttgaatgacaagaatccattgagttatagttttataaatttccttgttagtcaattatacacgcgcgattgaaatgattcaattctgtggataatggaggagcatggggcgtgatggaacgattttgcaggtttcatgtttgcaattctggtattgtttttttttaaaaaataaattctcggtagagttgatgacgtggagcgttaataaaaggctattaaattaattaacggtaatattaataataaattgtattttatgtatataaatgaaaattttccttatatttatagcatcatataagtgtaataacaattttttttataatttatattataattacagtagataatctataaattttctaaatattttaaattagtgttgaaattaaaattataatattttgtacacacgtgtgtttgtgtataaaaaggcagtaacataatattttgcactatattactaatgacgtcataaattattttaaaatttttgtacgtgctacttactttttttttttaattacaatatacataattatataaaaaaataaattatatttatttaggtgtaaaaaaaaaacacacgaattcaattcaacacccccaaaactttgaagtaaaa

SEQ ID NO: 93722 - DNA, 627 bp, Cannabis sativa
cagtgcgatcccgtaaaaatatccgactcttattgaccgtcatctatgttaaaatatcgagatggttaattttattgtcttatttttaaaaaataaaaatgaatgtattatgaaaatattatttaataattattatttataaattttactattctattttaaaaattaaacatattacatagatttatttatttaatttataaagaatattttatttaattaattaaaatattcatttattaatttgctaaattattttctatttcaatttctaattttaaatttttttatcattattatttttttacaatataaacgttactactctattgtaaaaaaaattagtttagcttaatttcttattatattatttttatctaaatttcggcagcataacagcttaaaaatcataaactcaaaattttaaaatctacaaaaaaataagcaatcattgcagaacaatatgtgcacaacaaaaaaaataatccacccatccgacccagtacatttaatcacataacctacttcactacggatgaatatttaagatattcaaactcttctatatcatgatgtacatatataagtgctatgtattttctgatataagaaatgtaaaaataatta

SEQ ID NO: 93723 - DNA, 657 bp, Cannabis sativa
tcttggtttgttaagagaaactcatattttgattctattgactaatcagactaatccttatctgtcagggatagttgaagatgtttttgtgcaggctaatagacttgtcattctaggtgatttttacataattgagatggaagatgagggtgatcccaatcctacatcaactttatttgggagacccttcttactcactactaagaagttgtatatgaaagtatggatacctacaatggaatttaatggtgtagtaattaattataatgtgttatattccattgataaatacataaagaatgagtctttgttaaaagacccaacatgaagaatgagcacaacatacagtcgagctaacgacgctaaacaaagcaaacttacaagagtttttcttaccattttctttaaattttgcattaattttatttaattgagccttgaggacaatgctcgtattaagtgtaggggaagagattaattgtcgtgtctatccagtttttttctttagttatttagttgtttatttacttatttttatcattttttcagtttatattaatttttttggttttaatattagtgagtgtgggttgaatgaaattttgttgacaatgattgcttgtgtttgatatgtatttttactttgatgtcttatgc

SEQ ID NO: 93724 - DNA, 569 bp, Cannabis sativa
tattttattagttgcggaaaatctcggtcaacacttgtaataataataataatcttaattattagacacctataatgtctaacataacatcgttacaaagtgtttatatgaatagtacatcactttttcataatagttaaactctctttttggtccatcaaaattagattagataagttttttcaatttattttgtgttagacatggagctttgactcttgcgagatccacatcgatagtgaaaaagatgagagaacgagtgagatcgcgaggatagactttgggattcaggattctaggatctcgattctatagtttgtactttcgaccatcgatgaccatggacaaccatcgtggccttggctgtggttgtgccgagaggaacgataaatacaaagatgaagagagtctaagcgagagtgagagggatgaaaccctcaggttttggtttccaagtgctgcgaggaccttgatgtcgtctgtttagactactgtcgctcaaggaaatggccattgtggtctggcaacagtgccgcacaagatgaaacagtgagagagagagagagaga

SEQ ID NO: 93725 - DNA, 573 bp, Cannabis sativa
cttgttgtacaatatcataggacgaatgaagattccaagaccccacaaaagtatggtagctgattgaaaaaactgcaaagaaacaaaaaaataaataataataataattgaagttgttaatttttgaagtctatccatatataaatttgtaagatataaatatattagcaaaattgtataatacactcccttaaaaaagatatatccatacactcttatatattttggtatctaaaaaaaatacttactttaattttttttatagtcgtatacattatagttatttgagacatctaataaaattttaagaaattcagaaaaatttatcacgtcgaaaacagtatttaaagagtttgttgcacgtgtgacttttttattttatacacgtatgaaatagacaatttaaacattgatttatatattgtaaattattctaaatttctcaaaattttgcagaatgtcttaaataactataacgtgcatgactataaaaaagtttagactaaaagttttttatagataacgaaatagttaggagttgcatcaatacactcattttaataaggtgtattg

SEQ ID NO: 93726 - DNA, 555 bp, Cannabis sativa
gtgtggttttattgtgtggcccattagtttcttgggttggaacttggaaggtttagattgggaagctttggtttgggaatgcagaagcagggtatggctgcagttgtccataatatttggattaataggaatctttgtgtttttgaggacaagtcttactcagttagacatgaaaatgatttgatttatcatgatattaaggttaaatttggttgtatgggtaagaggaagttggccacaagagaccaataacaaatgtggtgaataacttgtaatgtttttcctctctagtttgtaaattcggtagtttttctttaaagctgcactttttttgtagtgaaatttatagccgaattgctgactatgtcgcttttttaaaaaaattatttagcaacgttactcaaaatgcgcattacagattatcaaccatgaagttcccagaatagaacaaccactatacttaattagtttgatattgtgagtgtccgtgtttttacgtttattggtttcactagaaatttcctacatgtacaaacatttgctgaacgtaaaaat

SEQ ID NO: 93727 - DNA, 647 bp, Cannabis sativa
aaactaagaagaagctcagatgaccactattggaggttattatgcaatggtagctccatcggctgcgcataaaacatagtatctgagaggttaaaatttggcagctcaatagttatccggagcagctggaccttccgacatacaattccaagccccaatgctactgaagacttttttttaatatggagtgcctaaaaattctagtgtcactcctacagtgtattgccatatcctactgcatccactactcctgccataggtgtaacaaccaataagaaatcgtcctagagtaaaagatcaagcaaaggtattattcacactggtagtaagaaagggagaaaggaacccatatacaaacctcagtatacccagtacactaaatggattgacacacaaaggaatatcttcctagccacccaccaagttgtgcattatacgaagcgaccaccgatgttcaaagattgttccaagagagataccaacaagagattttagtatctcaataatattggacaagataccaataaatgtagtttattgaaggacaaaattgaaatttcatcaggtaataccatctccatgagtgggtcaaggctcgactggcccaaaggagcaactttcggaacacatgccctgatgggatatct

SEQ ID NO: 93728 - DNA, 1343 bp, Cannabis sativa
ccagagactttatccccagaaagaataaacatagtcgttttaatttcatcagcaatgaaaggctccgcaaggaaggcgtattgagcaggagaaagatgagcagtaacaccttggagaatagaagtgatggcagagttattggtgtgctgagagtggaaaagattcgagtaaaaagtaaggaattgagagaagatggtgtgagaatcatgggtgacagagccatcaggaagagttaagccacagatataattgtttcgttttcttatggaggctttttgatgaaaaatttggttttttatccccagcacggagccagtcaactctagcccgctgcttccaataaatttcctctttgtgaagcagcctgttgagctccgattgaagatgggacgcttgttgtaaggtatgagaagtgggttgtacaaagttcaacaaatggtcaagatcatcttgcgttctagtaatttggagcttaagaggctgctacgaatttttccaatccttaatgtctgagagacaaagggattgcttggtaaggaagctttgtaggggagaggatgaggaagatataagaaggcgccaggaagcgagaaccgtgtcagagaaagaaggatcattgagcaaaaagttttctatgtgaaaccatgagtgctttcgagtgttgggagaattgtcatccaattaaactttcaggactctatgatcagagccataaaagcccagatgtgagagagaagcttggggaagaaggttctgccaaagaacattaacagtacaccagtcaaggtgctccaaaatgagcccatgacgccaagtgtacttattcccagagtgatggaggggaatgagacgtcgacgatgcaaaaaatcatgaaaatggtgcatagcatgagaaggtggaatagttgttgagtttctatcattaacatacaaataatcattaaaatcacctataactaaccaaggtaagagaggagcagtgtcatataatctattaagaagagtccaagtaataggtttataatcaggataaggagaaccataatacgcagtaaaatgccagttcatatcattaaaattatttataatacagtccacatgattaagggaataagagacaacagtaacatcaatatagctgttccaaaaaagtaaaagacctccccctaaaccttgcctagggacctctaaaacattatcaaaatggagtttatgcttcaaagaaatttcacgacctacttgaaatttggtctccatcacaaaaaacaacatgggctgatgttgcctgaccagcagggagaggttatggaatgctcgaagactccctaaacctcgagcgttcc

SEQ ID NO: 93729 - DNA, 676 bp, Cannabis sativa
gcttcaagggattgaggtttcactagagattatgttgaggcgatggtgatggtgtttcagcaggagaagtcaaatgattgtgttgtggttactgaggttggggttgggattttctgggttggggtttttgtaatcgtagagcttgtttgtcgttttcttgtaggtttggactactatgtgtgtggggggatgacgattgggtgggtgaaggtcgagggtaggtggccgggtgaggaagacgagagaagaaactagaaaaaaaagaaaataaaagaaataatattttaaatttctaataatgtttttttaaaattatttataatttaaattatgatttagaccaatagtatttcaacatgtggtatttttttaaataaatagacggatcaattaagttagggactaacagacttacaaaaatcataaccttagagatcattactgttaatttttaaaattgaggacttatttgcatcaaatataagttttgggggacttatgctgcaattttctaactattactaaaaaaattatataatgctcacaaaaatgtcaatggagcccaaatgtatttacatcgagataaattgaaaactatctctttttattatatattaagtaaatataatttcaaaataattttaattgataaataccctcttttataattaaagta

SEQ ID NO: 93730 - DNA, 535 bp, Cannabis sativa
aaaactcaaatccaatctctctctcttttctctgcacctctctctctatctctcgatctttttctctctcaaactctcaatctcatctgaatagagctttgaatctcttgtatccagtctatcgtaaaatgataagtgaaggtggtatttataggcctaggatcaagatcttaaaattagtggttgcaagaaaataaggttgttaagttagttaaaaatagctaacttaaccaactcctctttgagcgaagtccccacttcaggttaagtattagagccttcaagaacaaatacgagctcctggacttaaggactaaggacactttctgaaaggctttcggataggatagagccagctggagtcatctatcattctaggagggataactagctaactggaactcctttctaggggagagctaactatcttgaagactaatcttggagtagacatgatagttaccgagaacatcctttgttaaatattcttctcatacttttttttttaatttcaaatataataataataataata

SEQ ID NO: 93731 - DNA, 2208 bp, Cannabis sativa
  modified_base (157)..(157): a, c, t, g, unknown or other
atgctttgatgcctcttagacctctgggagcataggggacttcgtatgccttctccgggaggcaggtcccggatgctgccttccttcataaagacttagcaatcaattcaaatattaagatcttttggtcaacgtgtccctgtctggttggtccacntatattgggcaaaatcagggacaacagttagtaaccagttactcataaatgatataactagtaagttgttaaataattaaaattttaatttttgtagtatttcattatattgtaggttgtgagataattgtaaagttctagattatttagtgttgatcgcgttttagctaactacatgtatacattcagtaacttctgatattaattaattatcaatgcttataagagtttaaatattttaaattttcatatgtagtgaagtaggttttgtgaaatattatactacgatcgaatgggtgacatatgcatgttagatgagtttgaacatcttaaatatacatcagtaaagtaagtcttctgaatacatgtactgcggtcggatgggtggataatttttatattgttaatgttattgtgattatttatattattttagattgtgttttgttgttattgataactttgaatattttgggaacgtgtaattttagtcgttatgctgttgaaatgttagtagaactaggactagttactacttagtaatttagtatactataattagttactagttaataatttaagaaaagatcagttacaatgtttaaaataacgcaaataaaccttgagacgtaagcctcaaaaattatattgaaataaattttaaaacacctaaggatgaataaaatgtcacatacattttaaacataccataaaatatctcataaaaatagcatatcatgaacacacttgacttataaaactcgaactaaaacattaatgataaatacaatgatgattagaaattatttaagtcatcatctcttgacgaattatagtgtaaattcctcttatcattctcactctcgtttccaccatcaatatcctcacattcatcagtatttagtataatatataaatggtgactagttttgagaaattagttagttacaacttatataactagtaactagttactagttagtaatatgaaagaaacacttatctcaattgttactatttttcaaaatgtagggggttatacatctcaattaataaagacataaaaatatctacaatttgagattgagtcactagttagtaatttagtacttaacattgagatttttttgttatgatttttattatggataaattatggatgcgtgaaaagagagacacactgtaatttcaagtaggattcgagacatttatatagtttgtcctaaagaattctagaaatcccgaatatattcactgtccatgagtagattgttgtaattaattaaaagaaaatattacaatgattaaggatcatgtgtatttaagaggtttcaataaaagttattttacatgatattggcatggcaaatatttaactgataatctatatatattagggaagtggcgggtagatgatattgacggttattattttgatgatcattcaatggacatgcttgatgaagaatatgaggaatttcttgatgatcctaaaagattcgataatttgctaagtgatgtagataaaccctagttcgatgaaattaagattaccaacaatagtaaaattttacaacattaaacagaaaatagagtgatgtagataaacccttgccatttgacaattactttttgaaatctacatatgaagtgaagaaaattttaatttcatatgattgaagtatgaaaagatccattcatgtccgaataattgtattttataccataaggaatatgtagacatgaataattgtctaacttgtggtttatccagcgataaaataaataagagttaggagaatcggaaacttatcccttaaaaagtattgtggtacaagcttttaattttatgtcctaaatgattatattgtagtgcacaacattctaaaaatttaatttggcatgagactaagagactgaaagatggaaaactaaacatcatgcagattcacaagcttggaaaaatccaaaattttaatatgaaccaagatatctccatctcggtttattttttggtggagtaaaccacatagatctctaagtagtcgtca

SEQ ID NO: 93732 - DNA, 611 bp, Cannabis sativa
tttattttttaaaaaaaaagtgagtgagcatattttgaatataaatatagataaatatgtaggtaggtcagataattctatagtaaatatatatttgagaacatctgttaatttttagaaaattacaaatagtttatggtaccgtaaataaggtaaaacattttgttgtttgtatggttttttttttttttatatatatatgtgataagtagttgttccaaatttattttcgatattgttgaaatttttgaaactttactaatagtccaaaaaaattataatgtttgtaattgtaaaaataaaaaaattttatggatgtcgaaacaaatagagggtgtaccaaaataattttttaaaggagggtattatacatatttttgactttatttacaccaataatgatatagagtgttggataccttaaatgctatttaaagttttctcatttatcttttgcatatagtcttatgtatttttttttatgtaaattattgtttttttgagaggatttatgtaaattatattactataattaaattagaaggaaaaaaaaaaggctttctagcaaactaacactaattatgggcgagtaggtcttatttccgaagtaa

SEQ ID NO: 93733 - DNA, 561 bp, Cannabis sativa
aaatacattttctttaattatgaaatcatgtatatttacattttagagagtgtacatgtaacaactttttcttacaaagaaatttaatgacaaattagtcctcttaagttttataagtttaacctattaattttttttttttatagattttaatcataataaaatagcatttatttaattattaaaatcttatttttgtcttaaggcttggtagcttaagtgtaatacaattcaattgatttaggacttactacatttcaaaccttaaatcctttcaaacattttatcatttattaattaagaagtcaaaacaaaaaatattattactgtctagcatctttcttaataccatactattaaaagaataaattttaaaaaatatcactaactaattataagtaataaataagggataattacatgagatactattttttgtaaaaagaattaaatttttacgcttaccgattttttttacatttttacggttttccataaaaacaacacaaaaacaatatgaaaactacataaaagtaacatgaaagtaacatctaaataaca

SEQ ID NO: 93734 - DNA, 1446 bp, Cannabis sativa
tgtgtttaattttataatcgttttgtaagtttttctaaaacctaaaaggcgtgtgaagctccctgtttcctctcatggcgaagaagaacgggtggtttcgaagcccaccaaaatcgtagcagtttctgagaaggacgagatcgactcaacggagaaggatgaacctgacctcccttcgatccaaaccgaagtggaagagcaacctgcacctgaaatttttcttgactcctgtgagaatctggaagccgatttagtggatgagagtccgattaagaagatagatggattgaagccagtaagctgggcagaggaagctgagaatgatcattttcatgccaaagcaagggatatctggagtaaatttaaatcgaatcaggttcgtacaccttctactcgtcttgaatttactgaacctatgaaagtaggggatcaaattgatgcaaaattggatttggaggaggtcaaaactgaggcctcgtattggaaaaactcgataatttgtattgtgctaggggctaaccctccgttcagggtttttgaagggtttataaagagagttttggggaatttgggaatcgagaggattgctagaatgaattcaggattcattttagttactttcagagatgaagagacaggggatctaatattggaaataggggtcattcattttgataaaaagcctgtaattctaagaccctagactactgatatggatgcagcaaagatggtgaaatcagttcttgtatgggtgagattgaattgtcttgggttgcaatattgggggaaaaatacattgagtgctcttgtgagtactataggcaaaccaataatggtttataaggtcacattgagtagaactatgattaaatatgctagagttttggttgatatttagatctctgattgtccaccaaaaactatagcctatattaacgaaagaaagcagttagcgaaacagacgattgagtacgaatggcttccatctaaatgtggggcgtgtgatctcttaagacatattatagctaactgtaataaagagaaggggccagtggtttggaggaaaaaaggggtgatagatcagaaatataaggcaaaggatgctatgaatgatatccccaatactgagattacaaaaccaacagcagtaaacccgaagcagaacatgagcaaagagggaatgagaagcaggttagagattcagttgaaactgaagattcaagctagattactcctaggaagagaagctccaaacaggctgttacacctggtttagaagcttcaatgaaaaatggttatgaggttctatccaaagctagggatgaagacttgggcatgaattccaatgaaattccatggaagtctggaacataatgggatggaatgtcaggggaatgaataagagggataagcagagatcaatgttggaagtgtgtagagaaaata

SEQ ID NO: 93735 - DNA, 603 bp, Cannabis sativa
ttagggcacaaaaccaaacactagtgtgtggtaactgaggtaataacttgcctaaagtttgagcaccagggtgcccgagcttgcactgccaagagtttacatctttgcaaagagagatgaatgaaaaacagtgggagtgcaaatatgcatattattggaaaagatagatttttattacttgtaaaatcgtttcaagaactgatattatgatcagtaggaaaattacaagagttattagtcatatcagatgacatataggcaaggttgcattacaaggctggttttgaggttgaagaaccttctcaaagtaagtaaagaccctctttaagcctccctctcagcagaacttggccagtggtcttgtccttgaaaaaacaagaatttttatggaattcaagaaaaacattattgtcattagtcaattgagaaacacttatcaaattctttttaatagaagggactgtaagaaccgaatttagatttggatatgtatgagaggaagagggtaaggaggtagagcctatgtgagagatagtcaatttcttaccattacctacagccaatgtgtcatttccattatagactatagcagtgtcaaggttg

SEQ ID NO: 93736 - DNA, 568 bp, Cannabis sativa
aaattcctatacattttaatgtggtataccaaaagaccatgcacaatttttaagcatgaattgtcaaatttctcttttaaaaagagtaaatagtggtcaaacccttagaactttacttactctaacaactaacctttgttctttttatttaaggtgaaacctctcaaatcacacttttgttaacaattaatttttttatccattagcttttgttaactattgtccatgtatacacaatgtatatattgcacaattatattgatctatctaatattattattttaaaaacataaaaaaataattttaaaaataaataaataaatttttaaataatatttttttaaaaaaatacacgcacaatatataatataattgtgtcacgtaaacatccaacttggcacataaacagtagaagtttgatgaaaaagtaaaattgctaatagaagtgtagtttgggaggttcgctcgtaaaagaataaatgaataaattgagggttagttgcaagagattgtaaaattcagggggtttgactactaattcctcttttaaaaatgttatatttttgta

SEQ ID NO: 93737 - DNA, 582 bp, Cannabis sativa
taaaccaaatggcatgactttattacaataaaatctcatgtttgttacaaaacttgtatgttccctgtcaggaatatgcattttaatttggttatatccataatatgcatccataaaagtaatcagctcgtgtcctgctgttgcatccactaactggtcaatcctgggtagtgggaaacaatctttaggacatgctttattcaagtttgaaaactcaatacaagtccttcaagtgtcgtttggttttgggataagaattgggtttgaaatccacatgggataaaaggcctcacgtataaagtcattagtcaacaatttatcaacctcttctttaagtgccccttgtctctcggaatctaacgaccgtcatttttatctttttgctaggtagctggggtcgatgtttaaatgatgacaaatgatattagggtttatccctatcatatctgagttgctccaggaaaagtgatcctggtttgcctttaaaaaatcaattaattgctattttagtttttcatccaaattcttcccaatgtatacacattttgcgggattatatggatctaaaataacctcttccag

SEQ ID NO: 93738 - DNA, 503 bp, Cannabis sativa
aggtactaattaggggtgacaatttgtgttcgcggtttgtgtcgagactcatgtataacatgtacatgctcgacccgaacacgactcgtttaataatcgtgtcaaaaaataaaacctgaagacgacccatttataaacgaattgacacgacaagacatgtgtaacccgtttataagcatattttgtttaaacatgtcaatcaataacacgtctacgaagtattcaacacgtttataacccatctatgacatattaaagtactaaaataacttcaaataagttattaacaggtcaattttgtgttagccgtgtcaaaccgaacacgaccagtttattaaacaaattagacgagtcaacctgaatccatttaaggcaaatccaaacccgctaactctcgtgcggatttcaagtcgtgtaatcgtgtctgaccagcttagccagctctaatactaataatatctaaaaccatatatgatatcatattattattgaagtaaatatca

SEQ ID NO: 93739 - DNA, 1466 bp, Cannabis sativa
ttcctcatgtaattttcaaaatccaataagtgattttctttcaaaggctgatctcagacaatgttcttgtgggttttgaattgatccatagtctgaaacatcgaacaagaggtcgaagggggtatgttgcattaaagttagacatgagtaaggccttcgatcgggttgaatggtcattcatagctgctgttatggagaaaataagttttaatatattcgatggatctctctgattttgaccttattgagctctaatcattttttattccttgtaaatggtgttgtttctgattcagtcacacctcaacgaagtttatgtcaaagagatcctctttctccttatttattcctcatttttttagaagggttctcgacattattacaatatgaggaaaatattagaagactcaaagggatggttatttcttgtcgatctcctataatttctcatttgctctttgcagacgatagtctcttaaagcgtgcattggatattacagagcctctggtcaacaaatcaacacgaataaattagttatggctttctcaccaaatacatttgaggttgtgaaactttctttccaagagattttggaaatgccaatttatgagtgctataataaatatcttggtcttgccgcttattcagagtgtgataagaagtaattatttaataatattaaagaaaaaatttggaagcttatgcatgtttagactgataaacttttttcaattggaggaaataaagatttattgaaagcagatgtacaatctattcatatctatgcaatgagttgtttcaaattttcattgacttttgtggatagattgagtcaatggtggaaaaatttggtggggtacttctaatgacaagagaaaaatacattaacaaaatggaaactagcatgagttttcaagattccattcactttaatcaagctctgttagctaaacaagcctggtgtattttttagaatctacaatctcttttaagtaggcttttaaagggtaggtatttctctaccaataatttttttgaggctgaaagtggtggtatgtcttctttgacttcgcaaggaatatgtcggggccatgacttattgatcaaaggcttgaggtgaaaatttggtgatggctctaatattgtttgtggatcagatcctcggattcctagaaaatccgtcttcctctccctttgcgatactcgaaagcagctttaaagagagtttgtgaatatatgtctactaatggtgagtgggatttaaataagttgtagcaggatttcttccgtactgatatcgaatacatcctctcccttcctctctctgttcataatgcaaaggatgagcggatttggcaccttacatgtggtgattattgtgacagtcagtagtcccgtgatccgtaagggaaaataccaggtaagctgtgcaatcccacaccgcctggggaaggtcaagtgggat

SEQ ID NO: 93740 - DNA, 1374 bp, Cannabis sativa
aaatattaattctcatattcctaaacgctaataaattatcaatgcatattgaataagttttaatttttggcggttttaatatgagatcatgagaattaaatttgacttaactaatgtttactatgtatgttagattattagattttaaattatgtcttctttatttgtatatatagatatatatatatatatttatatatatagtgatgaaatcaacttaaatggtagctaaaatagattggatatatccaattcaatctaatagaaaaccagtcaatacatccaatggttggaaccgatccaatccaatacatctattggataagatgacttaattcgattagattagatcgggtgataaaattcaacatctaataaataattcgattggattggattggatgataaaattcaacaaccaataaataatttgattggatcggttgggtccaaatccattggatgtgatccaatgaacacccctaattataaacattaaaaatagtctttacttacctcaatttgtttataagtcaccgctaagtgcaaaattctcataccataatcatctttggcatttacaaattggtaatcaccatccatagcactcaccaaaagctttaaagcttccaactgattatgcctcacacaaacatgcaaaatggtctcatttcgatccttcaaattgattcgacctgtctcgggagccactttgagtagctctctcaacacatcaagtcgtcctctcatagctgcaaggtgcatagggtttcttccctctccatcccaagcaaagcacaagttttcgcgatcatcaaccaacataagtagtactttgacggtctcaaggtgaccttttgccactgctaagtgcaatggcgtggagtgccatgcgtcaatctccttcgcaagctcaggcttgtaagtgatgatttctctgacgaaatctgcatggccgagcatagccgccacatgaagaggagtctccgtaaaaccattattgttgataacaatgagtcgatcgagaatcaatttatcttgtttaagaagttgccttaaagtggtcacattcccttcttgggcagcttcataaagcatactaaacactttctccatggttttgattataaaaactatatgttgaagaaagttgtaatttacttgatgaaatgttagttctcaccaaatctttactactatatatacataaatttcagttaatatttgtcaatctaatacatagtataatttcggtccccccactacttctgaaaaagctaaagctgtcaatgaaaacgactttgtattggttgatagcaatgattttgtaggaaataactatatatatttatttaatttagagggttgagaagt

SEQ ID NO: 93741 - DNA, 528 bp, Cannabis sativa
aaaaatttatgttgtcactaaaaataattatttttagtagtgtaatttaatataaaaaacctaaccaattcaaaataatcgtttcaatttgcacttttgtggatacatatgtacgtactttccaatgtaataatgtctttactctttccaattatatatatgtactactaattagttcttgcatgatttatatagatagtgtaattaaaataaataattcatttaatatttaaaatttttaaatatattgaacatttacattgaactaagttgaatgataagtatattatgaatatgtattatttagtattttatgtatgattatataaataatataattgaagtaaataatatttctatatctaaaatttttaaatacattgaacattataattttaaaaactaaattaattaacataagatagataaaattttgaaagtattaaattaattaaaatcttaaattaaatataataaagaaaaaaaaattattacttctaaaaaattgaactcatgacgttttaatta

SEQ ID NO: 93742 - DNA, 1090 bp, Cannabis sativa
tagattaatgccatttacttaaagggtcaaaacacatggaacattgctatcaaacaagatatgagctggtattttaagaaactcttaaagctgtgcaataacatgaatgagatcatcttgtttcaagctgaaaaaggaggaagattcaaagcaaaatatttctacacctccttgatcaaggatgaaaaggtcgagtattgctcaaacgtttggaacaagcttgtcatcccaaaggacaggtacacgtactggaaagctataaacaatatgcttttaacaagaaaccacttgatcagatttatctgcatttcttcatctctttgtctagtttgcgagattgaagaggaatctcatgatcatcttttcatggagtgtatcttcactaagaatgttgttgaagatatttactcttggctggcatttgtgaattggccagagactagacttgatctaattgattggtgctcaaaaccatctctggggctgaaggaaaaagtggtaaacaccgttattgcctcgacaatttatatgatttggaagaatcataatagatgtgtatttgatagttgttgttgcttggtcaatgtggttagtaaggagattaaatttcttgttaagtggcgtattttgggggtaattaccaatgtaaaaaaggatgataattatataatttgtgttgtagaaagttggtagcttgtggggtgttttgttggcgttggccttgtttgtattgtttcctcagtttgaataaaaaatttccttttgttcaaaaaaaattattatatataagaagaaatgacataaataaaactttaaaattaattttttttttaaaaaaattgacacactaaaataaaaaaaaatgatttgactgcaattttttaaaattttttataaagaaatattaaaataattttagtgaaacaataaattaataaaccaatttattctatataattcaaaattagttttttaacgaaaaaatctattacaaacactaaaattcatatataaattttacatgcttattagaatagctccaagacataattatcaacccactgtcaaaactaaaaccaacacaagacca

SEQ ID NO: 93743 - DNA, 663 bp, Cannabis sativa
cattcttcaatctctcattgatgaattttttcttcaaacaacctttaattgaaattggagtcttctccaccttgtcgcattccttcacaccaacataatgccttttgtgacttgactccaccttcacagttctacctaaaactgtctttccgacaaatttattcaaatttcgctcattcatacctttcacaagtaccaagccacatttcttgatagttatttcaccatcttttgcaaaatagtcataaccacgagtatttaaaactcaaagagattaagcccctccttaatgttggaacatgtctcacatcaatcagtgttctcacaataccatcaaacatcttctccttaacagttcttattccaacaatcttagagccagattcattgtctatcaaaacagtacgaccatcatatgccttataagtatcaaaacactccttatacgggtacatgtgtaatgaacaactagaattcaaaatccaagttagaaaatttttcatcaatcatgacagagagaacattagagttacattcataaccttcaccagcaatattggtggaatctgatgtgtatttgcattcttgattcctcattgctttaagatgcttgatcaactctacccaattttgcctaacatgtcctcttttgtgacaatagta

SEQ ID NO: 93744 - DNA, 942 bp, Cannabis sativa
aagcacaagtttctttcaaaaaaatagtaaaaaaaaaaaaaaaatcattattgtaaaaaaaaaaaaaaataagttatcacattctattcttatgtcagcctaacctaacaaagtaatttttatatttccaggcatattcatcatcaaaatattactgtgcagaaccaaacacgttattgttgctttcctaggtttatgattcccttcatcacccaccaaacaattttaaacctattcccatgaaatgaaacctgcataccgaatgaccccttagagcaaacaattctagccttaaatacttgaaggctagcaactataaatacccatcaagagttccaaattataactaacatccaaactatcaataaaacttactacattctatacaatccccttctaagccaaactattctcttctatatacacaaccaactatcaagttatcaccttactaccatcatcatcatcctacattagtcacaaaacatattacaaactctcacctagctaaaacaaatcacaactattttactctatcagctgttttacaaattatcaaatactaccagcataattcacaggcatcacctagatgtacaagttacaactattgcttaaatatataacttaaaaaatagatgtgatctcattttctttttcctttttccaatatgagacgtctttaatatcctttttgccgtgccgacctatagaaacagaaagtcattaagatgcatgtactttagtaaaggtttgaacagggaaattaaaacaacgataagattattatctttcaaaaagtgaaaaggaaacaataatatatcatcatagatatatgggaaagattattaaacgattaacgattaattgcatgaatatatatttatatatatacacttgtaaaaaaaaaatatcatataaaatcaatgccaagtatacgta

SEQ ID NO: 93745 - DNA, 603 bp, Cannabis sativa
atcttgtttgttgttgttatatttaattaagaatgttgtgtttgttgcttaatctgtggattgttgctgttattttgctgttttttcagttaaaatgtttgcagcatgtgaaaactggatttttgctggttttttgcattttttttcgtcgggcccgatgggggcccgatgtaggggaaaaatttgttggcaggggtgaaggtccgattggtccgatgctcctccaagttggtcctatggtcggaccaatcggaccccatcggatccgatgcttttattttttttttttaattttttgaacgtgggtctgatgctcctccatgtgggtccgatggtcggaccaatcggacctgatggctttttttaattttttgaacgtgggtctgatgctccccatgtgggtctgatggtcggaccaatcggaccccatcgcacccgatggctttttctaaattttttttaattttttgaacgtaggtccaatgctcctccatgtgggtccgatgatcgaaccaatcggaccaatcaaacccgatggctttttttaattttttttaatttttttaattaattaattattaattattatttattattttatga

SEQ ID NO: 93746 - DNA, 539 bp, Cannabis sativa
actttatcgatattgaataatctgaattacattgaaatggggttttatttagggcataaaacccaacagtatccggagtggctttatacaactttattccacaagtgtactgtctacttgtcagatggtacatcttgtgcttttagaagaagaaagctgctcctaccccaaaagagatttttagtaggttttatgtcttgaaaagcctgtaaaaatatttctgattttcaataagagctggatattttgatatatgcatgaatgttaaattattaatattttaatattgaataatttatatataaatataaaaaaattccattttcatacataacgctatgactttgttaggttgtttttagtattatttgttaggttgtttaattcacttggacatccatggccgctgtggccatattggatcttgtagccactgacaacggtgagctgaggtggtccatctcatacctaactcgagtattatatatatgtatatattttggtatatatatgtatatacaatttatattatgtgtata

SEQ ID NO: 93747 - DNA, 1161 bp, Cannabis sativa
ggttacgctaaaaactatctaatgacatgtagttagcaaagtatcatgggaagatcatcaaaatattcaacatgtttacggtgtacttcatgcaagacacatctttttaaatggatctatatttattttcatcgaacaactatcattttttttttatttggaaaatattcttaaaaaataagacctatataaaaccttcaaattaaaaatatgtaattatgataatctcactcattttataatattcttgatcattgtcaatatttatattattttacaacaatttccaaaaaatataaatatataattaatataaagaaaaatttcacatttacacaaatgagattgagaaatgtagctccagcacaagtatttggaatgggagattgaaatctaaaaggagaaaaagttgaactcctcactctcagcgacactacaagcaccgttaataattattaatgcctaccaatttgttaatgatgacattatattaaattacatgtctttttttttttgaaattatgtattatatatctgtcaaataaaaaaaattattaaaaaaaataaataataagttagtataaatgatattattttaaaacatttacatttaaataaaaaagtaaaagtttattttatttttttaaaaaaaagaaataaatattaattaattaacataatgtaattgttctttgtttttctttatgtatttgcatttactaaaaaaaaaataccgcactccaaatttttttttttttcaaaaaaattaatttttataaccaacaaaataatgtgaattttttaagaagtattgtgtgttttaaggtggttattgggtattgcctgacaccataatatcgaaaagggacaaaactaaattacacaataaaaaaaatatttataatataaaattactaaattgtccaatacaaaaaaaataaaaaagtaaataaaccggctttagaaagtataggttgtattaatgagtccaaaatgtgtcaaaatatataaagtgaaaaggaaaaatattgtttttattatatgtgacagtgcatcacttcttctgtagtacaagcgggacccaatcctttgcctaaatatcatttaaaatacatatatatatatcataaaatatataaatataataattaaatatatgta

SEQ ID NO: 93748 - DNA, 1815 bp, Cannabis sativa
gtaagcagctggttgaagaaatcttagcaattgacagctccactggtgatattcagctggttgttaatcaaattaagagacaccctcagttttcttactgtacaaagttcaagcatgtaaaaatagcccaaaatgtgggtgctcatagcttagctaagagaagcctagaaacaaaattaactcattctttttacaattcttttccggactggttagccattgtttgtaaggctgacctctcccattctttgtaagtttgttggcgttgtttaataaagtttcttttcaaaaaatatatatataaattgttatattacaaaaagtataataatgaacaataaaataacacatgcattaatattaaaatatctatcaataataaatatatgacaatatgtgcgcatggagctaaggccaagactagggtcaaagtttgaggtcaaatccaaggcaaaagctaaggcgtaggatgaggtccaggcctatgggcagtgccaaaaaaattgttcagcccagcgtccatgacatgtggtcgaagctggagcatgggatagtcaaggcttagttctatggtctatggtctggggttggcaccggggtcaggacctggtatacctaatttcagatctgaaactctcacttcttttttcttctccatcttttctctcaacgaaataaatgccaccaccatttctcttaaagctccattttctccatgcaccattatttttccttatttttattttaaatcatctagttttctaatccataactgatgtacaactataaaaattaattaatttttggatatgagagtagatgtaagagtttaggcagacagttttttagggttttcagagaacaacggtcagcgaatggtagcaatttcgagtctttggaggttgtcttttaacttgcattgatgtattcattactttaatatatatatatatatatctttatatgtatttttacttacattgcatattttttagtgtgtacgatatagggttaggatattgtggtggtggtcaaaaagttcacgactgttgttggaaaatcaataagtcttcacctcaattttcttctgcagcgagaataattttattaattgaagttaaacaagcttaaaaacttaatagaaatccaatttttcaagtagtggaaggaaaaaattctcattgtagtagatattttagctttggcaagaattacttttgatcattggctaaaaactcaagacagtacatctttgtcatcgttttactttggtaatgttgatgatggagctcagctttggactaaactaggtttgaataacaatcaagattaatgttgatgtttctctgtttgatagtgataattattttgggtatgggcttgtggcgagatttgattcaggggcttttattgaagccaaatcaatctgtcatggtggttcttttgatccagaagtaattgaggtattgggtattaaagaggctttaagttttgtcaaaagcaaaggatgaccacacgttgagatagaatctcaaatcttgctctctattcaagctatacacagtcattcttctatgttttctatatttgctatcatagttcaagattgtcaatctttattgctttctttacccaatgttaaagttcattttgttaaacaatcaacaaaccgattagcagatgttattgctaggttttctcgatctttctctgatcataccatttgtgagactaacgctccagctattatgttggatattttgtatttcaaatgctaaatttaatgaagtttctatttcataaaaaaaaaaaaaa

SEQ ID NO: 93749 - DNA, 548 bp, Cannabis sativa
tcatatggtgagttcttgtagtagtaggggctgtgaggttatcaagaatgggaatatggggtgtagccgttgggatagatacattagataaagttgtgttgtcactatcacacaatggtacattgagtaaaggtgggttgtcattatcactcaaaggtaaagttggtatagtcgttgggatagtgacattgggcaaaggtgggttgtcattatcacatactggtacaatgaggatggccgaaggtattaatggaatggtaatgctttgtgtgggtgcatcgggtatagtggggcatgtgtttggtgagggagtaggtaatctgtcaacattggtattagtgtgtagcctaagtaaaggacaagtaggaaagggatgtgtgataggggtgggccaactgtcttgtgttgtggtcaaaggttgcataatacaagggatggggcgtggggtaggtactgtaggtaaggtaagatgggagtgtgatgtatcaataggaggtacactttgttgtctttcatgaacagtggtgtcatgttcctcaataaccgtg

SEQ ID NO: 93750 - DNA, 1193 bp, Cannabis sativa
aatataatttacttggtaccaagtattcttgaatagagattctactgtattactattacaattcctattccattacattactattacacaaaattaaacatcacgaatagcaccacaacatcaaactaggtcgtgaagttcgaactcttaaccaaccaaaaaccgttacttggaaagacacccttatcactacagcacaccatccaatgctgtcatagatattttcatggcccccacctcaccatcccatatgagaccccataaccattgactaaccttaatcggtagctatgtcagtcaagtgaacaatttgaacactcaaaactacaaataatgatttctacaaaggtaaacgatgatcatccatttccagttccaggagcaaccacggtgtgccacgtggtggctttaccatatccaggcagaagccacatcaacgccttaatgacattctgcaaaaccctatcttctcgtctcaatctcaaacacgataatctcaccatcttaatcaccttcgtcttaaccgaagagtggttgggtctgatcgggtcggatcccaaacccgacaacaatatccgattccaaaccttacccaacgtcatcccttccgagcatgttagggcaaatcaattggctgatttttatgaggctgtcgcaaccaaattggaagccccctttgaagagcttcttgttgatttagataatgataaggttcgtcttccaccggttagggttatcgtatcggatagcttattgggttggccagtcgaagtgggtggtcggaggaatattccggtggcttcgttctggccattgtcgggttgtatgttttcggtgctttatcactttgatcggtttaaacaaaacggtcatttcccaatcaaactctctggttagtcttttctttacttttctctattgccacgtcatcactcactattgtctaatttggaagaattatttctctttttagaaaagttattaatattaatttgagtaatttttgttttgtttttaatcattaattgattcctttttagtttgatgattaaacatatttttaattttaaatcatacgtaggcaaacttgtaatagtttaaacgttcacactaatattttaggtgattttacaatgcacccccttaaaatagatgtattgatgcactctctacttgtttcgacatccggaaaa

SEQ ID NO: 93751 - DNA, 1137 bp, Cannabis sativa
ttttttagtctataaatggaacaaatactgtaaaaatgaaatattttcttaattatataaaaaaattaaatataaaaactcaaatttttttaatattacccgcttataaaaaatacttactaaaagtatatatatgtatacatatataatgtttgtctggtctggtaaaaaaatgtataaatttatatatatttatatatataatgaagaataagactgaatatgtttgcatatatatgtacatgctaaatcaacttacctagggtgtatgagaattgtatatatgctaacctatatagcataggaaaattcatataaatagtatatatttgtgtagttttgacaaacaacattatatatgtatggagacataatatatatatggaaactaacattattttggtgttatatatatatatatataattggacgtggcatatatataataatactttattattattattattatctttatttaattgtttccgaataatttctcaaatatttgtttacgtataccaattgtgtacgtacgtatatgttttatcatgaataatagtacgtagttgacgtaaaatataattcgtaaaatgcacaaatcacatttatatgaaacaattaataaggaaacaatcaaatatattattaaacattaatccaaattaggtaaggtataatatttagggtcgtcattataaacttctagagcatgtgaacatatttattaattatataattagttcttaaaatatatatatgttggttggttggtttggtgaatacatttatggaatccttcaaagtcattcctatgatcctatgatccatacatttatggagacctcaccttaggtcatagattttaggtcataactgatggaagcttgaactatgtaattcataataacattcaattcatagatagcggagtaacctgtttacggctgcgctctgcagttgttatatatttcttttctcaaaagagataatgtcatgcttgtgttggtcctgttcacctttgcaacaccacgagagtttaaatgatgcatgtttcataaaaaaaatgtggttttaatggtgtactttggagagaatagtgatgttgggtcttatatattgttgtattaattttta

SEQ ID NO: 93752 - DNA, 806 bp, Cannabis sativa
  modified_base (449)..(459): a, c, t, g, unknown or other
aagggtagaacagtaaatttgtctctactcgatgtagatcatctatagaggatctttgattatttagatcaaaataatgaataacttatagtctctattattggtgaatagagcattctatataatcaggagtgcaattttgaatctatagtggagtctggaggagttaataagttagaaaatttacttggtaaattttggatctacttattggaagcttggttacataggcctatggtcctctcactaactgagatactattgttttgtagtctcaattaattaatttatttaatcaattacgattctaaataaagattatgttttgtttatgaattttgactaagtaatggcttatttgagaagaaaagagattttagaatttgtttattaattaagagattttgtaaagtctaatcaatatataagttaaatggtaattttatttnnnnnnnnnnnataattattaaatagatagaatttacatttatagagttagaattaaattatggtatttgtgaagaaaaaaaaaagatgagtttaaataaaatgacaaaattaaaatccaataggcccattaagggttctgccaaggatgattaataaagtcattctttatttttttcaattcaattttaattctaaacttgaccctaaaaagctaccctataaatagaataatatgacttttattttcagatgatgatcagactcctttcgttagataaatagaaaataaagagagcccttaatttcaaattccttcctcgtctcttctcaaaaattcgaagcctatagtgattgag

SEQ ID NO: 93753 - DNA, 530 bp, Cannabis sativa
aaatatcttcatagtaaagcttctactagaaaaaggaataatcatattaaatctttcactcttaggtagggaagtttcttttttatcaagatttatggtttgaaattaacaataattattttttaactaggtaatatagccgctcttcgcgcggttaatttaattttttagaatgataataaacaaataattctaatatatagtaatgataaaattattaattattattatttagaatgatttattaaaaagtttaaaattaatatgattatcaatgtatacataaattataaattgttttattttttaaaaataaaaaataaaaaaattgttattattaaaatagataaatggtgtagggaaaaattggagttccccgtaatatattattttaataattgatcttttaaaattgttgtcattcaaaataaaaaaaattgttgtcattattgaatctcaccagttttcataatcgtatctcactaccctccttcctaaatctcaaatcttattcttagattttattccaa

SEQ ID NO: 93754 - DNA, 687 bp, Cannabis sativa
gtttattttgattcaaaatcaggattctgtcaaaaacaaaaaagaatcacgtacaatgtcattgcattactgtgtaaacgggcataacaaaactttttctttaaatctttgaacactaaaatatccaagtactcaggactcataatctgttttatattttttgacaagttatattttactttttttctttctgtagagggaatttgagggcattgcaaatcagtttcaaaatcatgatcatattcggttggtactgaaatatgatgaggccctttcacattccatatatgccgcttctgacatgttcgttatcccctctctctttgagccttgtggccttacacaggtaaaatatgcttcccttcccaataaataattatttcttttttccttcaacaacgacttcatcaaaattagtttgaattagttttgaaattcttcacaattttgtatattttttttcatcaatggctttgtgcagatgatttcaatgagatatggttctatacctattgtaagaaaaacaggtggtctatatgataggtttgtatccaatttccttgaccttcatatttatatatagggtaaatacggtattttgcaaaagttacaacttggatcctttgttttgttaaatgataaaatggatcgtgtattttttaaaattgtacaaataggacctgaact

SEQ ID NO: 93755 - DNA, 858 bp, Cannabis sativa
tgtgttattcttcttcttctctagctttgttgtaatcttgatgaaatacttttatttgtattttgagtattttgattataatcctcctatcctatcttgtaataagaacttttccaacatttaaatatcctaattattttttgaataatttatataaatataaaaaaatttcatatttatttataagaaaatgatctcatatgagtatgatattattaaaatcatatatattacataaaatggtcaacaaagtatgaaatatttatttaatattatgtaagtaacagatggtggatcttttctcggttatggtgacgacgtttgtaaaagttggtctgcacaatggaagttcttaggtcaggatgagtatctcagattcagggctgagaatccttctggtatcgttttttattttgcatcaaaataagatttggagccctgacaaacaatagaaggcgtattatctttccgtcattttcggatgctactcttttgggttcaccggtaagccctcttcttttgtttgtttctagatctagttttgtttttctcatgtctagatttgttttttcgctgactagatctattgtagtagttttgttttgtttttttttttttatatatattttcttttagtctcttattactttcttttttagtttataaatgaattgctttattttgttttgttctaaaaaatattgtggtgttgtttgctttattttgtggtttgcacctttaggattttcatatgtaagccagtatatcaagatgtgaagagaagaagttgttagttggctgagctatcatcagttagtaaagtctgttattttcagttagtgataactgaattctgtt

SEQ ID NO: 93756 - DNA, 1337 bp, Cannabis sativa
atatatatatatatatattgggtttggaaatataagttttatttgaaaatgaagaaaatagcaagaaagttatgttttgaatccactacactttatggacatgagcagttgttcggaattttaaaataaagtgaaggaggtacaactcaggcacaatattacaaataaatagagccaaaaataaacataagataagatatgatgtgatgtgatttacaaataacacaaagttacaagtaaatgacacaaacaaataacttagaagaagaaatagagcaacaaagcatgaacaagtatcttgccactttgttcaaatgaaattatttccactcatccctagaactcgttggttagggccactagtttaaaaagagatgaatttaaataccaattcttcaagaaaaaccaaacagattaatcatcttctttcgaatgactcccatagggtgcctagatcgacattacctccggaaagtataattcctatgtggcgacaatccttgaatgcttggtttttcttgaaaccattggatagaacagcagctagaccaattgctccactaggttcaacagcaactttcagaatctcataacacaatttcatagcttctattatctcattatcttccacagttatcacatcatcaacaaaatcccgcacaatgggcctgtgccaatagaaattgagtatctaagttatctagtagagtattcaagggcataaatatgatcagctgaagaattaagaaaaggagactccataccagacaaatgaaagcaatattgatagcagataacttttaaagtgatattttttaccaagtaaggtctccaaggaaagctcgaagcccatcagcaacagtgttggtctccggtaatgttattatcttaccagcagctttggactgagcagcgtcattagctcctttgggttcagcagctaatattcgaatggctgggttgataaacttggcagccaaagccactcctgatattaaaccaccacctacattttcgtttgacaggccaaagaagactaggatcggcaatcaaatatgctaaaagaaagacgcaaaattcaacttttagagctaaaatgcagcaaacagaccgcttatgggagctataatagtgtcaatttgtggagcttgctccaaaagctccaatgatatggttccctgtccactgtaataaactataaacacatcaagaagccttgacacatgcccacaagaggcccaagccttaactctatacaactacctgaatcaattgatggaacttaaagagtttaagagcaagtagtacaaaatatgttcatggtttataaaagaagt

SEQ ID NO: 93757 - DNA, 522 bp, Cannabis sativa
ataaaatcacacacgtggcgtccctatagattatggcgttacagtcgaagctagggattttgatgcggtctctgggaggaaacccaacccaagcccagatgaaatccattatcgccgaggaaaagctcactgcgcccttcaatttccctcgattttaggacctcatggctaagcacatgaagcccgaacccttcgatcgccagcttcgtgatgctttcaaggtcctcgataaggagtgcactggctacgtcttcgtcaccgagctccggcacatcctaaccaacattggcgagaagcttgagccagcctaattcgatgagtggatccgagaggttgaggtcggttccgatgggaagatccgatacgaagatttcattgcaataatggtagctaagtaaaccattgttgtgttgttgatgatgcatttcgtgtgtatttttggctctaatgtgttcttctgatatgatatagtgatatggattttgagggccagggacctgtcgagaagaaaaagaaagagaa

SEQ ID NO: 93758 - DNA, 3340 bp, Cannabis sativa
aaataataaaaataataaaattaaactaaaaataataatacattgcttaattaaacacatttaataaacataagtgttgacccttatgttgatttgtttgttacatcatattatattgaagtatattttatgtaaaactatatgtgatattgatttttttttttttttgaaaaaaaatgtggtatattattaaatgaaatcaactattacaagagcacttaagaatttaggacaaacgtctgtccaaatacaaaatccttctgaactagtaacagattttactagagcataggctacaccattcgcaacacataaaatagcaaaatacgaaccacaactaagagcagctaaaagagaattaatctcatcaataggagatttaaatacaatattagagtcaggacaattaactcaacgacaaagaattgaggaatcagtttcaactttctccacattaaatcccaaattattagatgcccaaatcaaccccaattgaagcaccaataacttcgttaccaccacctggaactcgcccgcaatatgtttactttatcctattaccaaacgatgcctaaaagttgtataacaaagtcatgttgaatcgaatttaaattcaccaaaatccatttatttcatatcaaaacataaacattaaagacatgcaacacacaaagacattgaactatgaattaacatcataaattacaagttggaatataaaaagagagccgtcaaaataatcatcatccaccaaagaaaggagacagtaatgataatttgataatgataaaagcaaataacatagtcactcatgcatattccactctcactaaacaaatcccaactcagaattctctaatccaatcataattgaattgaagcaaagtaaccatcttttttgtttcttaatctgaaatattaaaaaactcaaaaataaaggtggtggtactcattgtcatcattagtacagctaccagttgtgtctcagaagattataaacaattcccttttagtcagagataattccatctcttactttggattacttactattaatatatatatagaagaagaagaagaaaaagtagtgttgttacttaaaatagaacaagacttttttgtctcaaggagagagaaacttcattcaatgtttttttaataagagaattaaaaaaaaaaaatctgtgaatggaacccaacaatggatacacatatacagactttactgaccaacaaccaccatttcttgttttgttgcagatgaaaaacaacatctttgctttggttgctctggttctgttcagctctaactggaatcttcaaactttgacacaatttctttacttgtttttgtttttatttatttcctctttcctgtgccaatcgataggagctcgaagcttctaagagcatcgtcacgactgcctcttgtgcctgctgcagaattgcggctgaaagaagtggttttggactctaacccgggttgaattctttgagttgttgacaggcgaccgctgcttgagactaaccgacttgaacgattctcactaggctcgccagaggagcttggtcggctacttgataaaacaggtctctttgaagcactaccattccgggaagaactcctagccctttcagaatcatgtttctgctgaaataaaaataaaaaggaaacacaatgaaaatccatttcggaaacctgacaatgtgcacaaaagcattagtgaaattcatgcaccgaccacatcttttgatgatggcgcatcatctgaagatctgtgtctagaatggtctccatgcaaaccatgcccagagttattccttcttgcaaaagcctcaaccgcaccagagaatctttctcgtatctcctgtcccactagtggaacattccaacataaagtaatcagcattaaacaaggagaaaacatctcaaaaatttggcggtcaaagtgttttgtgtgctaaaaaaaacaaacctgaaggcctatctgcagatggtccaggatttagaaccggtttcccgcttggttgctatcaaggcaaaaataaaaaatatataaacaagaatatacatcaaatgagaacataagtactagttggtaatttttaaataaagtacgcactcgagatcttgaactagatccgatctgtggatatttcagtatagtccaatcaaatacatagtcaaactgataccctgcaacaaataaaactctcattcagattagagcaactcacaaaagattccgaaacctgaaaagactaataatgcaccacattggcaacaaagactgtgaaattgaaagccttcaagaatctttcatttaaccttctcgaataaataagtctctgaaaagcctcttcaggtacgagtagtctggtttgtcttcaaaccgcaatgaccgacaataatggaagtacgatgtaaattctgagggatatgatttacaaagaacctgtcaatgtagtgtagcatattagtatcttccgtgcctcgacattcaaaaataacagtacgtggtatcaatggaaccgagctacaaaattcaccaccaccaaccatctataatgagctcatagtaatacctataccatactatacactatttgcaaaagctgaagatcagcatacctcaatgggagtaagcatcttcttttcactgatcttgtcatatttctgttttttcgtacctgcttttaatccctgccagggaagactggtaaagagaataaaataagtaaaaataatacggtgaactaagcaatgaaacaaaaccgaaagtggactggattcaattcaagcacgtcacataagtatcataccttcccctcaaaaaatacatgagcacataaccaagagactccaaatcatctcttctgctttgctctgcatgaaaattacatgcacaattagataaagcccccaagtctaaacaaataacataatctctaattatgaactatatcattatggctcaccaactccgaggtgagtgttaacacttgcataacgagcggttcctgtgagattcttgttttccctgaaacaataaattagcataagaagcagaaatttgaagatttaagaacgcaaaattgatgatgagaaatatgtaacaattaataaataaataagacgctgtgaaataaagactatagtccacaaatcatagaattataccacaaacagatcaaacattcagcaaataaaaactgtttgttactgtgaaatttcagtatctttaatgagcgaaaaataatgtgacaacaccaaattgtattaccctagtgtttgcccaaacaaatctaacagcttgttctttaatattcacatttaaaa

SEQ ID NO: 93759 - DNA, 718 bp, Cannabis sativa
attctaatcctcatataccaaatagtcatcttcttacttaagccgtttattttttaggtgaacttgagacttggtcattgctactacagggctaagacctatgtgtccaaggccaagaattcatccttcgagttggagaaaaccaaagaataggtcgagatgaaggaggccaaacttgcagaggtgaacaagcaactctttgaggcaaaccaaaagatagattacctagagaagaagattattgggactccttttgttgcgaaattagaggctggcctggagaaggaggaaaaaagagtccaagagcttattgatgagagagaggatcttcggcgacttatgctcaatcattaggagaaaagtagagatttgactacttcttctcaagaattagccaatgctttggaggatgaaaagaaggctcacatagatgataacgagaagtacacgtctataagcattgaagtcttctatgagttcttgaaggccaatcacaaaggtgacttctctttcatactgaggaggaacatgccgacctactagagtactgtgaaaaggaaaaagccaaagaggaggcaaggaaggttggagaaaataccgatgaggctgctggtgaagttgttggtgggaacattgagcaaactgaaacaatcgacccaaacttttctatctaggagcaagataatgtctcaccagtcgagtaccccaaatcatgtga

SEQ ID NO: 93760 - DNA, 522 bp, Cannabis sativa
ttgttgatcatattagcgtcaaattataggagctgtataatatagtgacgaaagttttaattaattattaaacttatttatttttttaatataacacctagctagcgtacatattatagttataaatataagctttcggtttgttatttttaaaataatttaaagtatcaaaaatagaatttaaactgcattttatccccaaaaaaattaaaatatagaattcaaacttattattttaaactttctttttcatcctatatataattcaaaaaataagtgagatatatgttattttttcaaaaaaaaaaaaaattaattgggctattaaaactttaaaaataactaaatataattttaaatatataatattgattaggtatttttaaaatataaaaatatattaattaatttaaagataataaataattagttcaaaatgagaaaaagccaaaactctctatatatatagctgaaatattaaaattacttcaaacatatgcgaaatcacaagcagactaagtg

SEQ ID NO: 93761 - DNA, 789 bp, Cannabis sativa
cccaagttctcattcatcgcccaagttgacatcccagcgcccaagttgacatatgatgtcaacctagacgctgggtaagtgtaaaactatccaagggatatactttaaggtgcctaactgatattttgacattactttggagaagttggccaccagttcttggagatattgttgttctgcggaaatgagagactcaattcattttcgggtgagttggaaatgagaaatgcaaagttgtgaattcgaattttctaaattcatggatctttgttagggtgaaaaactagacgggcggtcgaaacctcatcagaatcgtataagccgaacccagtgcaccagaccttttgtcaaccttggcacaaagtacttactcccgagcttctaggatttcatttttgatacttccagggcttctgaacttgaggacaaggtctcctaccctattttgaccatttcagattcaatgattgcatcaaactttgcatttgagcaattgaaggtagcgtcccaagttgattgtcaacctgaatgctaggacccatttccaggagcttgagtttgtggttttctctccgagtttgcttgaatcttcaatatttcttgtgacgaaaataatgctcagaacaatttcgatcagattgattggaaacaagccaggttaataatatgtcaacctgggttcctagctttgcccctttagaaattctgtttggtccccaaaaatagttgaatctcaatattttctgataacgcagaagatgctcaaaaagaattcttgaaaaactccat

SEQ ID NO: 93762 - DNA, 548 bp, Cannabis sativa
actttttgagaaataggattagaaacaacccaggttgacattatgttaacctgggcgttgggcctagtgccaggtgtcaacctgggcgctaggtctagtttcaggtccttaatggttccatttgatccacagaaacacttgaatcttaatctttgacaaaaatggagactatgcctagaagatttctcaaaaagactcctcaaaattggccaggttgataaaatgtcaacatgtgcgctggactagcaccggtgtcaacttgggcactagtcccttattttggccccaagttggtttgtttcttccccaaaagtacttatttccccattttttataaatacaaaaaagatgcacgagttaaatttttagtttgatacttgaaagtagcccaggttgacaatttatcaacttgggcgttgggtgcccgggcaccgagtgctctgggtgctcaaaaataaaagttctctaaatctgattttgattcctcagatatgttcctgacatgtctagttcgtgttctagtacaaagtttgacccatttgcactaa

SEQ ID NO: 93763 - DNA, 1157 bp, Cannabis sativa
gtacatataccattattcaaggaagcacctcctttgctcagatatctcatcggacatgattcaggacaaaaagggtttaaatttagaaaaactattagagcttacaactctatgtttgcgtttacatcaaggggaggtcgaatcaataactcaatcaatcaatcacaaggtttgtatgtatttcggatgagcagtcaaaattatcaccacattggttctttgttgccagaacatggaaaaaatccacagttcgctcagctctacatatatgatacagaaaatagaatcgccacaattcaaaaaaccaagacaacaactgagattgaacatgatattgtcactaaattatctcaaatgttggatcaacataataatttggtgaaatcctttagaatggcaagggatagattcaaagaacaactagaatgtacgtttcgtttatgacttttaagtactcgaacaaaagatggtcgtcaatacaacttgccaacagaatctgaagtagccgggttgatagttggttttagaactgcgaatgggatgttattgtagagcaccgaactaacggacttcaaagaatcacagatgtacatccaagttttatgcctatgacatatccattgaaacacctttatggtgaagatgaatataggcttcgcataccttttagaggtgaacttgagaacgaatctgatacaaaaaagttgacaatgagacaatactattgcttcaggttgcagcaaagactaaatgaggggcacactcttcttcaagctggtagattattgcaacaatatatagtagattgtgacatggcaattaaagaagaaaggtttagatggatacgaaataaccaaagacaacttagatcagaactttactctggtttaatggatgttgttcatagaggtgattcagattgttcaaaagttggaaaagcaattattttgccttcgtcacactgtgggggaccccgatatagaatacaaaattatcaagatgctatggccatttctaaatgggcaggatacccatatttatttcttactttcacttgcaacccaaagtggccaaaaatgaatgacatgctcagtttaattagtcaaaaagataatgctaatagagtggatgttatatgcagagtttttgagataaag

SEQ ID NO: 93764 - DNA, 600 bp, Cannabis sativa
tggaggcttgaagcggggacgttacattaacacctcagaacaactcgagacacaaactcgaagcttcttcgtcttctccaagagaaagctagggtttcaagcacacaatctcgaggatcgatcactctcgcgcaatcatagatattaaacacagaaaatcaagaacacaagcgcacacacacaaatgaaagattggagttagggatttaagagaaacaaaagtaaatctaaacaccacagtttgatctcagagttcacctcagaatgatgggctacgtctccgtgaaagcgcttgattcttactaatccaaacaggtattacaaagttttcaacagatttcgagtcacaacattttgattgataatttgttttgattttctttctttttctctgaaactaactctctatctctctctttatttctttctttgtatatgaaaaacaactaagctcgagaatcttctcactctctacaacaatatggctcacaaaagaaattgaaggcttcatgtaatgatcttcacttgctattgtggtggcgttggattggttgatgtgactgactatcttccccaatcaattctattgagtattatgaa

SEQ ID NO: 93765 - DNA, 704 bp, Cannabis sativa
taaaaataatataccatgaacacaattcttctcattatcactagttcgtattttagtactaaactttcagacttttttgttaggactatcgttataaataaatcatggatgcttgaagggagagacacgctgtaattttactaaaaaaagtcggacatagatgtaaaattagaaggtacaatttagtacatgttaaaattcaagggcatgcatgatttaataaatattaaaattcgaggggtacgatgtagtaattagacaattaccatattataaaaattaaatgaaattagacagaagtccttgaatttaataattttaatagttggtaagaatttttaattatacctaaaaaattgaggaggtatgattaaaatatgttaaaattcaaaaagaaaaaaaattataattaacctaaataaaaacataccgtgatacacgacatttctaatattaatttttttttaaataaataaataaataaaagtacaaaattaataattaaaataatattaatcaatggagaattattacatgctgatctgatggtacgtagcacctgctaccacttttttttttaaaatttatgtgttttaacctttaataataccaagcaattttcattgggaaatttcactatttgaccctaataaaacaccccatatcaaaatttatacccttcactaatttatacaaaacaattc

SEQ ID NO: 93766 - DNA, 793 bp, Cannabis sativa
  modified_base (416)..(439): a, c, t, g, unknown or other
  modified_base (590)..(595): a, c, t, g, unknown or other
ttcttcttcttcttttcttctatagtttttaaaatccttagtgttcttcacaaatcaaattcagcctttagtgattgagtgtgtgcccacctatagcaagttagtcctcaattatagcgtgtaagactgtgaagaatccaaataactgaaggagtttcgggctcagatcttggtgatactttgtgacagaaaggatacaagggtgagagatctgagtggaaggagtaatttaattctgcagcaactaatgtaaggtttctcatactttttatgtgtttattttatatcattttagaagttcatgcttaggatgttaaaaatatacttgttagtaaatctagatcctcgaaaaagatattcctacaactggtctcaaagccatggtaattgattactttcaagaaatatggatttannnnnnnnnnnnnnnnnnnnnnnngtgattcatgttgatctatgtgttgattgatgattgattgatgttaaaatttcttttacgtaaaataattagaattttattttattggatagtatggaaaaaattaagcaattcattcgtttacataacttaatttcgattttatttgaannnnnnatgaatttttgaaaatcaaaaaatgaagaggttgtgtcaccccacgtgcacgtgcagacacgggtgatcacaccgtgttcacacgcaataggacagggattgtccgaaggagctctgctatcccctatctgaacacccctgcgcgtgcagaaatcctgcaatgcaagatccgtgtgcgtgttttctcggccgtgcatc

SEQ ID NO: 93767 - DNA, 4103 bp, Cannabis sativa
aattaaagtttgtgaagaaaaaaaaaattagtcctcagataattattaataaaatatgtgaaaaataatagaaaattaatataaaaatttaaaatctgaatactaaactgtaaataaaattttaataaaccttgataaaattaccttgataaaattatcaaaaatgtctaatttatattttgccttaagccttacaagatggccctcaacctcaatagtcaatacacatacatagacccatttgcaagaaaataaaacattggggaccagatagcaagatacacaaaagataagacctttttcacaaaaaaaaaaaaaaaggactcattttgaagagtctcgtgggaaagaagtcaatcgaaatcgatagaaagaaagaaagaaagggcagagatcagagatcagattcagagattgaagaagaagaagaaatgggtattataaagagtgcctttacgttcatgtcggcgactgtattcggaatatacatagctcaaaactacaacgtccccaacatcaagaaactctcagacactgctctcttattcgccaaacacatcgaagaaaattaccgaaagcccaagaacaaaacagacgactacgaagacaattagttttcttttttccattttgtagtctaaagtttttgtctttttgattttttctgttaagggtataattataaaaacctcaattcaattttatattttgttccaaatgcaaagttagaaactttatatgtatacacatttttgtcttttgagattaccacaaaacaacccttttaagatttatatatatatgtacatatacatactgaaaaaacaacccttttaatggtcttggtctagtcctccaattccacggttatgtagacatcatttgaagcagatttcaggttgtcattctgtgattcccataaccccttttcagagtatgataaacgccacttatctatgcaactcttctgatgagtttccaccatgtttggaacttgtctgtgttctagaatctttaagatctcttcaacttttccaagagcaaaaactgcttgccttacactatcttctctcttttctatggcagtgctcaaacacttgactgttataacttcttgtaagttagtcatacaagcaccaagtatatcagagatcataactgtgatagcttcaaataacctctctgatgatgtttggtcacttctttggtagcttagctgaagagatttggttattctgtacattgaatttgcagctaataacttggaaggccatttcaatggattgtcctttaagcaagaatgagcctcatttagcttctcatactcagaaaacttggtcctagcaatttgggatagttgttcaagcactccatttggggttagctcttgattaagtgacatttttataagatcaactccaagccatttgtggtagagctcaacttctgtccaagtagctgctgcagctttcttgatgttggtcttatcagcttttgtgtctaagtatttctccacatttgtcacatagttaaggccttcattcactccacatctcaagtttctgattgagttgggatcaatatttggaagtgctaaggcaatacttgttagtgtcaccacaggcatagcccaactattaggaggcctttcatatcccaagctaggaactttttcactgtcgaaataagccaatgctttaaagccttgtgaagatttctccaacagttttttcagatactgaggttgttgttttctccctagcttaaaccagtacttagtagcatcacaattgtgtgagatcataagatcaacaagtgcttcctcgccttcgagatgcaaaacaaagcggcttaggttcaatcttctttccctttgagagtcttgttctgaatcaacacttcgtgacacacttttacataagtcacagcacaataagatgtaacttgcagagaaaatcgaaacgaatcgaatccacttactcaccaaaacaattcccttctgcattgctatacacaagtccaagattcggtttttagcatcatgaacaactctcctgctatgtctgttttgaagcttaaatattttagaagttaagggacatcctttcatctcttctagtctctgaatccagtatttttctactatgaattcccttttggtgcctttatttcccctatatggacacctgaatcgaatggcgaataaccatctgcaagccgggccaattgtaccaactccaacagcaatagtctgtgttacaagaactagagtagttgaccatttataatcagattgaccatcacaaaacttgaacatccaaggcataaagaaagatctaaccatggcttctcccaaaattgcagcactcaataaacaaaatgcccctgaagcagtgcaagtcactgaccttcccatcacaaattgtggactagagctatatgacatcatccaatacttgctcaaattctccctcagtttacaaactaatgaaatgttgttctcacttgaatcttctttaagtactaattcatacttcttactatacttatattcaagataatgcttagtggtgggaactgttatagcagaaaaactcaatagcagtagcaaaacaagcatgataaacataacacaagcatgttctttccaaaaaacaaagattgccccagtagctaactgtatgcaaatattgactataagggtaattactagtattcctaaagccacgatgttcatgaatatttcttcatttcccatggttccaagtgaaggcatagagttacccattatagtgcagacaaagacagtgctactgagcttggcaagctggtcacctcggctcggcatggaagtgtttagatccacagaaagcttcactgctgctgctattaaggtgagtgaagtagcatttatggagaagaatctgcaggggaaccagagttttttatagcgcaaaccgttgattatgtctaaagccatggcaacaaggcatgctgctgctgctgctgctatgtataatccaatccatggcataggtgtgctgaaattctggtcattcaagttcccatctacactgcatccagctcctcccatttttataaccccccttctaaaaaggctgttttttttttttttttgaagttgaatccttttctcagttaaaaattatgagagaattcttcagaagagaaaatcacatgaacccttgtgaccaatctccactcttgtctgaaaaggtaggattttgaacctttttctcagtatgagagaattcttcgcagaagaaaataaggacacaaaacaaagaaaagcacatcaacccttgtaaccaatctccactcttgtctaaaaagcctggcttttgaacttttttctcagtagaaaattacaatgaagaatttccagagagtggttgcagtcaaagctgggtgctttttagttccaaacctcatttattagtattttttctacatgaatttttactctattattgtgttaggtatggatgacaattgcgctgacaattataaaatttctatgtcttgtaatagtattatcactattgaaagaaaaagtctttaattcttatttaggttctgtcaaaggttgagacttgagaatcctatcctatggctatgatcgtaatcattatcattgttaattgtatttctaacttttttaaaggagccaaaccttggaattggataccaatagagctaagccatgctataatataataacatctcatttgcctttgacattaattaattatgatgaaagtgggatttcatcatcattattattagagggtgtgttaatttgtttttctattttaaaaaaataagtaaaaaatttgtaaaaaaaaaaaaaacagaatctgtgcaagtgtgaaaaaataatgaatccataaaaatagttcgattttaattactgtgtctaaatttcctttctttctaaccaagatatactgtaaaaattactagtaacaaaattcataattaactattaattatatcatgtttatgaacaataagataatttattggaaaacaaaaatatgaagttggtaattttcttaaaaaaaagtttgatatccagtaaa

SEQ ID NO: 93768 - DNA, 555 bp, Cannabis sativa
aaaatctgcgttaacagtttggtgctttcattgagagcgttcgtgtaaaagctcaaaaaaaactctccttacaaataaaaaacaatctccttcatggttgacaacctagagaacgttaatgcaccacatgaagaaactcatcaccgtcctggaaaggagcccatgggctccagaaggcctaccaactcacattctaaacggaccactcattccaggaggacccaacctgagggtggccccaacactcagagcactcgttccaggaggacccaacccgaggttggtcccagtatacgaacgaaacgttcgaggaggactcagcatgggaatggtcaaaatcccagaatgagagataaagggcccagtcatggaggtgctcagcccatgggtgagggtacttatgaaatggaaaatcgtcgtcttaggcgccgcctggaggaggcaaactggaagaacgctgaattagagcataatgcagccgtagctagggcaacacatgggaataacactcaaaatcaacctgccccaagagtgagaagaccacgaggcagacct

SEQ ID NO: 93769 - DNA, 1193 bp, Cannabis sativa
attatattccgctgcaattaatgtaagagttttttaaactcttatgtgtttaatttcattgttttagagatatacatatttagaatgttaatcaacatacttgttagtaaatttagattcttgtaaaatattcccaacaacccttcggtgcctggtaattcaatcttgtttagttatgttatattggttgactaactaatcgtgtatcggagtatataactttggatcgagaatgggacattcataagcttcaatctaatttttcaacagtagacattgagcgtattctgtctattccactcttacttcatggttttagtgactcttggatttggcattattcgtgaggggattatgatgtgaagtcatgtaccatttcacttgttctatagcgatgatacacaacattcaacatctactacacagcgttcacggtggaaatcttgctagggtttaaagttacctccaaaagttaaaatcttttcttgcagaccaattcagaactctgtcctagttgttgtagagttgtttaaatgaaaatttcttagttcagttgcttgtagtttatgtttgaatccttgggaattagtggggcatgctatgttcttctgtcgacatgcgaaaatagtttggagttactcagcgttcaagttggattataaggctactgaattgatgaaaccaaatgattttctgtttcaattattagaatcatggaccaaatcggagctagaaacatttttttgtactatgtcatctatttggcctgatcgaaacaatgttatccatggtaaaagagcacaacaaccttctgtagtttttttgaattccaagatttatttgcacaattatcagtcatataatcaaaatgatgttgctgctggtttttcacctgcaatacctccagttgatcgtattctgtcgcaaccaccacccatacactgtctcaaattaaatatcgatgctgcctagctttgactcatcacaaaataaaattgggtttggagctatcattagaaactccaagggacaagttcggactgatatgtctcatccaatttatagatgctgtcatctccaagaaatggaagctaaaggcctattttatagactcaaataggcaaggcaattgaatgtgaaagttgatatggtggaaacaaattctttgattcttcccaactctctcaaaaaca

SEQ ID NO: 93770 - DNA, 805 bp, Cannabis sativa
tcttgaagaaagtagggaaaaaggttatgatgggtactcaaaagtctttttcagatcaagaatcggctgccctttcttctggaagacagttccatgaatctacccatgatactcgtcaaactaaggggtgcccttggtgtgatcactgctaaaaacctagacactacaaagaaacatgttggaaaattcatggaaagcctccaaattggaagcgaaagtgttggggtgaacgtgagaatagggggaatgttgctgccacttctggtttcacagctaaggaaaaactgaggcaattgagtcagctccattcactaaagctcaacttgaggcccttcagaagcttctaagtcaatcttccacttcattgactgccactcatggttttggattgttggcaaaatgaggtaataaatcagtagcttattttgtcaacaaaagaaatattaaatcttggattcttgattccggggctttagagcacatgacaggagatgcatcaaatttttctaagttgcacatgagtacaagaaatcatattgtcaaaattgctaattgtacactctctaaagttctgggtttgggttcagtcataattaataaggacctaaccctcacttttgtactttatgtaccaaaattggattgtaatttactttctattagtaaatttactcgtgaccaccattgtgtgactaattttttctaaaatctttgtgtgtttcagtacttggattcggggaagaggattggcagtgctgagaagtgaagaggtctttatgttctaaggaatgaaactcaatctact

SEQ ID NO: 93771 - DNA, 1116 bp, Cannabis sativa
aagtaaacgtagctccattaccattacgacatggggaatgaactactataaattgagtgtgtttttctaatttttttttgcttatatccattattcatctcgtcaatctaacaaactggtgctagctacttttcagtgtctataatcttaatcataaattgactcttctgttttagagataaaaccctttgacaaattttaaacttcacaatttcattttaaatgataaaaaatgttacaaaatgttttaattaaaaaaaatgttacaaaaggttaatttttttaaaaaataattaaagtggaatgactataattgtagaataatcatcaataataacaataatattaaccacaaaaaaaaatatttaaataaaaaaaaatgggaatcactaattggagaacaattaaattgaattaatattatttattttgttatccaagtggtgtgaccatcatgttcattgacatctccccacttgccaatgagttccatacaaatgctcaatcaattacccataattttccaacttttatttcttccattcctttcctttagaaaagtccaactcaccctctaatccactcctcttaataaaatatagttaattattttaagggtacgtaattatgtttacacccataaatgtataaagacatcacatttattaataatatattaaattattttattatctgaaattcctttttctagataaaataaaaaaaaaaaattcaggtaaatcaagtaatagtattgtataatgatatattatttaaagagcaaaaatggcaagataggaaaattatctcgtttacaaaaaaaaaaaaaaaaaaaatgaaaactccaatcggctagtattgaaacatcaaacaagtacaaaaaataaaaaaactctattattgattaataaaaatatctaacaaaacgaccaactttagcgtcgtaccatgtactggcggacctaaaaatattgtttttaaaaaattaaatgtaatttttaaattaattattataggctaaaataatagaaaaactctataaaattaaataaatttaataaaaataattatttttaattataaataagtccctacaaagtaaaaattatgagtccg

SEQ ID NO: 93772 - DNA, 864 bp, Cannabis sativa
atagtcactatcatcatcactaatgaaatttaagtccatcgaacacacgtgatcattctcctcatcactaagataatcaatcaataagtcatcctcatcgtttgttacttctacgccttcggtagtatcatcttcaccgtcgttaataaaatcatcatcatcatctttaacaatcgatgagcgttgagggacattgacaatcagtgttggtggttgatcagattattgcataaccaaatctacaagatccacaaaaaattcaaaattagatgagtttgtgtcatgtacaatatcaacatcatcattaatctcatccgattcatctaaaatattgtcccaaacttgtcgatgattcacattttgaaccactttccagtcttgacctctcaccaaatcatcaagataaaaaacttatttcgcttggttggcaaggatatatggctcatctttataccatgtactgctggtgtttatactagtgatattattttcagtaaatattttcttctttgttggattagtgttgaaccatttacatcgaaataataccaccgaatatgagccattaaatgacatgggcaaaatttcttcaagttgcctataaaagttgaaaccatctgtcccagcgactaacactccactattttaagtggtgcgatctttatctcgattgtatgcaacaaatcgaaccacattgactatacctacctcatagctatatgccaaatgatctgacccagatgctaaaatgttactaaaatcatattaataataaataaaaaataattttaggagcgacaaaagtcgtccctaaaaatttaaaaagacacccctaataaaaattatttccacaaagtcttttta

SEQ ID NO: 93773 - DNA, 1457 bp, Cannabis sativa
taatataactgtgttttttttttggttttgtgttttgatgttttttcagtttcgctagctctggtgataactattattaatgggcaggtgtttttcaatgagatgaggtgttatttgaagacgatatagctttattgtctaaattttatggggcagttttgtcacatgtggcttgcgatttgatttctgtaactcatggtttggcaaatcatgcccttcggttagacaataagctatcctggttcgaggaggttccatcgctgatcgcggttattcatgtgtgacttagttcaccacgtcaaaaaaaaaaaaaagaaaaaagaaattacatgagaatatacaagtgtcgtttgttgggtttgtatcagttatgctttttaactaatttttgctcctcaaatgcttcctttctctactttttttttttaaattcctccatgttaaatgttccctccatatccatttctctcgaatcccctattgccgacgactgccattagcccctgcttttctgttctacttcttctattctcatggacctcttgatgaaaaacttgcattcaactctctcccttactgatgaggagagatctatctttacactctctgactcatttcccacaccagtagacaagcatccctcctctcttttggctagagttctctccacacaaaacatctacaaaccaagtttcgttaaccaaatgtttggcctttggcaaggtagattatagttttaattactgaatacaagggtgatgatggtttatttcatatttcttttggctgtgagggagacaaacttcgggttcttaacaaagaaccatggtattttcaaaaccatctcattatacttttggcgccagatgctctgcaaaatgtatcaaatgaaaatataattctcactcccttttgggtgcaaatttaccgactacctttcttgagcaaatctaaattgttggctgaagcacttggtaatgtcattggagagtttatggaagtgtttgatgactccaccaatgaaggttggcgtccattcttacgagtgcgtgttaaactttgtgataccaagcctctactgcgaggtcaaatgatccaactaccaaagatcgaggatgaattttgggttaactttcgatacaaaaggctccttgaattctgttttgagtgtggtcaaataggtcacccctttgaatgttgtgtcattttcatagaaagaatggataatggtaatgatgatgattttcaatacgggccatgaatgaagggtgctaaactcccgaccaatgactatgattgatattgcatgaatttttctaaaagaaatgcttggccactccttactgttaggctatttctagcctatattttggatcacttttatgttcgctttttgatgttttaggacgaaattatgcttgttttctatgttttttctcggagtaatggaagccccg

SEQ ID NO: 93774 - DNA, 1000 bp, Cannabis sativa
  modified_base (935)..(940): a, c, t, g, unknown or other
gagttatgaagcattggaactacaaccatatttatcatatgaggaacaaccggtgcatatacttgacaaaagggagaaagtcttgagaaacaagacgatcacactggtgaaagagttatggagaaacagtaaagtagaagaggcaaccagggaactcgagacggatatgcagtagaaatatccggtgttgtttaggaaaatttcgggacaaaatttctataaggagggggtaattgtaataccctggaattaagaaaatggattatcaaaaccctaactggttaattgactattattgtggaattatattagtatatgtgaattaatatgagatatgacatgttaagaccctgttggtgagccaggggtattttagtaattttgacccgagaagggtaaaatagtaaaattaatttattaacgtgcttatggactatattattatatagtatgcttgtgttgtcctttttgcaggtgtgttttgacaagtttgtgcggtatagtcacaaccgggtatttcggaccgaaccgggttcgcggccgaaatacaatgttgggtttaattattggttttttatttatgtggtaataatctgaaaattatctgagtttatttgtgtgtgcaagtggctattttacccttgaagtgcttatgtgggtgttttatggccttaagggcaattgagtaattttgccattttggagtaagattcataaaagggagtttaagcaaaataaagatttatttttctgcattttttcccagccctttggctgaaccccctttcctctcaaaactcattctaactcttgatttcgggttgtgcttgcttggattcaaacttggggtttgtggcttttgtgattgagattgaaaagagttattttcgcataagaaaaaggaaaatttctgggctttttcctctgccctagcnnnnnnccctctccctcttttcttcatatttttattttgctaagtgttggaaaattcatcttgaaa

SEQ ID NO: 93775 - DNA, 742 bp, Cannabis sativa
aaaataaagagaagaaaaaaaaaatatatcttcttcttgttgttgttgttaatatttgataccctgaaatcatagacattattgttcaccattttgatagctgtatcattctccagatattaaaaataaaaataaaacaaaaagagaggaaaaaagaaatggatgtgaatgtttaacctcacacttgatattctaaccaaattaaataaaacccccttactctctgtattgaaaattttcatagcagggctggataagatgtaattcgatccaattaaactaaattaatccaatccaatctaatttaatccaattataaaaaattgaatatccaattataattagattaaattagatatccaaagttgaatgtttaattggattagatcgttattggatgttaattttaaaatttaattaaaaattgatttaatctaattacatttaatatatattaaaaatattatttatatataataaaatatttaaaaaaataattaattatatttttttaagttgcttctttatttactaatatatttaatcaattagtctttctaaaaaataatttaattccaccttaaacttaaagaatagcatgtacgcttggcttactgtagtttttccaaacacgtgtacagtcataaatctctagaaaaatacctaatagtattttccttttcccttaaatcattttcaatatcaattagattttatgtaattttcttcatcttaagtttat

SEQ ID NO: 93776 - DNA, 536 bp, Cannabis sativa
atatacatagaataaaaaataatttaaaacatacatttaataaatttatgcatacttataccgatcttaagccaacacagtaaggtaatattgatgctgtgttatttgataaggaggaaatgcatgattttggtacggttgttcaaaatcaccacggtcaggtcgtggctgggatttcagactgcgagttgggcgagttcttccagagattgctgaagttgtgactctcaaggaagtgctttcatggttgaagcgtgatttcctaggtgttaacattatcgaatctgattgtctggtattgctacaagctgttagaaatttgaatgttttgtcatccacttttggtggcatcgtgaggattgtaaacaacttttattgtcttttatagttatgtttctttacgttttgtcaaacgatctgttaatcgagctactcatcttatggttagagcgtcttatttatatgtttttttcgaagtctaatttctcttttgatgttgttgacattgttaaagctgaattggtctagttgaataa

SEQ ID NO: 93777 - DNA, 673 bp, Cannabis sativa
  modified_base (634)..(642): a, c, t, g, unknown or other
cctttcttccctaaacattaatatacatgattattttaaaatgggctaatttggttactcatgctatttctattgatttattttggctaattctaacgtgggccttacagttttacagttttttttttttttttgaacaatgattatacacttttctgattgtttaggtttataatgtttatataatgagggggaaataaatagggagtgatagtggacaactcatatatagcaaatgcatataggacccctcaaaatacccctaattcacccatcctcacatgcagagccctaggccccaccatgcagccttagggccaccatgccagccgtttgtgacattgaaaacaccaaaagttgttgtttaaatatccagaaatggatacttaaattaaaacttgacagcacaccaaagatatgcatagacagaatagtggagatatgctagactaattaaaagaggcttttttttacgccctataaaaaatgctaagtggtattagtaatgtttagcattgttttatgtgtatatattattattagtttaattaaatattaaattttgtatacactaaaaaaactattacttttagtgataattttttagttacaatataattttttttgtgattannnnnnnnntttagtcacaacaaaatgttactagtgacta

SEQ ID NO: 93778 - DNA, 701 bp, Cannabis sativa
tgcttctagtccttctccttcctcagttgaagtgactgctaaccctcaagtttcaacctcctgtgatgatttttctggttcagaggatatttcagctgtgattgctaagcaatcctgctcttcctcatgaatgttgccagttggaatgcacggggcctggggaatccgagtgcattccgccgtgtgtgtttgcttgtccgtgagcaaactccccacctgttgtttcttatggaaactaagttaatttctggttgtatttcccgttttaagcaatgtttaaagttcaataatggcctcgaggtccctcgctctggactgaagggtggtttaatgttattaagggatgatgatgtaaatgtaactctactatcaatgaactctaactattttgattgttatatctcttataatgatggtcctcgatggcacttttcggctgtctatggttttcctgaagcttccaataaaaagcacacatggacacttttagagaaacttgctgatgtttctttattggatccttggttacttgtgggtgacttgaatgagattttctcacactcacataaaaattctggtcccctacgatttcataacaatatgaaggcattttgaactacaattgacctatgctctcttcttgaacttccccacacgggtcaagatttcacttgggaaaaaaatagacggaatccacaagc

SEQ ID NO: 93779 - DNA, 741 bp, Cannabis sativa
gcatttatggatgcatgtttgcttctattgtaaggtaattttatttaaaactaagtagctttgattttgttgggtcaaaagtgatgtcaataaagggtttaatttgtgtttgtaatatgataaaacttgtaatatttttttctttcagtttaattatttagtcatttcataaactggtttttgaattatttattttaaaaaccagcttttgatttaattaattcaaagaactagtttttaatttagttgtttaagggaacgaattttgatataattaattcaagagacaggtgttcgatttatttttttatttaactgatttttgtgtgtacatttttatcttaactagtttctttgttttagattttaattagttgataaatataaccggtttcttgatcttatactttgagttattatgtgtaatttatttttatttattttattatggaaccggttttgtttaaatttatgtcttagtatatttgaaattgatttctatattttttttaattataaccgatttatgtggtattatgtgctattcatttttactctatttgttgtggaactatttcttttttaaaaaaaaaaatttagtgttttaggaactggtgttctttttttttttttaattataatcattttgagttactctgtgttattttcttttattttatgttatagaactgattctatcttaattataatttgttttagttattctgtgttataaacttt

SEQ ID NO: 93780 - DNA, 610 bp, Cannabis sativa
taggaatgagcgttaataatgtctgattaaaagcagctgggttgcctccttcattaagaacatgtagaaccactttcgacacagattcacccacaatataccaatggtgttggtaaaacatagctgacatgccatctatcccagggcttctatccgatcccatcatttttaaagctgaaagaacatcaacctcagtgaactccttggacaaatattcattatgagaatcctgaacagtagtggggatagtagagaggacatgagagagagcccagtgatcctcctcttgagcagtaaaaatggtagtgaaataagtagaaatgatatcagcaataccctccctagaagtaacagtgtgcccataatcatccaccaatgaagtaatcttattattaacattccgcgctttggctttagcatggaaaaatttggtattgcgatctccctcttttaaccagtccacccgagaacgttgttgccaataaagctcctccttagcaagaagatcatccaaaatgttttcggcctgttgaatattattttgtgaactctgctgcagatgcatatcagaatggtgaagaggctgctgtctagcaggggccgaatgaag

SEQ ID NO: 93781 - DNA, 725 bp, Cannabis sativa
ataataataataataataatttcgcaaacactactatttttttttaaaagcaatgaataaattcattgaaaatataataacattatacaagctagttgtgatcatgtttatcaaatatatactatacatgtcataattatcacgatacttctatacatccaccaaaaacttggatcatcatatctaaccaaacaagttattcatccatccgaaaaacatgcacaactaatctatgagcaacacagattagacacactcttggaaatctggatgacaaacttgtaaaaacttctaacaatatcttaaatttattatagtagggaaacttcattgaaaaataattacataaattgtaaaatcttggtaacaggaaacttcattgaaaaataatcacatgagttcttaaagaaaaaacataaataatttgggaatacaatattgaaaatttttatgaggcatctatcaaaaggggatttttgacatccaattaatattagttttatatttttatataacatagttataagaaattctataaaattttaaaaatttatcactcaccaaaaataagcttcaaacgcgatgcgttaaatagttatgttgtacaatatcttataatactaaaattataaagagcattttacaattttttatacattattttaattaattacaaaatatgtgcaaaaaaacttattatcattttctcatacacttttatatat

SEQ ID NO: 93782 - DNA, 748 bp, Cannabis sativa
ataacattaaattaaaattatagtttaaaaagtaattattctaaaaaaataacaataattaccttgaaaaataatttatgatgtactattcttaagttcaaataattaatagtatgatcaattttttttatgtaatagagagaaaatgaaataaaaataaaaaataaaaaaacgcacgcaaaagagaatttttgtagtagtgtgacataaaaaaaaaaaagaaaaaaaaagacagctgatagctgacgcaagtaaaaaggaaatgtcaaaatgttttaattttcggtaaataaaatagtgagagttagtttttaatttctttctaatattgcgtataaaattaaaacttcccctttattggatccttccatatttaaatttttatcatccagataattttattttttatatgaaaatgtatgtatcagtaattaagacgtgcgtgctacaaatttttgaaaaaaaaaaagaactcaaaataatttaacatatagaaaacaaaatctaaaagtaattgattaatttaaccgaattagtttaaacggttaactttaataaaaagaatttaaaaaaaaaaaaccgttaaccaataattttctttaaataactaaaagatatatataccttttaattataatatatatatatatggtatcatgtgtgaaataatgtaggcatataatttagttatatatttttaatttttattttgtttttatatatatttttagttatataattaattttt

SEQ ID NO: 93783 - DNA, 757 bp, Cannabis sativa
taatggttggtcagtgtatacccaaacaggatgagccttgacgtagggccttaaattccttgttgctaagattaggcagtaagtaagcttttctatcaatgggtgtcgtagatcagcttcaatgagttgctttttgatataatagactggatgttggacgtttgtttcgtctttgatcaacatgacacttacaacatattctttaacagctaagtatattcccaactcttctttgtccaagggttttgacagtacatgaggtttcgcaagttgtctttttatttcttaaaaggcattctcgcattcctccgtccattcaaatttcttataacctcgatggatgttgaagaaaggaacacacttgtctactgactttaaaacaaatctgcagagagtagctatccgaccagttgagctttggacttctttagtttttgtttgcaatttcatatccaggagggcttgaattttctctgcattggcttcgatacctcgagcattaacaataaaaccaagaaacttactcgagctcactccaaaggagcagtttaagggattaagtattaggttgtattttctaaggattttgaaacattcgtctaggtcatctatatgcccccagccttcttggattttacgagcatgtcatccacgtatattttcatattttgtccgatctggtctttaaacatttgattgacaacctttggtaggtagcaccagcattctttagaccaaacgacatgactttgtaaca

SEQ ID NO: 93784 - DNA, 1181 bp, Cannabis sativa
agaaccatccaagtctcctaccatttaggcttggtttttatgtattcgtttttttatctaggaaagtggccctaaggccgagacaatagtttgccccttgtggcacttttgtaaagataaatttgcaaggttagatggcaaacttttcttttgaatggttcttacttttatattttaacttaatctatctgcttgtttgtattttcattcacaactcaaacaattatattttgatcaaaaatactttaagcatttccattgctcgtattttcctatgatattatttaagtagttagtgatctactatgtgcgctagtagttattatctgctatgcttttgatttgtgagcagttatcgattctgcttcgcataaacagttgtaatctattttaagcaaacttaaatacacttttaatgattcatcactttgtatatttttgattgctcatatgaatagttaggccttctattcatatattaggtttaagtattttttcaaggcatcttggtgtctcgtttaacactttcctataaaatgtgagccgttagtgttcagctttgcatgtagcttaatgttgttcttatgagttatttctcatttacaactgttactttttattttcctttcccgtgggaaaggttctttaatcaaaaacattaaaaaattttaaaaaattttaaaaaattctaaagtagtgggttaatatatcacgtacttctagatagattctggtttatcatacacatatgcccctcaagtacttttaaaggatgacactttataattacttgaaaaatgattcaactttattaataactgaagttcaaaatattacatcagaaatagaagttacaacatcagtttactggtagtagggtcgtaaatactccacgttccaatagttctttattagcaagctgttaagtcgagttaatttgtaaaccccgattccaacttcgattacataaggaccctcccagttttgattcaacactccttcagaagcgtctctcgtattcgcaaatactcgtcttagcaccaagtctccaatgttaaatagcctcttcttcaccttcttgtagaagtacctcgtaactccgtgttgatatgttgtattagtaatttgcgaatcaacatgtttttcatcaagtagatccaaggacaattttaagagctctt

SEQ ID NO: 93785 - DNA, 503 bp, Cannabis sativa
tacgattttttgttgcaatttatgttgcagcactagttgcaataagagtttctacgtagaattctgtaaaaatacaaactgttttgaagtgtaaaaatgaaaaaactccataatttatactacacctactaaaaaaagtgttgtggtatactttttggcctttttttttttattttacgatcacttacgttgtgttatttatacacatttataaaattttagaaaatcttaaataattcataatattaaaagtaaagttcaaatattttattatacaagttacaattttttcttatacgaatgataagcacaatactgtcaactacaacgtacataatcatgaaaaaaatttaattaaaaaactctaatgaatggcggaacaaataaaaaatataccaaaacacttttctaataaatacattatatttatgaaaataaattcttattactagaaatatatttgctacaatttgaataatttaggttaattgagatttttgtct

SEQ ID NO: 93786 - DNA, 1012 bp, Cannabis sativa
tctctctctctctcttcctcttcgtctctccctctctctcaacttttttctaggtttgagaaaatcttcatctccatatatgctttctacttagggtttgcaggtttgtactgtcattgtaatcttgtttgagttttctgcatatttggctttttgcttgttcccatgtacttttcgtgggtgttcatgtactttttgttgggtctaagtgattatgtatttgatattcttgcaaagtgttgtttattctgcttatgcaacttttgctgcgtttttcagagagttatctggtctagttgatcgatcgtaggtgatggaattaggtgggaatctaagggaagagcagctacctatttatcaagaccctccttcctcataaacccactttgctttgaggtttgatccaaatgctactagcttttaaaatgtatattattgattgatattagaggcttacattacaattattctaataaaactttgtagcaaaactattctacttaacaaaataccattgagtacttgatgggtttgtgattttttagtgtttgtcttggtgtaagcaaattaggaaaaaggataccagaattagtaaaagaaattcagttctgggtttgtggtagttttgttcccaacattaaatgtccctgagtatgaaaaatgctgatttagtttaaataaggaagtagagaatttcatccttgttaggaaaatatataccaacatagactttaaatagagaactattcaagtgggaaaattcagattatgatatgagaaagaaaattaacccaattaaagcactaaagaaaaggtaacaaacaatatctgttgtaatcttacctctgtttttcctaaaataaagtccaacaatatcctctgttaagctatgaggatgaagacgatggacttctgtttcttttaatcttattatccataatatcctaactgattgattttggtcctgtgcttttgtcttcttgttgatggagactaagcacaaattatgtgg

SEQ ID NO: 93787 - DNA, 780 bp, Cannabis sativa
ggctcgtacaaagaaaaccacgcggttggccaacactactgatcctcaagtggctcggcttgccactctgccgagtgccgaacaggatttggccatcccgatggaggaggatcgtgagggggacgctgaggtccacgaggttgaggagctggacgatgctcatccgggtactcctttcgaggcggagggagaggaagaggttgaacccccaaaattttgggagtacaacgaggccaggcaaccagtcgatgctgacggggatgtcttggtcgagggcgttgactacgtcagtgaggagcttgcttcggcagttcctcacgaaaggcagggtgccttgggcgccaggtgggtaagtcctccgtccaatattacggaggcgcaccttcgaacacttgatgaggccgagtacctgagcgagctggactactacattctcgcccacgataattgtgccacaaaccctgacaaggggattgcgcctggtcgggggcccacgtccagcaaggggcgctgatgcccttgcacaagtacttcaagaatgtggtggacttctttggtctctgcccagcccagattactcctaagggcattaagtatttatccgccctcttcgtcctctatgcttcccaaggttggggtgctccttctcctcacgaggttgcctggttctttgatctaacgtctacccctaagtaaggcaggtcagggtacttctatttctctcagccaggcttcaagtggttgacgggcacggatgccaaggccatcagcaaaataggg

SEQ ID NO: 93788 - DNA, 976 bp, Cannabis sativa
tagttccataaattgagctatcttacctcttgttgggaatgcatccctctcaagctgccaccaaatgagtttaagacgaggatggattttggatgtccataaacacttccatttttcatccgctggggtggtatgtgtgatacctttgacactccggcacgccgatttaattgagaagagaccactaggttctcccatccacatccaagcatctcttgtgtcatgaaccggtagttggatattcaagattgctttcgcgtcactccggttaaaccattcatggaccatctccacgttccacgttcgatcgtccctcataaattgacttacccaagcgacaccgtgagttacatcttggagaggggtaggtcttggattggaggaaggcacccacggatcgaaccagatggatgtttcttctccattaccaatctttttacacacctgagttagaagcatcggtttagctcttagaactgatttccaaaagcttgagtccccctccttcatttcagcatctaagaaacaccttccattgaggtattttgattgaataatggtcccccataagctatccttatccgtaagagccttccatccccatttaaggataaaggctgcattaatagtttcaattcttctaaacccgagaccaccccgcagttttgattgacaaagtgaactccaatcaatagtatgccaagtcttcttgttctccgagtctccccaccagaagtctcgcaattctttgtcaactcttcttgctattttcttaggaattatatcagaggcagctacatacgtagcgatggaggagccaaccgattgtatgagacacgctcttccctccttggataataaccttgttttccagcttttaactcgttgcataactttgtcgacaaggaagtttaaatccttagctctcttcactgatctgaataagggcaagccgaggtacatagaatctctattc

SEQ ID NO: 93789 - DNA, 1600 bp, Cannabis sativa
aggttgactgccatgactcaagactactcaacttcaagatattttctttcttgccacatgttaaacattgatgtccatgttggaaaatcttttactaggatcttaatttaatactcatgtatgttgaattatgactaatataacaccctaatatggaaaacctaaaacaataatataaacacataaggattatagaaaaccttacattggtgcagtagaatattatgtctcattctgtctatagctgagtattattaagatttgaacctggatcttctcctccttcgattgtgttcatcacagtcttccacaaaagcctgagtatcaacttgaatagtgtgggctgatactcaaacacctttgaacaatatttgagatagtttttcttagtaaatttcaaaattcaagagaagaagaagaagtgacattaactttttcaattctcttctctttctttatataggcgttcacttagagttagctttagataaattgtactaattaacaaataaaactatatttctcttttttctcataattgccctaacttggtaaaaaatcttaaataagatataatctatttttaaattctaactaacttattaaattgattaattgagtctacaagatgatattctcccaaaaaatatggggaccatggggctatgtaacaaatctcttaataagtagatccaaaacttatcgagtaaatttcctatcttattaatttctctcgactccactatagatttagaattgtactcctgattacatggtacactctatataccaattatagatatgctatgaattatccattatttcaatcacaacaatcattgatcctctataaacggttcacattgagtagggacaaaattaccgttttatcgttcaatgtattttatccttaaaacacatagctacgtgtaaatgataatattggaaactaatataattatcgaaatgagcgctcaatcatttatcacgttaagctaagctctaaggaaaccatcacttcacttctaataggcatataaactatacatgtccatatctataattaatactccaactcaattactctaccgagttgccaagatgtaagtattttgcctacatgtaagctatcacaagtaattcaaagaactcgtgcaatatattaagctagagcttaaccatctcaggattgagatcaaatgatctatgatcaactaagtgatattgacttagaaaagatataacggtaagtttatggtatcttttccattgtgaatatcggtccagtccggtgcatagtcgatacatccgatgctagtttactttactgatgccttggaaaagacatttcacttatccaagtgtaagtaaaccccatcattgattatcatgtcagtgtaaatttagtgaattgataaatcatgggactaaataatttgaaacatatagtcatactttccactgtgatgatatcactataattttgaataatgatatgctcagaatttaatagaacttataaattaaacatataatcatgtataaaatatgtgaacaaagcatatgacaaggtcaagatatgatttctaatttttattga

SEQ ID NO: 93790 - DNA, 1008 bp, Cannabis sativa
gtaatgggttttatttagggcacaaaacccaacagcttcttggaggaaaaggaagaggaaactttggctctttgagggaagactaggaaggaggaagaaggtggcaaggtcgaggaggaagaagaagatttgtccaagtctctcagcatgtagacttggttattcacttatctcccttttctttatttttttagaaaatgtccctttgtccaagacaatagtttgcccctggtggcactctttttttttgtaaagacagatttgcaaagttggatggccaacttttcttttttaatgcctcatacttttaagtttaaactttaatatgtggatgtttgcttgtgtttcattcacaatttaaacaatcacatgcataaattttattaggggtttccatttctcgtattttcctctgacgctaagtagttaattacctactttacgcacgagcagcttatctgctcgaccctcaatctgcgagccatcatcgattctgcctcgcgatcatcagaaatgatcttattttaagcaaactcaaatatatttttaatgaacttgtcatcttgtatatatttttattgcttagataagtagttaaatcttctacccacgtgttcggtttaagtattttttcaagaaactttaatgtctcgtttaatacattcccttagcgcgagccgttagtattcagcttgatgcgctaattataacttttgatttccattctcgtcagataggttttaaaccaaaaattacagttgtttgatctctttctcgctagaaaggtttgattaaggcgttataacgatttgacccctctttcgtcaaaaaggtttggtcagagagttataacagttcgacccctcttccgtcaaaaaggtttggtcgaggccccctttttttaaaaaaaaaagtgttgggtttgcattgtactatgtatttccaaattgattctggttgatcatacatatatgcccctcaagtatttttaaagggtttacgctttat

SEQ ID NO: 93791 - DNA, 955 bp, Cannabis sativa
aaagaccagaaaataatcaagctctttctcctccttttgataatgattctaagaagctttagtattaaaatattctaactttcgaagctctctctgtttcttttctcactcccttttggtgcgagtgaaatttttattattccaactgaaaagatcacaagaactcctccaaaactatttttttatatcccaccaaaccagagcccccaaaagcaacacatcccatgttaacaagatttgcacactctggctcactcacctaagcaatttcaaaaaaaaacctctttttaactttgggagaagaaaccacattagtcaaactttggaataaaagtaaaaaggggtctatcaaaaccaaaatgattaactcttggggaaataaatccaacaaaacctaattatacactattctatccaacttcttgaatcaagcaatattgactacatgttatctggttaatttggatttatacatattactatatattaacaaagaaatggtaaaagtccattaaaaaaacgctaaatgtggcactctaatagtgtaatatagtatcaaattttacatatttaatttaataactattttaaatcaatgctaatcttttgtaataagttactgatcataatgttattagatactagcatgcctgttattagacaatctttattacatggtgtcaattttatagcaaattttactaaaaaagatagcttaatatatattacatttggctcaaattataaaatagtgcttcaatgcacatgctaaaataaaccgcaaaaatcaacaaaattattatatttttattaaaattatataaataaataaatagtgtcaaaaaatttctaattaatgaaaattattaattagtggtgaatgagtaaattaaaaagaaatatttatttgttataaatattaataattatgtggatgttcaaatcttttatttat

SEQ ID NO: 93792 - DNA, 654 bp, Cannabis sativa
  modified_base (571)..(584): a, c, t, g, unknown or other
tttacagatgtcccaattaccattatttaacaaaatatcagcaaccttagtaacaccagcatcaggggcaccaatgggcttccggaaaaagccttcgctatgagggatccaagggtccccccaaatgtctgtatctctaccatcaccaaccaacttacaataagcacctttctttaagatagaattagctttgacaacattcttccaagatttggcaacacagtgacttgcacccaatcagcatgttccacccccatttagccaaaaaaagtcaggttcatttccttagtcttccggaaaccaagacccccaaaagatttaggaaggcacagcttatcccaagctcttaagtgaagaccatggtttcccctttcaaaaccccaccaaaaatcacgcaccaagtcatcaattttactaacaaggcagtttgaaagtttagtagtttgcatagcatacataggcaaagacaggcctacagattttatgagggtagcacgccctgccttcaacaaggttttcgcctttgagccttgaagctttgaagattctcctgttggaaatattttaccannnnnnnnnnnnnntaccatgtatgtttcattaacatcttaatatgaattctaacacaatgaaataaacagtttaaggaaacct

SEQ ID NO: 93793 - DNA, 815 bp, Cannabis sativa
  modified_base (272)..(283): a, c, t, g, unknown or other
tcatcatgaaaaaatttctcaaaaaatttttttttttcataaggtaaaatctatagtgatcgtattaagaattcaaagataactcatatccacccctaaatgaacatccatattttcgaatatagatgatcttactttcaagtggatattgacatatttactctttgcagagaatgatcttgttaaaacaactatatacaagatacaaatgccacagatatattaaaatgtggttgtggtttttgaagacttaggtctagttacaataaagnnnnnnnnnnnnagtccaagtggatcctggtcacaaaatactaaactcatattccgtacattaccatacagttcaaatccattgacaaaaaatagatattaaatcttgtgaaagttgtaatgtaatgttcaatgtcatcttggaaatagaaattaaaaatttctatttgaaatctagaatttaaaatcaaagacttaaatttataccaaatatacatgagtaatattctagcttggaccacgactactaatctaattctaagtttaagatgccttaagtaagcatatacaagtaggagattctaagatcgaggatttatataattttgggatagaatatcaggaatatagtcatctgcatcattcaatttaaaagagaaaatagaatgacatcataatcatatgatttataaatcacctatccaatgatactttctaagcaatttctaaatgaaaaggctaagacgaaactaataaaggataatttcgattaaaataagaattcaacgatgtcccggtaagcgatagtcaaagttattcttatt

SEQ ID NO: 93794 - DNA, 529 bp, Cannabis sativa
agaaaattcattaaggttgagtggaagtaacccaaatgacagggaactcaaattcattcccattgttggcaaatgcttataatgatccttatttgggtttgccaaagaaagtatattgaacaactcaccactatcttagggtcaaagtttaaatgattggagaaacaaatacaatttgatagaaaaaaagggttgttgtttaagacaaattgccaacaagacagaacaaggaaagattttgttaaactaatcaccatctttgggctgaggttacaaattacaatttcgattttgtgaaagaaaaaaaaaaacacaagcgtaatgtaccacatggaaaacgaaagcctatcatattttttacttttttttatataagaatgcacttgtcaaatgaacaatctcaatttgatataacgtagtaaatgttggatatttaaattttctttttaaaattctttattgtttttgaaaaaaaaaaattgttaagccagtttcgattactattttctttaccaagatcaagaaacaa

SEQ ID NO: 93795 - DNA, 919 bp, Cannabis sativa
  modified_base (854)..(858): a, c, t, g, unknown or other
gactgtctccccatcccagctcatttaatgtatttcttttcatggccacaatttccataatccctacaaaattactcttatcttctaataatgacagcaccgattcttgaacaataataaatatcactttcctatatatattaagaataaaatattttagagtataaagttgagcttatgtatctatatattttttattggataatattaaatttgaactatatattataaacgctttttatatatgcatgatcagactttgaatggtattaaagtggaatctagaccaattaagttgatattatattctttttaatattgtcattactatttaatattagataaatgaaatgaatctaacctacatgaaacttgaaaccactacaaaaatttttgtcacatttttataaataaatttttgattattaatttgtaatttttagtcataataaaaaattatttatgattaaaatataatatttaaataaaaattatcactaatctaattttaaaaatatatttagtcactataaattataatttttgtgattaatatttttttagtaataatataagaacgacgctttataattagtaaaaaaatttctcacttttatagttagttgtactgtgactaaatttaaataaaaaatattgaaagacagaaaataaataagctactaaaatattaattatacatatattttattattattattattattagggaaattatcccatatactattttttttatttttttttttcaaatttacagtttgatttttaaagtggttgcagcgctagcgctagtcgcaataggagaaaattatgtagaatttcgtaaaaatgcnnnnnaaaaaaaaaaattgttttgaagtgaaaaaatgaaaaaatccctataaaattttattgtatt

SEQ ID NO: 93796 - DNA, 544 bp, Cannabis sativa
ttttcgataataatacattaatattttgttacaatttaagtacaaaatgttaatttttgttgttaaaacaataatgtaacaacatacatttaataatttatttgtttagtttatattatatattttttatgttacgtaaatattgtcacgtcatcatttaacagcaaaaaattagtagtttgtacttaattgtaataaaatattaattttttgtattattatcaaaaaaaaatttaaatattaaagtgtaacaattaaaaaaaataaatatttttgttttcaactttttatattacttttatatttatactattatttatacattatttatatattgtaaaaatgaaatgaaaaaatttacaaagaaaataattataattcataaaaatatataggaaatgcctatggtagagactttagttttgtgcttatggtagggatatttttctagcccttgattgttgatctaatggtaataaagttgatgaaatatgatagtaatagtggaacctagcttatgatatttttacaccttttttgtctt

SEQ ID NO: 93797 - DNA, 533 bp, Cannabis sativa
atttaagctttcctataccataagcttctccaatcatgtcacccacaatatttttcacacaatcccaatactccattttctaattaaatgagagatattttttttttaacaagactgcaataactttatatttattttttttctagatttgatacttgttttgtcagttttttctttttttctttttccaaagttgttggcaatctattatttttttttttttcatattctctcaattttcgcacttattcccacacatatacaacaaacatcccatccaaattctcccaaactaaagatctacttatggtataattagggttaaatttttggatattcatgggcttatctttttttttttaggctcaatatgtgtagaaacaaagaataggttaaggctcaaaaagggtaactaggataaaatcacagggatggcttgaaaggcacaatcgatctaaaaaatgcctaaatcacttttctagccatgcataacttattattttgcctcaaatagcaagcaagcaagttctaga

SEQ ID NO: 93798 - DNA, 549 bp, Cannabis sativa
  modified_base (512)..(523): a, c, t, g, unknown or other
aaatagacaaacaaatccccataagtagtctaattaattaactaatattaagagaaaagaacacaataaaataaaaatgaataattaaaaaatcagataggaaaatagaaataaaggatattgttaattttgtatactcgaccgacacatcaactaaaaaaattaaatatgtgagaaattgcaaaattcaatttcttggtcaaatgtgatattttttaaaacgtaagagatcctataatttttcataacaacaaccaaaaaccaaaaaggaaaaaaaaaacatatgcataataaatgatgttcaattaataattatgtgtcacatgtctaataaattttcaactgaaattattaagataatttaaaatatataatagaaatatgtatgaatatgtgaaatgtcaatggccatatctttaagaaaacttttgacgcaaaagaaagaaaacgttttggtttatttacggggggtaagttgaaaaatactccttttattaatcaattaatcaaannnnnnnnnnnntttatatttatttgaaacatacctct

SEQ ID NO: 93799 - DNA, 530 bp, Cannabis sativa
tcattacagccacaaattaaatgaatatagtgctgaaatctagagtgagatagatcttttgtcatacagtctgaaatttgatctgccaaaggattgtatctaatttctaaggtcttgttgagaactttatcctaaagatagtgtatgtccaactcaatatatttagtgcgtgcatgatacactggatttaagacaagaatgctagcactcatgttcacacccagtaattagagttacagacaaaggacacttaatttcctcgagtaaggattcagtccaagttatttcaacactcacatgagcaagagctttgtattcagattcagtgcttgatctagaatccactgcttgtttcttagatgaccaagacactaatgtgtcaccaagatagacacaatagcccctgattgaccttctatcatcaacattacttgccaatttgcatctgaaaaaccaataatgttcaaactgtcaatatagaaaatatggaggccttgagtgctacttcccttcaaatatcttaggattct

SEQ ID NO: 93800 - DNA, 782 bp, Cannabis sativa
  modified_base (217)..(221): a, c, t, g, unknown or other
ttgtcccccaatacaaaattattaatttttagagatttttttaatataattataaatatatttatgttgtattaaatatgactatataccttcttttttaaactaatacaatttaaatttaaactttaaattcctatttcttttatctcttacatttaagtgacacttagttggaagtaatgaaatagagtataatgaaaacaaaaaaaaaaaaaannnnntttattccattcttttatttagttacatattaaaatactagaatatcattccaatagaataattttttcatttttttagcagaatgactattctattttaaaatagaaaaaaaaactattacaagataattttttattaatttttctatgcattttaaattttattccattacatttttattattattctcattctcatttctttacttatattttctttccttcaaactaaataccagctaattgtgtcttttttaacattacattttaaagttaatcccaattcacacgtctaaaaaatatcttcatattaattttttatttaattcacatatttaaaaaaaaatgtatttttttattatttttttcaaacaataaattaaaaaaattatttatatttcttaacaaattattgttataacgttgctactttttgtcacgttaataaagagtataatatttattaaaaaaataaaaaataaaaatattaaaattaaattaaaattataattgacaataaattttaaatattattaatttttttatataaatatcacttaa

SEQ ID NO: 93801 - DNA, 901 bp, Cannabis sativa
aaaaaaaaaaatgaacttcaaaaattttcactttctaatatttaggttcaaacaaaccaaaacagaaaagaagaacaaggtaaacttaaaaatagtttaatattatctaacgaaaaaaagcttaatttataaaagtcaaaacattttccagcatattgaaaatgtgcatataaaaagataagaattgctaaagcattagtatctacgaactttctgggtaattaaatggccacttataactactagcaatactttaaaaaaatttattaaaattggtttaataaaaaaatatagggtgattccacaatgcatcatcttaaaagggatgtactgatacactcttgacttgtttcgacatccaaaaaatttttttagtctatttttttttcatattcatgtatgttataactatttaagataacctacaaaatttttagatattctgaataattcacaatatagaaaacaatgttcaaacagcttatttttcacgcatataaaataaaatagtcacgcgtacaatacactgtttgaacgtagttttcggcgtgttaaatttttccaaattttttaaaattttgcagtatgtcttaaataactataacgtacatgaccatgagaaaaattttgactaaaaaaatatttcgggtgctaaaacagataagggtgcatcaatatatctcttttaagagactgcattatactattatagaatttcccaaaaatatacacgattttttttttttttttttgtcttttactctttttttctttataatttatcttcttataaaattcaaaattcacacaactatttaatttaccatgtaaactaaagcaagcatacaattaggaagactcaaaacaattaatacattttccccatgctaaaattgtaggt

SEQ ID NO: 93802 - DNA, 570 bp, Cannabis sativa
cccgaacttgggacccaaacccaggacccgaacctggactcggactcaaacttagacccagaccgggatccaaaaaacccatacccggactcggactaagactaagacccttaccccaacctggacccatacacggacccggaacaaaacctggacatagaatcagaactggaactgtgactaggacctggacttgagaccagaaccgaacccaaacaataaccaaaactcggaccagaacctgtaccgagaccttgactaggactaggacctgagacctgggacttgaacctagaccgagacccgaagtgggacctgatcctaaaccctcgatgggacctaagacccgcgagccagaccaagatccaaaccctgacaaggacccaaacctaaactcgaaccaagacttggactgagacttggacccaaacctagagcgggacctggactaataccaagacttaggatctaaacccaaacctcgacccagactaggacctaggaaccagacttggatgggggacctagaccagggacctaggccgtggaacccagaaccagatctaaaac

SEQ ID NO: 93803 - DNA, 584 bp, Cannabis sativa
ttcattcaggtggtcttctagctgcctatgagaatttcttttttgaaattccatcaactgttccatgtgaccctcaagaaaacatccttcacactgttaattctaatattattccatcaactattccatgcgctcctgcttctaattcccataaatctgttatcagttctgatgttgtcaattttgataaacctatttccaatactcaaatcagaataggaaggcaggttaacaaaccttcctatcttcaggattatcattgctatttggctactaacgtttctgctcacatgtctcaaggtatttctgccactccttatcctttgtctcgggttatttcttatcacaggttatttgttacttttagagctattgttttggccatttctagctatttcaagccagaattttttagtcaaggtcaaggcattccaaaatgggataatgctatggacacaaagatagatgctctagaaaagaatgagacttggatagtggtttctttacatgtagatcagcatgccattggctataagtgggtgtataaaaataaatattttgttgatgggagtgtggaaaggttc

SEQ ID NO: 93804 - DNA, 576 bp, Cannabis sativa
aaagagttgagacacttaactatttttgacaatattttctaacttcgataagataacgatgaattggggctaagtctggggttccatttgatttttctaagtcttgggggcctaggagtggcaactgaaaagaggaggagaccattagactcccactctatgttatatctcttttatcacaaccttttatgtgtttaattgaaattttggatgtttagaatgactattatatgagctaatttcaattttaaggatgttatgcaactcacttgaaccttttttatgaattaatgtagttttcaatttcttcatcattttctatttaattccatgcaatctatgttaatttaacaattatttattggcctttatagttattctttatgagtttgaattaaaatttgaaaagttcgatttgattatgcgctatggttgttatgaatgcaatttaatttagaataaaaatatctaggttgattgtataatttttatcagttgctatatttattattttctttgtgattaaatgttaccatagaaatatacagagcttatagattgagtttataagtctta

SEQ ID NO: 93805 - DNA, 830 bp, Cannabis sativa
  modified_base (561)..(562): a, c, t, g, unknown or other
tcgctctatgggtttgggaaggatagtggtgatttctagcaagtgacctccgttctcccggttgagtcccaagattctcctcattctcatgagggatttcccgttcatcagtttctggttgtctcccatcttgttgtttgttctaatttttagggggcgtctcattttccctagtttgttcctcccgagaattttcccgtctcctggtccgtgagccaggaggtctacctcgtggtcttctcactccaggttcaggttgagtttgagcatttgtcccttgtgctgccctggctgaggttacatcacgttctaactcagcgcttctatgttgcgcctcttttggacggtgtctcaggcggcgattttcgatttcataagtacgttctcccataggctgggcacctccacgattgagctcttcattcctcgtcctggggttccaatcactcccacgctgagttctccttgagcgtgttgtccacgtactaggaccaatgtcgggttcagctttctgggaacgtgtggtccgtgcactagggccaccctcaggttgagccctcnnggaacgggtggtccttctggaccgcgggttggtagaccttttggagcccatgggctctttcctagaacgatgattagtttcctcatgtggggtgttaacattttctggatttttagccatgaaggaggtgatttttcctcaaaggaagggagggttttttttgagcttttctacagaggctctcaatgaaagcaccaaactgttaatgcagatttttgttaaccaaatttcagcctcacggtagtgattccaaaaaaaaaaaaaaaaa

SEQ ID NO: 93806 - DNA, 1087 bp, Cannabis sativa
  modified_base (43)..(44): a, c, t, g, unknown or other
atctatattaataagtaaatcagattatattgaaatgagtttnntttaaggcataaaacccaacagagctgggtttattccttgagctatcttttaatacctttagttcagactgagtttcttcctttggaatatatataagtgccatgtcgttaaattatcccataactcgcctcccgcagtagacgagttagtagttattctagcctagagcgctgtcaattggatattgtcatttaggtttttcacctttgtcgtggttgtgctaaagcgactcaaaaaagccattagggattccccaagttgttgcttgatattcgtcaaagacgacgcttttggtcttctgttcctcgctgcctggaattactttttgaattctttagatagttgctcccatgaagtaatggaatgatttgtgaaattatcaaaccatctactcgctttccctattagggatgtaggaatcaatatgcaacacaagttattaaacacattacttgatcgcattattgtgttaaagttatttaaatgtgcaactaggtctgtggtcctattatactgcgcaataagagagttcttaaatccttttagaaattgcgaattcaatatatcagggtggaaaggttatgcatcgtcatttgagtcgtaccctagaagcttctcatactctccatcctaacatttcctgaattgatcttcctgctgaattatcctttgttgaatggagttattagcaggttgattggtttgttcatttgtccgttgagcatttttatttaatctttctcgaagatcttgtgtattcctatttatctgctcgtgtaggccaggacacctttgatttagatagtctttcagatcaggctggtcacgcatgttttggtgttgatcttgtctattattgtaattatacttactggccgacttgggaaaatactttttgattggtaactttgaaagttactcgtattttcttactcacccaaatattcatattgtggcgttctttcccctcacgatgggttttcccatgtgtgtgacctcaaggattgagtttgcccctgactcctcaacctactttgggttg

SEQ ID NO: 93807 - DNA, 676 bp, Cannabis sativa
taattattaaaaaatattttttttcaaataataaacaataaaataaaataaattattattattttatattcataacaataaattaaaataaataaaacaaaaaataacaaatctaaaaaaagaaaaaaatatctataagaaaatgtataattttattttaaattatatttttcttataaataaaaataaaatataaatttaatctattaagctttgaattatgtttgtaattatatgttattaagtttttaaattactattttttacaataaaatatttattgtatgtataatttttttaatatatatatggattaaataagattggttacttttacaacttacttaatatctaataggtacaaatacgaattttaaatttttcaatctaattcaattcggacagatatatataaatatttgcactttacaaattgtattgaattgaattaaatattttataaacactctagttttagattggcttttgatttatttttctctctaaattattttattttataattgtgttttaattatttgttcaagttttatattattcgcactgattttgtatttcttagtgttctctcatttgtattataatctaattgttaaacaaatgatctcatatctatccgtacattcgttggtgtttattacaaaatcaaatcttt

SEQ ID NO: 93808 - DNA, 597 bp, Cannabis sativa
taatgttgctttcctaggtttataattcccttcatcactctgttagcaatgttaaacctattcctatgaaatgaaacctgcataccaaacgggccctaaaaaatggtgttattactctgggtcttgcacatccaaactaggtttcgtccattggtaaatcctgttgcagttgagcttccatggagaaataaataatcaactcgtgtttcacatttacactcaatattccatttagtaatttgaattatgatgctctaattcttttatgcactctttgacctcaaataaacggggttcaaaatcaaaattcaaacacaaattatgatacatctatgaatggttggtttgaatttttttgttgggtagatgtatagttcattcacttgacccataaaccgaacaagatttttagatttagggcattattccttcaaaattttctccttaaaccctagtccttttcttctccaaatattttttgctctatttaacttattcccgggtattttcatataagtagttgcaacctgaagttgtaacaaagcaatttcacttatatgcataataacaacacttttttctttctctctctctctc

SEQ ID NO: 93809 - DNA, 599 bp, Cannabis sativa
aagccgagatagatagctttatggatactccaccagaagcagcaaaagtagattctgatgtagcagaactcgtttttgacgacgcaaatgacgaatctgctgctgcaactgatacaggagaaccagaacttgtctcaactcatccaaacatcatcactgattctatccagaaggaaccaagcaccagagttaaactgaatcatccaaaagagctcattcttgtaaatcttgaagaaagcatggtaacccgaagaaggtatgttaatttaattagctttctttgttttgtctcacaatttgaaccaaaaaatgtgaaggaagccatgatttttgaagaatggctcaatgcaatccaagaagaacttaatcaatttgttcgcaacaaggtttagattttggttcaaagaccaaaaggtatcaatgtgattggaacaaagtggattttaaaaataaaagtgatgaattcgatacaatggtgaggaacaagactcggttggtggcacaagggtacacacatgtagaaggtattgattttgataaaacttttgctcctgtagcaagattagaatctattcgtttactcttgtgtattgcttgta

SEQ ID NO: 93810 - DNA, 568 bp, Cannabis sativa
agatcaatcaaaaccaaagttgtagtatacctacaaaaataaaataaagagtattatattacaatatccaatgtattaaggattacaataggaaaataatatctgatgtatgattttttaattttttttaaacaacactaatatatgaattggctgaacacaaaattcacaatcataatatatatgttaatttatctataaactataacagatatgtaaccaggaaaaattaaaattcttcaacaaaagctattttgcagtggcaaccaagacacaacagttttggtacgtataccaaactgaattttgaattatcaacgattactttattaatatatatgttttgacatttaattaagtaaatagggcatgggttatcttatcttagattactttagaatttaaaaccagagacaaactaatataagtaagtagtactcctacatttagataggataattgattctctcatgatgaacaataaggactattatcaaataagttataattaattaatcaattgtatctatttctctacttgcaacatataaatttgtctaggaatgaa

SEQ ID NO: 93811 - DNA, 678 bp, Cannabis sativa
gactagatatcaaataaaacttttgtgcactaaactgtatacaacggtcagcaacttttgctcaaaattctttcaaattaggctaattaacctccctcaatagaaggttttgcacaatttggggatggaatacgaactcgagaatgtccaaaaaatgaccgaacagtgtatctcagaatatcttcaacaaattactcaaaattgtgttctttatgttaagaataacagagtaagtgcatgtagtaacacacttggatctataataatcttgaggactatatttgtatacccaatcctgcattcaaaaaaagaaaaataaaataatgaatgggcgaacagaagttttaaaactatattacaactacaaaacaactatgaaaaaatagtcacacataacaaaagtaaaaaaaaaattacataaacaaaaaaatagatgaaaacaaaacctaatagaaacaacaaaacatacaaaacacataaaaagcataaaaattcaaaaaatgagtagactgccccaattaagctccttcaagatcaagttttagggtagttcttatatttagtctgtaacgtccccgcttcaagcttcccttgggcccttacacccatggaatgatggttcttaaacactcgtgttggtctgtagggtcagttgtcagtccatgaagcagccagagt

SEQ ID NO: 93812 - DNA, 692 bp, Cannabis sativa
  modified_base (27)..(36): a, c, t, g, unknown or other
tgtttaatatcgttttagaagttcatnnnnnnnnnnttaaataacatacttgttagtaaatctaagatcttggtaaaatattttcaacaagaccatcccggataggaacaagctggttggagtcaactatttgagactaccttctaggagaaacaacttgctaaccggaactcatttccgaaggaggattaactttcttgaagattacacctggagtggacatgatagttattcaagaacaaccttccaagaggacaattattattccacgagacttcttccttgatagcaagaaagatgtctgagaacaaccttccgtgagacagataactttacagaaataatttttggagaaattttcattttagaaacattgccacaattatatggcaaaacactctaattaatgttgtttttctttatatatataccctttcactctatttcattatttatttcacgataaagaagattctgtttctacaaatacttctttaagaggttacacacactttcaacctgaaaatacgtaattttgagagaaccaattctcagacgtatatccaaaccttttctctctctggaaccttttaagggttgcatcccgttacattttctggtcccttccagcttgatctctcccgtgtggtgttcaatcttcaatttttaatcctccatctgtaatctgtatt

SEQ ID NO: 93813 - DNA, 1874 bp, Cannabis sativa
tagagttcaaagctctcactacaaccaaattattttcataattaagggatgtgaattttgtgataatacaaatcacaaagtagaaaaattaacaaaatataaattaagagagacattaagataaagaagaagaccttcagagggagctgtagtgggctgagttccattaataatctgggctcttgttaatgaaacatcaataacaacaaaccagcaaaccacatagataatcaaagtactaaccaatggtagtaataatgatgaggttcctgatcttcctgacatgatgataataataataataataattctacatatatatatgtatataaataactggactatatatatataatataagcaaaacgtcgtaggccaatattattaattagcgtaagaaagacttccattgtatatgttgagaagaatagtcaaatattccgatgacccatcaatgtaaaaagttgtaaaaagactattcttctctgcacttcatttaattgcaattttaacttcatttaattgcattttcttttgtggcatcgctttcttgttgcaaagtctcttatacaatttcatatcagcccaaaatgattgttggaataattgggtaagacaaatactgcggacaatattataaatgagccaaaaatgtctgactccgattgtgtccataagcagctgtggggccataactttataaccacgccacacttaaacaacaggttggaccagttggagccattcacttaataagtgatgactgaggctctctcatgaaaattataattgttgtcatgtgacacgagacagacagtccatcaataaacgagaggactattcttctgaggggtcttctcgaagtaaccaatgagtacgtaatgaaatatcattcaacaggaggactctagggaaatgcacatgaacatatggggccggcgatgcagggaatacattttccgccccgttcccacatttctcagtttagtgtgaataatcacgttaatgatgcagtcacgcatacacccgttgcagttgaagaaaagaatatagcgtgtagagttccatgaaagtggctattccaattcggaccactattacaattccaaacaagctagcataacataacactagggtttataattgaaaatgctaagtcgcatctcaccccacgatgtggtatttttatattgagttctataaatatttttatttatttttaatgtttttttcagtctttccctttctttatttgtgacttttggtattttattctgtattaagtcatttagagtgttgatagtgagaagttggtcacttttgaatgatttttgataaagaaaaggctctatgtgatgcataatttttgtgcaccaaaagtagttgtgtctgattgctcaatccacttggaacaaagctttgaagagtaggagaaatggaaagtagaatataacctagtctccatcattccatacttgtgcttcactgcctttttagagatagttatttctcatccttttatttatgtatttccttttttacttcttatttttagagtatttttgtgctcttgagtatgaagtaattttgttgtagttagaacttttaatgaacttggaattgtaaattttattgatgttttatgaaagtttttagccatggaaattttgttcattcaaggatgcttaattttatctaaccacttttacatgatcactaattgtaggttagttaatcttgattttgaaaaaaaaaaattaaaattagtgaaaatatttgaacaatatatacatatgattatcacattaaaaaagtttgatttgtagatggtataagaatatattttttatcatgtatgaccaattggaaattgg

SEQ ID NO: 93814 - DNA, 578 bp, Cannabis sativa
cttccgctcataaccgaagcaaaaaaccagtgcaccgatgctaattggttttttacttcggtcatgaactgaaggaaaaacatttaaaaaaaaaaaatctgaaataaataattccgaccaaaaataaatacaatatcaatcaataatttaacataccaaaaacttctctttttaatctcataattttttttgacaaaaaaatcttaaatgtaaaatatatatacatatatatgcataattatttatacatattatcaaaactaaactatctacaataaaacacacatatgtaattataaaaaattgaagtttgaaccaaccatcaacaatattttatattgtcctctgaaccgcatagtcaacaagtatcatcaagagttatatttaatatgtaaaatttctcattagtttgtaatctatcttacactatttcccaaaatacaaacttgtgtttcagtagagaaagtcaacaccaaacttcttgctgcgaagtgactttggtttggaccacctataactttcccaatcatagaaagaatcctatatcatgtgatttatttataattagttaacacaca

SEQ ID NO: 93815 - DNA, 873 bp, Cannabis sativa
aggattcaaaatcacagctccaataattcttaaaaaataataacaaaaaaaaaaactattaataacgaacaaaaaagcttcgtccacaaacaaatacaaaatacaaatcaagcattcataatcaaaatcatttctcaaacaactaacaagctctacaaaattgttcgctactttgcaaaagagattaaagttacaattcgaaaccattctcaccaagaaaaactccattaacgaaaaaaagcttcgatcacaattgccacaagaacgatcaagaattcagaatcgaatttatttctcaacaatagaaaatcatttctcaacaacaaaatagtgacaaaatcattgctcgaaaaataacaactcaattgactacaattcaaaaattaaccaaaaaatttctttgttctattaaaaaaaaaaaaaaactaaagtatacagcatatgaaaaataagtaatatgtaatcaaccaacaatcctaattatatgaaaaatacacatatatataactatacaaacaaattttttaaaaataaaaaataaaaaaccctaaagtatacaacacacatcaaattaatgtccgatcaaataaaattctcaaaaaacaatcaataaaaatatacaaaatattttataaaaatcacatccaatttttcatgttatcttcacagacaataaatagcttcagtaaactaatactggtaatataatcacatttaacatacattgtaaactaccattagcgtaatcaattcattagtatagtagaatttgcataataattctataatcttgctacatgtttattgttgttattaatgttataactttttacgttatcttcacagaagataaactataaaatgtatcagaaa

SEQ ID NO: 93816 - DNA, 1029 bp, Cannabis sativa
  modified_base (465)..(482): a, c, t, g, unknown or other
atcaattctagtgattagccctccatctgttggttcgtaattagttttggtcaaattaattttacccttctggttacttatttatcaattagtaccattaattcactaatgaaagtataatttagaatccatctaagtttgtgcacaacttttcagttcaagaattagcacttaaagggaactagcattcgatccgttaggaaagttatgattccataattgtagatcatattttcagccatccacgttattagattcccaaaacaaaagttgtaaaaatcatcttctcttaggaactttatcaagtgaatcaaagaaactaataacacgaacaagagtttgtgattactcaggatttaggtcgatctaccattgatcattgttatgatctgaattaggtctttatagtaaacaatatgttagataaagatagcttcattcatatcagtccttgtcatatataannnnnnnnnnnnnnnnnnccttcactttgatgtcatactacaactataatctgaactgagattatttgcaccaaagaacggacatcaatgaactatacaagcaaccattgattaaagattccataactttaatatgttttttattgtttcattcatagctaagtgatcttagttctctataaagctacaagtcatagtctcatataagaataaggaattttttgacatttacatataaattattcaataatgaacattaataatttaacattcaaacatgtatcaaaatgttcaactctttatacatgatcagaaatatctttataggttttttagggcataaaccctaatagattacgctgaatttcttggtgactgtgtaggaaatgagaaagatagttttagtcaattttctaatattctatgccattctttgtggaatgctagaaatttagcctttcatcaaaggatggttctaactttgttggtttaaagcacatgatcttagcaactgtagaggcgacaaacacagttttgggcccgagaccatgagactagaagattt

SEQ ID NO: 93817 - DNA, 1097 bp, Cannabis sativa
atgacaccaacgaatgcaacaatccgaaccgggaaattaaatttttgataaaaaaaaataacccgcatgttcaaaaatatgttaagaccaatcaaaatcaaagggccacctagacagatattaatcaagatttactgccaccactgatggacgagcatttacaagtcattattagcggcctacctcaacactagagaattcccagacaataaaaacgaagctcaaaaatgaggagaaagggtgcgtggtacatcatggtagagggagttatgtatagaagaggcctctccatgccattacttaggtgtgtaacacaagaagaagctccacgacttttatcagaagtacatgacaatttttgtggcaaccatgcagtcggacagagtttatccaagaaaattttaaggcaaggttatttctggccgacaatgattgaagattccaaggcctacgttaagaaatgtgataaatgccagagattttcaaagatacctctggcaccacccaacgaactgactcaaatgcaaagtccctggcctttccctatttggggaatcggcctgatcggatagttgcgcaaaggcaaaggccgagtgcagtacgtagtggttgcatttgattactttaccaagtggatggaggtggagccagtggcaaccatcacgtccaaaaaagtgcaagacttcattgtgaaaaatataatttgccagttcagattaccatacaagatagtttcggacaatggcaagcaatttgactaaactatcaataaaaacataacaataatttaaaaaataaataaaacacttaggtttctgctgcaacttttatgactaaaatcacgttatgtatgtgataggaaccaaacaagcaatatccaacttcttacgtgtttgactcggtatgtgacatgtgtgaccctaaacacattatttgtgacactcaaatgcactatgaaaaactttaattttaaacatagagatttagttatgacaattatgcttgtttccaaattaagtctgacattaggtctagtgaaatcggacatcgagaaagtcatctggattcaaaagaaacttgacccctctaaattcatt

SEQ ID NO: 93818 - DNA, 1112 bp, Cannabis sativa
  modified_base (944)..(946): a, c, t, g, unknown or other
tcatttaacaaaacaaatggtctaatcggtaacttttgcaaaacagagagtccaaaataatatttatcctaatccttcaaacaccaacaaatctgagaattatatcccgttgaacaccaaaaccttttctttaaagcaaaatatttagcttttaaacaaaatcataacaaaagaattcttttatatatatagaaacaaatattgagtttgaacgcccaatctttttcttaaaccattgttttttaatattgttttggaacgtaattgataaattatactctattttttaaaataatattttaaacttaattttcgataaatttttttattataaccaacttaaaaataatttttagcacgaatagatttaaaaaatataataactatataacacttttatatgaaaaaaaatctaatagtccttaaattagtgtgccctcactgtcccactaattattttagtacacattatttgaaccaatttgggtaaagtagattttttttttacttctatattgagttactattacgttttatttaacaaagttgccgtttggtaacacttttgttttctaatttttaaatcacaaaatgaaaataaaatttttgtttttaaaaaacaaaaatacgttctgtaactacttttgtttttcaattttaaaaacaaaaacaaaagtgtattctataaagttcagttttattttcattttttgattttatttacgtcgagtctaggttcggggtctgattcgggtttaggtcagaggtcggatttagcaccaaggccgtggggggatttgggtccgagtttgattgatgtccaaaatattgattaagaaaaaaaactgcttaaaaaaaatattgaaagtgaattttcttttgtttttaaaattttaattcttaattaaaaagtaaaaacaattttatagaacatgtttttgaannntattttcactttttcaattttaaaaacaaaaaaaatgatcaaaaaaattgttaccaaacgccaaaaaaaaaaaaaatcaactctgaatactaatttgtaaaataaagtattttattattcaacaaaacacaatccaatccgcaacttttatcaacaatggtattta

SEQ ID NO: 93819 - DNA, 540 bp, Cannabis sativa
tctgtatgttattttttttattgttgttttaatgttattttcttgttagttttatgtagttttcttgttactttgtgttgtttctatataaaactgtaaaaatgtaaaaaaaaaaaattaaatataaaaatgtaatttttttacaaaataaaaataatgctttatataattattccaatatatatttattttgagaaatgttaaaggacacaaggagtgttatatgtgtcggtcttgctatttgtattgagttttaaataattcaatataatagtttcaagaaaatattgttagttaatcgcaaaacaatatgtaaagttggcactattaatatctaatagcaatgctaatttatttaggtggagccttttaatcaagggctttatttactgcatgcttattaattaaccgtttgttaacaattattaacaaaccattctatatttctaccaaccaaaattatttagtgttaaaaaaaaaatcaaactttaattcaattccaaaaagttatcgatgggagtagaataaaagacaagggtt

SEQ ID NO: 93820 - DNA, 2030 bp, Cannabis sativa
  modified_base (2001)..(2004): a, c, t, g, unknown or other
ctctaaattggaggatgctattaggttgtaaacattattttttggtttataatacacttgctgatttaccaaaaaaaaatatgtaaaaaatgctttttgatattaatgagtaaaaaataaaacagaataaataaacttatggggaaggaatttgtattcttgaattaagttgatagttgatgaagaagaaacccaaacaccgaacaggtaagcaatgattttgccctttgatatatatttttttttttttgtctaaagataaaataaattactgacatatatataaaagtttttgtacgtctattaaaaaaatatgttaggccccattttcaaatatcattatatattatatataaaacctacttttggcaaagcctttgtatgtttattaaaaaaagtgtcagacccatttccaaatattacttgctatgatattgactgttgattgcattaattttttagacacttaatcttgtaacttaaattctatctctacaatatattaacttgagtgatatatactggacctttcacatattgaccgtaacgaattgatactacatttgacacattgatcactattttttcaacattctttttataagttgagctgctacttttttcatattcttttattcaaataattgctaaaagttatttgattgatacctatgccatgagtcataagttgactccacctatttatcagcctccttgagcgcaacatcaagagacaaataatgactactatgagtcctacatattaactgtggtaatttatatttatctactttacaaatgaagacgtagttcattaaatgacagctattttctctataacataactataatttgagtgctatctctttttacattttattgcacacattgagtgctatttatttttaagttttctagtaaattgagtgctagtcattcttatatttccaagtaaattgagtgttgtatataatttcatgaattaactgctatttatttgattatttttggtaaattgattgatactccactaatgatattttttaacttaaatgttatttctattatagatttttattgatatcttcttataaattgggtgtcaaccattacgataatttgtaaggaccaattccaacttttaatcaatgtcaatgctacaataaaagcaagggacaccattcccttgaatcgggtttctcgtttcaactactccataaaacctgattggtcgtagttgaaactagtctacacaagcttgaatggaagaaattcatccacattttaacacacatgctaacgtgcccgcaaaatggggcatgcaccatataatacaacattcacgttttaaagtgttaaaagcattcaactatgcgagctgaatgttcttcgatttgatttaacatagaacacaaccaatcgaaccatctatttcaacaatgaaacttaaatttgggcatttcgcaaatcaaaattttaaagataactcaacttaaagagtagggacaaactgtagagggcaaaattgggctcaggctcaatgttcacatgcaatgttttcaaaagaatactcaaacaagattgggttggactatttgactagttatgatgatacgatcaacataccaagcccaataggcccaaaacgatacagtcaagtcaaacattaacattattcgtgagccaacattcagctcatgatgattcgacccgcatacgagactgagtcttatcactcatctaacgatttctaaagtgatcaatcaaattgaccatgcacataacgatctccctgagcaagtgggagaggggcacttctcaaggggggtgagcaatcatgagtaacgcctttccatggatgcctataagagccactctcagttattgaaagagggacatcaattttaatcatctcaatacctcttacttattgttcattctctcattctctctaaaactacatacttgtttctgcagtcaagataggtggtaacttagttnnnncatttattctcatcttttttattaca

SEQ ID NO: 93821 - DNA, 781 bp, Cannabis sativa
atttatttaataaatttattttaaaaatggtaaaaatttaatttttgtaaaaaaaaaaaaaaagattttattacaaatattataatcaaatagtttgacttttaaaaataattataataggaactcaaatataaaaataaaagtatttataaatattaattattaaaaaatgtctaataaatattttaattaatttattttaggagaattaccctataaattattttttttaacttttttttttaatttatggtttgggtttctaaagtagtttcttcaaaggtttctttgtgggttgctatacaatttttggttgcgatttagattgttccgctagttacagtaggagtttttatgtaaaattccgtttaaaaaaaaaaaaaaaaccctttattttacgtatatagttaattataattaatttagttttagaaaaagaagtttacctatagtaacctagctaactactatctctaattcagtaattagctatctctaactactcttgcctaatacaatactcataattataatgcattgtgttgcaatttgcaacttttctttctcttgtgttaaatgaacataaacaatatttatttcaactaaaccactcatgttattcttttctttctgtttttggttaaaaagaagggaatcctccaactctttcttttctttttcttgccaaataaaagactcaaattggattgttactttgatactatcatatatgttatggttaatatatatgcagagttttaattaggtcattatgttgtga

SEQ ID NO: 93822 - DNA, 607 bp, Cannabis sativa
gaagcaaataatcaattagcgtcggttcataattgatgcaaaaactatcactatttgtgtctacgactatagcgtaagatataccaatcgaaacaaattttttatatatcacttaaaaatcgaagcaaaaaattctttttgtagtgatattattttcttcttatcctttttttttttaataataaacattattaaaaaataaaataataattataataatcaacaacgtggacccaaacattttaattgggcataaaaatatatattaaattaaaaaaaatatatggtcattttaaaaatagttagagttataaacaaatatatataatctatatagattgggctttttgtaaagaaaaaaatgaatattttaagtaatgataaaaattttaaaaatggtatttttagaaaaacaaatttggcttttttcttttaaagaattttttgggctaggagtggggccttgggcaagcgcctagcccgccccaccttttgtgccagttctgaataatcaaggggatttttatagggaaacttacaaaaatattgaaatttgggttaagttttacaaaaatactgtcacacggaaaaatttttaaaaatactg

SEQ ID NO: 93823 - DNA, 568 bp, Cannabis sativa
cgaacttgcagtggctaatttatcgtgtcttcagtatgctttaggcgaagggtagagcttttaatctttggcttttcacataccttaaccttattcccaggaaattttaggatttgtttagataatgttttcaccaataacaaatgtgaaaaaacataactctctgatatgtagatactttttatgggaaaatgagaaaaagtagttttttgatctgatctgtagatattttttatgggaggtatgaggatggagcctcaaggatttgatcttaaaggcaacttcctttagactccttaatcgcctcacgccaccatgattttgtaaaataatggttggccatcagtaatctgcagctatactgttaaacagtgagtcagctaattagattcttatatttctttgaactataagaagtggctgaccatgaacttttaaataattatcaggttggttggtgaggtggcttacacagggaaccatgcttgggttttcctcaacgatttatccaccagatatgtctacagcaagttggttcctgaagtaagaatctaatcatgatagttaa

SEQ ID NO: 93824 - DNA, 759 bp, Cannabis sativa
aaaacattagtgtgagttgccaaattggaggaactttaacctcaatagccaaaaccaactaatgacaatcgctaaaaaaattagtgaatcttcaccctcgactagagcacaaggaaatggcgtggcgaagagcaagagtctctatctcaaggggagaagacaccttggctttcacagtaagaacttcaagtaagctcaccttgactatctaacaccaaaatagcaaggaacgcctcatcaccacacactacgacatcaacaaacacattgaaatcacagggtcaagggttagggtcttggtttttagagttcatattagagttgcaatgaaagtagaaataggattgagtttaaaaaaatatatgttgttgaatttgatatgaaccttaaaccccgaatcttaacacaatattacgtcttgttgactattaggatttccttgaatgttttcgtataatatattaatcatccaatccagtaatgggcttgataatgaattcacatcttccagatcagcctcaacactcaagatgagagtgggcctatagattaaacaggatgaatgactttttttattacagtgtgtactcaactcatgagacactgtaacctgaaattggcaaaacaccaattctccttgaaaagatagatagatagatagatagatagatagatggattgatagatagagagagagagagagagagagagagagagagagagagagagagagagagagagagagagagagagagagag

SEQ ID NO: 93825 - DNA, 631 bp, Cannabis sativa
aagtaaaacttatgttcattgttcgtgaaaatcatgaatgatgaatatgataacaaaaactaaaagtatcgaactaaattgtgactaaaaattcaaagtccatactctatagtccatccatacattccgtactagttattgtccaccacaatccctacatacgatatatctatatccataaaaatgtttaaattcaaaaagtgtttgtaaatttaatgtccatttgatataaggtataagcatttataaaataatagttatacactaatatattatatacatacacacataattttaaatttttcatttcctatctaatagataaaataaataacagaaaaaaaatataaaaaaatcatatttatatcttaatttttactttcattgttacacatatacatataatttttactaaaatcttttataaaaaaatacatttttttatcttatttatatattaaatttctttaaaaaatggattacctctagatgaaaaaaaaaaaagtcattcgggttcgtgggctggtatgggtccaatctgaacctgcagattaataaaaatcatacctgaacccgcccaaaagagttgatcaggttggacccgacccgcctgtaaggaactggttttccc

SEQ ID NO: 93826 - DNA, 520 bp, Cannabis sativa
gagcatagactcttaatgtgtaaataataattataatgtaaaatgagaaaaataatacaaaaaatgtaacaattagaataataaataggatattttttcccgaactatgttttttttttaaatttttatttaaatttaaattttagatattttaacttatttaaatttttaaaaccgttctcatcgtacctcacgtatattttagatatttctacttatttaaaattttaatttttttataatcttttaatcaaagggatatcttcaaattctattaaaaaaaattgagaaaaaaagttataaaaaaattatataaactactctaccaataaacatatactatatttggttgatacacactcaaattttatatatatgaattttaatatagtaaactacgattaaaaaaattgaaaaactaataaataaaaataattaaaaatattaaaaccagagttacttaccacaaaattgttggtatatattatatataatttattttttaaaatataaaaagtaa

SEQ ID NO: 93827 - DNA, 686 bp, Cannabis sativa
acagggttgcatttcgcaagcctgggcccatgagacatgcgaggcataaacaggatgcaacaaaattctatagattttacaaggacattgagcatacaatggatgaatgccatcaattgaaagacgagatagaaagtcttatctcgcgtggttactttcaacagtatgtgaagtagggcaatggacaaaactatccaaatctgcccaataacccaggcaaccaaagattacaacctcctccccttgaaggagaggacattttggttatcttaggagggccacatctcgctgtagaaagtaataatgcccaaaagatatgtcaaggaaattaagaacgagtagttagtctttgctccagaatcgtccaagaaagctaagactcaggttcctccaattgtgttctctgaggaagacagaaaacatgggaggtaccctcatgtcgacccgctcgcgattacaatcctactcgccaacaaaagaataaagagggtgttggtggataagggaaattcaatgaacattctttataaggatacattgaagaaaatgggactggaaagtgccaagttaaaaccttgcatggtaaatctatgtggatttatatgcgattgtgtcgccagtcaaggaataattgaacttccattaactgtaggcgaggcgcctttatccaataccataatgcaata

SEQ ID NO: 93828 - DNA, 631 bp, Cannabis sativa
cccgtggtcccagtcccaaataccagagctcccgatgccagcacttcgggttctggtaagtcccctttgtcagtgcattatgttcctcccgtccgtgagtattctcgtcttaggcccatagggttcgatgagcgtctccgtaggtttagaatgccttcttcctgctggggggatcatgccttcatttctggacctccggcacctattcctttggatcacttggcctacctatcttccagccagtttcttccctccaacagttatcttaaggatgatgaagccagtgccatgattcgagactttgctagggccgaattagagggtcagggtaggactagttttattgccttttcgctaaatgtagtttgttttcattaatgttttaacacttatttctttattgcagcagccaggcccatggacgatctcttagcaactcttgctgaagcctacagtccggactcttctatacctccggttgtctcccagttaactactcccggcaagtcctcctccaatgctccttcaggcaccattgtcctagtggacgaggaagaggaagttgaagaaggtgaagcggaggacccggccgcccttgagcgtaactgaaagggcaagatggtggaggcag

SEQ ID NO: 93829 - DNA, 527 bp, Cannabis sativa
  modified_base (363)..(377): a, c, t, g, unknown or other
tcctacaatgtgtgtcactaaaaatatgaagtgtcaataaagggtaattccataatttaaatattttttttttaaaaaaaattgttgacctacggtgacacgctaattgcgactagttaaatgtatcccaacatgtctggcgcatcattaaaagttatatttttaattattttttaaaaaataatgagtacttggaaaatgttcccaaacttaattaataataataaataataatgaatgtccttttttgaaaaaataaaataaaaaaagacagcatatttttattttaccctctctctttctcgcctaaatgaaaacccaaaccctagtacaattagaaaacccaaactctctctctctctnnnnnnnnnnnnnnntctctctctctctctctcattgcatttctttctacggttgtagattcacacacacgaaaagaaagcttctgatgagatcgacgttcccggcctcccactgcgtgcgacgttcccagcctcccactacctgcgacgttcccggcctcccac

SEQ ID NO: 93830 - DNA, 553 bp, Cannabis sativa
accaacaatatcccaatggtgttgaaagaaaccaggtcccataccgtctggcccgggagctttattggggtgcatagagaacactgcctgcttgatttcttcatcttgtatgggctgtaggagagcttcattatgtgtggcgctgacagatactttaatattatcaatgacttgggcagaaaagttatctgtagagtgataaagttcttcaaaatactgctttataactgaatgtagcccagtgttccagctttgccaaacgccattgttgtcttggagttgctgaatactgtttgatctcttacgagcactagccgtagcatgaaaatatttattattcttgtcacccgagtgtaaccaatactgcttggacctttgtttccaatagagttcctgctgtgcaaggatttcaaaataattgttcttttccacagtaaagttttcagcatcaaaattcagagtagaatttttatatttggccaataggttcttacttttctgcaaacgggtcttaaagtttccagtgagatgacgaccccaggcagccaattga

SEQ ID NO: 93831 - DNA, 1157 bp, Cannabis sativa
tcaacaattgcttgcttaatttgcttgctgcacagcaaactggtatgaatatctccgaaccacctacctcttctggtaacacaggtatcttactatcccataacacaatctattttacataattcttggattatggattccagagctacaagacatatctgttccaatataaaactttttcagtgtatatgcaaaataccagttacaaaactcattttgcctaacaataattgtttttatgttagtcaaagtggcacaattgttctcaataataacatcacccttattgatgttctttatgcccccaattttaagtataacatcatttctactagctatatgacaaagaatactgctatcaccatacttttcgaatctgatagtttttttatctaggacaaagccataccggaggatgattggaaaaggtagcaatatcaatgatctctatatccttgatgaggcaccagatcccttccaagttctgtccatttcagctgaaatttggcattcttgacttgggcatttgtctcataagcgattagatcttctcggggaaactttacattgtaacacttctgctttacataaaaataaaccatgttatatttgtcccattgctaagcagaaaagactctcttttcagaataataataatctaaaaattgtatttttgatctcatacattgtgacatatggggaccttatcacatagcctcacacactaatcacaagtactttctcaccctagtagatgaccactcacggtttacacggatttatttaatgcagcacaaatctggtgctaaaagcataatcccacaattttctatcctatgttcaaacacaattcaactgtgtttttaacactttcaagtctgataatgcacctaaattagttttcaaagaattgtttgctcaacatgggatcatgcacaactttacttgtgtcgagacacttgagcaaaatgttgttgctgaaagaaagcatcatcatttgctcaatgtggctcaagcattatattttcaagccaaattcatgattgaaaagttaagttggggttctaagactttgattttcttatagcttagtgaaagtgtaagaattgtggttaatatttttgataatgaagcccatgatcttttagaggtcatgc

SEQ ID NO: 93832 - DNA, 998 bp, Cannabis sativa
gggaaacatctccttaggatcaaactatacttcaccaaatggctccttctccttcttcttctgaacttttggttcagaagaaccaaactcattgacaaaaggagatctacagtgcaatctagattttgcttatctcttgagagcaaccctagattgcaaagatactacatctagtacttcaacctcatcatccacaataggggatgcagaatcaggaattgatacccaatcccattgatcattttttacactattttgcgaggcatatgcccgagtgaggttgtcaaccaaatccaaaatggattggtcgacttcaatgtgttcataagaaaacacaaaggcctcatccttccgctcacctaaaccagaatgaacctgaaaaaaaaacatgaataacagttataataaagacatcactaataacaagaaacaaacaaacaacctaatcttcctgaacaactgacaattgcagcccaccagactcatcatcataatcaggaagattagatttcgaaactacctacaaaaaaacaacaaaaaacatagtcataacctgtttttaaaaaagagaaagaatgaaaaaaagaacataaaaaaataaatggttatacaacataaaaaaaactgaaaacacgaaaaaccaaatgtaaataaaaataaccaattataaaaacaaaaaagcaacaaaatgaagaaaaaatacctctggtgacaatggattaggtaactcatcatcattgccaccaacatcaagattctcaaaataagaatcctcagccttatcctcgacatctttgggcacagacgacccactcttcctcttcaacaactcaatcacttcatcaaatttaatactaaactcatctttcaaatttttaatactcaataaaatcttcttctggtcctcttgtatataaaccaaagtcgactccaacttagaaaactgaaaacaaacaaacaagaaaacataacaaaaattgaaaaacatataaaaaaaa

SEQ ID NO: 93833 - DNA, 787 bp, Cannabis sativa
tactctaaaataattctattatgatataatactaatgattgtttattattattattgttacattgatattttttggtattttaatttttttctactataattctttttagttataatctctcaattagaatataatttgcttggtcccaactctcaagtgtattcttggatagaagttctactatagtagatttaaagagatcttcaataatagatttaatcttatacaagaaagaaagttgtctagcatgagaaaaactaagttgtaagtttctcttttaaaggggaatccccttgtgagtgtaattatctttcttgataaaaaaaattaataaagtaaattaatttaaaagataattatagcagaattatgtatctaaataagttggtggcaaaagtacttaagtaatcaattttgttatagttaattattagtatgaaaaaaattaacaaaatttatacgtaaaattatttttgaaaataattacgtatataaaaataattttatttttttttaaaaaaatatatataataattcaaaataaaaagtaataaattgtttcattattaatattattttatttttaaataaatatataattaaatattattataatatgtataaagtcttaattgtatacatgcaatcttactgtaagagtatacacttaacatcttaatgatcatatgatctaaaatcaatggtcaaaaaaactttcctacaggtagggaacttatgctaagtcctaccataatcgagtcctatatatatcaatggttttcatct

SEQ ID NO: 93834 - DNA, 531 bp, Cannabis sativa
  modified_base (482)..(485): a, c, t, g, unknown or other
taggccaaaaatagcctaacaaacgtgtgagtgaggataaagcacgctggaaagacacatgctacattgcagtactaatgtcgatccaagaatcaattaagaatagtgtatggcacacgatatcagtttgagaatgtattagtagtctatagtgaagaatggtatgattggaaatgtatcagaatgtttagttattagtaagtgaaattagagtgttggtggccagcaagattatattagtctgagaagactcccaactagaataggaaaaaataactatgggttttaaagtaaaatcactgaggactaccgaattgtatgaccccactgggataatagtggataagaggcactagatcaactattaatatagacaacatgtaaaacaaaataaaatgttgaaatgaatattaaggagacggttaaacttcatgaagttacaaagttaactgtactaggtcatgatgttgggttttatgccnnnnataaaactcatttcatataatcaggtttacttattaataaagatca

SEQ ID NO: 93835 - DNA, 1014 bp, Cannabis sativa
agtagtgaattaattagcgtgtatattaacggcgagaatcaacatctccctttaaaaattagtgtttcatattatgttaaacgaatgaaaatttggcacatcaacaaatctaatttatattaaatatgttaagtcaacaaaagtagttaacatatttaagataaattagcttaattaatgtgttaaatttgatttaatacagtatcagatacaaatttttaaccggagatcttgattcggacggaatggcaggtagttaaacactataaaaacatccaatttcgttactatttcaaacttttttcattattattattttcaattaattcgtctttttctaatacatgcaattcatgaagttgagcattttatgagtcctgaaactatgttgaagtttatttgacaaaattaattaaattaaagtaggcttttttggaggcatgaaccaaatttcttcaactcattgcatatttttattactttattggaattacattgatcaaatataaaagaaacacttgatccacacaagcaaattactcaaaatatactacatatattagctactgtgtagaacttaaaaaaaaataagagtcctcgcatgcatgaaaccaaacaataatattggctggctcaatattattaatagcctcatgatgaagttatttattttttgaaatggaaatagcacaccgggcgggaatcaatccatgcaatcaatcgatccctttattataattgcatgaaacacagtactgttgtgatcgattaattgatcaagtactagtagtgatgaactcctctattttctcattatcatcacttgttggagttaaagccacgtacttgcaactgaacttgaagtcgaagaaattaacccctttgaatattccatctgtcatcaccggatagggtttggtgtccccactgcagagaatatcgcgccgactataattgaagggtatatcacacattgcctcagtcgcatccagagtcactgttactttatgcttt

SEQ ID NO: 93836 - DNA, 643 bp, Cannabis sativa
atgaggccttttgggaaggtgcccaaaaacaaaaccgtgagggattaggcccaaagcggacaatatcatactaatgggagtcaaggtgaggtagcgcaccaacaagatggaagaacggggcccaacaatcgacaaataagaagacgaagccacacattaaaaaatataatataaaagtctccaaatatctatacacttaaaaatataaacaaacacaagttaatataacacatcaaaaatacattaactcctgagtttgttagtatatttttgatgtgttatgttataagtttatgcctgtctcatgaattagttgtgcatgcacttaaggtggatagtgaattagtctagaatgagggttatccattttttttttttgaacaatccatctttccttattgatatgtattaaagttttgttcttgttaataaaaatttaatttttttaaaaaaaacatataatattaatatatacataaatccccgttttaaatgaaattaaaactccaaacaatcaataaaatttgtttagagcagtgaaatagtattttataaatatagagcatgaatagtaatttttaaagaaactttaaattaaagaaaatgtttagagcatctaatgtagcgtatttttaatttagtt

SEQ ID NO: 93837 - DNA, 1426 bp, Cannabis sativa
catttattatttatgtatataaatatatataaagaaaggtttatgtatattgattttcagtgtattaatattgtattatatcatatgataaaataattaatggtgtaaattatgagtactaatagagaatgagcctcttatatatattgtgttagatagagaattttgcaatgattgaaacggtaaaaattaagctttattataattattttttaaattatgttttatatttactcgttcaattatatatttaaataaaatttatataaaattatgaataggataaataaataacgtcaatgaatttaattatattttatacatttattatttatgtatataaatgtatagaaagaaatgtttatgtatattgattttcagtgtattaatattgcattatatcatatgataaaataattaatggtatgaattatgagtactaatagagaatgagcctcttatatattgggttagatagagatttttgcaatgattgaaacggtaaaaattaagcttcattataattaattttgattattattataattatttttaaaattgacaaccgttgttattcattaaatcaattataataaattttattaaaatgaaaagttgattataataatcaaagtgcctttcttagcgaccgaattatctttgataatgtccttattgctaatgaggtcattactgccattaataatcaaaaaggtggcaaagttggctgggctgctctgaaacttgacatggaaaaagctttcgatcgagtggagtggggtttcatccaagtgattcttactcaatttggttttccctcttcctttgtttctctaatccttaagtgtctttcttctgtctctttcaagatctccattaataatactctacttccttctttcattcccactaaaggcattaggcaaggggatccactatccccttacctttttctcctagtcgttgagggtctttcggcagctattcgtgtctactctagacatactaattttaaaggtatctctatctgtaggtctgctccttccatttctcacctcctttttgctgatgatagccttctgttcaccaatacttctcataataattgtaggattattaaagatattctttctctctatcataaggctattggtcaatcagttaacttctctaaatattccattcttttttcaccaaataccgctgtttctgacagagacctcttccatagcacccttggcattgataataagccttttgttactaaatacttgggagtcccacagtgctttggttgatccaaaaattcttccttccattacattctccactgggctagtgctaaacttcaggtttggaatcataaatttttctcaaaagctgggaaggagactcttattaaagcggttatccaagcaattccttc

SEQ ID NO: 93838 - DNA, 874 bp, Cannabis sativa
aatatatgaaatttttatattatacacagtactgcttcatggtgtatgcatatggcttttatacatattaaataaagtgtagttgattgaaaaaaaaagtctccgacacacaaatgtgtctctaatacatgacctgctcaacttttcagaagctgatgatgaccttctgcaccacacaattaaaacatgcgtacattacattgacacacccatctaccaaaatttgtgcaattaatatgtgaaactattaaaggaaaagttcctttctttctcctataaatacagtaggccattacatcaacaagtgtgtaaacgaattacaaaagaaataaaaatattaattaagtttaggagagtaaatgatgaagaagtttatggtaatggcgttggtagtgggtgtgattgttgtggggtgctttggttcactacaaccggatattcatctgaatttagaacctcatgatttgaacccaccacttgaatattatgtcatttacctcaaccaaactatgaatatttgttgattataatacatttaaattttacttaaataaaagcctaataattttttttttatttttttattttaagctcacggaaagtgtggaccctaaatacgagtctagccggcctatccctaggaccggccctgggcacaaggcaagatttgctgtgaaggactgcattgtataggtgatggaggatggggtgagaatcgaagatgtgaacctgtctcaagctgtaaacaagctggcgaaggttgtgctttgctatcagatccctgttgctacccaatgatgtgctcagctacctcgcagggagaatgttatacccctggattggccttagctgatgttcaacaaaacaccccatc

SEQ ID NO: 93839 - DNA, 618 bp, Cannabis sativa
taaaaaggtaataaatcttattttagatagtttaatatgatctctaacatattcttaatatacaatcttaggttgtcctacatacaatcttaggttttcctctgtttcttgtacaataaaaattgaaatgaaactgaaaaagaatgatagaaaataagagaaaatagatagtgtgtgaagttggtataacatgtattagtgtaatcaaaacaataactctgtttgtagatgttttctctagaaagggcagagtcacatgggggtgcaggaattgtagcttggggtacactttgcaaataaaaaaaaagtaggaggattggaatttttgaacatatgagattggaacatagcagctatcataaagcatgtgtgatcgattgttaacaagaaggacgatctatggatcgaatggatacacaatgtatatatcaagtcgattggtggagctacaatgctccatccacaatgtatatatcaagtcgattggtggagctacaatgctccatccaactgcagttggtattggaaaaagattattgaagccaaagacagagtaagacaaattgttgatccagtgcaatttgcaggggaaagataccatattgcagctggttataa

SEQ ID NO: 93840 - DNA, 1122 bp, Cannabis sativa
tttttgaaaaataagagaacaattttattggtgaagtggtaaaacctcaaaaacttaagggggaaacagacatacgttttttttttttttgaaagaaagaaacagacatacgtttggtatttttaataatgcataagatgcaactctaacctgaaacataaagcattgttaagaatgtccctcaaaaaaaaaaaaaaaaaaaagcattgttaagaatgtgaaagttgatgtaaaagtaggagtagggtgggtgtatgataaaatatttggggttttatgttaaaattaattagttataagcggagtagattatgtatgcattttaaatattttataatctcaaactcaactactaaaaaaaaaagtgtttactaatatattaatttattaatatgtatgatttagttatcacataatattctaacattctataaaatataaaattcataaaacgataattaactaagatagcttctttacactcgaaaagcgatagtttatatagtcttccataaagatttaagtaccactttgtatagtacaggtcggtcctcaactcactaaatgcgaagagagagagagagagagagagttttgaaaatcactatgaaaaatagatagctttttttgtgagattctaggctagaatcacatagaattaggttatctgacaaagttctatgtcctcttttaatcctaagatttatttaaatatttttcaatattcttattctagattaaattgatacctactcacaactctcactcaacactagttgtttagtctagtgcacactaaagcatacataagactttttactgttggaacttattttaccaggcagggccgaccctaagcatagtgctaggcccgcccctaagatccactcattttaggagcccaaataaaaaaaaaatacattttaaaaaatgtacatttttttttaataatttttaaaaataccatttatccttatagtaagagtccaaaaaatttttttagcctatgactcatttcaaccaagatctagatttactaacatgtatgtttgattataaactataatctaatatcctaaatataaatttcttaaaattataaaataaacacataagagatta

SEQ ID NO: 93841 - DNA, 788 bp, Cannabis sativa
ggcctccctccgttgagcctcctcttggaatgcccgcctttcggcagacaagtcccgaaggattctcatggcctcgtctatgccctcgaattcgaacatgactaagccatggtcaatcaaagtcttggagaggcggccggtctcagcagtaatttgaaaaaagcggcaagtgtgagatcagatgccttagacaaaatattaagagatggaataaattacgaagtactcaccgcggccatggcagagcttatgtcttggacctggtagatagagttcaaggaggcgcaagtagcatatctcttaggtgggaattgcgtcaggtgggagacgaactggctagtcatctccgaggcaaacggagccaaggtgggcccaacgaagcggttgaaccagtccgtccggattccggaaggcttcctcctggagagtattctgctactcgtcccgaaggattttcttcaaggcttactcgtcaagggcgtaattgtgtttggccacccgaagattctgcctctcctcatcagcatgaaccggagtcaacactctgccatgaagcacagtgtattcctccgcctcggagggaatcccagagtcatggctcggggctggagtgtttaccctgcgggctgcttagaggactccacctccatcatcttgccctttcgcttacactcaagggcaaccgggtcctccgcttcaccttcttcaacttcctcctcctcatccaccaagacgatggttcccgaaggggcattggaggaggacctcccaggagtaaccaactggga

SEQ ID NO: 93842 - DNA, 544 bp, Cannabis sativa
tatgggtgttcccagacgcttcccccatgtcgcattaaatgtgaggtgaaaatttgtctcgagttttgctagtttggagaagttcatacgcccttcacctctcggagaagaagtagggctgttcttcctacattaaggagcttgctcttgaactagatattggttcctttgaaggggatttggttaagtactttgctcatctctgagtaatgggtcttagtttgcccgtgtcctatgctgagactgccacgtatattgtaataaacttgggacaacatttacccccacgccttatttagtcgtagataaataagacttttacactgtctccagcctcaatgaatgctatgacacgtgcctcgagcacgtgggccatatttatgatcatcatcattctcccttgtctctttaacatgcaacgatttgtttcccgtctattgacagacccctccatcaatgccgatgtcagaaagatactcaaacgtctttatcgccctttcttctcatcatgctttttcatcctgtctgttggattaggggattt

SEQ ID NO: 93843 - DNA, 570 bp, Cannabis sativa
aaaattggggcacgattttgtaaatatcaaaattcgaatggcacgatttagaatatgggcaattgtcatattagcaaaattgaatgaaattagacaaaagtttttaaattcaacaatctcaatagttcacatgaaattttcaacgacatgaaaagttcaaaaagcataatttggtacatgtcaaagttcaaagaacaaaaatcttaattaacctatttattaatagtattttcaccatcaaaagagttagagcatctctaataataaaaatacaaataactgttggaaatgcaaatataactcactttgttaaaaatctaatccaataatgtactaaatcatgatgcaaatatatcacataacaaaaaaataatcaaaatttagataacaataaataaatgttattcttttatatttattattatctcatttttaatattttattattaaattttaaataacatgctcagtattattattaaattttatatttatctttattattattattattattttatattttttttaataaattactgagccttagatgacaacaatagcaaaaag

SEQ ID NO: 93844 - DNA, 924 bp, Cannabis sativa
tgctggttatgtgtttgggaaataacatatatatatatatgtaatagaggtttagggttttctgctttaaattgaaacgacatgtagcttttgttaaaggggttgccgtttctttttcttgggtgtttaaatcaaaaagtcaaacaaagttttgactggggtaataaaggttagatttgaccattgcttttgaattgatttctctctgctatgtgtagggataaacagtaataaaatcctacatatataaataaaaaaaaaaattagtaacaaactttaagaaagatatgaaagttttacacatgataaaataattttgaaaaattagttattattaaaacttatctcataaaaatcattagattctcaaataatcaagtaataattaattgaagttgagacacacttataagataaatatataaaaatcaattaacacactacttaatgataataaaaatcactattataaatgagctattctcaacagttaataagagagtcaactatgaaaattattggaataggtaagcgaaagttttatccatcggtttagcactaaaggtgggataggtattaccaactgtcgtagaaaaccgtgggcaatactagataatttttttaaaagaaaatggcaaatcccaactatttatttttagaaatttatatgtaaaacatgaagcataaataattgtgtataaaaatataaaattaaatcaaacatataaatgatataactaaaagattgaaacacctacaatcattgattctttgagcttcaatcccacatgatctttggatctacaaaaaaaaaaggaaattgattattgtaggtaattggattgtcaagctctctctactctatttagatagatttattgcgtttcagtgagtaactcggggagcggtaccctttatatatag

SEQ ID NO: 93845 - DNA, 1731 bp, Cannabis sativa
taacggcaaaaaaagttcaggggacatgatttagtatatgtcaaagttcgggaggaaaaattactaattaacctaatgaaaaataaaatagtaacaaaaatatttttgaacagttttgagcaacatatcaagtgtattttcttttatttcaacttgtttttttctgctttcatttctttgaggatcttttctgaaatttgttctcttcgtttatatatcttattccttatcaaaagaataaatgggccaaggagacaaacagagagaattatcagaaaagataaagttatttcataaaacccataaggatatatctctagattaagggaacacatttgaacattctaacctgagagaattaagaaggttctgaatgataaatgcaataattagttgaaagcagttaattgtattactttactaaaaattggaatttgagtggacttacccgcttcttggacagtgtatctataggtgacataactactggctgaacatagtcctttcccctataaaatattacggtgtcatttccaattatctggattggaatcccaccactcagtctggcaatttcttgtgcatactcatgtacttggccaggtttagaggaattgcagataacctttacagtttcatgttttttccaatgcatatgcatattaagaataacacctccaaaaatgcctcttctcccaatgggcacataatttgaccgtttttgggccatttttttcatataaaaacgttcctctcctgtcaaggtgactggctcaacaacaggaccttcgacttttggaacctcatatcgcttaagtctttcaatcaacaaagtttccttaattttggcctgaaaaatatatagcacaacaaatgatcacgaaaactatccataaaaagaatatttgcgcaaagaaaagatattaatatggttctatcatctcagaacaggagtaacagtgtgttcaatctaagcaatgtcattttttggaaacacaacagagaacacaatttcaaggagatattatgttcatcctttgcaagaaactgcaaatgcattctaatacagagtcaacagaattttttccgtggaacaaatcaaatcaattttacagtttctttaataatccaattaggaagaagagccacttgcactatgaacgccaccatcagtgtatatagataggcattgattacttaaatcgcaaacttcccttccaacaatgtcccctcaggtttcccgcaagtaggtgaataaatcataccgttgttgataaagtgaatcagtcatatcatacccagtgaggaccagaagatacagaaggaaaataaattgttggctgatatcatttacactagaaagatctaatctgatggataattctgcacatgagcatcaggtcaccaaatttcgtgccaattttcattcaaaacacaatatccaattaattttacccactttttagtgttgtagagaaattttacccactttgcaaaaaaaaaaaaaatgcatcaaatataaacgtaatacatagataggtggctcgactaattaaaatattatacaagccactgtagattttagaacccgaaagccaaactatcaaactacttgtcaattttcatttgcaatgtacagaaattcatgaatttcaaagtagacacttcagaacaaattcacaatgaagcatgacacaaatgccatcgaatatttgtgaccaaaacttgtag

SEQ ID NO: 93846 - DNA, 510 bp, Cannabis sativa
taggtcagggacctaggtcttggtctgagtctccaatcccggtctaggtcttggctcggggtctgggtccaagtttgtgtctgagttcaggttcgtgtcgcaattcccgagatgagttttgattcgggtctgcgtcctggtccgggtctatgtttgggtcctagtcagattctatttcccaaactcaaacccaatctcggactcggacctaagtcttgggtgcgggtctgggtttgggtcagggcccgagtttgggttcgggtttgagttcaggtatgagtcccacatccaaacacttactacgtgttagttccaagccctgggtgttggaatcctgtaccgaacgttactttcaaaccatatttttataattttgattaaaaaaataaaaatctacttttaaaattgttaccgaacagagccttatgaaacaaaaattaaattagctaatatgtgcttataaattttgatatttatatgtgtgagcaataagttatctaaattactttc

SEQ ID NO: 93847 - DNA, 755 bp, Cannabis sativa
tctattttcatttcattgttttttctttttttccctttcttcctccattctttgttcttgctctgttttttgttctactctcggtttttggacgacaatggtggcattgtgcttcgagtaagagtgagcatttctcttgtgttcttcaaggtatttatgctttctttatattcactgattttagggttttatttttcatcttcatttttttgtttgttgaagttttcattgttgttatacaagttttcctagttcatttttgtatgtcttttaagtgattagcatttccatgtgtttagtttgttgttgttgtttttttttaaatccgaagtgagttatgtgttgttgtatttgttcataatggattttttgagtacttttgttttgtgtttggttttatgttttagtattttgttgtttagttttaattttttaatttttgttaagcatcgggttgttgtcgttgtcgtctttttttaactttttttttttgttttgggtatgatttgtgttggtattagatataaactttaagtaagtactagaaactggttttaaatttgtgttttatttgttgatttaggtagtttcgatttttagaatttttatgtgttcattgtttgtttatttttgggcaatttcattatgtgttgttatttgaatttttcattcaagtttcatttgtagactttattattagtatccctctttagcccatatttacgattttaattttttaggttgtttttcaaatt

SEQ ID NO: 93848 - DNA, 750 bp, Cannabis sativa
ggtcacactttttatttgtccgtcgatacccagtttgacagcctcgttaagtactggcaagaatgccacgtgttgaagtattattagtccaaattttaattttaattagaaataattaaaaataaaaaaaataattaaaaaataaataaataaacaaaattaaacccaaatcatgaaaagctgcccccaaatgaatatatcaaaccttaaaatctattcaggatgaaataaaaagtgtatatgtttagatccttcccgcacaaactcatcaaggaaatcttcgaccctaagcatctcatcctcaccggtggaaaccatgactctcgttgaagtaacccgcagaggagagcacgttgacaaggctacaccactcaagcaaggaaatgtcaacgtagatacgtcggaggtgttcactcacgcagaagttggtttgggtcaccgacgatggcaaggagaaggaacaagatggtgtctcccatactctctctctctctctctctctctctctctcagatccgttaatctcaagctctctctcttgcagatccgttcatcctagctaagctcccacacaaacccagatttgaaataaaacgtcagaacaaagtatttttcatagccttaaaagcttggccggaaatatactcaccgttctgcagtgttccggccggtcccaatgggtcgaagaattttccactggggtatccttggtctccggtggcatttgcgaagttctcggcagtcctcgac

SEQ ID NO: 93849 - DNA, 655 bp, Cannabis sativa
gccttcctgtacaggatcgcgactggcgattattgtgcacaactaccaagctgggagaacataagctgattcctgagaacgcaagtcttcagagagagccgatgtacaaggaaccttctaagaagcaacaagagcgaatagataaacgcctctctaaacaaacttctagaccatcatcaggtaacatatcgcgtatattaactagtgccttgaaatttatctatacttatcttttatttgtccttgcagagatgactttcttgaagtcctcacccattcttaatcgcaagctgaaatctggaacagcggcaacttcccctatcgttcctcagaaaaggaagaacgacgtggtagttacccctgtcgcggattcttccaagaggccagctaagggcatacaagagaaagggaagaaggtcgtgattgacctagctgtctgagcccgcaacatactaactctccaagagaagttcgtaagcgatgaattccaatcgaagatcgacaagactcctgctaaggagttgttgcctcgctctacggagttagctttgcagttcatcgccatgttctcgaaggcctttgttactggatccaaggaggtcgaactcgtgaagagacagaacgttcagcttcaggaggacattaagaagttgaa

SEQ ID NO: 93850 - DNA, 722 bp, Cannabis sativa
gaatcttttgttctaaaaactgtaccaaatttgtctgtaataaatatataatttttaattacaataattagtgagggactttaacattttgttttttaattgtaatgttgtaataattgtttttttttttttaaaaaaaaaaatatatattgtttattgattatcactttactttttatttacatctcaagatattactgtacattgttgatttattgtgtagaatcatgcaatggagaaggtcttgacgaaaaactgattatttcgtttttcctcaaccattttgttgcagtctatgtatcagcatatcattaccttgaatcggcattaagtaatctcgactcaagtgggtagctagcttatcaagttgctgggcgtgattgtacgggagtggctgaatggtcaaacaaaaaaattagcataaatcatttgttgcgaatatttacacatgtatcattcaagtagtaattcacacgagaggtcgaatctcaaaaaattgtaatttagtactaactaaattggattataatttctatttggtaaaaatgaaaattggtattggaaatgagaatgcagaaaaataaaataagcaataaaagaagagcaaatatcaataattaaaatttagggtaattaatatcaattggaccaattttgtatggtctaatgtaagtttaattcctattgatagcggattaactacttagatctatattcttatt

SEQ ID NO: 93851 - DNA, 5500 bp, Cannabis sativa
caatgcacatacagacggttctctaatgtaatttaatggagtttttggagttttcccaaagggtcccaagttccagactgtcaaacataggttttcatatataatataatacaatttttatatttatatatatgttcttaaattactaattaaaaaattataataataataataattaccttgaagattgagaattcagtcactttcaaggaatgtttgcgagctgtggaagattcttcatctgcagagaaaaataaaacgagagttcgtgttaactgaaaaatttgtagaaatggatttgattttctgacgaaaatgcctgtttcatttttggagtttatattaggatcttcctataactcatcctgtacaacaaaaatccaaactgtaaatcccagaaatagaaaattcccaaaaataagttattattattcaaataaatatattcaacattgtttttgccatacacaaacgcaacacattcacacccaatatccaatcaatttaattcaaatattttgacaataattcaaaattagtaagatcttcatttcacaaaattcatttaaacaaaaaaacactaataatagcactttctgaactcgattaattctactttgactgtactcaaaaagtaagcttcttaatcttgaaaactgaccaaaaaaagaaaacaagaaaccaaagaagaaagtacaggaacaatgcatcgacgttaaattaatggaaatgcgagtccaatccaaaaccagatcaacaaatgaaaaaatccttcaaagaagaaaagtccaaagacaaaacctgtaaaagcgtccatgtggagagaaagaagaaggcattactaactttgtgtgtgtttgagtttgggttataaattaaattgtggttaaagtggttatggcgtctgcttcttttgctaaattgttagttggttttcgacctttcattgcttccctctataatttaattcattcttatttttatttaaataaaataaatgaaaaaaaaaaatcagaaattctcttataaattatggggtggttgaccccactaaaatgaaaaatactaaaaggtatgattggtgtttagtattattctatgtgttaatatcgttattactcaactaattatcaggtctcatatactttaaaataataacatttaaggagtatcactagccaatcacaaggcgacatgtgtagaagtggtaggcaccactggtgttcaatagcaatgttctacttagatgcaacatttagaagaatttcttagtccaattctttgcataatcgcgtaccttatagttatttaagacattctgtaaaattttgaaaaattcagaataatttacaatataaaatttaatattcatattttactcttttttttttttacaatgaacattcatattttactctttgaatcttattttttaacgtgttaaattttttcaaatttttcacaattttacaggatatcttaaataactataacctatacgattataaaaaaaattatgctattttttttttctagatatcaaaggagataaaggtgtatcagtgtgcattgtaaaatttttttgaattatgatcctattttaatttttttgtcataaaaatatcttgtaaactataaaaattattgtaaatattctcttcaattatatttaacgtgacgataatatgagccaatttaagagtttggacaaaaaaaaaaacaaatgtaatctatatgtcccagtataatctatatttatagagttaattaaataaattgtttcataaataagtactaagtagtatgttagtctaatatttgcaaagaaaaaataaggacaaaacttactttagaaacataattaagggaaaaaatcctttttaaaaaaatggaaaatcgtggtttaatgtattaatgtcgtattaaaaatcccacgtttttcattaatatggtatatttaaatattaaatttaccgcgctagttcaaagattatgactaaacgaaatgtgaaatgacggctttgcccatgacattgcacctaatttgcgtggcagccacgcttttacatttaaaaatagaaactgaagcagagttgcacatgagcttgatttactttattttttctttttacaagctaaacgtgaaaagagcccaaaaaagtctttttccaccgccctctcattttaaatttttatttttatttttttaaaaaaaaaaaaaattaaagattcattttgttcgaacaaaaatagcgggtacgtattccatttttataattttataaatttcatattaataataataatattatggttacaaggaaaaaaataattaatatattgctatcagaaaccttggaatcattgttcttttttatttaattaattttattttatgacaaatcttagatcattattgtattcataaaagactttttaaattaaattgagaattttgaaatatatcattaacttattgacgtgtaagagcatgcttttcttttaaaagaatttgctaccgttttaagttttgaattatttttcaataatattaaattgaccaattaatgtgtattgataaaatattaattgtatagtatagaatacgttgcaagatatcttcaccttttcaaataaataaataaaatatcttataatatcatgcaaaaatccacattattacatattttgtaaccttattttctcatatttatgaatataataattacaaaatgattattttttactaaataattagtaaatacctagatacatacatatatgcttttgcccaaatgttttaattataaaataaaaattgatcatattcaatgtgttaccaacttttttatattccataggaatatagtataattaaattattattatatatataacaattcttttatgtttataaaagaactaatatataatggtcatcaatatttagagatggaggttgtgttgatggtttcagcttaaaatttttattaattttatctaaattaaaaaaaaaaaaggactttattaatttgttaattaatatatttaattaattagcaacatcataacgtagtagaatgtagtacaaatgaagaaaacccttgtgatctcatagtatgctaaatatatatgatttagggagatacttataatatagtattattgactattgaaaaatatatattctcattcaaaactaaatcatatatactacaattaatcaagataatggtactcttttcgagagataaaatactttatggcttcgggattgtggctcgaaattcttcaagcagattgctaaaaattaaagtgaaatatagtagaagtatttatgcagtgaaggttattgaaactttgggaacaaaaaagactcttagtttggattaagagcaagaattggaaggaagtggagatttgatagcatgctcattgttcaaaccattcgtagtcaataaatatcctctgttttctggttaattattaatgattgtaaaaatttattttcttctttacacaatattagtttacgttatattagacgatcagtaaattgagtaacttattatataattagacattctcaattttttttttcttagcatattgatgatcataatgctaatctttgaagccattttgtattaaaaatgcttaatttaaatgaatttactatgttagaagaaaatcatatataagacttttaattaattttactgttttaaacaattaacatatatataccttattcattaaaaaaaaaatgtatataccatcaatggaattatatatattattgagtattgtaattaaaggcatacgcatcttaaaaatattaatattataattttttttaatatatttgatctttctttttgcctttttggtaataaatttatttgactattcgaagtcttaactaataatgttcatcttattttattatagtaagttctaatatatcttataaattccaaatctctttcacaaagccttatatatagtgtgagtgcttgagtgtgttttttcacaaagtgtagcaataattactttttaggatcaaagtaacatgaaaccatgccaatattttattaattaattttattgaaaaataaacaatcaacaccaagactcaaaattcagatctgcaatatgaaacaatgcatacaaaatacaacaacagcaaatgatcaaacacaataagaacacaaaatcataaaatagaattataaggagaagacgacaccaaatttatcctggttccagtcctaaagattaaattgatctctagccatatttcaactgagagaaatcattgtgattcaatatgaaagtattgaacttgtactgtaacaccctactagattaggcacatcaccatattttcttcaagtttgtttcacaactcccgagttgtgttcaagctttaaaccttcctctttactaggtttgacaagtacttatgatggtgcaatatgcaacctcttccatatgtcttcaatttcttcatttttcaacttgatctgttattttttcttttggcttgagtgccttaatttgcaactttctgatgaatgagtatttcttttagatttattctcccactgtccaaaatttctaattccatcaaacttctcaagttcaaaccttgttatgcctgtcattgcttgatgcagatctcgattcttgaataaatcttgaattccctatttaaatgcggatcataaaccaaagttgtgatttgttgaaaattaaacaatcaacatcaagactcaaaatattttaatttgttgtcaaattaacttccatatattaattatatgtgtttgacaaattccactctctttttttctttttatcaatacaaattccactctcaatattatctatatgaaataaaataaagtaaatttcactaatttagggcacatcaaatggtatatatattatattgggcaccttattattatataattcatgcaagacaaactcaaaatttgagttgaacggcttgtactcttaaatcttaataatatcattttcaattataaatatattataaattttcaaaaaaattataaatatattatataattaattaaaataaatatatattttttaaaattattattttttatttaagagatagcccctagccttaacatgggtccacgtccgcccatgataaatactttatgtgcatatgtaagaagaagagaattaaagtctgaaacctaaaagaaagttataaaaaataattacttaaaaaccgttaaataaaaattatggggtttaatttcaaaattaattaataaaaagtaaaataattcatgttcttttttatacgtggctcgatacgtttatatttaatctatttaacacaatgttatctaataaaaattgtaagattaatcaacagaaccaaccgagcaaactcaactcatcctgcgcagcctcacttaaattacaagggcgcgatcggcctcgtcggaaatga

SEQ ID NO: 93852 - DNA, 778 bp, Cannabis sativa
taaggtattttgttgtgtcctttttacagtttgatttgtgtttaacagaatatacttaaaaacaagttaactttaacagacatttattcatacacacctacaaaaaatctatttacaaaaattatacagaccaacataaccattcaaaagacaccattcatagaagcacatattcatttacacaagtcatatatcataaataaaacgaaatgacaaccattttctcaatagtttaaaaaaaaattctttgtgtgttctcaccatttaagattgatttgcactgatagttggagccttataatctgctataatttgtaaacttctcattgcgatctgtacatgtatttttttgacattttattattttaaatttaatagcaataaatttatagacaaaacttaataaatttaatgggagattgaaagaaatttcattttatatatgtatacagtatatttgattttatatttatacattatatttaattttatatatatgtatactgtatatcatgattatatataaaattaagagaaattttacgatattgttacaaaattaaaaaggtaatcatataaattttaagaaaaattataagactaaccattaaccattaacggcacaacaacatcaccattaactccaatactatcaccattacagcccattgaacccaccaccgaacactaacggcaccatcatcgacccttcatagaaaccaaatgcaaatacaactctaaccctcgaagttgcgcctgtaggaagaagaataagaaa

SEQ ID NO: 93853 - DNA, 1348 bp, Cannabis sativa
  modified_base (162)..(168): a, c, t, g, unknown or other
  modified_base (1307)..(1323): a, c, t, g, unknown or other
tcaattttactgtttcagtgattgtttatgtattaaaccatactccccaaactttcatttctactaaatcatgccctcaaactttgatatgtactaaatcataccccttgaactttcatctatgttataattttttttattaaaattagacaaaagtccttnnnnnnnacaatctcaatagttcagggggaagttttaacgaccaaaaaagttcaagaggcataattaggtacatgtcaaagttcggggaaaaaaattattaattagccaaaaaataatattttctttatagaaaataaaataatatttatttaataatgtatagaaaaatataaaaaaaaattgatgtatgatataatttataagtgtatagtaaaaaaaaaagatttttaacaatatattttagatgataaagactttagaaaagctatcttcaaaagtgctcttagagatgtaataatttcaacctaagtagagctaaataatattcataggatatcctttattactttggtttttggagtttaatttatttattgattttagaaaagtgattttatcaattaaattaagagagagcaccctttcagagagagagagagagggcaagaataagttaattttgtaaagtataatattaaaaactttgtaaaattatatttttcatttcttttttaactttcaattttactattattattattattattattttctttctaaaataaaaataaatattttatcataattcaatgcaaaaatgaaaatcatttaaaaatatacataattattaagttaatactatataaaattatcaagttaacaagtttaatataattaacaatttaaagtagttgcttaatttattttatttttttttttaaaaaaagcaatatactaatgacaatgtttcaagctattcaaaataacaattaataataatgcaatataattatatataaattagtataaatattttgtaatatatattatatagtttttagttaaattttaacaatatcatctaataatcgatcaatccaatctaattaacatcaaaattttcaaatccaattatgtctaattgtaattggatatgtaaatttttgtaattgaattgaattgtattaaattggttgtttagatgttgtcatgagaaatcaaaattgaaaccattgacatatatataattggttaattaggatttttatcctctaaactttaatatgtaccaaatgatgcttcttgaattttttttgttgttaaaaaatcatcctgaagtactattaagattgttagatttaagnnnnnnnnnnnnnnnnnattcaattttactatttcagtgatt

SEQ ID NO: 93854 - DNA, 608 bp, Cannabis sativa
tcttatttttgcaactttagctgcgacttatgtagagagaagaggtcattgagacatatttaaatagatactatatttacatatggatttgtaaaaaaaattctctcaaactatataaataattgcaaattactctatcagttacatttcattcattttaaaaataatttcttaatgtaagactaattcaggactaatctactgtaattcaaaaatccatacaaaaaagaattacataaatagtacttatttaacaataaaatttagattgcgtatccgtattttaagagttagtatttgaatgttagggtcattatagttttagctattttaaattagttaaatatgttgaattttcttgaacaaactaagaaacattttgctaaaaaagataaagttgaaataacaacactttttgattttttaatgaccatagagtataagggttaagaaaaatataagggaatacattatgaaaatgtatcatattgtgtcaagactaaagacactttagattgagttttttgatgatgtacttgtgctgatcatatttttgttaacacttcctccacagtttaacaaatttaaaattagttacaactgtcaaa

SEQ ID NO: 93855 - DNA, 1177 bp, Cannabis sativa
agtgtttatataagagtacaacaaacactaacaaccataacaaaccaatgacagctgtctaaccaccaaaccgaaataagtaacagaaaactaactatccctaacacaccccctcaaacttagcattggtggaatcaccaatggtgagtttgcatctgaaattagagaatagttggcttgaaatcggtttggtaaaaccatcagcaacttgatcaaaggctgggacatgcttaacttgaacccgttgctgaacaattttctctctgacaaagtataaatccaattctatatgctttgttcgagcatgtaaaactggattagcagtgaggagaatggtgcttaagttgtcacaccacacagttgggactttgggaagcacgatgtgcaactctgtgaacaaggaatgaagccatgtgagttcggttacagtgtgagctaagcttcgaaactcagcttctgtgctgctgcgggagacagtgtgctgctttttacactgccaggcaataagattgttgccaaaataaatggcaaaaccagatgtcgatcgcctttcatcagggtccgtggcccagtcggcatcacaaaaggcagtaagctcatagtgtggtggttttctgagatgaagaccatagtcccgagtgccacttagatacctaagaatgcgtttgacagcattccaatgggattgtagagggttggccatgaactgacacactttgttcacactataggaaatctcaggccgagtgatcactagatattgtaaagcacccacaattgaccgataatgttgaggatcatcaacaggtgggctgccataggcagataacttgagaccactaaccattggggtgttagatgacttggcctcatccatatcagctttgtgaagtaagtcccgaatgtatttggcctgagataagagtaaaccagcttcaatattggtcacttcaatgccaagaaagaaatgaagcttgccaagatccttaagagcaaattgagcattgagggctgctgtgtaatgggatatcaagttaggatcactgccagtgatgatgatatcatccacataaacaaggatgagagtgacagataatggtgtatgtctaatgaatagactatggtcagattttgaagaaacaaagccaagattcagcagactagtgtgaagtttctc

SEQ ID NO: 93856 - DNA, 813 bp, Cannabis sativa
taattagcttaaatacaaagaaaaaaatggaaactttgtctggttgtttgagttttctcaagtgattctctctgttttgtatattgggatatgatttaattatattatctatccaattctctcttttttagtcagatttgtcgtaattagtagtagttataagatttagaaattgtttgtattgttatatgaatatgtgttaagtataggagatatctgtttctcatgtgaaatggtattgaagtactgtgtttaactttaggataattctatatgttggtgttgatgaagtgtaataaaatcttctaatttatgttgtgttgttgattttctagagatattttttgttgttttaataggagaaaaagaaaaatagacaatgcttcattgaatagttaccaattcatttgcatctcttcagcatttttgttagtatttgatcaaaactaacacaagaaattctgttagataggcatttattttattggtaagatatagtgatggatgcaaaatctttggcaaagtcgaaaagagctcattctcagcagcatagtaagaaacatcatcccaatcagaagttgaaatctccatcaactgatgctgttggagcggcaaacaaaccgtctcttaaacaagttagagagaaaaaccttcagtctaaggctgcatctgcactaccttccaattgggatcgatacagtgaagagaatgattctggtttagaagacatatcaaagaaaaacccagatattgttttgccgaaatccaaaggcgcagactaccgtaacttaatttttgaggcagagtctcaat

SEQ ID NO: 93857 - DNA, 734 bp, Cannabis sativa
ctccctacacatcttgaaaaattgtgaaatttcatagggacgaagccaagaccattgtctatcacttttcaattggggtctcggtttggggtttggggttcggggttttacgatttggggtttggggttcgagatttgagggttttgggtttacgatttggggtttgtggtttggggtttggggttttatgtttacggtctttggcttttggggtttttgggtttgaggtttagggtttggggttttatgactagggtctagagtttaagatcttggacctagtatttggggtttgaggtttcaagtcgggggtttgttgtttgggttttagggtttggggttctagggtttgggtttagggtttgggatttgaagtttggtgtttttgtgtttggggttttcaggttagctgtttttgggattagggtttggggtttagggttttaggttttggggtttagggttttggcgtttggggttttgtggttttgggaatcattatgggaatgggctagagaatgcgaattggaatggcaatggtcatgggtcggggaatgggaataggaatggggattgggaataggaataggaatgggaatgggccggggaatggcaatggcaatgggttggggactaagaatgggaatggaaataggaacgggaatgtgaatgggaatgggtcaaggaatgggattaggaatgggtcggggaatgggaatggcaatgctaattg

SEQ ID NO: 93858 - DNA, 528 bp, Cannabis sativa
gtactactgtactgaatacatttgtaatataattgtatattattttttccgtgaaaaaaaaaaatatttctcccgttggttctgatgcattatataaggaatgcacagaaggtagtaacggaaagaaagacgtttccaatcgtaaaaacattagaacatgagatcgtgaaaacgatgctaaaaaaaacgacgtttactaattaattaaacacgtttaaaaacggtttttaattaatcaaataaaaaataataatttaataaataattttttttaaaaaaaaataaagtgacaccacacccactagctcaacttggcatgaacgagcgacgacagcgcacacatgtatggcggttcagtgtgagtcctcacgtcccacacacataaaactaggtaccccttagggctccaatctatgtgctaaatttgcacattatatacacttataataaagtatttctattccatgcgagactcaatatattcatacacttcactaacaaaaattttgtaaaatttcactaaagttt

SEQ ID NO: 93859 - DNA, 629 bp, Cannabis sativa
atatgatattttgtagcgtaataattccctgaaagaactagaatttggtccctcaatagtgagaataacttactatttataggctacaagtgaataaattacattaattatagaataaacaataaaggctaattgaatcaatctcaagatctcttcaatccccttgattctctcaatcccactattttaagcatttgaaatgacctaatcttcaaggattggacaattaaggcgaatttggattccatcttcacgatattgttggtcggacatgctgcctcaggagcatcctttaagcttgttgaccttgcttttgttcaataccactaagtctttaaagcgattgggaataattagattcaagtaaaatatgaataatatagaacaaaataagaacacgaaatggttatagaggttcgacccctcgatagtggtaatagtctactctcctcgagcatatcatccacataaaacatccatgttacgtccgatctgttctttaaacaatttgttgactagcctttggtaggtagctcgtgcattctttaatccgaatgacataacttttttagcaatacatgccaatatctgtacagaagcttgtgtgttcctggttgggtggatgcatc

SEQ ID NO: 93860 - DNA, 721 bp, Cannabis sativa
ttgatcgagaatagtaatatatattataaatatatactaatgctttgacttgtcttgtactcgtttcactactttgtgccgtttatgaaattattttaggagctgtatttaagatgactactcatgatggcatagtcaccgtgatgctttaatgaaaaaatattcttcatttttaggtggaatatttatcatgactggagatgttctcccatgttttgatgcctccaccctgattcttccggaggacacatcctgtatcatcaccgttccaatcaccctggatattgcttctaaccatggtgttgttgtggcgtctaagagtgcaagtgtggaaaatagttatatgatcagcccagttgataatctcttacaaaaaccaagtttagaggaacttgtcaataatagcgcaatcttagatgatggtagaacacttcttgatactggagtaatagcagttagaggtaaagggtggttggagcttgttaagcttgcactgtcatgccagtcgttgattgaagagttgctgaagagcagaaaagaggtagattgccagttctggtttgaaatgtttttaaaattccttctcttcaaggccatctttaatttgcctaccatcattgagaaatggaactgtggagcttgaatcttattagtttaagtatttcatgggaaaaactaagagaaaagaaatgaaacgaaaagaaagtcacccgttaatgta

SEQ ID NO: 93861 - DNA, 655 bp, Cannabis sativa
ttgtttttgggcttctataaatctctatctatataaagaagttgatgaatactcttttccttctatacattaatcaaatttactttcaaatacaatttaatttaaatatattttcttatgagtattgtacttaaattatcctcacatactcaaatataatagatttgtattatttgtagataaatgtataggtttgtaggaaagttacagtaaaattttgattagagaagaataaaaattatcatgaaataataaggataaaattggtagaatgattaagaaagaaataaacataataaatattgaaaaaagggtaaaaactaaagacatcaaattaaaagaataatgtagtgtaatttcctcataaacatatttgtggaaattgaaatttatttgctcatatatttttctcttttactttttattttattgtcactgactcattctaatagtagaaagtacataaaatatgagattttttttagtatttactttttatgatattttttaaaaaaacttgtgatataattttttagttttattttcaattatataagttttatttatgccatatttttgtaaatattttctaaaatcccatattttcttttacttttcttttttgtttttgtttttttattcttttttttttttt

SEQ ID NO: 93862 - DNA, 695 bp, Cannabis sativa
atcatattgtgttacactcacctactcctggacagagtgttcactctgaatctctcatcttcacccctttttgggttcagatatataggcttcattttcttaggaaaacaaaaggacttgctaaagctcttggtgacatcattggcgaatatgtggatgtttatgagaattctctaaacgaagggtggggaccatttatgcgtgtcagagttaagattgatagaacaaagtcattattgagaggaagaatgatcactttacaacaagcaaaagaaaagttttgggtagaattcagatatgaaagattacctgaatattgtatggagtgtgggtgcttaggacatccttttgataagtgtctaatctatcttgaaaagatagataatggtgaagaaccagatttagaatatagaactacaatgaaaggttcgacacttccaatttcaagttatgaccgctacagaactaacttctcaaagggtaacacttggccattactcactcgttttgccaaaaattctttgatctctacaattccaagtttaaaaaatcaagatcaaccacatccaaaacaattaatcagcggtgaatcttctcaaccaagtcttatttcatcaatggaaaatgctctgttaattcagttgttggggtttagttttggttgtaacaatttttctgttgctttctttaattgg

SEQ ID NO: 93863 - DNA, 1526 bp, Cannabis sativa
aacaaagtttccaataaagtggaatgaacatgaaaattcgtgcacccgctactctgacattccttttttttatactcctataggcgggaaagtttcgcgtatatatgtcacttttttgatatcactatcaacataagataattatactcctatagtcttcatgtcagagttcatagagaacttctattgtaacttgtaatctagacaattgaacgcagtgactcgtggactaaagctattttaaaattccatacaatccgtttttcgaatcactttatagtctcatgaatctctctatattcattcaatttcttgaagttactggaaaactcagtcaacaaattggtgtatatttaatacttgaagttagttctctcaagtcttctcgaaaaatacccatctataacccacatcttgaagttagtgcttcatttacaaggtgacatcttgaggttagcactttttataataatcattaaattaaaatatataaaactcaataattaattaagaagaaggtttaaacttttttatttatgaaattatgaacttgatattctttaattgtttatagttattatgattttgatttcctcgttttttttatttgttttataatttatttatacttaatttcttgtttttttttactttttattaaaaaaaattgtatttttgtaaataaaaactttaagacgtaaaattatagatgaaacataaaagagcacaacagtagtgctgaacatcttctataggtgacgtgtcacaattagttagcgatatattttaaaaactatattcttaagttatatgagactcaatatttaactacaccaataacaatatgacacagaggagaatgctatacattaatagtacttttagcaattctcaacctaaatataatttttttttttaaaaaaaaaaaaaactattacacattattacttgtatgattttaatgaccaatgattaaaaaacacacacaaaaaaaaaaaaactaaatcaccaaaacaaatgaggttgtttaatttaataataataattgagtttggtatacatgtgtggttttcccccacatgttacaattaacaaaccttcccttctcttctctttcctcattcacattcacgcgtttataaaccacaccacacgtctcaactttcaaccaaacaacttcttcactcttttaacccaacatttttccataacacttttattatattctctcatcttttcttttctcataactctctttttttttcaagttcaaaaacaaatgggaagcgaagcaagtgaaaatatcaccaaacccaaatttctttgtcttcatgggtttagaacaaatggtcagattatgaaaacccaaatcggaaagtggccccaatctgttctcgacagattggatctcactttcctcgacgccccttttcccgccatgggaaaatcagaggtcgaaggactttttgatcctccttattacgagtggtttcaattcaataaggtttcactgaatctcaatcaat

SEQ ID NO: 93864 - DNA, 887 bp, Cannabis sativa
  modified_base (218)..(218): a, c, t, g, unknown or other
cctgaaaatatacatatcaagcatctgattgtccaagcacttattgttctttcattttttttaattaattttgttgcaaactaatagccggttaccactttcaaaagttgaaaaaaaaataaataaatgagttactttcatgtatttttcaaatcttgggatattagtaactagttcactgtgaaaacaaaaacgaaaaataaaaaaaaataaaaaanaaataaaataaaataaaaaactagcaatgtgataaacacattttaacaaacaatcacgtgcttgcaaatgtataatttttgtcaagaaaagttaaacgatttaatcatttttggggcaaaatagaagactctttgagacgcaatgcaagttgacaatcaaggaataaaatgatagggcagttatgcgtgtaacgtgcgtgctaaaatggtacgttacaagctaagtgatgcccataagttggccaagtggtggcgcttgttgtggtgcatgttggtggcatgcttatgcttagtttgtaaggcagtggcattttcgtaaatattttcaatattgtccggatcgggacgggacttggtattctccatttatttaggtctacaaatacaatggtgcaatcggtttggcgaaactatgtgatttggtatatgttcagccatatgtcgacagagcaaaaatcatatatgttcctgatagaagactaaaagctcagaatgctctttaagggggtatcctagtgtcagctctccaccaccccttgcaccttggtgctaagtgagctactactagtcagtggggctagtagtctaggcatatgaggaccacgaggggactcatatgtctctatgagttggagtactcattgttagagattttataacaatggaaga

SEQ ID NO: 93865 - DNA, 556 bp, Cannabis sativa
tacctcagacagactatggtcatgatttgcctatcctattttaccaaaacagagaaacaaaacaaaactaaaagaaaatcttttcattgcccaacaaaaggatacaaagtaaaagttatcaaagctatcatttcttgtatgtatacatatatgtgtgtgttgtgtaatttgaagttggtgtgaagagttaactactttactttcaagaaaatgcaaagagttattatgtgaatgaaaccattttcaatagtgacccaaaatgtcataagtcactattggtatgatctgtgttggaagcatactgcaacctcatatctttgaggatttgaatcaaaccttttaattcattagtgcccaattcaagacaatctctcaacaatccaccatccactacttctctttgcactgtcttcaccacttcgatccctcaatgttccctgtcaattccaaaatcaattttttaatatgtaaaaaatagaaattaataagcaaacataaatatcatcattttacatgacatgacataattttagatactaaaagttgaagtctttaa

SEQ ID NO: 93866 - DNA, 572 bp, Cannabis sativa
gacggtacacggccaacgaaggatggagacgactttgatccgtctatttggggcgcttttcttgggttattttcaatcgttttgaggtcctggacatcatgggaagcttccccaattgaaagggtgtgtcaagagcaatcaaagacgaagttacactttaccagtgatgaaatcggcataaactccagcaaccacagttatgaggatcttgttctcaaccagaaaatttattgatagctaaggtaagaagagtgaacatctgtgcacagggtgtatgttgaaacatacgattttattgtggatatatgatgtctatttgcttatgagattttgtataatgaattgttgtttatgattagtattgttagtatgtgatagtgataaggtttttgactacttgtgtgagaataacacttataggataggttttctgctgcttgtatgagcatagcacttgcaggatatatttttcgctgcttatatgagtttacttgcagattgtcttatcatgggtgagtacgacttgtgataagagactgtcccgttgataccaagtgtgagaacagcacaag

SEQ ID NO: 93867 - DNA, 1660 bp, Cannabis sativa
aatataaatgtaaaaatatttacaaaataattaaaagtaaaaaatgtaaataaaaaataaaaaatttaaattaaattgtaaataaaaaacttaaatattaaaatttgagagggcatcggccacctatactgcgcttgccactacctaagtgcaagcttaatttaaggcccacccaacctgtcttaactcagatgagaccctattaatattaacaagttaacctcataaattaataaaaaccaaaataaagaaagacaaaaaaactttttttttatttatcagaacacaaattatctttatcatgttactaaaatcttttttttttttttcattacttaaatcacttccatataattatgttaaattaatcttaattaaagtttatatttgattgctcaatctagctatttggtttcatccttaaatttcttaattagaagagaagtttatattgaccaaataaactacccttttatttttattatttttaggggaaataactaccttcactaatcactatagtgttttttgaatcacaaattatttcccaaaaaattgcaaattattttgtatagtgctagctagcttgtatcatggaatttttgttgttgaatttaatacatttttataacatcttctaggtcatatttgaaaaattatacaaagactacttcgaaataatacacctactataagataatttagtcaaattgaagagcatgtttataattttagggtgattctatggtttttggagtggacaatattttgtttctgagatataatagttttttctttacgaaaaaaaaaaaacagaaaaggaaaataattttacaataatatacattataattatttatattttttaaaaattaatttactataccaaaagtaagatttaaataattttacacgcaatagactcatattttaattatttttcaagcatatataataaattatttcgaattatctaaaaaaattcaaaatgttatataaataattaaaatatatatcgttagtacgtagagatgcacacgggacaagaaattggtagaatctcgttccatccttgttaagaattttagtcctcatccccatttagggtgaaaaatcctctaatgaaagtggggacgtgacataaaattccttaatataaaaataaagtttataataaaaatttaaatatataaaaatattaaattatataaaatttaaaatattacacatcaattattatttaatatactaattattactaaaacacaacttaaaattcataaaattaatactaatatattaaaaaaaaaataaaaaatagagtataaattattaaatattattaaaaatataaaataaaagattaaatgggtcctcatcgagacaaggagtgtcatctccgactctattttgtttaacattcggagataaaaaataatcctcatccctgcctcgttcaccatttaaacggggaatccccacctcattagggtcaggtccccgtgagaccattcctatagagaaaatatgcattcctaatcgttagttcattacataaaaaaaaataggtaagtaaattaaaaataatcagaattataactattcccttcccctaatgatgtatgttgtggggtgtgttgaaatagaaattataaataga

SEQ ID NO: 93868 - DNA, 524 bp, Cannabis sativa
aaaaaaaaaaagaaaaaaagaagagataattccgaaatccctttcttatccctaaacctagagccaaacccaaggttaggtctttctttttggctctacaaaatccctattttgagcatcttcttcactcaagcacgactcagtctcactctcatcactctctctctctgttcattcaaaacccctcaaaaccaaaagcccttgattcgacctcaaccaccgccaccaccctaatccggtggggctcccaatcgatcaacccaatccactccaaaaataaaaccctctctttcatagcacgataatggcggcctcggatgtctctgacggacccgtccttagtctcatcaacaagcgcctcagagcccttcgtaagaaactcaatcgcatcgtccagttggaggagggcatcgcccaaggtaaacccattgtcaaagagcaagaggaagtcctccgctccaagcctgttgtctccgcgctcatcgatgagctcgaaaagcttcgtcaacccctttccgctgccg

SEQ ID NO: 93869 - DNA, 525 bp, Cannabis sativa
ataatattttctcgcttttgacaggaattgactttcccaactaaatattttcttcttcatcttttccttaagaaactaaaccaagaatcccattttcatatgccccatgatacaaggcaagctaaaatatagattatcaccaaaagcctccatcatcccatacaactcacacatacgcgcgatcacacattcacattaatattattgctaaaaaagattgaagactttgcaaaatttaccttcatccccaaggtaatcctaaacatgaaaaggtgcaagaaatttgaagcttcttcttcattagccttacaatacacatagctatattatcagcaaaaagcatgtgagacactattggagctcccctagctactttgcaacccgtcagccaacgattcaactcataggccttcaacaaagaagagaaacattcagcagatatcaagaaaagataaggagacaatgggtctccttgtctcaaacctctacctgaaagaattagatccataacgtgccccaaatgag

SEQ ID NO: 93870 - DNA, 572 bp, Cannabis sativa
acgtttactgctgatattacccacgaggcttctactactgaggcttccgcccagaactcaccttcacctgacaacactaaaatactttattcttattttttttttcatgcttggatttcacactttttcatgtagttcttgtatggccttaaggccccttactttcaaactgatgaccgaccaagtggtctttaatcctagctttatcttcttttggtattttaaacatgtagttgactgggcaacctttaattccaaatttatgcattttatgttcaccttgaagcatgcccgaatacatcttacttagatgttaatttttggctttaacgaatattcaaattttttttgcctaattatctgtgcttgttcgatgttgtgtatacgtgcccccaagtgatcaagcaaacttatggtctattggtcacttgcaattcaccaattaattagatctttttcctgttcattttcttgagaagaccgttttacacgcatgttgaactaaaaataagaattatctttgaaaagttaattcattagcaagttgtttgacacattttgaactaaaaaaa

SEQ ID NO: 93871 - DNA, 847 bp, Cannabis sativa
ggaaaaaaatagacaaactcacattaaaaataaaaacaacacaaattaaaaatagaaacaatttaacctcgaaatggaaactatactttgaaatagaaaaatatcataaaaaatagaaacaactcacaatgaaattgtaaacaacacaaattaaaaatggaaacaatctaacctcaaaatggaaactataatttgaaatggaaacaaatagcataaaaaaaatagaattgaaacaatttaacctcaaataatgaaaacaactcaagttaaaataataaaaataatttaacctcatatacatgcatatatagttagtatactgtaatttgtaatttattttacaaaaatattaattcatcaactttttaatttcaatttttgttttcatttcacagtcacacacaatgctatatacatgtatatgaggctaaattatttccatttttaacttgagttgtttctattatttgaggttaaattatttctattttcaacgtgagatttttctattttttatgatatttgtttccatttcaaactatagtttctatttcgaagttaaattgtttttattttcaattctagacatttcctttcacagttaaatacaaattatttctatttcaatgttatgttatttcaatttcaatgctagttgtttctattttttttaggttaaattatttttattttcaacgtgaattgttactattttcttatgatatttgtctccatttcacatagatatatatgatagttgaatgcaagttgttttcattttgaacttttatttttcatttcaatgtgatttgttttcattttcaatgtgtgttgttttcaattttaa

SEQ ID NO: 93872 - DNA, 522 bp, Cannabis sativa
atgctccctttcttggttgatttaaatgtaaacctttatcaattgtttgattcaggtttaaccgtttctctaattctacccatgtagcaataaacataacgtgatacttatttttctcatgacttctaagcctttcagaaatattatgccaataatttataccttcatcagaaaaatgacccacatgatgttttgttgaaaacaaaacttacaacaaaagcaaaatactttattttgagaaactgaatatattaaccactttctatcttgtttctccctatttggcaaatctctagtgtaatgtgttgaagaaaaacttctaccaaaatcatccttaatatatgtaaaatcattgactctttttcgacttctttcaactaaaaaatcaatcagattatgatcaatttcattctaattttctggatcatctatgtcaagaggaaaactattcttatcatctaaacttttctcattcacattctcattaacattttgactttcttcttctttgtcatttaccac

SEQ ID NO: 93873 - DNA, 928 bp, Cannabis sativa
tagagtccatccttaagcatcccttgaagaagaaccttccttgttagcttgtccttcacaacacaacaatcagaatgaaactcaatgataacattgttatcatcggtgagtttggacacacttaataaatttttggcaatttcaagaacaagaagcatttcttttagtaatgatttttgaccagtattggttactataacaccactgccaagatgagaaatggtaagttgagtaccattactaactatcactttctccttaccaccatagtcctgtttctgtgtcattgatgcaacatccgaggtaatgtgattgcttgctccgctgtcggcaaaccaagcttcactctcgaggattttaggagttgcaacaaatgcagatggattgttgtttttggtctgagttccactatttggatcgctgcccatgtaatgttcatcaaaacggttgtagcaaatagccgctgaatgaccatacttgccacatacctgacaagttggtttcgagttgtttgttctgccattgaacctgccccttcctcttgcacgatttcctcctctgttggagtgtcgacctccataatgctgtgaataatggtttgatcctctgccttgtccactgctttgaggtttttgagcaaagtttgcttgtggttcagacaagttggtactgattttgttgtttgatgagagagcctggagcctttcgatcttgctgtcgaagctcggaagcagttcctgaagctcttgccaggaagttttaggccttgcttcaatctgcagaacaatagtgaggtaattgacatcaaggccagagagaacatttgttgccagttgcgattcagggtatggctcccctgccaaagccagaaggtcagcccagttcttcttctgcctcaaatattcagtcatgggagtgtttccttttc

SEQ ID NO: 93874 - DNA, 998 bp, Cannabis sativa
gatgaggtttgaaaatgagaggggtattttttggtttatcataaagtggtcatagttttaaaattttgaaatgcattagtttagacataaaattttagggtattttatgcatattttttcaaattttcctattattcacttgaaggttacttatattttatcgacatgcatatgatttgttcactaataaaaatgcaatcaagaaatcctaataatttatcactcatgcatcctttttatcatctatatataaaagagaaaaagtaacatacatatcacattgatcaaaagaaaaatgtaacagaagtctttctttaaaaaaagaattctcgtgtaagacacctcatttgaagatcttagtaaatgaagcttaagggtcaatattaataactttccttattagggctcaccaaattatttaaaaaaatatataaaaataatataaaatgaattaattaattattggtataaaataataaagtgacacataatgaaaaaaaaaaatgtctgtatgtacaaatattttttgtgactctacctaaacattatccataattatatatgtaaaaaaataaataagaaaataatattaaatagacatcaaataaaataatgacacatatataaaaaaagactctatataaaatggtttttaacacttctactgaagaattatcctttcttttatactttatatattcaagttgaaaaacaggttaaattttttttttcttaactacaaatgatttttattaatatgtttttttttttaaggtgcatattcatttctcacactacattttattaaattgtagatttggtattgatatttgtaatttgaaattgtacttgttttcatataccctaaccctaccttcaaatttgatcgaaactaaaacattaataataggctaattagtaattttttcttctgaattttgacatgtaccaaattgtgcccctaaacttttttggccgttaaaaattccactcgaact

SEQ ID NO: 93875 - DNA, 596 bp, Cannabis sativa
tatattattatttaatataattaattttatttataatattattatatatgtatttaaaaataaaaattatgtaaatcattctctgattcactaaaaattatgtaaatatcttatataataaaaatttaaatttaaaatattataaataatttttattacatttttaattttattaatttaactttaaattaaaataagagaaaattctgcttaatgggacacacaagaattcatcatgatatcacttgagttttattgtatatatatataaaatacgtttatatataatcacatctaaatggtatattaatatagtcgcaatagctaaaaaattcttcaaatattaaaattttaatctctattttaaaaattaaaaaaatatattatttaattaaaaaaaattaaatatacatatattacatctaacattacttaattaaacctaattaaaaaaacttattatagattgcacttaacataaaaatatatttgtacatcttagagaagatagattaacaaatgtttacacacaccaacttgggccttgggcctaaattaggataattagtctggtcttagcacatgtagaaattctt

SEQ ID NO: 93876 - DNA, 9108 bp, Cannabis sativa
atatatatatacatatttcgaataacataaacataaacatactgtaggttgcgtctgcggattgtagactcttctcctccacccagaagtaattctctctgcaatatcacattgaatcattttctttttattcaaaatctaaattttaaagaaaatcatatataaagaactatagcaacatctaacaattcctaagcttcatgggtttaaaaaaaacaatgaccactttattgaaaataatcaaaattgggtacatcatgaagaaaatgatgaaaaaatatccatccaaactagtttaatattcaccataagtgcatgcactgttaattcacgagaaatcttttagggtgtactgtgaacatgaattagggatgcggaaattgaaaagtaaactagtactattatcttacaataattctaatttaatacaaattgaggatctcatagagattgataaaaccaaacaatgccagcctaaaaaaatgaagaggaaatcctaattgatacatcaaaattgagtaacaccatccataagaaacgagtctaatacacatacatgtttggtaaaacttcattattccatcatccaaaaagtaagaccaaagcataaaatttagcaaaaagggataaaaagaaaaatgtccattacttcattacctcttcctgagcagcttttctcatattctccttggctttcaaattagcatttctcaaactcactctcaagctgataatcaaagacaataaaataaattcattaacaccaaaccccattaagaattcgacaaaaagatttgatttttgttacctttgagatcgattcgtccatgactcgagcaaggccttagccgattcaacctgatcatcgttgggcaactgaggagcgagtagatcaagcttgaattgcagggaattaagcaatgccaaacaatcttgagcaaccccattcatcctgggaagagaatctttggtcgtagtaagattactgtcttgttcaatcgattttgattttccatagttctcgattgccttaatttggttgaccaacttagcgaaagtctcatcccactcgttcttggccttctcaacctcctcttctacaatgtccattcaatcgatcttcttcaattcaacgccaccactcacactcacatcacaattacgtctcgctctgaatcccaattgaagtgtgtatattaaaggtgcgggtcgggtcggtcttttggcccgtgacaatcgatttggttctaaaggtgcttgatttctttatcaaaattagttttttagtgctggggtttctgtactggttcagatctccgaacaatcataacctcagagcatggatttggttgtaaaggtgcttgatttcatctgggtttaggcattcaatcacttttttcttcttatttaaaatgaaaaatttgtggatttatctgactacttcatgtcatgtttggtaaatggtaacaagtactaataaccgttgttccaacccaatcatttattttatatcttttgctgcacgtccatatatgtatatacttttttttttctctttttgaattatactgtatacgaactctgacaaaacactcacaacacaatttcaaatgaaacttttttatttgaagttcataattgaggaagccaaatggaaaagttctattcttggtcgggtcatcaagtttacaaggttaaaattccaatttttttagtaagaacacgattgatggggttaaaaggggaattagagaggccattggaatcaatgttccagagagtaatgtgaggtacctcggccttcctccgtactagacagaaagatgctgattttaatttcatcatggacaagctttccaataagttgcaacggtggaaagcgacaattctctctaaagctgggcgagccacccttatcaaattagtggggctggctatgccggtgtactccatgcaaactaccaaactctcgaatcgacttgcgactagaattgatggaatagtttgtgattttcggtggggatccaacaaaggtaaccacgggatccacctcaaggcctgggacaaattgtgtcttccccacaaatagggcacgcattatctttaatagccatacgatgttcaagaatcatgcagatggggagcatattagaaaatatactccaccacagaatcttatgtcgctcgagaattatattcctccacaacctgtttcataaggaaggggcaacatcacaatgagttgcacggtctaatgcttggatcatatacgcagatttggtaatgaactgaccattgaattctttagtccaaatccagtagtcccttccctgtccactaggtctcccactcttaaggatggtggtaacagtactaggatcaaacaggagacttgccacaaaattaaaaccctcagtagacactctgtttggtatggggtgaaaacgcgacggtgacaaacccatgggtctttccatgcatgagtattttactatcaattatcattttgcaagcgcctttctttaaaatatctttcgatttcatcacattcttccaaaaccaagaatcagatcccctataagaacaattgaggaaatatttccctctcaagtacttggcccttaaaatatcacaacaaagcgattgatgcccaatgatcaagttccatacccatttggccaaaaacgcttaatacatcttcaaggtcttacgaaaacccgattcccccttgctttagggagacataacagccttaagataatacccttattacctttttaactatccaccataaattccttactagaccataattttggtcgccattctattagtaagtttggtggtctgcatagaacacacaagcaacgagagacccacagatttaatcaaggattttttctattagtaagtttggtggtctgcataaaacaatcacattcataccataagagtaatattaaataaaaatatgcattcttattatgccaaatgtagtaaactattgctgaaaaaacagttgcaacaagttttgccttgacattcttgttcatatcttcaatccaggaggtccaatctctgtacaacaagggccaattgcagcccatccaagcatgaatctggataacaacttgttgagagaaatcacagttgaaaagtaggtgagaatggttctcatcagccttctcacagaccgagcaaaggcaactatcaagttgcataagcacccattgcagatgatcacatgctaataacttgtcattcacaatctgccaacaaataaatcgatgctttggcacactcatcttgttccacacaaaatgttgatacctgatcttttcttggttaataaagctcctgtaaagcaaatcaattatgagcttcccattgcagctagcattatcaatatcttgttgagaaaaagtatctcgaatgtggcataatttgcgtcaatactagcttttatctgccttaagttggtatctccaaatgctttagcctttgaagtacacattgtttattcatttgacccataaagtctcatgttggtgacttatggctcaaatatatttaacaagcattgccttattccacttagctcattcaccaaacttcaaccccacatatactttaggtaagcacactgtagtccaagaggttaggtgaaaatcactcttcgtaccattattgcctcaaaggaaccacatgcataacttgtctatctttcacaatgctttgaggaaacaagaatatattcatccaataattctgcaacctaaagagcactgagttaatgagttgggatctcccttcataggagagatgcctccttgcccaggtgtgaagactaagctttatctcttgagaataatcccacaatcttccgctttctattttgtaggcctcatagggaccccaaggtatttaagaggaaaatttttctcttcaaactgtaacacctgaagcaacatagccttgtcaacacttgaaactcccctaaagtacacctgggatttgctgagattagctttcaaccctgtgctaccataaaattcaccaaaaatcttcttaacatgagtaacataccctcgattagctttacagaagatgatgagatcatatgcaaagcataggttaattatcttcagattctggcactgagggtggaatttaaaatcatgttgaagagccccatgctgaagcattcgagtaaggtactccatgaccaaaacaaacagtaaggggagattggatctccttgtcgaataccctttgcaccctggaaactcccttgcaatctaccattcatcattaaaacataagaagtaccacaaagacacaccctgacttaatgaatgaacctggtaggaaaatgcaaacacactaaaagtttctccaaaaaacaccaatctactttatcataggctttgcttagatctatcttcaaagcacacctcgaggaggtgttttttctgttataagtcatcaagtcttgaaaaatgaggatgttatgagcaagagatctccccttgacaaacgcaccttgattttgaccgattaaaataggaaaagcttaagcaagcctactgcaaatcattttagaaatgcacttatacaaagtgttacaacacacattggtctgtaatccaccgctctacaaggcatctcaatttttggcaccaaagctatcactgattcattaaactcgaaagaaattttcccaatgttaaagaaattgaggatggcctctgaaatttcatctcctatttattgccacattgccttatagaactttgaattgtagccatcgggccctagacttttgtgccaagaatgctaaacaaagcctttttttttatatcttctttgttaatctttctgatcaaccacaattacatctcaatatcaagacaaggcccaagatcaatacaatgagaatttaataggctttgttgctgaactgaaacttcccatgaatcccttgaaatagtccaaaaaatgttgaacaacatcattataatcatctataactttcccctgctcattctaaaacgagacaattcaattctactctcttctttttaatacaagtgtggaaatacaaattgttgttatctaccttctgcagccatgtaactttgctacgttgaattaaaaaacttataaacatagcaacatgaatttgatacctagcaacagcatgcttttcagcctcctggactgaggcatcaattggagaagcctgagctctagtaagagcaagttgatactctcttttagcttgataaacccctgctcaacatctccaatctcattcttgttgatggcttttaaaacatgcttgagttgaagtagtttcttaagaaaccctgtaaccctctctcagccataggtttattaaagttagtcataacaacctctttaaatttactgtgagcaatctagagattgaaaaaccttaaaggtttagttttcgaatttccatgcctatgacttttaatgaggcaataccaatggtttgagttcacatcccactggaaatcaaccacatcattaggcatttcatccacccaatcttcattagaaaaaggatgataaatctttgagtaaatcgtattcccaccatcctacttattagaccaggtatatttagagcctaagttcttaagagaatccaccttattttgagcaagccaagttgtagagtcaattaactcagctaaactaatttccttacccacatatctttcatcatgatgaaacacaacaataaaatcctctactattaactaaggcttaacaggtaaagagacacttgagagacccgtccacaactccaatctctcttcaatggtgtttaaaccatacacaaaagtgactggaaaaaccatatgcatacctattattctgaccaagcaatgcacaaattgctggtactccaataaaacctgaacttggacaaagccttctgccaaaccactagaattctcccttctgtgatagtacaacagtaataatgccaaccatggaacaatctagagtcatcatgtcatcaactttagccttctttaacttattctttagtaaggcacctataccaactttattcatcttcaaaagactcagggtatctccctggttattcctcttattcataccctttacattccagctaattatgttggaataatccatcaacaccaaactaaatataataccctttttcctcacctttcctttgttcttgtagaactttaaaagtattttgaattttggctagttcaaacactacaagcttccctttaaccttcgaatttccaactctctttggtgtctctcaattctttttgttgtcttgctcaagtgttgagaaattagccatctattgattctctttccctacttcatcttttttccaactgaatccttggttatttcagaatcccatattggaacaaagacctttatctcctgttttaattcatctttagttccagcaaatttctctttattcaagcttttcttaacccaagcttttggaccaattttcctacaatcaaccatgttatgaccgcattccttctaattattacacttaataaggagccattcatattcaacaaattattcttgaacttgccctttttcattctcaaagtaaattatgaatgggggattatctattatctttatttcaacaagaactctagcaaacttaatcatagatctttccttcgagactttgtccactataattggtttcgctatagtgctaaccaagacactaaagcaatttcggccacaatattgaagacctagattaggcaatctaattcaaagagacacagaacgaactaacctgaatgtatccaagtcttatgtcccagagcgcacaataacatgtttcttgtcgaattgcacaactctagtttccaacactaaatctcaggttgcctcatcatggaattctacaatattgagtcccatactcatcctcaccactcgctcaatgtcaaggtgtccccaaattcgtttaacaaatccttcaaatgaatggggaattggctcccatcaccatacatataacagcagaattctagttttaatcttgctctgccacttctgctaaatcaattttagcaacatgcttaccagatttcatcaaagactcctcatagtgaagcttaactgtcccactaatttgttattctttgagcttcgcccaatgcttttaagctgaagattggaaatcttccttctcagcatcctcaacctagtttgaattgggcacatcttcctcagagctcttcaatctaccactcactgaatttccaaatgacttcaaaactgattgttctatcagtgccttattctcaagcatctacaaaatcaaatctatctcaagcatcacaattccctcatattccacattagcagattcattagtaatcgtggcttcttggtttgaagggggctcctcgattctagatcgatacgcaagctttcaagtaacctacttcttcatcgagagagaagcaagttcctatgcgccttatttaactatgtattgaattttcttattttgttgtaatattatatttctttttttttttttcattttataaaaatttggctgagtttagcagtaattttcatttttatctcagtgtcttgcttaagcataaagttaaaaagtaaatataaataaaaagacacagcaaacacattgcatttcttaggaaaaacttgattaaataagaaattgtctataattaacattccataacatatacatctaaacaatttcaatctgtctacctacctactgaggtttgacaatgtagaatcagaaacaatggagcaacagttaacaaaaaccaaaattgctgcagccactgcttgttcaaattagagccacattttttcagcaaaaattacaatcatatacataaatttgggagggagagcacaaaccattccactgtcttcactgattagtgtagaaaagattaaaccaaaatcggagatgcgtgacgagtctgaccagtttttctttaacaaacagtgatactctccggtgaaagagtggaagtaccaaaattcctatgtttgccatcagcaatattagtgagatttaatccttggttaggaagctgattgatgagaagggtctcaagttggcaggctagactctttcccgggactgtgaaataaaggaatctggctttttgcatcccgtcctttgagcggtgggtacggattcgtccctccaaatcatcggtctgtggtaatggcaatgatgaacatggaaatttgtttttcaaattagcataacagtataatgacaatggtacaaatgaggtaaataaatagattagttcattggaagaatacctgtcccacatatagttttttatcaggcctgagcataacatagacacaagaagcacctacagtagaaggaggtggttgttccctaggaccaaccggaacacaatggatttcgctaagttcgggtattttttctttcttgtggagctctatcagcttcttttgacatatcataattacatttgtctcaacttccttctgtaagacttccatttgatttagtgacctgctcctttcagaatcttttcttccagagttatttgattgaaaatcgggtctgtcagaaccattcaaactttcataagaacacaagtgttgtatttcggtgtcattttcccctggaatcccttcttctgcataaactgaattataaagctcttcagctctttgaattattctttcagaaattccttctctcttagctgtctcaaatgcaaggctttctctacaaatcccgtctagcaatttccaagtcggttttgtttggccgttaacatttacagatcccattgctttaaacacagtgttcttcgcattgagtggcaaactaaatatcccgtgcaaatgggtggatacaattccaagacagcctattttatcaagactttcaacaatgctaccggcaatacaagtcccctttgctgtttctgttcctcggcaaatttcatctataagcacgagacttcttttactggtagaagcaataatagatcgaat

SEQ ID NO: 93877 - DNA, 1921 bp, Cannabis sativa
ttcagcatactgcgcacagaatctccaacttgcgcatgttcacgtgtgaaggtcgctcgggtagcaggggaaatagcagtagagatagtggggcagggttcattaataaccactcccttacttcctctgaagtgggagggatggctggtaggagagagagcaatagcttttccttttgctgcgtgggtggtaactgagtcggtcataatgggaggaggaatggaagtttgaactgtttgtggggtaggtaatggactggaatgtggcataggcaatgtagagatgaatagggaaggttgggtacaggaagctgggacttaagtagtaagagaaacatgtgtagaagtgggagattccacatggagaaattggtcaacagcttgttgcaagtcttggtcatcagtgcgggtacgaatacgaggaaataactcctcgaaagggatagagttagagatttggaacaggttctttttatggggagaagatggggatgctcgaagggtatccttatattccaggataggagggacaagaaaattatcacaatgaagcaggtacttggaacacttgttgtaggtatggtgcatcaggccacagaaataacagaagttggggagattttcatacttaaaactgatccatttagggtcgggaataccacgaaaacgaatagtcatccctcggcgtaatggcttggttatgtcaagcagaactcaaattcgaaggtagggaccaaagttttccattaaagaaagagggaatatttcaatgagatcaccgacctcatcagcgatgaattgtgccaattgagggcttttccgaccaaaggggatcctatgggcttggagccagaaagggacatacctaacagattttggggtaggagtaggggacacgtcaggatgggtaaagaccatcagaaatttatcaaagtgccatggctgctcttcaagaacacgacgtcggtcaccatcgcattgaaaagaggccaagaacaatccagagtgacattcagagatttgggtagggaacctaagggtccaggcctcagacatcgctttctcaatccaagagggtttggcagatttgggtgacagcagtttatagaacagacagaaggagttggtatcattgggcgaacggatggaaatgtgatcaaactcatcgacaagactgtcttcatcatcaagagcagtaataggattagggtttctggaggaggatgccattgttgatagagaaaaggagaagacagtggaggtagtagatgaaggtggtgttggtggtgtggaaaggcagaagaacaaggcatataaatagacaaataaagaaatagaccatagaagatagtacctggagaagaagagacgcctcgaagaaggaaacggtgtctgattcatctcttcaatgcctgaagagactgtctagattcggagaggatgcgcaatgatggtttttggttgtgagaggaggagaaaccaagcggcggttggtttatcattacaaaatcgatctgagaaggagaggaaatctaaattgggcagaagcattaaatggtgaaaagattgagccgccagaatttaatgaaggtgtgagagagaaatggtgttgaaaagtaattaagctcgagaaattagggggagatgcataatgattagtgtgatgtaaaggaaaataaatgcaaaagacagagaaatgtaattaatgaggactgcaaattcgacaaagaaatggtttgaggtgaggaagaggggtaattaaagcgaaaagaaaatcgaatgagaactcaaacctggttgagaggggatcacagagaaaagaaaaactcagcaaacctaacaaaggtggaaccagagcagagcctgtaggaagcttcaagaagaagattacaaatccataattgatgtatacttcttttgct

SEQ ID NO: 93878 - DNA, 1996 bp, Cannabis sativa
tggtatattatttttatgtagggtggtacatgaagaacgaaagataaatatactcaagtatattactttaatagtgtggtatattttttttttatgtggggtggtatataaaaacgaaagacaaagtatattacagtatattcatattcgagtatattactttaataatgttgtatattatttttaggttgggtggtatatgaagaacgaaagagtgaaaaaatgtgaaatagtagtttgtttgaggtaagtttatattcaatggggtatattctttttattttttatggtatatgaaaaaggaaaggaaaaaaaaaaaaacttgtgaaatattaaactaaatttttggtatttttatttcacactatgatatatggtatataagagtggtatatatttttatatgaataaaaaataaaaacaaaaaaaatggtatatgtcttttatgaatattgagggaaagaataaaaactaaacttatcaattaattaactggtatattaatttaaaagatttgtatatctattttatgtgatttagtatatcatgaaggacacgaaaaaaaaaatttaagtgcatcactaatattagctttgtgatatattcatattgcatgtatatcacttttatgtgatacaatatatattaagtgaaataaagaaaatgtagaatataagtttaagtttgagatatagatatatttgattagggtatattatttctatgtttaagattgtctatatatattttactatgctagtatataatttttttataatggtacattatgttaggatttgggtatattttttatacaattcaaattttataattttagtttgctgaatgttaaattttagtacacaaaatatatatatcacaaactaaaaattaatattctatcaattttttttcttatattagtacaaataattgattatcataacttttatctctttaagttagcatgaaatatataaattcatattcatatatacacgataactaattttatagttaatgtatattaacacttcttaataaaaagtgaacagccaaaaaaaattattcattcaataaaatatgcttatccattatagtatataccatactttataactataattagaaaataagctcatgtactataacatgataatactttatatatagttaagggtatttttggtagcaaaaaatataaaaaaaatatttactttattattctaaaaaaaagacattaactttcactaaagagagaaacaagaccatttgctaacatttcactaatttgtttgtaatttgttatttaactagcaatacattgttacttatttaaccaaaaatataaatatattttataaacaactaaaatacttattaaaggcaatgctaacagtaaagattccttattatataacatgcactataaatacatatattaatttataagtgtatatataaatatatattgatcatattactagatcattgatgatcatgatattcagttggcaccgccatcagagaaaactttctatgcgcagtcaaaccagtggtttcagccatatgatcatccaaaccttcttctggagtcaaaaacgtccagtcaaacttatgaacgacactagccaaaacaagctcatcaacagttatggcaaagagaattccagggcagccccgtcgtccggccccgaaaggaatcaactcgaaatcatgccctttgtaatctactgcggcattcttgaacaagaacctctctggtttaaactgatttggatcatcttcccatgtgtcgggatctcttcctatagcccatgcattgatgaaaacttgggttccagaaacgacatcgtatccacttatctttacatcttgtgttgagagtcgaggaacgagtaaagggacaggaggatgtagacgaagagtttcttttaaaactgctttcaggtaaggcattttgtgtagatcatcttctgtaacgttatcttcggta

SEQ ID NO: 93879 - DNA, 8516 bp, Cannabis sativa
ttagggcataaaacccaacacgggcatggatctcaagcaaggcaaggacacaatcaccatgaagagattccagtggacgaacagtgagacgaagcggtctagtggacagtgtgatatacatttgatgcttgattttgtgattattttttgtctctctaatttgtttatacattttgataatggtgatgagatattttatttttttaaaagctaaccatgcaggaatttttattaaaccaagggtcttttgatattagttgttttccttttgggatttataagctcaccccctattttctcccattccaggaactcagtttgatgctagtgattaaggatggttccgttgaggaaggaagtcgttattagtttagtcttattctacttatcaaacttccaatgaaattgattttgtatttaagctggaatggaatggttcggatgacttaaattagttatgtactagtttgaaatgaggaatgatggatgctagatattattttggtattttattgacttattaaatctatttattttgtgactacataactgtgagaatactcttattcttttatattaatgaatggtcctgattttgttactaatattttcttattgatataagagttaatccattacttgtaaataagtattttgtgatataaattaaaggatcatttataagcattatcttcctacaagggtcaaggtgtgacctttgaccacccaagttatggatattacatatctgtcatgacctagggctcagatcatgatagtgataatgttgagtttactaaccactggtaagtaaattttagtttatggtgatgttttgaaacaaggtctgattgagttttatagcagttaggaaaagtcatttcctatgtgttaaggcaattgaaaaaaattaagagttggagtaattttctttatcattggcaaagagtatgactagaattggaacaatgtttagaaatggaaagatcggtcaatgttactgtaaaatcgagcttattgtaagggactatgatggcacaacaaagtaaaagatcatagaggaataagggttgaacttggattccaactgataaaagattgaagcaagaagtacttgatgagctttatgctacgccatgcttgttacatttagaaatgacaaagatgcattatctttcaggtatcccaccatgagcttattccggagttaagcctacatgacttggagtaatcttagaatgggtgacctcttgagaaatttttcctcaagaagtgtgtgagtgaggacaaaacatgttggaaagacatatattagattacaagaccaatgtcgttccaggaatcaactaagagtagtgtttaacaggagttatcagattaagaatgtatattatgatgagaatgtgttagtggttgagaataaaaaatgatatgactagatatgtatcaacatctttagttgtcggtaagtaaaatcagagcattgaaggccaataggattacatcagttttagaagactctcgattagaaatgggaagagataactacaaattttgtagcgggattaccaaagactacaaagttttatgacttcacctggatgatagtggacaagacacactatgtcaacacacttgttgtcaatgcagacaacatgtacactgagtcaagatgttgaattagatactgaggaaatagttcgatttcatggagttctaaagttgaatatcttgggtcaggattttaagtttatctctaacttttgagaaaagaatgggtattaaattgaaggttagtgcagtttttgttcacatgtgaatggacaatttgagagaaatacttagataataaaagacatgtcacaagcatgtgtgatatggtggagcattctagaataaatttcttcctctagttgattttttgtttgatagcagtcattaaagtgccattgatcgggcactctaagaaatatggtatagagaaaaatattgatcaccgactcactagaatgaagtctgtgagaaagggtgcattagaccgagagggtccaaggaactaatgaggccattgagaagatttgagtttgtatgctcacctcacaaagtaaacaaaaaagctatgctgaatcgaaacataggaataatgggttccaagtgggactttgtgattcttagaagagagtttagagattgaaaatgaaaggtagataaggcaggacaatgatggagcatgtttatggtttaacttcctaccttgttttcacattttcatgttagtgaagtatgtgtcagattcgactcccattttgagcattgaactttagactggtttgatataggaggaaccacctatccagatattagatagtaaggaagagatatacagagcaagatgattctgctgtttaaaatactgtggtgaaataataaagttaagaaagagatttgagttagagtcgcagatgtaggaactatatcccgagttgtgcagataaattttgaggacaaataaagtgtgaatggtataaatgtaaaaaaattcattaccgcatataaatataaaatttgaaagaactatgatattttgtgtaaaaactttattctaataatattaaaatggtttagtttttttttttttttttttttttgggctaaggattaaaatcgtttagttaatgttaggttataaaacataagtagtttgttgaaaaataaaatataagaagaaattgatatgaaatgaaacatacatggtaaataaatagaggtaggtaacatgttcattaatagtttttgaagaaagacacaatgtcatctttagtatacataagtaacagaatggaacagaggcgttgtatgatgcaaaacgccccaacaaagttaccagacgtgttccttcactctcaaaattttaaatacgtctttgttgctctctactccaacataatgtacactctcactcactctccactgtatatgctttctttctttcttctttttctactcctgcacttgatgattttgatgagaatgaaataataattttgaagtagaagaaaaaatgttaaaattagaaaccatgttggcaccaagtcgcttacaatgagcccttataatcatgctcatattttgaagcaaccagagcacttggaatacaacagttcaaagaaagcacagattttctgataaatgtctgcactctcgtttcgtttagtagggaatggagtgcctaaggaagaagctgcactggcaccgtacgcccctacatcactatgaatttgcaccatcgaagcttccttgtgcactctgtcttcttttttcacgccaattctcaccccacatcttagcctcagcaacagctcgttctctatctaaatccttgttgaccattaatcttgcagtttctctaggagaatcatccttctctgacccatctaaatcccatcttcgtccggaccctcccccttcctcgttctttagtatccttccaccatctctgtttcttctatcttccttttctccagagcctctgtggcctgaagctgtgctagggtcatatgcttggttggctagataagagagagcagtaactacgtctccaatgagaggacgagttgcagcctgttcttggatgcacatcgacgccacagctagagcctggtagagtcccctcattggataccgaccctgcagctgtggatcagccagttttgaaaattttctacgatcattgaacaacggccgtgcctgcatagaataacaataaccaccataattttgttatgtcatgatcacaaaaggctgcaaaactagaagataattgccagtcaaaactggttcaaagcgtatggacttacccatgtgacaaggttctgctcaccatggggtcgagtactatcgatggctttacgtccagtaattagctctaagaacactaccccgaaactgtatacgtcagacttcactgtcaactgtccagtcattgcatattctggagcacagtaaccataagtgcccataaccctggttgagacatgtgacttgtctccagtagggcctagcttcgcaagtccaaaatcagaaagctttgggtgaaatccttcgtccaacaatatgttggatgatttaaaatctctataaatgactggtgggtttgctttgtcatgcaggtattccaatccttttgctgcaccagcagcaattttcatccttgtattccaatctaatggctccttatcaggtggaagatctacataacaagtcagagtactatagttattattttaaatggttactgttcacacacataaatgcaagtcagacaattattgcagacatgttaccctataataataacagcatgtaggtattatgttttacccgtaaatgaatgtataggaatataaaaaagccacactggcaatggcaaatgaacagacaaaacctcttccttttaaaataattttaatgagtttaacagccatttgtcttctcaacatttatggtgaaagctacttcatctttggccaaaaccaatcaaagtcttgacctaaaagcttcaagaacaaagtgcttctcaactattttgcctccagaccacagttgttaaggtttgtcttacacaagtgaggctatacatagaaatttcaacaacccatccattaggaaactaagcttgtctagtttcaccatgaatgtcaaatttgatttttcttgagcgacatcggtacaaatcttacacttgaataaaagcatgatcactatcaatgaaagagactaataaatgatgtatttcttaacaaagtgaaacagaaaaatgtgtatcgaacttttaccaagtaggtgatcttctaatgatccaaagggcataaattcatatacaagaagccgttggtctccgtcagcacaatacccaattaaactcactaaattagggtgatgtagaaggctgagcattagcacttccaccaaaaactctctgtttccttgaagaccatttctgtccaattgtttaacagccactacctgtaaaggacaaacatactttaaacacttcaaatctcctcagtcatgtctttatcactgctctagaagccatccaagattccatattaccaataatagacaatttttgaaataatcagaagccataatggaacaatctagtatcattatcatccaattatttcattgtcaaactatttgaaactatatagattttcaaactccttgtgtgtgttgtgggtgggtgtggccagatttcccaattaaacattgcaaaacatcttttaccattatgtgactaagattataataagatacatagtacttcccaatgaataaactcaaccattgattctctagtgttcttgaaccctcagcacacaaaaaaagcatacacacattatatattgacattacaacaccactacaccagcatatataagtcacttcaatctttagagacagttaaggcataaaatctatttttccttgaggggaaggaagttattggaatccagttataaaagtctaacttctagttctcagcccgatcgtcagtaactagagataggtcactagaattctacacatcttataatccttcaaagggaatggttaaacagcaatagtttatgtcactgataagtctatcacccactcaaattatatacatgttaactgattacttgattgatcttgcaataatatctcaaactaacatacaacaatagctaatactgactgttctgtgatttcaaaagttgtatttgactggaattttataaccaaaagccaatcaataatgaaggaatttacctgaccagtgctttcgagtcgccctttgtatacacgtccaaatcccccttcccctaagaagcactcaggcctgaaattctttgttgcagcagccagctcgcgaaaggtgaatgtttgtgcggcaataggaaccccaggcccatccttgggcacaggaaattctcttttggacgctccattgctccttgatctgagtctatcaactcctgcagaaaccaccattacaacaaagtgtagatccataagttatggtatgacatccaaaactaaactctcaagatcaatatgagaacttgaatttgataggattcaaaagaagaaaaccacccttgaattcttcagataataaattcaatcaagatacaatccccaatcacataacaaattactacaattaactttgactttttaaggcttccgaagcaataggattaacagatttatcagtcttcataaattgtaactatgaaaatcaagcaagccaaatcaccatgggccttcaaaacttcaagttacaccttattcatttatattattttgtaatctcaacgatgtcaaaatccagtggggtctaccaaaaatcacctcaaaatctaaaactcaaagccttgataccagtcaatcagaaatagcaatcaaacaaagtaagaaccgagtatcataaacataaaggaaaaacccagatcagatcaaacaacaaaacctgataatccccaaaaaaccaaaaccaaaaccaaaagttcctaaagtaaaaacatatgcatatatgaatatagaggaagactaaccagaaggcaaactttcaagattagagatgggcgttgattgagcttgctttggatcatcactgtgtttctctggattaagggtctcctcctctttcgaatcgaaacaagaaaagcaacccatttccccaaatcaaataagtaaattagtaaacccctccaagataaaaatcgttctttttcctttaactccgaagaagaatattgaaaactcaatcaaaactaatatatataatccaatccaatccaatccaaatattacaacagtccaatcagatgcgtatccaaattcctgggcatctctctcttatttttcttctatgaagaagacaaagcaaacgaacccaacttcccaaaaatcaaataaaattataaagaaaaaatggcagtgaaacagagatgtaaacaccaaataaaagagccggctttgtcttcggcttcgtttacactactgtacacgcacacacgcacacgccttatagcacaccaccaccactaccactactaccaccaccaacaacaaaactatctttctttctctctccgctttgaccccaggaaaaataattaaataaccaaaaataaaaataaataaaaaatgaaaactttatatttgggattaaaatatcaaagaaattaaaaagtggatttttaacagtgatggtgtttagtaattttggtaaggaaggagatgagaaagaaggagatgattccaattggcacaaacaaacaaaacaaaatggcaattttgggataaaaccggtaaacaacggaaacgtgtcaaatggcggggactacacaaactacactgtctcttaattatttaattgattaacaacaaattattacttttattattctaatctttgttttaaaccattgtaaatattaaataatattgaattatgttttaggacaaactagattaaaaaaatggaacggacaagctacaaaaatatagatacttatactttgagcaaaatttagtaccaaaaaaaaattaaagtgaattgatggagcaattttcatattgaaaagaaaattcgccattggatgagggttcgggattagtgacggtcagttggtagaagtagccttgttgtgtgttctggtcaagtggatctaattttggcagaggtggtagggataatagaagcgttaagttggattaaggctaaagaatgagcgagtataaagtttgaaaggaatttattaatagtggttcaagtcatctctagttcattggatatgctttcttcttttggttaaatagttcatgaatgcaagattttattagcttgatctttaacatttattaggttatgttttgttaataaagttgttcattgtgttgctcgtatctattgtttttatcgagatcataaatttagtatggagactcctctagctaaacttgtatctatggtaatggttgatgcttgttgattaataaattactattctttaaaaaaaaaaaaggtcataaatttaaaaatttgaataagaaaaaccataattttgagcaaatattttataaaaaactataaaattataatttatttatgttttaagtttatattcaatataaatacaagggagtcaatattagttaagtttttttttttattattaaaaattagttaggactgttcttagttagaattatgttttacacatgtataattgtatttatcaactaaatttagttctgattagcttgtatatattgagttatggctcaatttgattcactaataaaaatacatttttcatattctttcttttcaatatggtatcaaaataatctttttttttttttttttgcttccacacgttttgattttctcttcgtttcttcattttctctgttaatgaaataaaaatagtgttatattttaccaggatcttaga

SEQ ID NO: 93880 - DNA, 515 bp, Cannabis sativa
  modified_base (153)..(158): a, c, t, g, unknown or other
tggctaaaaagtattagttacaaaaatctctaactgttgcgaccaaatgtatttttgatcgcaacacttgttgtgactaaaaatttaaattagtgacaagttgtatctaaacattatgttttagtcataaataatattttgttgtgactaaannnnnnatttagtcacaaaaaaattattttgtgacaaaaagttaccactaaaggtggcctttttttttgtagtgggttattatatgagtttgagttgtgatttaagttgctatgtgtgttattatgtgaatttctgtaaaaatacaaaaaaagaaactactttaatatgtagaaaaaaaaaaaactccttattaaagtaaaaactatatgtatctatataggatccaatatcaaatttatgtttgatggctattttttcttagaaagattacaattaaatatttataatttgatatttacatttaatcgattaaaaagttaatattattataacccgactaaattgaaaaaatattttttata

SEQ ID NO: 93881 - DNA, 677 bp, Cannabis sativa
tccgtgggtgtaaggacccaatggagggttgaagcggggacgttacagcctcagcttgatgcctctcttttatccaatcaattcatggagaaaccaaaccatggatccatcaatagttctttctccaatttttttatacaataatattgttgattatatttataatcttgaccagaaggtttctttatacgtagtatttacatctgaggacttaaaatcattcaccaacaatttccaccagaagaatctgattggagacacacagtaagttgtataagaaatttaacaggtattatatgcacttaagaaaatcgagatgtgactgtcaatatatatatgggatgaaaaatcaaattgcttgaacttggcttcagatgatgagcatttaatgatcaaagtaagttgcctaataattggacttgtatctgtttgtatatatatatatatttatatactagaagaaagttacgtgcgaggcacgtatacttacttttatgctagtgctttctactttatttaaaagtaatataataaataattgaagaaaaaataattagttatcgtttaaaattatttttacatgtccaattaatgaataatagggttgatcaaagattttccaccaaagtctaaatatgatttcattcaagcaacaaccccataagcttagttttttt

SEQ ID NO: 93882 - DNA, 1292 bp, Cannabis sativa
tacattcatgcatgcactaatatattactcataaaataatacacgccaatccaaacatatatatatatactaggtagatgttacgtagacgagccacgtattgttagttttatttaagttttttttttcgattttgataaataaagtaatatgattatttgagcaatttgtttttttaaaatatatactatgggtactgtgtttataaacgtatgatatatacattattaataataaaaaaaatacgttaatcttaatatataaacgtactatataatagatattcttaatgtgaagaaaaacttaagataaattataaaacaaagcatagttgaactttattctaatctttcatcaatttagcaatttgaatggtgatatctttgtactcatccttcgatctagatctgtgatatctttgtactcatccttcaattaatctagatctgcatacaggattgtctatgcttcatgaaaaatgttatcctattggataataacattcaaataatgaaaaaaaatatatatatatatataagaaatagacaatcatgagtccatcgccaatcattgcaagaaacatgaaatcgcaagttaaaagcgcacggggaatcatgagtccatcaccaatcattgcaagaaacatagaaccaggtgataaacccttaatattgtcaggaattaggaaacttgtccgttgaaaaaataaaaatcatcaaggttacattgtgaagttgtttaattgagcagaaacagattcactaacaaaaatatagattattaccatttgtgatccacatgaagagaagtgtactcgttcatctagatatagctccaacaaatttagtaccaatgtacgaaaatctgaattacaataattaatcaaatgcctcattatcattaagcatattcaaaactctacccaaattctttcaaacatgtatataatacacagtgcagcaacaacccaataagaacccaataatacacataatatggatcttatgagttcatacctaatggtatagcaagagacttgcatcaaatgacaatattggtggtactgatttgatcaccaccacagtacaacaacaacccattaaaaaccctcaattttgtaaataaatacactcataataaacattgccaaacccgtagcatttgactgcacatatcatttgtcctaaatatctaatactgttttgtcaacaatttggaaaagctcttccctataagaaagaaaaaaagtcattgcagagtacacaaaagaaagtcactgcaaagtcatattc

SEQ ID NO: 93883 - DNA, 906 bp, Cannabis sativa
ttaaaatgaggcttaaaaagatcactaaggatggtttctcaaacctcagcctcggttataagagctaaggctgagttagaattgctacaaaaccagattcagatgcatcccctggacagtgctttgcatttgcaggagaaggaaactcgggataaactgatcaaaatacagggtgataatacctccttcttgtagcagaattctaaagcaaattggattcagcaaggtgattgtaacacggctctcttccatgcttgcattaagcaaaggcagaggcaaaaccgtatcctttccattgaaagatatgatggtagcagagtccatgaaccagagctaatcatggtggcattcttggattactacaaagggttacttgggtcaaaaatggagcagagaaggaaagtagatgctagaataatagccaggggacttgttctaacaaaggagcagataattggccttactcaaagatttactagtgaagaagtgaagaaggcagccttcagcatacctggaaataaatctcccagaccggatgggttctcaagtaacttttttcaagatgattgggagctcattggagaagatatcagtggtgcagtgatagcatttttggaatcaggtaacattcttaaagagattaattctacgatcattactctggttcctaaatgtaaatgtcctaactctgttaaagattttaggccaattgcttgttgttatgttatccataagattgcaacaaaacttttgagctctagaatcagcaatattcttcctgaaataatttcccattcacaagggggatttactaaaggaagattcataggacataatatcatgatttgccaagatttggtgagacactactgcaggaaagccaataagccaagttgtatgatcaaa

SEQ ID NO: 93884 - DNA, 839 bp, Cannabis sativa
cttttatactgttattatactgaagttcggttattgaccagaagctaatatatgtcttacaaaaggaatatacattagctcaaagaatataaataattaaattgcattatttaatgtggtttaattaactcgttccaattaattaaaattgatataaaaatttaaactcgcgaactatataagcatacacgagataaaaataataactattgacaatatagttgacgagacaatatgtcaatctcggaataaacagagtatcctaataagaacctacaagacgagacatcaaggagcttgcaactcattgacccacatatttcataaagaatataaatacattcactgatctcgctctttatataacaaagtagccaccttgcaaataactctatgatataaaggacacagcgagaagaagaatatttatacttagcgttttctcttataaaaacaaataaaaagaataactcacatttaacgagaaataacatttttagtcagcatatataacggtttaaaggataaagacaaagagtagttgggtagttattagatattatcccatgtgcatataaatgaaatgtggggaatgtccatgtttcatgaacagttgtaagtgaatagatcctaataaaaataactttcatcttatacacctataaatagaaacaaaattcatagaaaatttggcgacaaattaagagaaaatactattattcttacctttattaaaaattatacaatgtattaaaataaatattcatactaaaaaggacccgtgtagtatatatgtagattttaactacaaatttacgtaaaatatctaaaattcatat

SEQ ID NO: 93885 - DNA, 640 bp, Cannabis sativa
gaatagagtactcatactcattgtgatcccttaggctagcctatttgataataatactgactcgtggattaaggttagtaacgtcacaaccacgtgaaaaactctgagtgtctttttcatttatcgatcttttaattgtattttcttttgactctaatattaaataattagttttctgaaaaaaaatctcggtaaacaactattattttaattgtaaataaatatttatcattgttatcattatcaacttatcaaactttttaatgtgtcattctttcgagtgactctattcgtgtttagtgttgtgttttcgggcttgttgtgcctaagcttatatcttttatgtcgtatcatgtcgtgtcaattcacaacattgtctcgtgtcatgcttaaaatcatatttatttatgtcgtgttgtgcctaaacacatattttttcgtgtcgggtcgtgctcatgtcgatttagtgtcgtgtcaaaaaatccaatccatatttacagtactacaatgaagaaacaacattttagcaaaaaaatacgataacaataataaaaaatgagtaattagcggctaaaccctcccaactcttattttacttgcaattaaccatccaaatttaaattttggtgggaaaacctac

SEQ ID NO: 93886 - DNA, 577 bp, Cannabis sativa
gtatagttatttaatttttttaatattgcaagcttgtctcttaaataaaaaacaaaagagaaaatgactgttagtttagttataaaatgtaaaattgtataataatttaaaaaacgttagaaaggaacgttaaaattaatatttagacagattgagttattattgataataaaagacaaaaaaggtatgtacatgtaaattatcctataatcaatgtttgaacattaggagtttggaattgtaatttagagtaattacaagttttgctatatttgttttactagataattacacagtaattataattgaaagttattgagaagtattaattactctccaattcttataattcaaattaagtataatgatattgtataattatacaatattaacaaattgtgtaattagtaactcctttaccaaacactaactatgcaattactaattgacatgatatctaaacacgcattattatattttaaaatagaatgtaattactctcatatataataacactacttaataattacataattattttcaaaaataacagtttaactattttttaatagaccaa

SEQ ID NO: 93887 - DNA, 514 bp, Cannabis sativa
aacaatcctgtccaatattgtttcccttgtccactcaacctgcaccagaggaaaggggccactgaaccataaatctctcacgaaagggcacttccaaaaaatatgcataggttgaccaagtcacaaaataggtaggatttgtccttaacaaaagccaatttatctctagtagggagacaacaaaccaccactctccaaatcataaaagagagcttgtaatgaattttctaattctaaattaacttccataagctactccctgaccttaggaaggtcctctaagttcccccatatgcgcgtttgactaaaaattcgtcgtcactcgctctttccaaattaatttgtcaggattgttagcagggaacctaacgatgttacaaattttattttctaactctcttccaaagggattaaaaaccacctccctattccaattataaccactagttgagatatctgctaccatcttcaaatgagggtaccgaattcgtacaccataaattcaatgaattct

SEQ ID NO: 93888 - DNA, 779 bp, Cannabis sativa
tggaatcccctcctcatagatcgcataactcataggtttgatagttggtacccaaagtttcacgttcaggctagctgcactagttcttactatggaattatcgagcagtacgggaccatgttggataggtcaggccacatagattcaagctaaaatttagatccactaaacccttatgatatatttatgatcacaggatctagggagtttagtgaatattatagtcctccctcgtcatcttctgaagattatggtaaccttctcaagtgggagtttttcccattttcacttatttattttgttcaagtgctaatgaacttttcttgcctcgcagatatggatttggatttggaaaacatgttcaaaagtcctcccccagccgattagaagtctaagaagagagttgcccaagctggtgaggcctcgggttctaccaaagaacccaaaaggaccaaaactactaccaacaagaagaagtcctcaaaccagcttaccatcgagccagcgaagtctgcaaagaaagagaatgaggtctctgctgcagggaatgtcatcgagcaactgaatgggtcagtgcaccaggtgaaactctctaattttcatctagagatggttctccttgagccctcatgtcccctaccccccgaggttggcactgaaggctcggagcatgctaccaacgattggaataacatcttgactcttgggtccgacgattgggatcttctcatgcgaggcagttctaagaatctagccaaaaggagttacaaacttctgca

SEQ ID NO: 93889 - DNA, 1794 bp, Cannabis sativa
  modified_base (907)..(913): a, c, t, g, unknown or other
aagatctcatttttatagtatttatgtgatcacacttagaatttaaacacacaacaactcatttctctcacataaataagtattaatccattttataacaactatatcatcataattttgaattctttaaattaaattgtgtaacaactcttttgttacactaattatatgtgatcaataaaagagttacaagtaacaataaattgtaactcctctccaagttacaacatgtaaattacaaagtgtagattaaaactataggttacatatttatttacaacacatttaatatatattatcacatttaatctacatactttattattaaataaaataacaatcactctctagattaaaatgtacgacacacttgtaatatttatttaatcaatcaaaatatagcatcccccactttgactaaataaatactattataaaagtattacttaggtgcattaggaaaaatatcttccgacttgaatttttaccttagtgtagttactacaaaatttaataaacgtttggttgttgtagcattgaacaattattcttttagtataaaccggtgataacacacactcttgctaatgctcacttgagaccgaatgtctcgctcttataccgttaatgaccatgtgcaaaattctaattcatggactctctagagaataactctcaattatcttaagaggcaacaccacctctagcctatataggtggagttttagtgtctcacaactctttagacacttctgaagcttaagagtttttatggtaacctacgttgtggttatttaagactttctacaaaattttgagatatttaaaaaaatttaacacgataaaaatagagctcagacaatctgatgtgtgcgatcactaaatatatatttttacataattatannnnnnnttatttattttattttattttatgctaattaaaaaaatcgtatcaaatgtgttaaatttgtgttaaataaatagtgcatttggtaatatttttttaattaattttctgttttttaattagaaaaactaaaaatattttttcaaaaacatgttctgtaaaattgttttcattttttattttttaaaaaatcattttcacaatttttttaaacgttttttttttcttaatcaatattttaagctctaacctcaacgtggaccttaagacctggactctgaccccagactctaacatcaataaaaaaaaaaagataacaaactcgttcgtgcacaactaaatcacgaaggaaacacatgaactaggatgcttgaagaaaagtggaaagtaaactaggcatgaatagcccaccacatgatgtgaagaaatgcattgactctgtttgttattcctttgcagattacatgctactatcttgcctgatcatgttccgatgcggcaagagtcttgggcctcctcctcagaattggattaaacttaattgtgacgttagagtgggcctggagagtatgtgtattgcagttgtcacaaggaatcacttgggtgaggtgatccgaatccactcggctcagttggacttctcggatgccctctgtggagaggctacagcttgttgtttagccgtctcagtggcattagaaatgggatctaaatttgtaatagtggagagtgactcgagactagtaatcaacgcgctcaatgggaaggagtcccattaagctcttgagaactatgtctcattctgctctaagtcttctccctctttcattagttataattttattaatgttagtaggtcctataattttgttgcccacaacgtg

SEQ ID NO: 93890 - DNA, 753 bp, Cannabis sativa
tagaacgtttcgctctatctcgccttctcctagtgatggtattatggtgagtgaattgattggtgcggaggggtcttgggatatccatactttgtcccagtatttttgagattggatattgatgtcatccttggtatcccattgcggagtggactatgtgaggatcgttggtgttggcattatacttcaaatggttgctacactgtgaaaagtggttatgcggttgctcttaatatggtgagtgaaaggaatggaagctcttctgttgaccaggctcattggtggaatgggatgtggaatttgagggttccacaaaaggtcaaaattttctttggcgtatgtatcatcgggctcttccgactaattcccagcttattaagcgtaagcttcttattcagccgctatgtcacagatgtggtgaggaaacagagactccagagcatgctttagtctttttctcttcattgcgtcctttgtggtataagcttcggctttggagtgtgctcagtcgtggtaggtttgggtctttagcggaatcgcttgtttatctttttgaggtgcttgattagagtaattttgctttgttggctatggtctggtggtcggtgtggtttgataggaattttgttttgtttgggaagaagcaatttagattggaagtgcttgatgtgttagctagggaagcttgggaggagtttcgtggtgtgggggtgagttctggggggcaggttttgggtgctttggcttcgggta

SEQ ID NO: 93891 - DNA, 806 bp, Cannabis sativa
atattcaatctgaatgtgccaataccttaaagaaaaataaaaagggtttgaatgttacttggagtgatgattctgaaagtagtgaagatgaaaaagaaaagattgctctaacaagtgtttcgttaagaaatttgcaggaaaaaggaaaattcattttcttgaataatactttgaccgatgacaacaaggaagaagctggatctgagtcagatgagttagaaattgatgagaactctatggctgaatcttacaaagtaatgtttggtaagtggttggaaatttgtgttgaaaatcattctttggttaaagataataaaaattcgtgtaacaacatcaattatctggaagaaaaaattaaatgttgtgaatctgaattgatcttaaaagagtctgaaattatttctttaactaaggaacttgaaaacataaaaagaatgtcaaaacgttaaatccaagttccaacatttttgaaaagattcaaaagtctagccaaactagtcatgctggtctaggttatgtttctactcaatctgattctaataccaaatttgttaaatctgatatttttgattctggaagaactgtctctacctttcagggttctgtcacttcagtaaaatgctctgctgttacaaaaaagaagtagcccggtaagtttgacaattccaaagggaatagaagacgattcattcctattttccatttttgggggataaaaggtcacattcgacctaaatgtgtcactatgcgaaacatgtttaaatctaattatcttggaaataaacatgtttttcaaaaacaaaaat

SEQ ID NO: 93892 - DNA, 553 bp, Cannabis sativa
ttgaagtagtcccgaagagggaggatggcccctgcacaaatatgctcaaggctccaggcgcccatactagttgaaccaccagtgctagtctcaccactggtttctgggttattgctggcgaagcgtgtagggggtagcaactgaattcaccctcttgtattgacctaacctggcatgattgcccaagtgcaattccataggtcttcaacatgtcgcctgtatagccttagatagatcgcacctttaattctattaactcagccttgaaggtgacgctaggatcctgaggagttttagacgtatgtggcttgggaggcataatctcgaaatccaagtcacttggttcaaaagcaattgtgacgttgggtgaaaacaaaggctttgccacaagaataaaggacacgctgggtggttctggcaagactgcttcttgcaagaatcggcgtctgccttctgatatttcttgcaagaagcgcctgtagcgactagaagtatcttcctgttgggttctcaccgtgtgttccctagccctagcatcgtttagctctaattt

SEQ ID NO: 93893 - DNA, 546 bp, Cannabis sativa
taacagttgaataacttgaaatctagcttctatttggacagatttgaaaagaacaacctgagtcaattatctaagcaccttctgatccattcttggagattgtcaaaacactagcattgtcgtatccatcagtgccttctccatctgaaactacatcagcatcaccatctttcttggaattttagttctttggacaaggcaatctcttcttagatgtgtagttttgttacatacaaagcatctcttcttgaacttggaattatggtcgcctttattcgaattgttctgtcccttacttttcttctttggagttttacctctgatcaacaaaccattcctagcaccttcttcttgttgttctaactttctctttaattcttttgacattaatgcattctgaacttcctctaatgtcaatgaatccttaccatacaccatggtatccaaaaaattctcataggtttctgtgggaagagaattcagtacaatgattgcttgatcctcatcctcgattgtgatccctatattctccaaatcgagtatcac

SEQ ID NO: 93894 - DNA, 758 bp, Cannabis sativa
atattgaaagattctaaaagaagatatgtatatattgttataaatgaataaataaaattaaaaaatatatatattttaattatataacagtctgtgtccattcttaatattactcgtttaaaattatatttttagttacttttaatataataataataataacataatgtgagatgtattattatttttgtattatgattactattaatgctaattatatatatataagaattatatacatatattatgcaattttaattttacgcattaaaaaataaaaaagtatttgagttaaaattttattaatgattaataaattatttttcaatatataattttaaaaaatttattaaaatcacgcaaagcacaggtttattgcctcgtatatatatatatagtatatattccaacagttcgttattaagcgcaaactgttcatctggtcttagaacataaagcccatgttccaaagatgcaccacaaaattgaatgtcagttcgagaaataatagaaccagaactcgaaaaattcaatttgtattgttgcaactgtaaacatgaaacaaaaatcaagtttctactaaaatttggaataaataagacattgtctaaatctaaaattttgttctgaaacttgtgtttggattttcctctagctttaactgatatcatttcgccattacaaactttaagtttcaactctccggattttaaataattctaattttcaagcaattacaatgaacaatagacatggtt

SEQ ID NO: 93895 - DNA, 773 bp, Cannabis sativa
tcatgatgagagaattttgataaggcacccacatacatgccaattatgcagatcaacagaattattaatgttaataaccatgtgtgtgtgtggttatataccataaacttactaagacaaaatattatagatagatagagatctagaaggattgattacctgaaactgaatcaacgaattctccattaatgaaaagctttgtgaactttatagcaggcttcctctccatcatattatcattactactgctgctgccgcctttgtaataacttctcatatctctctcttttttctggttgtgtgtaaaactaaaggagatgttatatttataagaaacaagtaccaaacatattgtacagtataataaatgagtcaaagtcaattatatatatatatatttaaatctattaattattcatttattaagatttaatttacggtgagtattattttggacatcccaatgaacttattttaattatttttaatttatataaatacagtatatagaaaaatttatatgaaaaatacaaaatgatccttttattacatttttactctcacaaagttaggacaatatttttacttttattattataattttattcactaaaataatttttacacacatcatacataactgtcacactgaaagttttctctttctttcctttttttttttttttatttttcagttctgattttgaattaatacacataatcatattcaatttctccccttaatttccctacacgatttcaatcttgatctt

SEQ ID NO: 93896 - DNA, 3142 bp, Cannabis sativa
aagaggtgcacagtgcagatgaggttcaaaggctttatattgttttgagacctgagtctggtgaaagatctgttgaagaaaagcaggaccaactttctggcaaggaaggttttatgcacaagtcctctcaaactgaaactactgtcacttcaggttcaaatcaaggtggtcatggaactgaggtaagtggtaacactttccataattggttaaattgaatgtgaactaaggtgattaattgaataatcttcatttatatatgttgagatttggcatttatatgtgtgtgtgtgtacttattaggaagtgaacattgagaagcagcctttactgaggttgatattgatgggaaagaaaagcctccctgatccagccaagaagaagggtgtcccttattggggttttgtggagttggttacaacccaaatagaagatatcaaaactgccctcaaaggaggtatgtatatatattttccaccacactcaataacaatcacttggtgagttcatttcgctaattaaatgtctcaattaagaaataaatgttccaaaaaaaacccaattatgcaattattatcttgttcatgagtgaaatttttagcatgacatactagttttttagagatatttaaaacattatacatatgtttgtatatgaactacagaggagtatgagacatcaacaagagggcaccggcaccagcctggcggtagagctctaggagaaggcatatacagaattcttcgtcactatccaaataagaaaatgcatactcatttgatctacaagctcgaatttccagctgagaatgcaaagaatgagccacaggaatccctcaacatcgaacgacaaggctcattcctaatccaaataaagaatccggatgatcatggtcaacagcatggtggtggtagtactagtactagtagtagtggtggtgcttctggctttagaggccttccgaacaagcgcaaggctatgtttccagcccatctccaaggccaatttgggcataaccgatactctcctgccgatccccccgactttttgaactacgaaggctgcgagttcctgctcattgcagcctcagatgacataggggaggagttggggcttgatttgaagccagaaggatgtgattcttcggacaagtcttgttctgatttagtaaacacttttggtgagaatgctgcttattcgactaagcccctttttgaagggacatgggattgatggccaaatgaggatcaataggaactaatgctaatggaaatgctagtgtataggtatagaagaaggatagtgttgtgtttttgttgtttttcaggtttttgtaaattatacttgtatgtttggttttgatgaaactagaaaatgttaagattgtatgaatttttttttgttggttaggattctatagatatgattgcttttcttatgtagattagttactatgttactgtttttgtttacaaatataggtgaagtggtttgatgatgaagtaatttgtagaaagattagtataagtaagctaaaacacatctgacttggcaataaaataatccatacatcaataagaaaatgaaaataaatggaaaatcaactaaatttgagctcaaccagtaacaacataatttaaacaaaacctagaaaaaataattgaatttggctggtcgaggacagcctaggaggaaggggtaagaggtgatcttggcccccccactatgcggcagccgatgacaactcaaaaggccaccccggtgccgcttcgaccattaaagactcaaatctagtgccgcttcgaccattaaagactcaaatctagattttgtggggactttggttgtgccgcttcgaccattgaagactcgaatctaaatcttgtggggactttgactaaactttgcgagaagttagagctctcaagtgacgcgattgctcctggttgatcatttgggagttttgactgaggtgactcaatccttggcaaaggaggttgatgggttagagattgaaaatgtacttgatgctagtgatgttgagggatttttaggggacttcggagaaggttggtcttaattcaaaggaggtttgtgtgggaaaattacaactaagagtgcataattaaatgaactaaattttaaacaatcaaacgattagcaatgataagatttacaaacactaaacagaaaattgagaaaaataggatcaaacagagtgtatgaaatcagcaataataaatgcagaaaataacaagatatatacgggttcaagtccaatagattaatgtgatctatgactctactccagttctggaacactactaaatcttctttattgattgagcaagagcaagtacattacagtcgagatcgattctctgttgagttctttcaaagtgtttcaactttcacactcttacccaaaaatcttcttcatctacagaaagttattcatacaaaacccaaattcaatctctctcttttctcagtacctctcaatctctatctctctctaactctcattctcaatttgaactgtatgcttttcgtcatcttcaaatgcgtaagtgttggtgatatttataggtttaagattaagatcatggccgagacctggaagaggctttttcaatgataaggaagtatgggatgaagccaaatcccaaaaaatgtacttttggggtctcttccaggaagttcttgggatacattgtcagttctcgggggatagaggtcaatccagagaaaattaaggccttcatcgatatgccctctctcaagaagcataaagatgtctagagtgttacggggcgtattgctgcccttagccggttcatttcaaagcctactgacaaatgtattccattttttaatgtgttgcggggtaacaaaaagtttgaatggattgaggagtgtgaggatgctttccagaagttgaaagagcatctcactaaggctcttattttatcgaaatttgtagaaggagaagatttgctcctatacttggcagtgttagatcatgctgttagtgctgcactcgtgcgagaggaagacaaagtctagtatccggtgtattacgtgagcaaaagattgctgggcgcggagtccagataccctatgattgaaaagctaaccttt

SEQ ID NO: 93897 - DNA, 583 bp, Cannabis sativa
  modified_base (72)..(73): a, c, t, g, unknown or other
catgcaacataaaaatgttatttctgatctttattattaagtaaatttgattatattgaaataggttttatnnagggcacaaaacccaacatatgtcacattacgcaaatgggtaaataacacgctaaaacccgaattgggaacctaaagtcacaactacaagttttgctatcgataatgaacatgacaatattctaattatcaaggaaataataaactaaggctctgaaaataacacgaatcaacaaaatggattttttggggatcctgcctgtgattcggttaacaaatttacaccaaaaaaccccaaaaatcccaaaacttgcacaactcgtacccaaacttaaccaaaccttccagatcacctataataacatcaaagagtaaattccaaccaaaaataacagcaattatccacaaaatttcaaaacaccattgttgagctaagtttgagttcttaaaacaacttcactaaacagaaaacaatcaagtattaaccctaactcgaacagtagcagaatcacaaccttaacatgcttgaactaacaaataacttaacaactcaacaagaagaagctagggc

SEQ ID NO: 93898 - DNA, 1034 bp, Cannabis sativa
cttttcaatatattttaagtgttaagtttcatgttggactatccatatatgtatttacatggacacagtctatacatgacacaattttattggctaattggattgcattccataatttatgtcgttttttttctgttgttgagactgtctcttttcttgaggatctagactttctcgtttgaagtttgttttggtttaaataaaaaaaaaaaatcaattttttataattattattaaaataaaatctaacattgtattgtgtcaggctatttgaagatttggtaaatgaaaaattaatattaaatgaaaataaaagttgttgttctttcattgttagtatacatagaatttataactaatttgttgttagtatttgtttaagttattacttagttgttaatttccagctgtataatttgtttgttaatttccagctatatactttgcttttctctgttagtagagttgttagctttatatgcttgctataacagaacaatattacattccatacaagaaattccttcacacaaaaaacactttgtacatcaattctacttgtaacttttatggtatttatataggggaaataaatcatggtttttatcaatatcaataaatgcacagcaataacttccacaattacaaatggttaacctaaaaattgaaaaaaaaaaaaaattatgcagttacttattttttttaaggatatttagtaatttgaatgcttaagatgtgtttggaagtaactgtgtaattattaaggcgataattacacaattaaagtataattacattgtcaaacaaatatgttaaattgtataattagcttccattacacacaaattcaattatactgtaactttacaaatgcgtccttaataattcaatagatggggttatcaaaattaataaagagatttcaaattcaaatctcatttctcaatattaaaaaaatcaatagaaaaataagaatgtgttggaattaaatacactctacaatggtaaagtgattagtttgatatgttaaaata

SEQ ID NO: 93899 - DNA, 854 bp, Cannabis sativa
  modified_base (598)..(603): a, c, t, g, unknown or other
aaaaaatctattttcaaactttattttatttataatcaggtatcttaaaaaatcaagccgaaattattgagaatctaataaataatttaaataaactatgattttttcgagaaaaaaatcaaacttatttatattattataaactcatatttcaacaaataaaaaaaaattaaaccttcaataaaaatataaaattattttttaaaaaacgttataaagtaaactaaaatttgtttatgtttacttaaacaaatttatattttttgagaaaaataaaatataccaaatttgttttcgtaaaatttaatttttacaaaaattaaaattttaatatctatattaattttttaataaaaaataaataactttttaaatcgcttaattagttttgaaattttaatttattttttaatttttttaatcattaaaaataattttttcttaggatctaaattaattttttaagattgactaaaaaacgtgttaaatctttctcatatttattttgaggatgtacgatttgatagttgtcaaaatttagggggcaaaattactaatatacaaagacatatcattatttaaacggaataatgagacnnnnnntaacagaaggactaaatttctatagatgtaaaagtctaagggggattcttaacaagtcgtatattttaggggttaaaattaatattgtcgaaagtttaggtgtaaaatttactaattattctaattttaaacataatagatttgtattctttatagatggatgtgagatttgtgaaaaaatttgggtaaaattttaattagagaagaataaaaattatcgtgaaataataggagtaaaattagtagaatga

SEQ ID NO: 93900 - DNA, 854 bp, Cannabis sativa
ttatgctttaaatttcattttccttataaattttaatattctttcattaatattatctattaactattgattgttttgtatttttgtaggtacattaatcaagtagagcaatccaataaatcatctcaatctcaccaggtattttagttctttttatttttaccttcgtattcttatagtttcttcttcgtaagattacaaatgggtttttttattttagggttctaaacctacaacaaggtacctttccaattgatttttgttttatctatgtacattgcactatgttcgatttagttttttttttcttctggctcttgtggaaactatcaactaattttatgaagaactatattgaaaaatcattcagttgacagcatatttttacaaaaaatcttacttttaatcataataaaatttgtgactaaaaataaaaaaattgtcactagctttaaatctcgactgaaaaattcatggacaaaggtattagtcacaaaaattacagtttgttataactaaatgtgtttttagtgacaatacttgttacgactaaaattaaattagtgacaacttgtatctacatactatgttttaatcacaaataattttttgctatgattaaaaatcacatttagtcagaaaaaaattatataatcactaaaaggaactattttttttttgtagcaataatataccttttaatttctaagttttagaactggtgtaaaaccctgatatctttcttagtcgtggtcatagtcctgttgtttaagtttcttagtctttattgattaattaactaattaaattattatctttgtatgggtagttggtgaaaattattacttcaggag

SEQ ID NO: 93901 - DNA, 581 bp, Cannabis sativa
ctatcgagtttaatttttaaatgaagaagatatgctatttttgtttaactttatttgcaactggctatagttttttttttctctgttaataataaaggaaatttctaaatatgagatgatttactattgtttcttcttaaacgaataggcaatatttgattgcttgtttattttattttttattggcttccaataaagttgttaagagtaggattctgttctaagctcgtctaatggaatcatagtataagagagttgactttggacaatcaccttttttaagaacatgcttttgaaaaggaaagaatagtttgcaattattaagctgacattagatgtcaggttaaagaagatgaatgtgtgtatatagaaattagattgttagaaggggaaaaaggagataaagacacagacaattgagtttatggagaaaatgaaattgttcaaattgtctactaggtcactgggaggtctccagttgaactgacagggccaaaatttcattaaagaaaaaaaggaaaatcggtcaaattgtctagatttttgttgaaatgtgggttatgcagaaattgtttctgtag

SEQ ID NO: 93902 - DNA, 1003 bp, Cannabis sativa
acagagaaaagaaagaaggagacgaagaagaagagaaagagcagagaaagaggggacgaagaagaagagaaagagaagacgaagaagaagagatagaggggaaggagaaaaagttcaccagaagaagggaagaacgaagaacaggaaagaacgaagaacacgaaagaaaatgattgtaaaatgtcgttgtcgtcctctgaagagatctatgattttcacctcttagactgatgcaaatccaggtagaagattcatgagatgtcctctgtacaatgtaagtttgcatatgttgtatgtaaatatgaatttattatttttccaagttttttttttctttttcgataaatcagaggattgggaatacatatagaacaatatagaacaatagatattattcttaggatgaaagtagtgaatacaaaagacccaaaataaaagaaagatagatacgtaccaaaatttgaagctttaatcaattaatcttaggaatgcattcatagaaacccaaaacctttaaagcccaaatagaaataagtaacaatagatattcaaaaaaaaaaaaaaacagtaggatgaaaaaactgtgtttgtttgccaagaaggaaaagtgaatgaaatagaagaaaataatgtaaagggaggtgaatgaattgattatacaaaatagagtgaaggaaaacaggggtaatatttggggtgtgtaaaaaaaatgtagttattgcatatttttatgtgtttgagttttatgtatcgatttaatatagcttgaagaactctcgtgaagcttcatacttatcaaatttataagttttggaagagaaaaagttactattgtcagtttgtgtcattttgtgaagatgatatatataaaaatatcattacaaaaatataagtttgtttattttgttggtgcttatatatagagaaaatgacactcaatctaaaaatatgagattttaattaaatgtttttttttacagcaagttggtgggtgtaaattttg

SEQ ID NO: 93903 - DNA, 687 bp, Cannabis sativa
ttacactaaattgtaattttttctagtcgaaagaattttggcaatagaacaaaaattcaagcaataaaacaaaaatttagaggaccaaattttacaattacaatagtgtttgggacaaattcttatttatcttgcgaaattgtactatatttgtatatttttgccaacaatttgttatttatcactacttaattgaaactaattaaaattcactcaaaaaaaatatattatctttattgtcaacatataattaaaacattagcctataattttaattattgaaatataaaatagattaaaccaaaatatttaataaaaagaacaaataaaataatataatcataattgaaaatttattactttttatcttaacaattagttttattataattatatttttaagtaaaatgaagttacttttataatattaatactatttttttaatattttttatttagttattattttctaatttatttatcatatcaaatatattggactttcctaattactataaaaaaaaattatgtgaaactgttattaacgatttagttgttttgtcataaataattaaaaaaaattaagtgtgtatttaactgtttgaatattatttttgaaaatgtaaattattaagaaaattattaaatgtctactatatttacaaaatatatgaaatttaaaaatta

SEQ ID NO: 93904 - DNA, 652 bp, Cannabis sativa
accattcgcttgaggatgtgccactacggagaaacttttgatgatatcatggttctcacaaaaatcagtgaaggattggctgtcaaactgcttgccataattcgaaactattttgtacggaaatccaaactaacagattatgttcttcacaataaagtcttaaactttctttgatgtaatagctgtgagtggttcggcttccgtccacttagtgaagtaatcaaccgctaccactgcatactgcactcctcctttatcttggggtaattgtccaatcaggtcaattccccaaatggcaaagggccacggagtttgcatctgagttaactcatttggcggagcttgaggtatctttgaaaatctctaacatttgtcacatttcttaacataggcctttgaatcttcaatcattgtcggccagaaataaccttaccttagaattttcttagataaactctgcccgacagcatgatttccacagaatccgtcatgcacctcagataggagtcgtgcagcttcttcttgagtaacacatttgagcaacggtatagagaatcctcttctgtacaaaattccctctactatgatataccgtgcagccttccttctcatctttcaagcttcattctgattatttgggagttccccagtg

SEQ ID NO: 93905 - DNA, 539 bp, Cannabis sativa
tttaaacaaatatacagatttcgcgttcatatttaattatcattaaaaacaatccaaagacaatccaaaactaactaaaattattaaaactattaaaaaatatatattttttaaaaatctcttccataaattattatcttttaggtaacttttcgatcttcttcttcaccaaattatcaaaaaaaaattctccccaaaataatgtaaaaaataatatatgcactagattatcaaaaaaaaaaaatctctcccttaaattattttacatttcatcttctttatccttttcttcttcgtcatcttctttccttcttgtaggcgatggttgaatttggaaagtggttggtcagatctgggcaggggtcaaacaaacctaggatgagttcggttggatctgggtcgggatcagtcagatctaggctgagctccttcgaactcacttcgtctcagctccaatagtcaatttcctcgtgtaagaaagtagttcttggatctgggtcgagatcttcttccctcgtgtaagaaagcagttcttacat

SEQ ID NO: 93906 - DNA, 941 bp, Cannabis sativa
ttgtgttgttcggcaccttttcctctttttctcaccattgtagccctaacttcttctacttcttcaatggcatcctcttccaccaaccctaacattctcacccccctctctgaagaagaaagcctcatccatgactttgatcatatctcgctctcttcctcctctagccccaactctttctgccttatcttcaaaacattatcccctcgaactgctaagcccgcctggattgaaaaggctatgtctgaagcctggaccctccgtttccctgtccaaatttccgaataccattctggccttttcttggccaccttccaatgcgatggggatcgccgacgtgtcctggaagaacagccctggcattttgacaagtttattatagtcttcactcatcctgatgtctcacctactcctacccctgaaagtatcagatacactcctttctggatccaagctcaccgaattccctttggtagaagaagccctcagttggctcagttcatagctgatgaattaggtgaccttattgaaatattccccctttctctccttgagaactctggcccttttctcagaattcgtgttctgttggacatcaccaagcctttgcgtaggggcatgacaattcgctttcgatccatccctgaaccaaaatggataagtttcaaatatgaaagtcttcccaacttctgttacttttgtggccttctggatcatacttacaaccgctgtacccgatacctccttcgttgcgacaacttctctccccctgttttagaataccgtgacactctccgtgctccggcacagtctctgtttaagaagaatccttttgaaatttccaatgccactccgtttgaggaattttttcctcctatctcttctcatgaccagagtctccagcacgctgtcaatcagtttctgcgtgtgcaatcccccac

SEQ ID NO: 93907 - DNA, 930 bp, Cannabis sativa
cattccagttgttgcctatttctcgaccatcctctgcttgaagtcaatatgccccttgtcctattactttactaatcttataggggctgggagggcccaaattactagctcctgtctctttggtgttttgaaatactcgacggagcacccaatcaccgtccttgaatgttcgtgcttaaatgtttttgttgaaatgttgagcaaccttctgttggtatgttgcggctctgatcaaggctttctctcttttttcatcaagtgagtcgagctcgaggttcatacttttccagttctaatcatcagtcaaatgttcatacctggaagtgggaaatcatgtctctgctgggatgactgcttctgttccaaaggttagcgagaaaggggtctcaccagcagaggtttttataatagtgagacaagaccacagaacaccaggcaattcatctacccacattcatttggctttctcaaacctttttttcaatgtgttgacaacagtcttgtttgttgattctgtttgaccgttggcttgtgggtatcttggggtcgagaatgagagttggattccccattctttgcaaaagttttggaactctaaacttacaaattacgagccattttctgtgactatctcctttggcactccaaacttgcatattatgtttttccatacaaaattcttaacttcgagatctcttacctttgcaaatgcttctgcctcaacccacttgctaaaatagtctgttagtgctagcataaagactcattgtcctggagcattcaacatcttccctactatgtccattccccacttcatgaaaggctaggatgctagaagtgaatgaagcttttctggtggcatatgtgaaacttgggtgaaccgttggcatctatcacatttcagcacaaagctgagggaatcggctctca

SEQ ID NO: 93908 - DNA, 542 bp, Cannabis sativa
gaatttcgagcagccattctatcactaagcttaatgcctgaacccacatcctacaaacaagcttccaaatataaagtttggaacaatgctatggatgtcaaaatagatgccataacaaaatcatacttagattgtcgttccattaccaccaaaccaacatgtgattggcaataaatgtgtgtataaaaagaaactcaaccccggtggctctgtccaacgttgtaaagcatgtttagtcgccacaggttacactcaattacctgatatccactacttcgacacctgtgccccagtggctaaattcaatactttaaaactcatcttccccttagttgccatccatgaatggcacttacatcacatggatataaacaatgcgttcctggatggggaaatgaagctagtctaacaaacccgcgttcaaccacctgggtggcatggtgtatgctgctcaagaaggggtgtgcacacatgggtggcatacactatgtcatccaggcaaaggcccataccttgggcggcatacacatgcctccaagaaa

SEQ ID NO: 93909 - DNA, 1003 bp, Cannabis sativa
gaaaaattctcaataacccttgttgttctatttgtcttaaccatgttgactctaacactcatcctttctgcattgttccagggcaggtaagatatggaaacaacttaagttttcttcttttttctctaataataaaaactgtgatattaaagatttcttgttaagaggttttgatgctttaagaaaagaagacttaactatttttttcgaaattttatgggcaatttggaacaagcataataagttcattttcaaaaataacaagcctatggatctagatgtggaattttctgtcatctcctttttgcaggaatataagaatgcacaaacaaagtttacttccacacatgtccatcatcaacttgaagagtcacccttgctgccttctcgaggaatgtataaactcaatgtagatgcagcagtttgatctcactcaaaaactcatagctatggagcaatagtccaagactctcacaacataatcattgttgggttttcctcttcagctcattttggtctgtcccccatttttgttgaagcggaggccctccaccgccctttatactggtgtcaaacagttcgtttcccattcagctcatattgtcagattgctagaatttgatctcaaaaattcaaaagaagctcaatgactgctctgccctctctggctttattatggatatcgtttcctctttgtccttctttctaggtgcttaaatcaggtttgctcccagaacaaaaaatactttggtgcataatttggctcaggcagctctaggaactggcgaagagattgtttggaaccaattgcccatccattctagatctttgtaatctgtgtgcttcttcttgttcgtcctttggttacagatcttgtattttcaagaaaaaaggtatttggtttaacatgcgttgcacgatagggttgttgtaacgccctaaataattaggcacgctacccaagttacttatgaaaccctaatcccctaaacgagattactaa

SEQ ID NO: 93910 - DNA, 791 bp, Cannabis sativa
  modified_base (26)..(38): a, c, t, g, unknown or other
tagcgctgcaacctaaattgtaacannnnnnnnnnnnnaaacccctattgcaactagcactacaaccactttaaaaactcaaacgtaaatttgaaaacaaagttaaaaaataatatatgaggtaattcccctataattattaaatattaattttatcctaacattaaaactttattttcttaaccattattgtgattcgatttataatctaattacattgaaccgatctaattacaataaacaaattaaatccaatccagttacaaaaaattaaacatctaattacagattggattggaagtgagtagttgtattttataaattaaataagatcggtctttgaaagaaactttcaaaatctataattaaaagccgatctaatctaattacatgcatgtaacaaatatataaacatattatatttgttcatataaataaaaaaattatttaaatttctttttaatttatttattatttattaattttcgataaattctattatacaagaatttcttaaaacaaatcttaagaactcacatacttttatttttatgtgtttttctagttaatattaaaaattaagtgttgaatagaaataatatttatgatacttacccttaatttaaatatgtgagattattttattaaagtgtcaaataatcatgttgcgaatatagtagttttttttacagttattattttataatattttttcttcttaataataaaattttggtaaaacaatgcataaaaaattataactaatgattaaataatattagatggaataa

SEQ ID NO: 93911 - DNA, 677 bp, Cannabis sativa
atatatatatatattattgctttattatttgaatttatgcttgctatttgtttttgtgtatttttcaagtgaaatattgggagatctctgtttttacttatttcggtgtttttcaagaatttttatgataaaattggttaattttgagaaaaaaaattcaaaattaaaatcatgcatgcttagttgagattcttagtgcttaaaaaattcaaaatttgtaatttttagcttcagaagttgcagtcctaagtcaaaagttatcactttcttaaaaaaaataaaaaaaactaaaaaaaaataaaaaataaaaggaaactgcttgtaatgacacggcataggtaactgctatcctaatcatataaatagcaggactaatgttgcagaagatgcgaccaattttctgacttagagaaattctaccaaaatatattatgtacacacaaaatccaaaaataagaatgacttaaggagtatgtagattttgactacaaaactatgcaaaaaattattgggaaattaccctatatattatttttttaacttttatttcaaatttacggtttgagtttctatagtggttgcatggctagttgcaatagaggttcctatacgattttttgttgcaatttaagttgcagcattagttgcaatagaagtttctatgtaaaatttcgtaa

SEQ ID NO: 93912 - DNA, 760 bp, Cannabis sativa
ttagggaatgggaaatgacatttcgagtgggttggacttgaacagaaaacagacacggttgaagtcgactagaacagtgaagagaattgttgacagatgttcccaagctgtagaggccatccttaagtgttcctctcagtatcaccttccctgtttgatccttcacacaacaaaaaccagcaaaaaattcaattgaaacattgttatcttgagttagttttgagacactaatcaagttttttgcaatagatggaacatgtaacacatccttaaggactaatggtgcagcagtgaatgtagtaagagtactatttccaatttttgaaatgtgtaacttactaccatcacctatagtcactttctccttaccaccatagtcgattttgttgttgatttttcctgcctcagatgttagatggttgctggcaccactatcaacataccatccatcatcatgtagtgtttctggtgtggcaaccaaagcaaactgctgctgtttgtcctgagaatggtcactgtttggtggttgaccggtgtagctttcatcatatcggttgtagcacacagctgccgaatgaccgtattttccacacacctgacatgtgggtttggagttgttgtgtctaccacctcttcctcttcctctagtgcctcctcctcgagccattccaggatgttgattaccacttcgaccttgactgtgattattcccagatctgcctcttccgtggttgggatgatagccaggactgtaaggctt

SEQ ID NO: 93913 - DNA, 520 bp, Cannabis sativa
gtaacagattgcaaagaagagggagaatgcaacactattaattgattcatataatgccatggctcaccagaaagaattcgttgaaaatcccctgcacaaaccatagttaagagaaaaagattagaatgcatttctgaaacaacaacttcaaaccgacacttgttactccaaaattcgcccatctttttgatgaaagtattgggattaattgaacttgcaagacacttagccaccagaaaaaatttgggagattgattgggatcacagagatcagcctctgaaagagaatgcaccactctctctttctcagataaacaaagagttgtactcatattttgtagaattgattccatacaaaccgaaggaatagaaaaagagaataaaaatctgaggaaaaaatcgtaaaggctgtgatgatatttataacccaaattagaatccaaaggtgggatcatggggtgagtaaacaccagcaaattcatccgcaaagaatgaaaatatgggcagttaaccatagaca

SEQ ID NO: 93914 - DNA, 631 bp, Cannabis sativa
cattttgaactctgggttttacaaatttattgattggaccatttattttgttaaatgacaaaatagatcatgtatttttcaaaatatacaaatgggaccgtgagctcaattttagataatttttcaacataaccaacttgaagacaattcctaacacaaacagttttttgccagttttacaataacacctctagatcgaattattattaagttttattttgacaaaaagccagttcagggtactatttagtaccattttgaaaaatacatagtctaatttgtcatttaacattacaaagagtctattcagtaacttttataaaacataagatctaaaataatatttacccatatattaaacacctttgaacatatttctaaataatttaaatataaacagatattaaagtaagaatatttataatcatgcagcgaaataatttatctcaacccttaggatttcttaatattttgtccttattgatactagttattacaatgaatctagacaactctttttcccattcttccacaattttttgaatcatttaagttggttcagagtaaagcctttaacaatctattttaataaagccataggcagacccacacataaaagcgtccggggggg

SEQ ID NO: 93915 - DNA, 823 bp, Cannabis sativa
taagatttttttttttataatatatacattatatacataaatttatagggtccttgtatagtagtgattataatctaatggttaatatactatgaacaaaaatattaaatataataaaatatttattctttttaaaaattacaaattaaatgggtaacttcttaatgacttgttgtataaatagtgatttttattaaagtatatatttgatttcaataattaatttcttgcttctttctaatccatgattctaaaatttaattatggaatattttagtgtatttattataaattttaaaaaaattactatttggtttatttattctaaacattatctatgtgatcatcatatcttattttatgcatatatatacacacatgcatgtatataataatcatcttcatcgtgaatcacatcctattcacattatatcctttgatcaaaacaaattaatttctttgtctaaaaaattaaataattaatatacttgatatcaagtctacaaataatattcttgataaaaaaaaattcacaaataatataaaaaaaatctccaaaaataatttatattaaaaagaaaaaagatcacaaatttaattgatatcaatcttacttttggagagaaatcaataataatccatataattgatataatagaattaaattaaaattttgtgatatgtatattttttattataattaattgatataattcttaatttagaaaagatacaaaatataattatttaatcatgtaagactttttttttttaaaaaaaaaaatctgatagtatatgtttttttttaatttaaaaaaataat

SEQ ID NO: 93916 - DNA, 647 bp, Cannabis sativa
cgaatttggagttctaagaacctatcctatataggaagagtcacattaattcagtgtttattgctatccattgctactgggttcaaattatgagtttactaaagaaattactcaatgaagtggaagcactttgttgagctttcttgtgaaaaggcacagcagcaacatcaactcctgggttggtggcctggaataatctatgcatgcctaaagaagaaggtggctcgggatttttttttttttttttgcttgagtggaatatggcggccaaggaaaaatatgtgattgctaaaaagaagtataatttgtttgtcaaatggatacatagtgtgtacttaatgaatcaaaactggtgagattatgataatcccatgaattgtagctggtattagaatataatattaagggtagacattggatactatatagatcggatgaaaaggtgtcttggagcaaaggatcgtattgctaaatatgattcatctctggatcaaatttgcttgttgtgtggggaagacaataaaaatttagagttgttctttgaatgtatacacagtaagaggtgcttagaatctattaaaccatggctcagttggaaggtgaagacagagtctctagcacacatttgttgaaaaagttttccaaat

SEQ ID NO: 93917 - DNA, 559 bp, Cannabis sativa
aaaaaaaaaaaaaaagttaaaagacatcgttgctaaaaagattaacttcttgattacttttacgccaacaccaaatatgatataatgtatacataaatgacacacaaatttaaaacattcatgtcacaaagaattttaaccaattatctttaactatgaatgcttccacttatataatttattacataaataatcaagtttgtgtgatcatcctatttatttacattacttttggtggaggaaaactatgagagaaaactttggaagcgtaaaatggccatcaatcaactctttcaaatgcttcttcattttaaacgaccctttaaatctttagctatatgtagagatagaataaagcaattttgaaaaattattttattactttctctttgattcttttaacaaaataatcatttatttcttttttttatagcttatttattattattttaattaataaaaaaattaaatattatatttaaataatgtggaaagaaaaatagaaaagttgatgtatgtcataaaggttttgatcatgtattttgaaagatatagtaga

SEQ ID NO: 93918 - DNA, 682 bp, Cannabis sativa
gagatgccttaacgttacttgggcttccgggagcatatggggttccatatgccttctttgggagatatgtcctggatgctgcttcattacctaacgacttagcaaatagtttggattataagttgcttgatccacgtctccttatctagttggtccacgtatattgggcaaaatcagggacaacaggtacaggtacggatttcacccaaacccggtataacatatttaatcaaattcgcactcggcctgaaatgcacccaagtttcacctgaacccaacccttgaaatttaaaacccaatttttctaggttttccgggtacgggtgggccaggttgagcgagtgggccgggtttttgggcccaaatatgtagccttacaatcaataaccaatttctagagtttcaccttgaggacaaggtgaatgtttggcaccgcggtaatgttaggcgtcctattcgatttaattatgttaggagaccaagggtaacttagtcctaagatataattgtatgggctgggcttagtgtgtattttaatgagctggactattagtcatattgagtcttacactaaacctataaatactagagtcttattcatttaaaagatatggcttttttcataaatgtacaacaaaaacaacataattacaaaaaatgtgcaaaaaaaaaattattttaa

SEQ ID NO: 93919 - DNA, 775 bp, Cannabis sativa
agcgttaacttggttagaaacctatggccatttttcatcagttttctgtttttcttttttacgtaatatttatatataataattgaaaattgggtacgtcaaacgatccatgtttctctgaattagcggttatgatctagtgagactttcaataggaaaatgctaaatatcacgatagaatggatcgttttcttattaatttctcaactttttaatagtaaaactaaaactagctaaaaacagatgtcaatgtatttacttttgactgttcaattattttttacaattacacacgttttaggagacaaaaacaacaaaacactactaatatatgtttactatggaagatcagtcgtgatattttctcaattttatatatatagtttgtttgttaaatttcttctctggttgcaatttttatgtgttgttgcttgttatgtatatggaacattgagtgttgcaaataaaggagacttgaatgaaatctcaaaaaatccaaagaaaaatggtgaatttttcaaatctatttgttttgaccatctctttcaaatatgagaaatgataagatatacgactcaaaaattacttagcttaaaatttttataccccataatcttttcactgattaccaaaatgcaaatgctaattacaatctcttattataatattttaattaatctctacgtccgaaatcacatgccgaaatattttttttttcaatttttttttcatagcggtattttttttcaatttacaatatcatccctgtaaattt

SEQ ID NO: 93920 - DNA, 1069 bp, Cannabis sativa
aaatagtcaattttaaaggactcttttgctgattgtgtcacctcctcattgacactttcattttctataaattctttgtttttccataaatagtagttcaacttgcatcatacttgcaatctcaatagctttagttatagtctcctcaaaactaatttttctatacttttggggcccgtttggtacgtgagattggactggattaggcaagataatttgtccaatccagtgtttggacatgttgaaagtctggataactaatccagctaatctcatatgtatgagattatttatcccatctaacagggaggggataaataatcccatgcaggtgagattttctttttattgtttttttttttaattttgattttactactatatttttaatttaataagaatttaaatgaaagaattcacacatttatttataattttttttatcaaaaacttattcattaaaattagtaaaaatgtataattttgaattatacataagctttcaaaatttaaaatattattaattaaacaatagttacttaaattaattttaagagaaacaatatgacaataaaattatatattatttttaaattattagaaaattaatatttatattaaattagtgtttaacataaagaattttatattattcaagtatttttattttactattttaattatttgttaaataaaaaacatgataaactattttattatatatacttgattgtataggatatattattttattttattttataatttaattatttttattatttattttttgttttttgttgtaaatttttcatttttatttatttattattatatatatttattttaatttgttattatatatttttattttaatttaagtttttttttctaaaaagaaataaataaaatagtccaatctattcttaaaccaaacaaatgattactttcagcattatctaatcttgtccagtccagtcaaatcatttccagtccaatctagtccaatcctgcgtacaaaacgggcccttaaagaaatgaaagaagaatctttaactctttgatagca

SEQ ID NO: 93921 - DNA, 2525 bp, Cannabis sativa
acgtgttggattagaatgatacaaattataagtagggttattagttgaattaaatactaaaatgggttatatatataattattaataataaatagttgaaagagaccacgtgtgtggtctgaaattatatgacattgataaattatacatataaataatcataataaaaaaaaaatcaaaattgatcaaaatgactgaacttattatatttccatatcttataataggagacagttccattgcaatacagcattatgtctgccactgatttatttaaatatatatatatatttagttaattaaaacttttttaatgtactaatgcataataatgatgattagtactcactaattgataaggttctatattttagtgatactaaaccaaaacccatttatagatatcatgagtaattaatatttaaggtgtacttatttcctctaataattttacttcttatatttgtataagtatactctaggaattgatgataataatatgagtattgatatgggaattttttatatttcagtttattatgtgtatttaaaaaaatttaaatttatttttgatagtgtaaattgtaatttgaaatttttaaaaaaattacagaaataatgttataattaccatgaaaataaaaaatattgtggtatgtattgattgagaaagaaatgtgtaataatagaaaattgtaattaacacttctctctatattattaccaaagtaataaaatctgtaaaattgtatgggttaggagtttttatatgaatagggcaagattttgacaaattggacggccaactttttcgaccggtttctttaacaccattactactacaactattgaaatgtcgtggttttcttctattcaacgagcgtatgttcattaataaaattaagtgagtgtttaaaagcgatagttatagtaaagaatactcgtcagttttaaacagttgttgagaatacctgacagtttaaaacactaacaaaattgaaacgagaaccttttgaaattgggaatcctcgacaattttaaaatatcagctatactataaccaacagtttttctaccaatgcctatttcaccaaattttacataggtcaaataaacgtaaatcttaaagaccgacaacaatactataccagactgttaaaatcagtcgggaaactgcccctatttttatgatgagtgcactaacctagtcagatcataatgaaatggtgcattccacacttgaaaaggataaatttggcccccaaaacatgcaacatatgacaagttaagttggaacaaaatgaaactaaggagtggaaaataattaagaaaaaatattgacccttgtttgcaaatttggcactaaagcatatataggagatttttcttcaaatatacaactggcagagttagaaaagtcaacttattatgagaaagttccgggaaacaaatatgatgatccatagctaataaagcacaattaatgaaacaattagatgagtttaatacttattaaacatattattatatgaactagaatcccaagacattattatataataaatatatattatttaaaagtattattggtaaatatataaggaaagaaattattatgatgatattgttcttcattgtttcatcaattaatataaagtactagaaaaattatcaaattttaaaggtcatgttaagaaaatatttttatttatacatataagagataatgaaccttaatccttaattaattaagaaagacaaatattctattaagcaaaaacacataatatatattataatttttagtcattataaatttttttatttttagtcacaataaaatttgtagctaaaaataaaaaaattgtgactaattatataaaccatcatccatatactgtgattaaaagatccgtaatttagtcacaaaaattaaaatttattgtaactaaatatatttttagtcacaataaagaaaattaaattagtgacaatttgtatataaatactatgttttagtcacaattaattttttattttgacgtataaaagtcacatttaatcacaaaaaatatatgttatgactaaaatattgtcaccaaaaattataatgagtgttttaatttattgtgttttatgtacataataatgaagcataagaaaaatataggaattatatatatagttgcattattaaaattaattaagctcatgaaagaagacaatctcttattggatgcatgaaaagaaaataaattaatgaaaatatgtacaaaatgagaatataataattacaaaataaaatgggtaggagaaagcaaaagggatacttctttgaaattgtttcttaataaataaaaattaaataaataaatttatatataatgttttttcacctgataaagtgtcttattgtaagtatgatgattatgatgagtatagagctagggttttgttattatgtctaccgacaacctcaagttgtgcaagaaaatacagaacgattagaatcttaatcattttta

SEQ ID NO: 93922 - DNA, 1769 bp, Cannabis sativa
tatatatattcctattcataattcccattatgcatttctatataagcagttacttaaaatagataagcaagtagtacttactataccatgagtcaaactagtctttacaataaatgtacatatcaagccagtcttcaggacttttaaaccttgattgttctgatacaatattgtaacgtcctaacttgtaaaggctccatctctgtgcttttataaattagtttacaataataaactagctttgtaaaggaaactgtggtttaataaaaagttgactaattacttttctaagtataacttacattgtttaaaaagttactgagttcggggatcctcatgttataaacttttactaaagtaccgcaaaatcatttcattacaaaatatttatactaaaccaaaatattgtgaaaccatcgtcctattaacaaagcacagtatgttggcggagctggtacgtacattcgcagaaaaatttctaaatcatggttcatctactttttcttttttcctacttacaccacaaagtacctgtgagtcacaaagactcagtaagaaaaacgagacacacaaattcatgtacaaagtataacaataaggaataacagtcatatactcacacatataatcagacagatcattccattatgacataatactaataattgaattatttttctaataagacattcctgatacttcataaaatattcgctaactctcatttccaaatgagacagttaatgtcactatcgttacctaatgaggcaatcgataagtaagaagccaaacagcggtttcaagatagagttgtaactcttatgtaatactggtaattaccgtaacttaattagccatgcaatgtggtacaattgacttttcttatctcaaatctaaattcaggtgtgcgggccaaccaaagtggaacaattctctacaatcttgggccctatatcatgacaacggtaaactggtaaataactcaattaatcctgctttaggacttaaactcaaaataaaaaaattttctatccataaatagcatggcaataccctaaatatcgataaaacacaaaaatctaggcgttggaaaacaccccaaatggttcaccatttactaggtttcaaccctgggaaaatggttcatcgtctaaaaatggttaacagtttttccctacataaatggctaaacttagtttttcaaacacaactccttctaaacttaagcaaactcaaccaaacttcatagatcagcttaaaatcattaatagaacaactccaaacactcaaaatcaagagttatctcaaaattacaaaactacccttaaagttcaaactttagttccatgaactcaagcttgaggctttcactgaaacaacagtcataactattagaatcaaacataaataacctaaattaagcttgaaaatagattctaaccaacactatccatacagaaccaaactcaagcaaaacccataaaaaatctaaattttcttttaagaatcaaagaaaataaaagattaaacttaccttgatattctccacaaaattgccttatccttgaacaagaatccctactgaactgagataaaaatctgttagaaactaggtctttttcttttggcttctaaggctttcgagagggagaaagaaaagagtgaagaggatgatgttgattattctaaaaaaattagttaataaatcaaatcctaacttaactaaactcagcctaactagaatttccaccaaagacaaaatcctaaaa

SEQ ID NO: 93923 - DNA, 551 bp, Cannabis sativa
gtaatgggttttatttagggcacaaaacgcaacacaaatattgggcctcatgccaaggttgaaacttggggctgaccttgtgtataagttgacattttttcaaccttatccatttcaaatggagtttttcaagaattattttgagcatcgtcttcgttttcaaaaaatatttagattaactatttatgaggaccaaacaaaatttttggagggccaaaactgggacccaacacccatgttgacacctggggctaggcctaggggctaggttgacaaattttcgacatgcattatttctgatcaagttaagaaaaaagtgttttgggcattttttcagtcataaaaaatagtaaagattcaagcagacttggggagaaaaccacacccctgagcccttaaaaatagggcccaatgcccaagttgacttggtgctgggcgcagtgcccaggtggacaatcaacgtgggacgctgtcttcaattggtcaaatgccaaaatagatgtgaccgttgaatctacaatggtcacaaacggggtaggagacctcatcct

SEQ ID NO: 93924 - DNA, 1092 bp, Cannabis sativa
  modified_base (376)..(387): a, c, t, g, unknown or other
taatttgtattacttatagtataactaattatatacctaattttaaatatttttaataattttactattttaaaattttaaattatgttttatttttttattttaatcttcaaaatatttattcattaatattaactcaacaaatatagaaaaaaaatgataaatatatcttttttaaaataatataattaatatttaaaattatcgcacgaaaggcgactatgttattcagttctcctatataacaaaagtaattaggagtatgaatgtctatatatatgattatttattatatatttacaaaatatgtcatttaaaatacgatatttttttaggggctttttcatttttacactttaaagtagttttttttttnnnnnnnnnnnntttacagaattttacatagaaacctctattgcaactagcggagcaacctaaatcgcaataaaaaatcgtataacaacccacatagaaactactggagaaactacattagaaatccaaaccgtaatttttttttattaaaatataaacatatggaagaaaaactcataaaatgtgtcaaaaaatttaagaaaaaatctatgacatggttgagtttcttgcgtggcttggtcagggtttgtagttgtgctactacgattgagttttgctattgtgattagttttttctttgtgacgtggttttgagtgtcttttgtttaagttattacgattagtcttgcctctataatatgattttgttctgttttgtttcgttgttagttcgtcttctttgtttttcgatgacttgccatcaaattattattagtggttgagaataatacgtctatgcgactgaaggagttcatagtagtgcaattatatactttgcacaatagttgagtgcttaagctaatgggttgaattaacttgttacaacagttttactgttgtatcttctaatcggtagagaaaaataaatataggtgctcttaagattagttgtgatggtgcaatttttttatttgattttattttattttattttcttttgtcaaaagatctgagaatcaacctgcaaattagatgacttatttttttaattctatt

SEQ ID NO: 93925 - DNA, 658 bp, Cannabis sativa
gagtcttttggctgggtgagtttgttagagggtagtttgggaattgtgggggttgttgttggccttttagtgccaggggaagctatatttttcagttatgcaattactgagaagttctctgttctctgcatcatgagaactcttctctttattgtatgaggctatagtctccttttttccttacaattcaataaagcttccaagaattctgcttcatctttgctgttacattcgtattttgctgctatagttgttaataaattactaggtgcttatcaactatcaagagtaatatgatgactaatggaaacttggatgtaaagtgaataaagaaatcaatagatttgtgaagagaaaaatagttcccgtcaacatggcttctaccattatcaccattatatcttgaaagtccagagcaactagaaaatgagacactcatgaggttaccattgcgagttggattccctggggcttcacttccgtcgtgaggcaaaacatgttgattttccccagggaaggataatccaaacttaactctatcaccattcaagctctccaccatccataaaaggaagaagttcttacgaggaaactttaaatttcccttataaattaaccttaaccagagcaggtagcaccaagggcaggaaatgaaaaa

SEQ ID NO: 93926 - DNA, 1067 bp, Cannabis sativa
aaattgtcatgaagtacaatgtgtctaaaacaatacttttaattctaaaattattctcccatattgaaatatagtaattcatgtttgtataagcaatccacatagcttgagcagtacgatcccgacaacctgccattactacagcaaattaattagataaattcacttcagatcttgatacacaggggctaactccttctgtgttgtcttctcctcaaattcttttcttcccattctctaaacatacaatcatgatgtgttcgttaacgaataaaattatgaaaagcacaacaagcaataactatcatagtttgtcgactcaatttgtaatgtggcatcttcttcattgtagtaaaacgtactgtcaactcactaaaacgtcgctcaattacatttcttagtgaataatgcctatagttgaacagttcattcttaccacatggtcgatttcctctattattatattcttgcaagtgatatctttcgccacgatatgattgaagaaaacattttgtacatgagaatccaaaatccctaacataatattcacctaatatgccaaaaataataattagtatatgcatcatcacataatataaaaaaaataatattaagctttcaaaaccttctttggacaatgaaaacttatattcagtttttgtaattttatctataaataccatggaatcatttgcaggttcttcccaactggcagatacaaaaataaaaaatatgtaaaaattacaagcacacaagacattttgtgttactacacctttccgatctctgtagcatgacttgcttatccttaggtacacatgcattcacatgtgttccattaattgcactaatacaattctcacaacacaaaatcatttataactgataaatgtttatacccaaattatataagataatgtgaagatatattatgatgaatttagttaattacctagaaccatggataatattttgaagaattaataatatgtgaaggaagaggagtttgagttgggcaaatgatatcctttcctaatttacacagttcctttaatgttgaatttaag

SEQ ID NO: 93927 - DNA, 797 bp, Cannabis sativa
  modified_base (351)..(352): a, c, t, g, unknown or other
atcccaccatctcaaccacctccaccgcttagggatattggtgttgacgagaggggaagagatcatgttcggaaccctccttcaccaatccggtttgccttatcaccagtaaggcatcctgagcctccacgtactaatgcacgagcaccacatcacccagccccaagagagatgccacgacagaaggaagaacctcctagttgccttctaagtcaagactttccccgacccccgcaaaatgggtgagaggactaccgagaccaccatgctcaataggtacctcaacctaggggacatggatgggaaaggcgatgcactgtctcccatgataactatgtccgtccgagaccnncacccagggagactagaccacagcatgcacaacctcactaaccctgagacaatagctacttatcaagatctcggactgccgcaatgcaatcatatgcccagcaacggcctacacctagggggccacaacaacagagaacggtgagcttcatgggggagagttaccattccgactcaaggagtcggcttgtgagcattcaagaaatgcacctcctccatattatgaggaacatcatggaaaccccccacatgatgcaaggagctcggaccttcgggaccatctgaaccaaagtcagcaacctgatttgagagaccacttgaaccgggggcacgcacagagggaggctccttatcgaggaaagtatgacattgttgggctttatgccctagataaaactttatttcaatgtaatctctatctattaaatatcaataaagagacagaa

SEQ ID NO: 93928 - DNA, 953 bp, Cannabis sativa
ggggggggggggtaatggtttttctgtttacgtcttctagcccctttttaatgctaactttacttaatattctgttgtttttcgaagtgtacctgcttatccatacgtttaaatttcgaacggagttttattttatatactgtatttgctaactgtccccttatggttttcatgttttgcgtattatcgtaccgaatggtcttagtcatgcctttcctgagaaggtcttttgtattgcccttcgtgaaaggtctttgtattgcctttcgtaaaaggtctttttattgcctttcgtaaaaggtcttttttgttgcctttcgtaaaaggtctttgcccctttcgtttttgacttgaatgatatttttccgaattccccttctttttttttatttatttaaagagaaagttcgacgacggtttccatgaacttcggagttcctagcttttagtttatacttagaattttttgaggtaccttgcattccagcttcttgtgatctcgattccgtccatagaggacagcctgtacgccccgtttcccgttgggcttaacactcggtacggtccttcccagttggtggataactttgccgctcgggcttcttcggtgttctgaaaaacttttctcagaactagttcccctgggaggaaattccttggccttactttcttattgtattgctttgccaccgcggaacagtaattctgcattcgggacaaggcgcgctcccttctttcctcgacatcgtcagcagcttgtaatctgaggaaagtgttgtcttcgttacataactcggatcgcaaagtaggcacttgcgtttctgtcaggataactgcctccatcccgtataccagtgagaatggggtttcacccgtactagtccgtggcatggttcggttggcccaaagtacgccgggcaattcttgggcccatcttcctttagcactttcga

SEQ ID NO: 93929 - DNA, 652 bp, Cannabis sativa
ggctagccatggaggagtactgggcggccagaccttgccctttgctgagaactgcacactaggcatttcgcttgtcgatgatacatttggaagggtagttcctagaaactgtgtttcaggagcataccatggtctgctagtgggataatatcctccgaaagtagttatttgtgcttcttctaaattaatgtatttttgggccctcttttgaaagtcttgaaggctagcagctccttcctgcttgagctcattccaaaaaatggttcccgttcggatcccagcttgtagtaatgtcaattgctatccatcatccacctttttagtcttggaggtttcttccttaaatctttttatgatcattttcagtttcaactggtagttgcttgattttggtcaaagcgctaacttcaaggtttatctttctggatgtcatggactaccttctctacctaacttgcaactttttcaaccaatccacagatctaggttctagcttttgaaaatactccttagaaaaccctcctaatgtcagcgggaaacacaaacacttggcgttattcctgactctcatgactatcatcacacagttaagctgagataagtggtcactaaggtctgagtttcctgggtacagtgtcatttcaggcatttt

SEQ ID NO: 93930 - DNA, 637 bp, Cannabis sativa
atactatagtaaataagaattggttcgttcttacctatttcacagagaaattatattttctaaaatgaaaataaacgtaaggtaggtggtctcgaactcggatctcctcaacaataaactagtggtacaaccattacaccaaattaaattatttgatattatttgtttacaatatatttaaatggtttataattagtatatgttaggtttcatcttattactttgtttaaatgctcacatgtcttttttaaattagcaactttactccctaaaatttgacaactatcaaatcataccccctcaaaataaaaataagaaatattcaacattcttttagtaaaaaatcaatttagatgtaaaaaaataaattaaaattttaaattcaaaactcgctaactttatagtcttaagcgaaataagtataaaagctattgaactgatattgacgagacatatgtcagcctcggaatacatagtcaaaaagaagatatttattcgttcaagtagattaaatgtaatcatctactgcaaccttggattacatatagcaaccaacgaaaagaataagaagaaaaggcagttcaagttaagcagttatgaaatattatcccatatggaattaaataaaacgtgagaa

SEQ ID NO: 93931 - DNA, 2029 bp, Cannabis sativa
ttgaaaaaattctgtcttggccctgctgtttgttcgtccacgtaaagaaagcacccgtagctttgatatcttcaagttgacagtcttgaatgcactcaatgaactcagcttcagcttgatatttaactttgtggcccactctctcatctttgcctatgattgcattaaaatcccccattaatatccaactttcatctgtctttgaggactgtaaatccttccacaattccaatctttctttcatgtcattgaagccatatataacagtcaagaaactatgataagtaccatccattgttgttattttcaaatgcataagttggctcgtacatttgataatatcaacaatgaaacagtttgggttccaagcgataccaatccttcctccttggtgccatgctatatttgacgaaaaacaccatccgttaaagacattaaggtacaaggttccaagcttgtgaacctttacccttgtttcgagaagaccaacaaaaccagcctcttgagttcgaatgaactgtttaatttgttgttgtttttgctggttgttggctccccggagattccaaacaaggaacttatccattgccaagagagggtcctcccccctctcttgtgttatctatttgctcaacattagcccactatatccataattcccacatcatcatttacccctactaatacttggaaaccatttgaagtgcttgtctcctttactgcagttttttgttcttgcaccttcttccctttcgaaactgcctgaaagccttcatcatctacagtgggtttctccttctgtttatcctctttaacaacccattcccgttttacaccatttttcttcttacattctgcagccacgtgccccaatccagaacaattagaacacaagtctggtttccattcgtatttaacgcccacagacacattactaccatattcatcctcaaactctaacacactgggaaactcctggttcatgaggacttccatcataattcttggatagttcaatctatctctatctcgagtgactgaatccaccatcactggtttacctattagccccactattttaaagagagacctctgcccccaatatttgagttcgagcccctctaattgaatccagatgggaagagactttacaacttcctttctgaaattcgtgtttgcatcccagggcttcattataacaggtcgacgattgaagaaaatgtacccaccgttaagcacttggtccctgtattccatggaattgaatcgaataatgaacactccgtaagtgagcattctaaccttatcaatcttgtccttccatagcctgttagcaaagccttccagtatatccagagggggatttgaccccaaaacataacaaacaatcgaaggttgccagaaattcacttcatcttctatgtcatcaattgtaatcttgactttgttactcttctcagattgattcatcgatttctccaaattcctaattacagcactagatcgtaaaataggaggagtagagttctcaccatgagataaatcactgttacattggttgttcatgtggataaagtgcatcagatcttctcgagcttcatcaaatcgtttaatttcccgcagtgatgatttgggcgacagaggaggtggaaacagatcgttctgagacccacaactccttctcccgtccattcctagcatctcatcatcctcttcccccaagagttccagaggagcaataccaattacttcatccaccgattttgtgtgtaagatatccgagacagaatcagggcctttcttcctcactttcttagtagaaatccttgccttcccctgtgtttttgacctagtttttgccatagcatatcgtgacacgtgtcgaagaaagccttgaagacgtgtgaaaactgcacacggaccgcgacataggaaaggcatgctacggcccgcctatataatgcgaagagaaataggtcttctgcgtgtgttatcttgtgctatctttttttgttggaaattattttac

SEQ ID NO: 93932 - DNA, 5973 bp, Cannabis sativa
atatttagtcagttcatctaattgaagctctaggatgggatataaaagtaatagattaatccactttcagcaaccccttgtgattgttgaaacagccaaagtaattatcatactataactccctacttttgcacctaggagtttagttggacttatcctttgtggggatggtcaaaagagttgtgaagcaaaatgataagaagaagcaggtctatctagtaaagatagcatttttaaagtaggtgtacttacaggtttcattgttttcctctcagatggtattagcatatatgatccaccagaaaaagtaataccacgttggaaaggtcctcctttggaaataagtcatgatttctccaataacttatctgaactaagggaagcaattcttgctgaaaatactggactttcattcaatgtgaagaaggacgagcagagctcgcttcagaaatcaagtgaatctccaccagttgcgaaaagtgccacttcttcagcatttaatgatccaaaaaagagattaaataaggatcaagaaaggtccaagacaattatagaaggcagcgatggttccttaaaagctgggaagaaatcagggaaggagttttggcaacacaccaagaaatggtctcgtgggtttctggaatcctataatgcagaggcagatccagaagttaaatccataatgagagacgtggggaaggatctggatcgatggatcactgagaaagaaattcaggaagctggtgatcttatggagaaattgcctgagaagaataaggaattcatggaaaagaaactcaccaagcttaaaagagagatggaattgtttggaccacaagctgttgtgagcaaatatagtgaatatgcagacgacaaagaagaagattacttgtggtggttagatcttccatatgtactggtaagtaagaactatgtttatcctttgctttgacttatctgctattgagctgaacctcgcaattttcctgcttacatattttggcaattaacatgaagttcaatattgttgttctctttaccactttaaggtttcctggccatatcttgtattagattttgatttcaagctttgttttaagaatgtttcacagagaattgagatcagtcaataaattgccatctttcctgtttatcttttcagtgcattgagttgtacacagttgaagatggtgaacaaaggatagggttttattcactggagatggctactgatcttgaattggaaccaaaaccacatcatgtgatttcctttgaagatgctaatgattgcaaaaatctctgttacataatccaagctcaaatggaaatactaggaaatgggaatgcctttgttgttgcccgaccacccaaggtgaaaacttttaatctgtttccagtttccaccatgaaattacttactggtttttgggattctttatctaccctctttctttcttccacaggacacttttcgagaagccaaagagaacggttttaacgttactgtcataaggaaaggagagcttcaacttaatgtggatcaaccacttgaagaggtagaggaacaaattgtagagattggaagcaaaatgtaccatgatatgattatgaaagagcgctctgtagatataagctcattgatgaagggtgtatttggtttcaagaccaaacccactaagaggtattttcttagtcccggtagagaaaattgacttgtttatttttataatactgttttcattgggagttcaggtttagagaagatttttatgccttgatttctcctctttttcaggaaaagatcaaaaagaaagctaaagaaacgtgggaagaaatgaagatgatacgttatgcattactactttaagcattcattagccgtgtaggacaattttgatgcttgtggattaagctgacaatatggaggcttcctcaaaataacttgtgggaatcttcaacagttcaactctccccttatttgtagattctgtgaggtatagccgttcttgtttatcttagatggtatgttggaattatttgaaaatgtaaggaaataaagtgaaaatttcctatgcaatattatttccatccagatgtttccagatccgggtattgaaaaaatgcaagttaaaatcttgctaatattagattgagaaaaagatggcattgaaaaggaaaactgggcatatagtaataaccaacttttatcagtggagcactggtcatcatctcattcctgcagcaagaattcttgttaatatcacatacaatatctctctcaatacacttggtttatctacagtaaactgaaccctacataatgatgaaaaggaaagccatatatttatatctgtcatacatacaaactgggaaatactttcagtcattaaccaaagacctaacagttaactcaatcaaagacattgtagtaatggccaaggaaagaattacgaagggaagggaaggaaataaaagaaatgaaaaaatcctttacgaaattgtatggacaaaatatcctgttgtcaaactgccatacacaaacatgtacaattaccctaaacatgaatttacttttttttttatttatttttttaatgaattgccactatcaagaagttgacttaacaatttcatgaaggcggccatccatgatttgagagacagcctcaaggaatgcagcttcacttgttccagggagcacagaatcctttgcttcttggacaatctcctccataatggattctgtattcaaggtttttctgcacattatgcttccgatttcaaagggggtgagacctttctgaactcccttcttcaagagcatagtggagatgcaaagagtacgagcacattcgggggacaactcccatccatggaacttcagaattgcgatatcctcgtctgcgtccagcgaattaatgtaatcaactacctcatcagagtacggtacacgagcttgtggccaataaagccagtcaaatgtacactcttcaaactgcaggaaaaaaaaaatcaacattagaatcctgaattatcaaatctcataaacgtgaataattaggaattccaacgcttgaattgagcaaaacattcagatcacaaaaaacaaaaaaattgaagtttctcaacaattatccaaccaaagctgaagtttgaaacccaatagttttttgaagtcttgtcaagattataattcagtatggcataagtttgatactcaaaagtatacaagcaaaatgacaagaatattaaattttaattttttgttaaaaaaggacaactaaccatgaaaaataattgaatgattgatagaggaacacaaaataagacagaagcataatataaacaaaatttcagctcaatcagggatcagcaatgaattaaaggagttggttacttacactttcaggcaagcagtacccatgatcaattggaatcagcacagtcttgccatcttctcctttgcttagcaatatatttccagaatgtctgtcagcattggccaacctaatatctaacacagagattttctgtacttccttaacagggaaagatccagggcccatatcctcacaacttccattattgtccatgaatttctgaagtgatccaagcttggcagtcatatcaccagaatggttgaactctttgtgaaagcacttgacgagaaatgtgggcgggacaccagcaaagccctctttatcaccaatgaacgagcggtggccgttcattggatgatccaaaaggtatgctgcaacttctctcaatgctccctctccaactcttgttcctttctttaacccttctccgtctaacgacaatggaagtcccctaggattatttacagccatgggctcttcatccattggtttgaacacagaaatatactttttccctgatgaatccagcataaaatatgctcctcctgtaccctctaaagacctgactggatgattcccgctacttaatccattaagtgaagcattaatcatgtcctttatggctgaaggcaatttaatcttgtggttcacaataaaaggctccaacataggttccttgtaagaaggcttcctaggcaaaagcactttcccaacatcatgttgcatcttattgactttcccatcaactccattgcttcccacatcagtcaaatcagatgccacaatagacagttcaaaattcttctcgactggtctagtacgaacttttgcagatttcctaaccaacaaatgaataacagcatcattatgtttgctgatatcatcgataagtctctgatcctcaagttgctccccgttgcaaacaacttcttgctcctcaagatcaacaaattccttccctttcttagctatcttttgtttaacatacctaacatctctaccacgttccacatgaaaagtatactctttacctgaagtagttcgaactttgatgacctgaagatccgaaagcttaagaaccaaatgcaatacatttccatctccaacaccatactcccggagcagcgaattgctacgagccagctcccggcctccacaaaccaacttctggttcttgaccacaaaccctttataggattgaatcctgagcttcactgactcaatagaatcagactccaaaacactcattgggataatagatcccgaaactgagagatatattaaaatggactcgctggagaccaaatcagccagagctcggaaaatgttattagaaattaaaggctcattgcaaagtggactaagcgcagctataccggccgaagacattttcctttcagctcaagaagagtcgagatttttcacagctttcgaaaaacccaactcacaacctccaaaacccacaaatattacaagaatacatacatttttaaatcctaaagagaccacctgatcaataaaaccagatgatcgaagaaacccccaaacccaatttagcgaagaatcgaaaccccaagcccaccaaaggagaaatctctacaaaagcaatctcacaccctagacaacaaccatggccaataagcaaaacccaataccccaatttttttttttttttaattttctaaatgagaaaaagaaaaaacgaaaagggttacgaagccttggcacaaaatgatcagactccaagaaaattgaaattcttaccaaaataatgagacttgagagatggagcttaatcaaagctcaataatcaatcttggcaaaagcttcaacaactgcaaattttctttctttctttctttctttttcttgttagtttttttgggtgaaattacagaaaaattgtcgagagagaaaagaagatttgaacaaaggaagatattgttaacgcgtaggaggagcttgacttttacgaggaagtttcgttttgatgatgaatgtttgtatttcaatgtctcttttggtaatttagaacagctatgactgttgtgcatttttgacacgttacactcttggtttgttctccaagttgtaaattaattaaaatgttatgactcatcattgcgtcccttgtccaaccacatgctgacacgtggagtaaaaaccaagttattaagaggatatgtactatgtatgatgtggacaatttggtatttttgtaaaaaaggtttctgtaatatgacttttcttggtaggtggacagctcagggctcactaatcacttataaaaatataataacatattggaaaagatgttaaaagaaaaaaaattggaaaaaattattaaagtaacggaattattctatggctaaattttatattgtctccttaacttttaaggtcgttaaaaatgtccttgaactattgagattgttgaatttaagaatttttgttcaattttaataaaaaaaaagtctaatatagataaaaattaaaggtacatgatttaatatcaaagcttaagaggcctgatttggtagatattaaattttgaaaagcataatttagtacataaacaatcactgaaatagta

SEQ ID NO: 93933 - DNA, 544 bp, Cannabis sativa
tttagtcatgcttgtaatgtaacatacaattcatattgaattgagagtgggtaagatccagtgggagacatatatagaaagagagaaataatttattttctagtttatgttattgtttgattcagccattccaatagttcttgttttattaatgcaaaattctatttaccttttttaaaagagaaataaataaccataatttataataaatgaaatttcttatatagtcacatttcataataaataaattttataaaatattttttttttcagggagtttgcacctgactatattatctctcatttatattatttggtatttagagaaaggtttgatgaatggtggggaaattagttggtaaaattactataatatatattcttttcaatattaatattttttttattttgtaaaggataattttgatattatttagcatattttaaaaatttattacaaaaattattatgaaaaacaatttgagaaaatatattttaatatataatttaaacgtggaagttgactaaaagattatagcataaa

SEQ ID NO: 93934 - DNA, 651 bp, Cannabis sativa
tatagttgtaactttaattctagatccaatctaattataggtgtcagtggatatagaaccaattcaatctaatattaaatagatgttggatcgattgaatgattgaaattaattgaatcatatcggatgataaaacctattattctatatataattggtctggataataaatttaaaaatatttgatgtggtccacttaacacctataatcacacttttaccacacttagatatacaaataaataactataatatataattatagataaataatatactataaatataatatataatatgggtaaaatattaatatactataaatataatatggataaattgtatactataaatataatacaagtaaaatgataatataaatttgacaaaagaatattgtatatacattagtattgcacatttgttaaataatttttggcaaacaatatattttttactaataaaaaaaagttacatgattttaaggtaagcaaaataaattgagtataagacaagacgcaaattttatacttataataatataattttttataattttataaaaggcaaaataggtacactaaaatttgatttttaaggttttaaatatagagtatatttgtcattacaaataatacactattaatctaa

SEQ ID NO: 93935 - DNA, 531 bp, Cannabis sativa
taaatcttttaaagttgaaaaaaattatttttaatcaattttaataatatagggtcaaaagtagaataataaaaaaatatagagtttaaattagtaattcgacaaaatataaaatctaaaatagtataaaccttattaaatttcattaccatcatcattatgattcttattttcttacacctcaaacaacaccaaatataggatgcatttcgaataagtcaataaaaaattgaaattaaatataattgaagataatattacgcatttttataagtttgtttaactacgtaattatatattgtaattgcataagtaaaataaagtaatgacccttttcaattctcatatccccatgagaattgagtttaatcaataaattgtataattactaatgattttgccaacaaaacattagtgatattatcaccccatatccaacatcttgtattttaaaatagaatataattactactctaataaattaataattacactacctaatattatacaattatttcgaaatataattat

SEQ ID NO: 93936 - DNA, 525 bp, Cannabis sativa
tggtcacttgtagtattggtcacaagattggcctaggttaagacaggttcgacttgcgtctaacgtctacctattttaaggtctcaaataaaaaaaatctagaattttttaaaattttttatttttacacttcaaagcatgtttttttttttttcatttttacgaaaatactcataataacctatataacaatttaaattgcaaccaaaatctacataacaacccacataaaaactactggagcaatccaaactgaatttaaaataaaaaaataaaaaattgtatatgaaataattttcctaattttttttaataatttttaaaaataagaaccaaaaaattatttttttcttaagcctatttctgtttggaatcatgactatattataatgaatatgaccattaatgaataatacaatgtttctactatacctatatgtaaagtatagttatacaaaatgttgttatttcaactcttagaaagaatcctatcaaaaaaaaaactcttagaaagaaaaaatgaac

SEQ ID NO: 93937 - DNA, 854 bp, Cannabis sativa
  modified_base (721)..(721): a, c, t, g, unknown or other
aagtttaggggacaaaaattttaattaacctatataaaatgatgagtgttagagctacctatacctttttctctaatgtgtataatgtatagtacccatgaaataacttctcatttcattaaattaaaatcattcttaccttattgaatattaatagtgcttgatatttttataaatgaggttttatattttttatttattaaattatacgagattcgatacttaattataacactatttattataacaattttcaataatttaatatctccaaagggcaaagtgatttggagatgagcaataatttaattagtatgttttgttgtcttttctaatattatatacattatctatcactatccggattaacattattatttgactttatttactttttttttttcaaaacaactttaaaatatatcatttctttcacttctgtgcttgtactagtattaaatcatagtcacgtaatgtaatatctcttttaattaactaaaaaaaatcatcaaaatagtgttcatccaattatgcacaaacaattatgatcgtacgtgtcaatttcagtgctgttattattgttttcaatgttttgtccctatacccaaacttttgagtttttaatccttataaatttaataattttttactaattaattaatattaataaaagaataatttacggcattaatatttaaatttaattttcagttataaatanatatttaagtttaattttttgtgggaataatacttaaattatatttttctatgatttcgcaatttggtttacttgttcaagatgtccgtaaaccgtaatttgcttttagttttcgcatatattgagtaatgtt

SEQ ID NO: 93938 - DNA, 14723 bp, Cannabis sativa
atttttgtagagcaatttgctagtagcaggaaactggagaagctatagaattagacagagaagggacgaatcgctaagagactatgtagcaaggttcaatgccgagaaagtgtccattatagcctacaaagtggacacaaccgtcacagccttccgaaaaggccttctggtagaatctgatttatataaagaattaactagataccattgcaggactatggaggatgtgcttaccaaagcatgggctcaaatcaaatgggaggaagatgaatcgaacagacaaccgatctccaactactcaagttctcgtgagaatcgggggccaagatgagtagagggtaagtcatcttatcatcttgaaccaaaccccaccaacagatctagatcattttaaggtagtggaagagctccgccccaacgatcacgtgattacccgatcatgtggacagtcaatcgggggggtttaccgagtttcggattcaaaaaaatgaaaccgaacccagacccgaataggacacgggttggcgggtttcagttggccgggttgactgggttggcgggttgacccggtcaactctttaaaaaaatatttttttattcaaataattatttcttttattttttatttattaaattaaacatatataatataacaattttaggatttttatttttaattctttttattttttttaattaatatatatataaaatgtaataaaaaaaataatatatatatataatatattaaatatacaggttggcgggtgggtttgggttcaacctgaaacccgatactcctaaaaactcaatctgcaaacccgctcgaatatttttttttttaaaaaaatttgtgggttcaccggttcgagttcggacgagttgctcgagttcgggtcgaacctgctcgaaatgttcagtactacagaaaaataataaaatacggtatttaaaattaataataacaaaaatatagtataatagataccataaaatagtaaaagaaataacaaaacccataaaatgcgggcaaatatttttcaaacgaagtttaaaattccccgagtatttttctcaaaaaaaaaaaaaaaaaatactagcagattgtttggtatcctaaagttttcaataaattgagggaagagcataaggcggcaaaattgtttcattccaaaacattcggttcttctacataaaatatctttcaacaccctttgcgaatatgtgtttcatttgtctccaacgccttccaaacaggtacacttctctgtctcatccaaagcctatttgtttgtgacaaatgaattgttgctaagttcgtacagaattttagatcggcgcggtattaacaatgattctggttattttttttttattgtagttacaattactaaagcggagtacaatacacgttcttgcaaaattttctttatgtttggatgaattttgttatggcgaaaagaattgttttgtgcgtctcataataatctaataatttgtatggctaataatatgttgattttgatttgcatttatcttgtttttgtgcttgacaacatgtaagtaaatgtgcttgtttgcttttagcatataacttctggctcgaaacataaattgtaatttgcaattccatatatatgtgtgacaatgtgtggattttttttttttatttagcatcaagtttgtggcttgaaaccaagattataaagttcactaggaggaaaaacaagctgagtttatggtgaaattaatcgccttgcatttacggtagatcttcaacttgctccatccatggctaccagattactggagttcaatggttttgtccgtaagagtaagatttagtgcagcttttgcaatccttcttgttcaagtttcttacatttaaaacttaaaagtctgagactttgttttcacttaggattgaagtttagttgactgttactaatcttaatccaataacttatttatatatgtatccaatatatataaatattactaactccaaaaatgcattttttttgacatatgagttaattattttcttccacgaattccttagtagttattttcgttaaatgtctcacagaaataacatttttttttgttcatcaatgtgagagataataagcacatatatggtatttctacccattgtcttctctaacataccagccatgtagtatgaactcattaatgatttcgtacatcatgtgatattttgtttaggatgaatcaaaactactcaattattcttccctttggggagtgacattgaataatgaaaatgtgctttgcttagcaaagttgaaagaataacaatgtttatctagtcttctacaaattacttcccgcttattatgggtatagcttgttgaacatgctctgtgctccctgctggccaaaatgtggcaaatccatttcaggttagaggaaggatggttgatgatgtacaacaatctgttagtgaccctattttaccctgcaagtagtctttatctattttgcacaacagacccttattttgtacctcctgctggtaaccatatgacactcagtctctttcatcttttgtcatcaattttgtcttgatcaacttacttgcggggaaatgcaatctggctatcaaaggtcgaggtgccctagttgtcatgtcaaatcccctcacgcaaacaaatcctgcaaataaatttgtgaaaatttaacatgtgttaatctacagatgatgaaaagtcattttttttttcaaagaaccattgcaacttgaatgctttgcatggtgttagggatagtaaagtgattgctcatgtcatggagaacaagtatttggttggtactacattgggtagaaagtactaaataagcgatcttaggtatgcagttaagtaatgtagaagttagaatagatgatgttatgtgaaccagagtgggtgagatgcttattgttgtcattaattttttttttctttcatacagtcagcacatttggtgctcttaagaaataaataacagaggccgctctgaccttcaagtttactgcatcctagcttcaatggcttgacgagaaacttaatgataacaagaatgttttcaccagtgtgttttaaggtggtatatcaaggttattacttattgttaagaggttcatcaaaattttatcgaggaattcttataatttgttaatatgccaagttgccaactcaaactccaataactgtgataaatgcttaaatgttactaaagaaaatagtataatgaccatagttgagggagagtggtaatatgtacctttccagaaacagaactgaattccttgtgttgataggcctgatacatgttttgtttgtcatttactttattttttcattttggaaaattatctagtgtttataaacctttaatacaatacctttgaaaattgttgatacggaagttccaaagtataccatccttcttggcaaattccatatccacgctctaggaacattgattggattgagacttgaatcatgatctgcaaacacctgcaagttgatacaattggacaaaaagataaatgctctttggtctcacaggggtaaataaaaaatatattcttgttcaattagctgggttgaatgggtgcagggtaggtcacacaggtgtttcttccccatcaagtaaggacacataaatctatcgtaacaaaatttgcttgtgacttctttttaggcttaagaaatatgtttctctatatttactcaactcgtactgatatatctttatctttacaatggtgtgtagcaagtaatttcttttttcaggatgtaatgtaagagctagcatattttacttggagagacttacctcgttaacttgaaagtatgtgccattaagtggaaagcttcctctcattgctgttctacaaggtatctggagtgaagtcataaaacttcagtaagcaactgaaagaagcctatttgtgctgcttctgaaattgtgtatgtatgtaatcaataaggtattttcttaccaaaattgtccctcttacggtttgggaatttgtttctctaatactattgcatgaaaaacatgtcttctcatcacataatttgtctggttggtcggaactgcaacttcttgctgatggttgagtggaatttgctgtctcacctattgaaattggcaaaataaaaagcggtattaattgaaatccaatttttcttcgtagaatttgggcaaaagctaggctatccacttattaatattcttttttgcggcgtttgagtggtccagggtaaatctttctttctttgttttctaaagttattagcaatattacatacctggtgtccatatagcaagaagataaggacttgggtcatctggttctcgtttctcaagctgtttaaattcaatgtaaatgctcagctttaatgatatgagtagaatcattgatataattcagttaataagtctatagatagaaattaactaacctgttccaataaaggatgtgaatctggtagttcatacctgcatcagatcagtttgttgagaagctaaaatgtgccacatctcttaagaattactctgtaaatgtaactccattgtgttgctagtatagttttcttaacacagctttcaagaatattaattgggcagtggctattaatactaattcaggaatagagattattactggtttaagctttagcgtgctaaaaactgacttcgtatgctacgtaagaatgtacttacacttggtgttctgttcggagtctactgacattcttcagtttaggtatagggatggaggcagcttctggattcaaggcaactaaagccttggacatgtcaccctcttggagctccatgttctttttcatgtaattttgtaaggtttctgtgaactcttcaatgttgagttttatggtggggatctcatcagggtcctcataaaaggagtcctcaatgtcactttgtgacacctctatgcattcttgctctggtgttgcaggctcttctatgattggttcacacttttcagttttagagccagcttctgcaagtatattgttctctagtggaggtagtagtgcagtattcataactacagcacgattgttagcttgtgtaggaacactggaagtcacaattcttttctcttctgggcctggtagggccagtcttgcactgcattaaacataatttctattagtcttattggtaacaattgttggttgtgcatatcacaaaatttaacaattttgagaacaaaaactaaattcaacttgttagatgctttcattttaattccatatttcatttggttggaagtttcaaatatcattttgggccacagttgtttgagtcgctcctgggtacctctacctagcaactgctatggtttcctggtccccaaatattgtagggttaggggtggggatcctagtttcaattttttttttttttgggccacagttgttgcatggcaatgacatttcatcattgtatcatgtagatctttgagcccatgatttgttaggttgatcctcataatttctatggaatttctgtgataatgaaatttaaaatttaccatagaaagtataacctccacctattttcttactattttatgtagctagtgaacttccagtaatttaaacatgcaagtaacatgtagataacctggctgttgttgtatgtgtctaataagcctaaacataagacctcttgttccaaacaactagtttaatatgttacttgcttcttcattaatttgtgtggtacccgtggttagtcaaactaaaatagatcattgcagttttattaggatgtataccttgcaaaagcacttgcgaagtgtctgcattctcctctcatgggacatgcattgcagtttggtgtactctttgtacagaagacctgcatatgtatattcatcgaaggatgagaccttttccttgaaataattcaaaatgttcaacttatgtagtaatgattgataattaacctttccaaatgtaatcatctggtagtgtagttcatatctgtaatcaggtagtttaatattagttaagaacaacaacttctatggaaaatacaagattttattcaatagcaaaatgcattctttaaggaaaaacttgagttgttgatggaattatgaaaatacagagttcgttgatcaagtttgcataatcttggccaaagatacttttgaactgtctccagcaccgggtacctacagtaaattctggtcagaaattctttttctaatatattttactttctttttaatttatttgaagcatacatgatagtgatactgaggtggtgtttggtttggtggaatataatagtaatattaatggtaatagtaatgtaatggaataagaatgatactaatgagaattgattacgttgtttggtttgttgttgagattaatattggagtaagtgatagattgacgaaattgttcccactttaatttttatatttaaataaagagagagagactattagaattatcttagttttactttctttaatcctttttaatgcgtaattctcattagataacattttcagtgtaatgtaatctcattacatcacttttaaaagcaaactaaacgttttaatgagtaatttgattccactacaatacccattatgcaaaccaaacatgcacttacagttctagaaggtgtaattgaagtgactctggaagtggttgaaggggtacccaacccaatcgtactgctattcttcctacatttgtgtcaacctttgcaaacatagaaatgataatcctaggttagccaaaaacaaaagaaacataaaattgatctgctggtcctcactatttcattccctgcctgttcttataatataaaacacacaactaaatagtccttaccgggaaagcaagatgatgaagtgttaaaagcctcacacactcgacacttttcaatcccagtcctcgaatgcttagcaagtaatccctgtagcaggttttgtagagaaaatatacaaaatcaaacgtatgtaacaagtaaccttgctttaaatatcatcaatgtatgaggtgttgtaatgtatgtagcaggttttgaatgtaatcgaacttgttatattctcaagcaagttgatatttcatataacctactttgcttcatctgggggaacatctcttaaccattcaaggtcaatgcttccatggtctttgactatgcgatttaggaattcctgtaacattgtgaagcaatttttaaattcaaggatgctttaaacttgaaatacattctaggatttttttaaagaaagataaaatatattttggcttaaaggaaaaatcaaattagaatatatgtatataggtgttgcaaacttctaataaatgttgtttaggtcgattgctaatacttttgaaccctagaagttgttcttgtgtatgattcattgatattcgtcactttattttataccattaggcatgatcctaatattttcacatcacaatggtgggagtgtatgagagctaggaaaaaccttgattcgttctgccagcatcttgttcattcctcgtttttcgatggcatcagaaatatctttaacattggctgttctaattgcttcatagtcaattgagtcaactgcatctttgcttttttctttttggtcactaccggtctctacccgcctccttaacttgtcccagtcaacttcatttttcttttgacctgtagaattgcctctttttgcttttgaaatttttgtatgcgcatcatttggagtatggtcagaaatttgctctaccaacttattatctttctgcaactggatacttattgcagaaatactatccccagtttcagaagatttttctgtgagcttattgtcatgtggaacagtctctgcagttgcatcctgcatcttgccaagtgcataagaaaactttacacggttttttagtgaagttctttctgcttgaaatgtatcactcttccaatgctgataattgctgcaagaagatcgactgtattcagtgtttgagtgaagtgcttcttggcttgttgattgtgagcataagaatgcacaagggtcagctgatggtgtttctttagatttccaaacttgattctgttgtgcagagctgatactgaaacattcagctcgttcactacatattgaagttttggaaactgtgtctggcccctttgctgatctggagctggttgaatgccaagatgatgtgcttttttcactgaagttttcaaagcaacatacttctggtgcactaggctcagttgtcgtacacaactcactttttccagaatggggagctggttgcatatacggatagtctggattgtttgtataagggaattcagggtgtttcatcagataagagcttgagtttagcatttttacatgcttgtgtttctcaaatgctgtacatacatctacacgatcataaacttcctgaactgagacacttttttccatcagtaaataatcagttagagatgaagcttgagtgttgctaggcttccatccagtacaaggatcttttgcctttgagtttgagcctgaacatgatctgattcctccagtggcttgagtgattgaggaatgaaaagaattttgagagaatatgatttcttcctctgaactttggctttgtagttctgtcaagtttcttttggtttttgctgtatcatctctccattgaccgtcatcatattgatggggtgctgtgttttggctcttgattggttctcttgagtcttcgtgccatttgatggtgtcatttagatttattatgtggattgttgcttctttacctattattgtagtgctgaccttatcttgaatgctattgcttgttgacttaagaggaaattgtgcagccagagacatgaaggcagaactgcagtaaaggatacaaaatgctttcattgaacattgtatggccatttggtttaaaattaattatatgtcattgtttaccttgaaagatggtctgagacattttgagtaaggaagactccaattactgaatcaacaactgatcctttccatctagagaaacgtctgtctcctacaaagagatatatttggttagttgctgaagtatattttgttttttgctctgcatgtaaggatttctgaataataataaaaaaatggtaacttggtcataaattgtttctggcatccaagcacggacatagctgttagtcctgttggcactacagaataacacactctaaggttggactgtttcctagcatcctttctgaatagcagagcactttaaacttatatatcttttggactgctattttttttagcaatgaatatttccttttcttaaattaaaaacactactgtttgtttttttgtttttattaaatatagagaaaaaaattataagaaagtgtaccttgaactagatgcatccgtgcaatgaaagaatcaactctcccactgaacacttttctttcctcttcccaccacttctcctttttcttatttgttccttctaggtcttcacttccttccttgcccatcaaaagattccaaatcctgtttgtttctggatcaaggtctactttaggtcgttgtttacgcttcttgataaactcaaaacctccatatggaacaactgcaccatttccttggtataggacaagtgcattttggtctggccttcgtaatccactgctacttccattgagattaaggctctgaaatttgtatatgacttcgtcaatcgctgtaagatgttcttgtttcttttttggacctacaaaaaaaattgatagaatgttaggtttcttaagttaacctattaaaatcacaatttaagtattgttaaataagaagcttacctctttttttgggcaagggtttttgtgtattcaatactgacaaagttgattctcttagaggggctttcacagtctgctgagtctctgacatgcaagcataatgagtttgaaatagctgcccatttccaagtgtggtggacttctcaggaagggatgaatgatgtttatttttctcaaatgtggttcctgtggaaaggctgttagtatgattctgggcccttgcagaacgtgtctttcctgtttgtgaatgttgcttggataaaatttgttgatttttcatattatgctctgaagggatagagtgatcataaatgttgctgttgaatatgctgacttcattcatttctctctcagcaattcttctcaattgtgcattcaataatgtgcaattagcttttgatttcagtctccttgcattcacactgtgtgctcctgttgtttcaacatattccaaaccctcagctgcttcgacattagaaggaatgttaacgatgcctctgcagtcatccacaatcttctttttctttgtagtttgggaaaattctgagcaaaactcatataactcttggtgcaacaatgttctagcatccatatgctttgtggttgagagacgtgcatgttcagtggtctggaaatggtccctttttgaccttcttgcttcactggaggagggggtctttggaactggctgaggcatagcctgcttcgttggttctctaatcttctgaagggttttacaattatctcttccttgaactctatcttggactattgcttctgcgcatgcatgttgctgtttccaaatgtattcatcttccttcctctttagctgttgatcaatatttttgtttatttcatgtcttcctgttacattgaaatatttcatatgcatatcttttgatgaatcaaacagaggaactgttgcttgcctgtcaaatggaacattgccattcagcagttgattcatgaaatggttttctaccacatgttcaacaggtatgccacttagcatggatggaattgtatcccttgcatgatcatttccattacatagctctgttgcttgatattccaaggtggcacttggagtttttccattcatgttgtgcatctcgtgctgcactgctatgttgcccagattcgcatctccaattttttcaaaatcaaaagttaagattttcttgcttctttttttgggcaatgtagttttatgatttcctgtcccctccaaaatatccaccatttgagatgttgactcttttggaacatttctgcgtacatatttcctcttttggtgcttaggttccgtattttctgaaactttaggcttttgtcccctttttggtttgccttccacaattaccttgggcctgtgtttcctacgttttggtggtttctgttgcggtgtctcattcagatcaaagcccagattaattatctcagaatctttgttttccttgtatggtgtagaaatggcagcagacgaagagtcaacaatcttttgcaaaagttcgtcacaatgtagttgtattgcttcatcttctctgtattcaactagattttgtgttgtgtctctttcctggcttggggtttcatcagctgtggactttagtaatgcagaccgctggtactcgattgtaacatgatttggtgttactggtgtgaagtgatgtgagttcacagcatttgtaagagcattggagttacttggtgagtaattcaaatcatagcttggcctggccgttgtggagagatcatctgcagagataatgttgttcatcaatgtggtgatgcatcaaggaatgcatatttacagtgttatgtatttagaactcgtatccagagatttttctgggtgagattctttatgctgtcttatagaaatgctactttatctagtttttatgctgtcttatactttatctagattctttatcctttatgtattttgcatattcatctatagcttattatatcaatgtttagcatctttactaaaagccttatgatgatctaagataggactgcgcagatgctcatcttattaagttttgtagttacttttatggtcatttcacatgggtttattaatttactattttgatggtttaattacacaaggaaacccataattactggtgacaactgaacaggaagcatgtttttcattcgaactaaaagagatttgccttcataatcaaagcatggaaatgaaacattttgaaaagggtgccttgatagtttttagaagaaagtaaaaaattaggcactcaaaacaataacaaaaatacttactgccgtcactttgcggaaaaaaatacatacagccgagtgtctggggtaagctgcttccataattcagtgggttagaactcttaccaaattgccagtgtgaatgaccaatttggtttacctccatgccgtcgatgaacctggcaccaggattgaaaccacctgagccacaatcttgttggatgttgatcatttcatgtggtggttgtggcattgaaggtgtttctgctgccatttctgcgaatcttagaagcgtggtgtttgatgaggggacttcagcttccccatgttgcaacagttgcatgaacgatacattattaaagtctacaaaagcgtcgggtaaagaaagttgaagagaaccagctctgccatttgccatcaggttatcctctgttgaatgttcatctgaatatctaaaataccccatagtttggctcacttgtgaattgggattgaaaatttgagttaaacagtctttatttgatgcacatcttcctgtatttgatgccaattctagtgaattcaatggcacctgttgtctaccttgttggatatctgagaatgcgatagatcttcccaaaacaggtgacttctctggtgttgcaggcacccaagatctttcagactgaaactcttctgttcctagaattggaatccgctcttcaaaattcaaattcatccttgaatttcttgtgatttggacaaaaaaacaaaagaaaaccttaattgatttgtttgcagttgaaaatctgtgtttcaagaaagtgtacagcaatttagaatttgatagtaattttatatatttggccacaatttatgtctgtacacatataccagccactaaattgtactcactagtttttgttcaatggaataaagagaattaacaattaaacacgagtttgccaatatatcagcatactagtaaggagggcacgtgcgtgcgctcaaattatagtgttacaaatacagttgatatagatttcaagtaagtctgaatacataagaatcagactgtttaaccaagtagaactatgtttactgcttcgagatgcaatttgagagatgaaaatggacataacactgcttgtagaaactatgagaataacaaaggcagcttctctatttacaatagaataaaatggaaaaataagttgataaataatatacgagtgatttaaaaggtgatttaggaacacctacttttaaaagtaaagaaatttcattcaatcactcttgaattaattgactttggcactgaggtatagataaaatcttcaaaggccgaataacagaaatgttcctaaaagataaaatcataaacaagtattattttcaatgtttagttaaatgcaaaaaaaattcagtgtttaagatttttcattttcttgagacacaaccagtgtagctttctttctcctgtttatatataatacaaattgatttgtaagtttaaagaaaatagcaaaaacatgaatgatacaataggactgatgttggcgataaattatccttacctttaaattcaagagtaataaattatctgaaatagctgaactttgagaagtaatgtatgttctgcagtttcttgatatatattttttttcctaaaagccaccaaaaacttgcgattgtaccctgtgcaaagtaccaattcccgaactacttacttagctcatcaacagcaatatctaatcacacttgtctgcattgattgattcaacaggaggaataatgtaagatatacagaaagctgtcatgtgcattgcttgaaaatttatgaagaaatatatacaggatttggaagacagaatggaagtttagctgatcacgtgattaaggaaagtgaaaacttacaaataaataatttgacaaaactgcagtcgatttaggggagttattcatttatgtactttgaataaggttttccaattctatatatatattcaatccgcatggggaatatttcatagtaactagatgctacaatggtaattgggaagggcactaatgaagagaaaaagatacagggagaaataggctttgaagcgaaagaaacagataaaagagggtagtgtaattgggtttgcagagcaaaatgtaattgacaacaatacgtacaagtatcatcaatgttgaatttcaacaacacataagggactccctttgtttgtgcctgaaatagttgtctcattcaatgttatattttccactaagtaaaacttaagaaaagaaaagctctaacaatcaagcactatataataaacaaatattaaaaacacaagttaccagaaacgacaaattaaggcagagatgcgaaaatccaggtcaattccataacgtgaatgaaaaaggtggagatataacacatttaaggtaccagaaacgaaagtgaaccatcctaccaccattaatatattacccaatatctatctttcttatacatagaaaacaacttcagctgatttagaacaacaaactttgagtcgtcatctgctgccgtgagctctcgcctttgcgtcgagttcttggagagagagagagagaga

SEQ ID NO: 93939 - DNA, 610 bp, Cannabis sativa
gagattggattatttttaggttttataagttttgaaaaaaaatagtaaggctattttggagaaaataaaaagttattaggatagtattgcataaaaaaatttatagggtattttttataaataaattttttattcagtataaaaaataaaatttcttctttaaaaaacaattatgttgtactttaaagtagtttgtaatttaaaattaatcgaaatatttctttaattgattacttatgaatatatttaaaaaagataaaaatattaaaaaaaatttacaactagataatttatttttatatttttttaaaatgtaaaatttaagattttttttagtcttagttgtttattgaacaaaatgattcaaataaagatttgagtggcatttggttggaagtgatgaaataaaataaaatgaaacaaaagaatttctattaattataagaaatgaaatttcccctttaaagaataattatattgtacttaaactagtttgtactttaaaattaatcgaaatatttctttaattgattatatataaatatattaaaaaatattaaaatattaaaaaaatttacaactcgataatttatttttaattttttaaaat

SEQ ID NO: 93940 - DNA, 1174 bp, Cannabis sativa
aatcataaactaaaattgtagcttcccttaaaagctaaaatcacaaaactagggtggactaacttttcctaaaaactataaatttcacttaaatttttgaaaagttattttttaaattttaccaaacacatattaactcataactttttccaaaagtgattttaactttctaaaaaactctcctaaacgggacctatgtgcaaaactcgataattatttacggttgggcacttccttcttatctatgaggatttatctcatatttttaagtttttttttttttaaaaaaatatggtacaattaaatttatatgttataaactttcttttttcttgctttcaaaaaaaaaaaaaaaaaactttcatttttctttttatattttcataatatatttttgagataattacataaaacactaggtgtctttaaatatccgaatcagctcggagaacgaatctccattcgagctcgattccttcaaaaaaatcggttactttctctccgtcgtctagacggaagatgagaggtttttctttcggacttttgcaaaccctgagccttttggtctcggggctttgcttgagtgttgtgatgtaaacccttgcggcgtcgtagatctagtttcgggttccgtattcgcttcccttttcgaatacgaaaagttatggtggtgtgtgggtagtgagatttgaagaggtgttggagtatggagatgaggtagtttgttacctgttttagtaggatttgattgatcatggattggaagaacattatggaagccatggctgtgaaaattgagtatggagatggcatttttcattcgtggaaaacattgttacatgtaagactactctgttctcttctctgtaatgtcttctatatataaaaaggattgacgttaggtacctaccaacaccaccagcatattataaaattgtcttcttacattttttttttttttttgagtaatattattgggcacatgtaggtagaaataagatgttagaaattagtgtctcatactgtattaaattaattaaagtttaacacttcagctaatctaatttatattacatatgttaactactaatgctagtaacttttagacctaaaatttgttaaaagttattatattaaattatataagatttgatacataattgtactaataata

SEQ ID NO: 93941 - DNA, 775 bp, Cannabis sativa
aagtttgccttgggattagctttccagaagtcataaaaaatctcaagacccactgtctctaagacatttaccttctctccaagcctcgtcacctccgctctttgctgctcagcctctgctctcgctgttcagcctccgacttgtacttctcgacctcagctttaagctcctcctccttagaattcttctctacttccaacctacggaagacagccagaagaacctccctttcttcttggagactgttcacttctgttgacaaggaggcaatggtagcttcaagttggtcataagcctggaggtccttagtgagcttgactactttcttctcggcaccaagaagtttcttgttgacttcacccagttccattcgggcggctccaagttgaactctagcttcattagcatccttctttgccaagtccacttccgctctcatggtgttggacatggtagcattcttggaggcagccgacttagcccaggaataagcataagccatcttcagaccggtctgcacagagaaaaaacattagaatctgagctaagtaaagaaggataaaaggaaactgtcaagaaagactcaaccttgtgaactcctttaggacaccttccatcaccagctcaagggaaagctcattgtcagctccggccaactgctcattcacctcaggaactgaccaagtcacgtagtgggtgagcatatctttgcttctcttagtctctggatgcagcactagaggtggggcaagggccctgatctgttcagctccgc

SEQ ID NO: 93942 - DNA, 644 bp, Cannabis sativa
catttcgagttgtctcgggtactccggaatcgtatttttgccataacttctcactcgagtgtccattttagacgttctatatactgtttcaaagcttacgacaagctctaccatatggtatatgttttagaggaaaaatataagtttaattttggtatatttcaactacggggtttggtaggaaatcctaggttatcctttgcaactattaagtagtgttttaggataaacacttattggtttattattgttatgacatagggcccgagatcattgatcattctccaagaaggtcggccaacatacctgaactgaaacttgaggtaagaaaagtataatgtaccacatcgcatgattaggtgatgcaatattcctggcgacgtatcggacgtaggtacgggtgtcagtgatatgaaatttcctggttatggcatagattaaaactatggttgggtttcttcttggcgacgtttcgtgcgtaggtacgggcgtcagtgacatatgataagtaccgagcgtaggtacgagatcgtctgattagacgatgcgatatattagtgccaagttgtggcgtgcgctcacttaattaggtggtgcaatgatattatatatgatattgcattatgacacaggcttgcctgatt

SEQ ID NO: 93943 - DNA, 778 bp, Cannabis sativa
ttcatattaaagtttgtaaccgaccgttggtgagtattttgggtgttgagctttttttttttttttctttttagaaacatgtaataacttcattaaaatacaagttacaagccaagtcttattagtgtgaaattttaccattctatactacctctttagctagtcttaaagttctctttcctaagccatgaaccttgtatttgcttgtctacacacatgtttaagagatacattagggaaagataaaaaaatttacttataaaagctaacaaattatataaagtggaattattcttacaaatctacacacaatggcagaactaactgagaaacaaacttgtagaaactaatatacatagaaaaaataaaaaattatttatttttatttttttattacatacgtcaaataaataaaaccactactacatgtgaagatcattacctgcatctttcattttctttcgtgagctatactgttgtagagagagtagagtgatgaagctcctcgagctcagttgtaatatcttaaaatgagaaataggttaataattttaattaaattaattaaatattaatgtgagattatattattatataattaattatgtgttatatatgaattattgagtgtaagtctctatttatatgataggagtatctttgtaattttgacccgataaaaataaaattataattttactattgttgctcgtaaattcgcccaatatacgtggaccagtcaagtggggacacgtggatcaaataacttggaaagatt

SEQ ID NO: 93944 - DNA, 548 bp, Cannabis sativa
aaaaactaatataataagagcttaccaaataatcaaatgtagtaataaaggagatggagatttttacgtagttcaggcgttaatgagtcttagtccacgagccagtctattggccttaaaaggcttggatgatacttttacagtgtttatgcaagaaaccctaactctatagtctttgtttctcttgaagaagatgaaagcttagagtaatgttaatagagcttcgactatcttgattttgatccccctttcgtatgaaaatggaaaagtatttataggctaaaggacaggtatggacatgctcatgacctgtctaaggttttcacaaaaagcccactaatagagtaaaatacatgcaaagagctgactattgggccccttggaaggtattatgctcgtgcgttgaagcagttggacaatatgggaccaccatttcgtatagaatgtgtgtcaccaaaaagtttaaccttgaaaagtaaatgcctggaataactgtctggcaaaaagtgttgggaatattttactaggatttagatttactaacaagt

SEQ ID NO: 93945 - DNA, 1050 bp, Cannabis sativa
aacaagtcttttttttgttgtctttttggggagatccatttatatatagatgttagataaataaaaagtaggaggaggttacctggggctctaaaattactcaaaataatagaatttttctatagtaaattaaaaagggaaacaatttacatttataacttagaaaggaaaaataaacataaatagaaaataaaagtttcgatttacaaaaataccggccacccaaaaaaaaacggaggagaatcctccttcttcgtgacccagccgagaaaccccaaacaacctaatctctatcattttctttcaaaaaccagggaaatcagttctgaacaagatgtagatctcaacgaaaaaccaattaaattctgaaaaatccaaatacattaaggcaaaaaaaattaataaacctaaattgttgtacaaaaaatgcaaaaacaacctacaatcaaaaactaccgcgttcggaggagaggattcgaagagaaggacatcggaaaaacattgaaactcacccataatcgaatcagagaaaatattgaatgtaatacaatttcttcatgaacctcttcctatcttttattctacataattgaaaatgtgttataaattgaggaaaacaggaaaaaattgaaatgataaggaaatttggtaaatctgaacaaaaaagcaacaaattgcataaaaaaaatatattaatgcatataattagcagttatagggttttaatctgtaaacagttgtttatatgctgttttccagtaatataatttttgtttgggatctgcaaacaagaaatgtttaatttattcttattaacgattatatgcttcaaaatagttgtttaatagttgatttgacagataaaaatagtcgttcagattgaaatattatttgcaactattgtcactaaaaaagagttatttattagtttttttgttcgattgaaatagttgtttgcaacttctaaaactgaaacaaatatttaatttacattatttcaagacttgattaactagtgatgacaataaaaattatgttgaatatgaatca

SEQ ID NO: 93946 - DNA, 684 bp, Cannabis sativa
ttttagtttcttttgtcaagtgatctgaaaatcagacgctcgattagttaactcgtttttctaattctaattctagttgtatttccaatagaagagatatctggactaagttagagacaattattttaaatgattactattaataaaattacataattttttttaaaacaaaaatagctactatatacaataaaggaaagggaatgtggaatataggaaaagtttatatatttgtttatcctataatccccacgccaataccctttatatagccatttaaactaacttcaagtgattctaaaaattattaaatttgcgcgagagaattttgtaaaaatgatcataaataccatgtttcataacggatatggataataaatagggttaattctgaaaatatatgaacctaaagtgaattagatttttgagctctaactttcaaaaaaatatataaaaaatattaaaaaagagtattatgggattcgaactatgacattgcataatatgtcatatgtcatacacctaagccaactaaataatttttttttttttttttggttcttaaaaattgtggaacctaagcacggatctagctcgcgtaattacatatagcaaagtcttcctataaaagtgactatattaaatatttgagttagatactataattcgatcctataccccccc

SEQ ID NO: 93947 - DNA, 624 bp, Cannabis sativa
  modified_base (185)..(199): a, c, t, g, unknown or other
  modified_base (557)..(595): a, c, t, g, unknown or other
cgaacccggacccgaacccggtccctgaaactggacccggactaggaccccgtagttggtgttgggactgagtgtattaaaaatacattataactttacacaatcaattaatacaagtcaataccaaacattgtattatattaaataatactaatacaatacaatacaatccaacacaatacaannnnnnnnnnnnnnntacggcgtaccaaacgagcccttctatgtttaaatgttatgttttttttattattttaagaaattagtttcattgttcatattttttactagcagataaacgtaactggtttttattagtcaaattctaatgtctaactccggtgacgactccggcatcgaactccggttatggtgataactcagacaatttttttgttaatttttatggtgacaataccgattccaggaacttttctgacttcggcagcaacttcggcgacttttttggcactgacagcgtctccatcgactttttcgacactagcaataaactccgatgacttttccggaactagaaactgttgggttttgtgccnnnnnnnnnnnnnnnnnnnnnnnnnnnnnnnnnnnnnnntaataaagatcagaaataatatttaatgt

SEQ ID NO: 93948 - DNA, 912 bp, Cannabis sativa
agtggaagtgggaagacatcaccatagattttgtggtggggttaccaagaacggtagggtactatgactttaattgggtgattgcggatcgatatatgaagtttgcacactttttagcagtacaaaccacgtatacagtggatcagtatgttgatttatacataaggagatagttcgacttcatggtgccccgaagtcaatagtttcagattgagatccaaagtttacatccaagttttgggaaagcttacaacgagcaatgggtaccaagttaaagttcaatacagcttttcatcctcaaaccgatggtcaatctgagaggagtattcagatacttgaggatatgttgagagcgtgtgtaatggattttgaaggttcatggaacaagtatcttcctctgattgggttttcttataacaatagttatcagagtactattggcatggctccatatgaaatgctttatggaaggaagtgtcattcacccattcattgggatgaagccggtgaacgtaggtatcttggacccaaggctgttcaaagaacgagtgaggccattgaaaaaatttgagcttgtatgcttgcctcacatagtagacaaaaaagctacgcagatccaaagcgtagagatattgaattccaggttggggatttagtttttctttgggtatccccaatgaagggaattttgaggtttggaaagaggagaaagttgagtcccaggtttattggcccgtttgagattcttgagagagtaggtcaggtagcatatcatttggctttacctcttgctctatctggggttaataatgtgtttcacgtcttgatgcttcggaaatatgtatctgatacaactcatgtattaagttatgaagatatcgagcttcaaactgacctgtcatatgaagaaca

SEQ ID NO: 93949 - DNA, 2275 bp, Cannabis sativa
acctatatcaacaaggtacattttatttttcggtagcccatcacgaaagaactcaataattaagtgtgcttgacctggggtaatttcaggatgggtaacttcttggaaagtttttccatgaagtgtgcaagtgaggacaaagcacatcggaaacacacatgttagtttgtaaggtcaatcgacattccatgaagcagccagagtgagttactcgtgtataaaaaccatcattccgtaaatgtaaggcccaatggaggcttgaagcgagaatgttacacaactagtttctgccttcaggtttttttacaactatccatgtcatgttcttcaacaatgacaacttttcttcattaataacctgtaaccagaactctctatctttagctctgatagctcattagtagctagttggttttgagttttcaatctacttagcagttaggagagcaaatgttgtaaagtcagccaaatccaatctgtctggtaatttgatgtctcttctctccctatccctagaaagttgataagtacttaaatcatctccattgtcactaagatcactactaggttggagtgcttctcttgtattccttccgtatgatgactcatctgattccacctcaagattgactctttgatcactctcattttgttttgatacatttggttctaaacccttatagccataactttttcattgaagactacatctcagctaatgagacacttcttgtgtcttggttctaaataccacaacttgtatcctttaaaatctcaagcctaacttgacccatcatattcacgtgttgacttatcgtgtacatgtgactatacttattttacattacatgtcgattaatatgattaatatcatatatttgatttttatacatgtatttttaattatatcaatttgtttgactcatatacttaataaaaatatataaaattgtaaataaataagattaattaaataaataatttatcacaaattatcaatacaatgaacaaaattcttagaaccaagtataaataagctaccttatattcttgtaagaaagtttctttctaattaagaataatttgactacaaatactacaaattacttatttttagtcacaataaaatttgtgattaaaaatacaaatgttacgaataattataaattaattactatttctatgttgtgattaaaaggtctatgtagggatgtaaacggggcggggcggatgcgaaaattgctccccgacccccatacccgccccaatacccgtttaaattaaagcggggacaaggtgaggattacctgacaggggaaggattctcattgggtacccactacatatatattttcaaaaaaataatgtcttaaagagaattaaataaataatcataaaaattcagtaaaataataaacttaagtggaatagtgtgtatagtaaaaaaaataatatataattaataaaaagcctaaagtataaagttattttaattgtagtagttatgattttaaaacttaaatatatatatatcatgtcgcggcaagtttggggcgggtgatcatgcccccaaaagtcaaccctcgttctcgctcccataggagcgggacctgcgggtacccgaacccgcgggtataattgtcatctctaagtatatgactaaaggtatttttttgtgactaactatttttagtcactttgactaaaattaaagtaatgacaattttttattgtggctaaaactcacatttagttacaaaaaattatgttatgattaaaatgttatctctaaaactagactatttttgtagtgaagttaacaattttaataatatattaaatataaataggttaatatgtttcgattttatgtcatacgatttaattctaatccaactcaaataattatcgtgtcattggagttcaacccatatctatttttatgatcaataattcgtattgatttcatatcatgatttaaattgtcactcctaactaaatcctaataggttgacacttgacaacatgttcttgttgcttaatgtgcttaatgaattagttgcatgaattgatttaaaaaaatatattatattacaactttaattttaaaatattaccaaatagatgatatttttgtcaaataaatgataaaaaatgaattgagaaattaacatatcacagttaattgtatagtaagtgataatgatatttggataagaacttttacattatatcattatcacacacgtaagaaaataaaacttaattaggagag

SEQ ID NO: 93950 - DNA, 825 bp, Cannabis sativa
tttggatgcttagcctatgcctcacacgttcacatcccaaataaattttcaccaagggctcgagcttgcatattcataggttatcctgaaaacatgaaagcctacactctcattgacatccaatctcacaccatcttccactcaagagatgtacttttttatgaaaatatattccctctcaaacacggtcatcacaacataaaccatcaaatagacaatttttttatctcttcacctccatcagataactctgatgcaactacaaaccaacaaattccaactgttgacatcccagcagccaccacaaaaacatatcctgttgtccaaaatcaatttcccattgctgaaaacccagcagaaacccaaccaacacaaccggttgtaccaaactcacacattcccaatcaactatcagacaaccctgataaacataagcaaaaaccttctctcactgctgaaatcccaacagccttaccaacaacaccatctgctatacccaactcccacattcacaccaaaagtggtcgaaaatccattccccctgcccacttacaagactacatatgtcaaactcaaactaaggcacctcccagttcttatcctattgcaaattatatatcatacaaaaagttctctaagcaatttcaagcagctatccttgctgctcatcttgttgaaccaaaatcgtattcacaagcttgcaaacaaaaaatatggaacacggcaatggataatgaaatcgatgctttagaagccaacaacacatggattgttgtcccccttcctccaggacaacatgtcatcagtaataaatgggtatatcgc

SEQ ID NO: 93951 - DNA, 583 bp, Cannabis sativa
  modified_base (202)..(205): a, c, t, g, unknown or other
taaccaaaattgaattattattttattatttagtgatggtgcttatagaaaatgaattcttttgtaggtgaatattatgttttggattctgaattttcatgtacaaaaggttttctcccaccatatcgtggtgaaagataccatttgcaagaatacaatagtagaagtaatggactgcgtggcatgaaagaactattcaatnnnngacattcttcacttagaaatgtcaatgaacgatgctttggtgtgctgaaagctcgttttcctatattaaagatgatgccaccttaaattgactcgacaaactttgatagtaattgcttgttgtacacttcataattttattcgaaaactcacccaatatgatcatatgtttatagaatggaaaggaaaacaaattgagggtgaagacaacatagaaggatgtgaaatcagtgtgtcaagatatgaagttaatttgtctgatgaatctgccacggcaatggcacgtgttcgagattgtattgctcaaactatgtggacggcttataataatagaaattagttaattatatttttgaaaaaccgtgtttttgcaaatgtc

SEQ ID NO: 93952 - DNA, 2124 bp, Cannabis sativa
  modified_base (379)..(380): a, c, t, g, unknown or other
tgctaagtgtactttcgtttgtgtgtttgagttcttttttcttcccggctcgacacgtgtcttcctctgatgtgcttaccgaatttttggtataaaattgccccttaaaaagttcttttaattaaaaagagttttttaatgattacaaagggtattttcgtcatgttactcttttttggaaagacagatatcctcttattttggcggttgtctagttttgaggtacatcagaattaaatgaccatcttttccacttccactttgaattatgtccttaggatcaaatctttctttaatctaaagaagcaactatcatgggtataaagtaagaaaaaaggaaccacctttgcaccattttctccatttcagaaagtttgannaaaacccttaaacttcttcgtcaaggatcaccattaaattcgtccgaagacttgcatgccatccttgtccttaacctttttcctgcgagtttcctttgacttcatcctctcaaagtgatccttgcttcgttcaaagatttggagacagaattaccaggcattgccccaatccctaacttgaaacagtaagttgctttcttctttcttaagtttgtttcattgtgaggattagttacttgatttgtttgtatcattatcatctcatcttgttttggtagatttttagggtttaaactcttcacactattggtcaagcactatgtaggttgttttaagatctccaactcattatcttcttgtttgataaaattctcttcagggattgggactgctttttgcttgtagcaatgtcccactttggttcaagaatttatcgtccataagttttagagtttgagttcccgacagaatcagccattccatataaatccaaccctttcaaaaccaacctatagattagacttaaacgatgctagggttagggaacacatagtgagaacccaaaaggaagacatttctagtcgctacaggcgcttcttgtaagaaatatctgaaggtagacgctgattcttgcgagaagcagcatagccagaaccacccagcgtatcctttattcctgtgggaaagcctttgtttttacccaacgtcgcaattttgaaccaggtgacttggattttcaaattacgcctcccaagccatgtaagtctaaaactccccaggatccctacgttcccttcgaggttgagttgatagaatcgaaggtgcgatctatctcaggctacacgggcgagatgttgaaaacctgtgcaattgaacttgggcaatcatgccaagttagatcagtatgagagggtgagttcagttgctaccccctgcatgctttgccagcagtaacccggggactagtggtaagaccggtactagtggcttaactagcatgggtgcatggagtcttgagcatatcagtgcaggggccacccttcctcttctcgactacttcaaagactatataaacgacattggtgttgccccattccagctaactcccatggcctacaggattctcgctagtttgaaagttttgtacaaaattctgaattgggggtgtcccactacagtagagattgagtatccttactcagtcaaggctattccatcaaggaagaatcctgcaatgggctttttctatctcggtactcatcccagcgagcctaaaattattgtagacttgctaaataaagtatcctttaagaacaacttcttctggacgtctggtttctcccccatcggcacaaccatgtttcgcgaacttcgtaagtgattgttctccttttacccatttgcatcaatgttcctttttcaagtttatgactaatgttttgtttattctggcagctcttttgacgggacctacccctacccccgagatggttagtaggcataggcgtctgttaactcttcccaagggtcttcggtcatgcaacttccttttgagcgaagttaacttgcgatcggtgggccttctcgctgataaagaatatacttgtgattacaagaatcccaagtattcttcttagcaacagattattgttctgcccgaggatcatgcctgtgatcgcttggctcaagcataataccttcaaagtactgccccacgggaatccagtgaaggagcatcccgagg

SEQ ID NO: 93953 - DNA, 692 bp, Cannabis sativa
tgagttcgaaatgacttatcaaaatccgaacacctattgtagaattcccaagtcaacttgggcatagggctagagaccccctctcaagtcgactgctatgactccggactactcaactctgagatattatctttcttatcatatgtcaaacattgatgtccacatcactagggaaagtttcgaggttagcatactgctaaaagaagtattgttattgggaactagtggtacctattactttctatggttgacgctctatgatttgttagaaatattccctaaaatttattgtcttaagttttatgcgatctgatacttaattacactaatagcggtatgacacagaggagggttctaggcaccgatagtgccttgtagcatttctctgttaaaaggtaccaatggtgcttatcactatctttggtgtcatatctctattggtacaattaagtatcaaattccatataatttaaggttataactttagagaatatcgttaactaattgtaagatgttacctttaaaaaaatgttagacacctgctactcaataacaatactctatcatatgtatttgtaatataggattcgaacatatttctatatgctagtggatgtaaacaaataaaataccaaaaaaacaaaaacaaacctttcatacttatttaacataaaataagttaggtacatata

SEQ ID NO: 93954 - DNA, 669 bp, Cannabis sativa
actgaaacttagtctcgtgttcaatggccaatcggctaatgtccatgtgagttcatcttgagtgtttgagagagatctaagcaaggttttgcataacaaggatcatggttggttgctctggtattatgaaaaatctataaggattgatatgtattttattgaactttggacaaatatatatacaatacaacttaaattctaaatcaaatcctatatactctaacaaatgcctatttaatacatagctatataatgaaaagaaatcaggatataaataaaatggattataatcaattgtcctataatgaaaagatatctcaatgctcatattttgtgggttgattgacttgatttcttaacagattattcaatttacacattaattaaaatatccaaacaaaacatgaagcaaagaaacaaatcaactaacaaacatgtatagtttcagctaaggtattatattccaaccattacattcataggatctaagtaacacaaaatgtaccttagagtttattaagatggtctcattggcatagataattattttcaaataaattatcataacaagacaagacaagataaagatttatttaacctccccatatcaaatagagaaacttattttaattaatttgccttgactgttttcaagaaaataatcctcca

SEQ ID NO: 93955 - DNA, 1190 bp, Cannabis sativa
aaaatgaccgagactcgaatggataggaagatgaagaggctcagatctgacaatggcggtgaatacaaatcagccattttcgtagaagtgtgttaagtagaagagataattagataattttcattactatgtacgccgtagcaaaatggcgtggcagaatgaatgactcgtactttggttaagaaagttcaatgtatgctatctcaatccaaattgagcaaatcattttgggttgaggctttatcatatggaacccatatagtcgatagactccctacgtcagcactaagtgggaaattacctaaagaggtacggtctataaaatgtgtttctgattatgattccttacgaatatttggataacctacatatttccatgtcaatgaatccaaactcgatcctagagcaaagaaggctattttcttaggctttaatggaggagtctaaaggtgttcgactttggtacggtgaatcaaagaagactgtctcaagctgagatgtaacatttcacgagtctgttatgctaagacagactaccttagaaagagaatgaaagcccatgataatctttctaaggtggagcttgagatatcgaaagatcaaaactaatattattaaagaccacggtggagatgatagtgatgatcaagaaaagatctcagttgaggtggaggttctcttagcttcatcaccaatacatcagcaatcaaaacctattgccactactcgaccgagaagggagattaaaaggcctgctggatacacaagtatggtagcatttgcacttccagtaattgatgatgacatcccacacacttatagagaagttgtgcagagtgtaaattgtaagaaatgaaaaatggcaatggatgaagagatgaagtctctacaccagaatcagacatggatgctggtttgacttcctaaaggaaaaaaggtaattggctgcaaatgggtatgtttcaagaaggaaggagttcctggtaaagacggcccccgataaaaagccagacttgtagcaaaacgttatactaaaaaagaaggaacatatgacaatgaggtattctcacttattgtcaagcattcatctattcgaattttactggctttggtagcacagtttgatctagagttagctcatctggatgtcaaaacaacttttttcgatggtactttagattaagagattt

SEQ ID NO: 93956 - DNA, 623 bp, Cannabis sativa
ccctgcctgcacagtaggggcaggtgctacctgcatttctggagcagggattgtaggagcaccttgctgtctcaggcgttggatctcttcatcttgttcattaattctagcttacatttctacagacctattttcccaattttgggcagcctaggcagcttgtggcatgttaacatcaccctgactgcgtgccttgcctctgggacctctacctcggccacgaatatctaggggaatctaaactccctaaccaccattggatccgaccgagttaccctgactcctggtgtttcacctggcgtccattctagtagaatagcctgcgtaaccaagagctagcctggtcagattgtgatcaagtatacttactaattgtcgcttattttagaaatttaaaacatgcacctatttagctgtcaggctactaacatgcttcctagcaggcttttcttaaatcctactattaaaataaactactaaattaataaaatcttactgaaccatgaaaaaagctaatcgctgacgatgattatacatgtcgtgatgatcttcagaagacaacctggcggctctgataccaaattgtaacactctaactatcttaggcatgttagcgtgatttt

SEQ ID NO: 93957 - DNA, 515 bp, Cannabis sativa
ttataatataaaattattaaaataatttgggctgataaaattatgccacgtgtacatatgtatacacagtggcaattttagttggcatttaacagccaagtttaacaggtgtattagatttgcaaacaaaataatactaaagggggttttgccacaaaaaataaaaatgatggggttaagtgtgtaacaatcaaaacataggggggtttggccgcaaatttctcttatataattagtattttgtgttttttttttctcatatatatacctaatatatttgtatgtttataatcatgaagaaagtactatacatagctttggaagtttgtagggcttctctctcacattgttagagaagttttttgtgatttttgattattgaagaataaactcttgatggtgatgattggtgaatagttgatggtatttttttagaatttcagttttgtgtatttttagttttgagattgcatcgtatggattatcactgtaatattttttttttgaagaaaagc

SEQ ID NO: 93958 - DNA, 689 bp, Cannabis sativa
aattaatattataattaattaaatttttttttgtcggcgcaatagtgcgccggtaaaaagtggcaaaaactattggcgccaacagacagattggcgccaatagtcttaccggggcatgtagtgcgccggaaaaactattggagccaatctgactgttggcgccaatagttttgccggcgcaatagcttaccaaatcaggttcatagcggataagggcattttttaacactgacgcttacttttcaccggcgtgatttctcgccagtaaaagcaagttttaccggcgcagttactctacgcgccggtaaaaactcctttaccgaccaagcttcccagataagctttgccggcgcagttgtgcgccggcaaagctttaccggcgcagttagggtacttttgccggcgcattaaaagtggcttttcttgtagtgccccttcctccataagaaggaacaatccaacaagcaaaggattcttcatttacacatttactctgaatcgaatacactcattggaagagaatctatttttccacatacgatcaatgctagtagccttgccaatcctccaaaattgaggagggagatcaaagattattactcacatctgagtaatagagaaatccatcgatcttcaccgccctcttctagcattggcttgaagatcataaatccatcgcatattctcca

SEQ ID NO: 93959 - DNA, 646 bp, Cannabis sativa
ccaagcatcataaagagactcattattaagctggttgaagttgttgatctcctatctcaatttggtagctttggctggaagaaagaacttagaaagaaatttcagtgtcaattcctcccaagtgttgaaggagttaggtggcaaggacatcaaccaactctttgctcgttcccttagtgagaatgggaacaagctcaagcgaatcacatcattactaactctattcatcttgaatgtctgacaaagctccatgaagttagcatgatgcatgtttaggtcttccaggggcagtaccctcaactggactgaagattgaaccatctaaagaatggttggcttgatttcaaaaattattagtatcaacagcaggtggtctgatacaagattggatccctgtcattgtgggtagcacatactcatgcaaacttctattttgacaattagcctgatctactacaccccattgttatcattttgagccatatctttttctaactcaacatctctaatagcagctctttccaacatcttctttcctttattctgtcgacaagcttctcaatttcatgatcagcagacactcttgcagttggtcctcgacgttgcataaactgcttgatcccgagaaaagagaaagattaacaca

SEQ ID NO: 93960 - DNA, 618 bp, Cannabis sativa
cacaacagtcatgaacaagcatcataatacatccttttcttttcaaaccaacattaatgaaatgaaattctagattatgtaaatgattctaatttttttaattatatttgctgggtgtcaatcccattattcacgtaagatttcttcacctcttttttcatatagtatattttatataagattaaatatatttaaattaatctcgttataatctttattatgataaattatttattttaaaaaatatcctaattaactgcagatagttacaaaaaacatatatagtcaaatttctattctttctctttgttgacctttctcatatctgagattctattgccagcgaggagagtttggagtggttgttgttgtttattcatgttttgatatgaaatctaatgggtaagtcacattacaatgaactttaaatgtcgatacagctaaggacactattcaaggggatttagatgtggctgtagtttttaaatgattggaaaatgttgctacatcactggttgggtgtatcgtttcagcctgtgtgatcctgcatgatgttgctgttattgataccaataacatgtggaaattaaaggggagttttgatgttgattttcttaa

SEQ ID NO: 93961 - DNA, 538 bp, Cannabis sativa
ttaaaccaaacataggattactttgaacaccaatcattttcagtccaatccagcccaatcctacataccaaataggccctaagagaataaattttaaaaaatatcgctaactaactgtgaagcaccacttataaatactattaacaatgctcaaaaacttatgtgtaagcgataggttaccaccattcacgattagttccctaatgaattcacgattagttccataatgaatgaactccaaaatgtgtcgtcccattcccacgaatattaatgcagataggcctatttgtcgtagttttcaacgaaaatttaaatcatgcgaagaaactaatttacatatataaatcgaccctcatcttagtatgcctttttccacacgactttgaattttgacaatactattctctccattgcttaaattttatttatctcttaaatgagatgaaattttattgcagcccaaacaaaaggattacaaagatgtcactaatgtgagaggaaatggagaaaattttgttgtatttgttaaaaattattg

SEQ ID NO: 93962 - DNA, 507 bp, Cannabis sativa
atacggtcgccacaagcaaaacacaatatgaatccgagcacgacataaaaaatagctggtctatgggccgtgtgtcaggcctacccttttaaaatattggcacgagatggtacgatccatatttcactatagcacaacatgacacgattcatttttttatttagaaaaaaagataaatataggctgggcgaatttataacactaattgttagtagcatataacagttttttttttttggaaagggttgttggtgacaatttaagtatgcttatgatgtgtttatgtctagtctattttgaatgaagatagtgaattaatatgagttagtgagaaaataaattccagatgaagcccagcttgtaaatattatgttactgtactttattaaataccaacacattatggacttataatcaattaatgtgacatcacatttcttccttaacaaaagagacatcattaataataccatattacgtaaaatcgtgaatttattaacaaattta

SEQ ID NO: 93963 - DNA, 809 bp, Cannabis sativa
aaatttgagtataacacttcattgagttaggaactaccatgtaaatagaatattgtacctttttaatgattacaggagaatttctaatgggatcaacattgttcactggaccattcttctctagattgaattttctaattattttttttattttcagcaggcttaatatagaaaaatagatatgctaccggatgatttccttttgctaagttgggtaaaagatttgcaaatatatgatcagattcctccattaaaatgtacctgtaattgtcacatgaaagatctgtaactattttttcttatttaaaatataaaagatcccaaatgagctttaaaagaaattatatattatatgaacataattttaatttatttccaatagtaaaataaagatctgtaacttacaatagtaaatttatagtatagtgaagatttttcacaaaatggatgtgttgacagattgaccgaatatatctacttaattgagattacatgttctttgactacattgaaaactgtcccattataaagtttataactttcgccactttaaataaataagaggattttatttatctatcttaaggtgtttacagggtatcatttcttggctgcaattgaatttgacagcaactaatttgcagcaggtagtcacttacatcagcaaaagtaaaagggtgccgactgctaggaggagtattttaagggttgttatggctggtttggtgtattatatctggaaagccagaaatgatgtgttatggcatcaaaaattatggcatactaaggtggtcatacagagaatacag

SEQ ID NO: 93964 - DNA, 7218 bp, Cannabis sativa
gtattttccaataagagtaatctctgagtcacgtgacactacaagattcatctcaagtcacgtgacactataagattgatcgggaggctgaaactgacctcaggctcccgacaaatctcacgttgccatatggcaacttactctatatatatattatttttttttcataaaaaggggtcttaaatattaaagaggggtgaggatgtaggagcatggtgtaactgcataaaaatcctttagtcccaacttttaaggaatataggatcatcaccaagggcaagacatgacaaggtcattgagtatatttatatgtttgtgtgtttgttttcatttactttattattgtgtaccattcattttggtcctagcagtaggggtgggtcatattaatgctatcaaactcaggcactctctctactcaacagcttcttttttactctgtcatagatctcatctcagatcacaactatttaaactgtatgcatctttacactttgtttggtagtgattttaatatatagacacatttactaaccaaaagaataaaaacatttataagttgaggagtgctaagtagaagaagctatatattacaacttctaaattccgaatattgtaataatttacagtgccgaaaacagatttaaatttttttaaatgcacatggtaaactgtaatataagaaacactattgtggatactgtaaattattcagaatctttttaaaatttgtaagtataactaacatcgtcgtgaaaaaaaaaaatcaaatatgtattttcgagagattgaaataggagagtaatagtatcactcatcttgtaaattaatttatttcatttcatcccactcatcaaaaaaaaaacagagggagagatcagaagagaagattcttatcacttttgggcatcagtggtttgcagattgtcactttctttgtcctctaatggtttcaatttttctcacgtttaaggaaagtttaaagggaacattggagaagaaaaaaaatcaaaaagacaaatctgtcgaaaatggaaaccatatatttatattagggttggcacgtgagttttatgactctttttttctttactctgtcagtgatgatgcatcatcttctggcccatggtaaatatttttttatttttgggttacaaaacttggcaatggtttggaaaacttagtctaaattagatagtaataaatagtccatataaataatttaccatttaaagagaggtttgaattttgtcacaaaaccctttcatgtctgagaatcattatcattattattaagttattggtgctttagtatttagataattacaaagcaaagctaagtttttcttttacttggattggaataaatattgataaaaaaatttaaaaaaaaaaaaaaatagaaaatggagatgtggctttaaaaggccttaaattctcaagagaggttgtcatgtagtggaaatagtcggcagaaagggacaaaacaataaaggtcttcacatcattttacagggaaaccaaaccccaaaaaactggaaacaaatgggaattacatgacccagttgagagaaatggtcaaaaaaaaaggaacatggcatcaaaaacagcttggacaaataaaaatgatgattattaattattattattattattatgaagaccagaccagaccagaccagtcttattgacttctttgctgctttaaaaagggagttggagctcatttatttcaggaccattattttcacccccaactataaaagcagaggatctttactgaaacataaatgaagatttaatatctcaatcatgttttacaaataaataataatcgaatcaaccacttcctttttccttccatataagtcaagctaatattgtagtatcaaataaagcaaattataaggaacaggtatcaatccccctaataaaacggggaagaagaagaagaagaagaaccattattgcagagtcaagagttgcatcttcatatattgtttttgtatttcataatggaattgaaaataaacaggtcaagctttttctttttgtagccacaacataccatggtccatgtatatcttaaatcattatataatgtattagcatctgatctgatggctttcttgtggtctctctgaatctgaagtacttgtcttgttcacagtagaccctttgacaaaaaaaacaagtgggggaaaacaagacactcaaatgctaatgttcaatttgaagcttgctccgaattcaaatgaaaataaaactatgaaaaaggaagaaaaaaatttaaaaggatagacacgaaaaacacggtcagtgtaaaaggtagagcaccgtgggactaatctttcattttgaaagagaatggagcacaataaacacaacagctctttaaagtggagagctggattcagatttcgcctaacagaactgcaagaatatatcttttctttttctttttttttcatggttattcatgagcaaattggaaggctatatgaggctgctaaaaagtttttgagggttggccatcggttatttgaaattgaaaggatgaccaatataatgattatatgaacacagaaatgaacagagcaagattgtattctaggagttttgtgaaaccatgatgataagtgagatatgaagcctctattagaggacttgcaccaaaagggaaaaaaaatgatgctttggttggagaaatttgaagaaaaaaagaagaatgggaaattgcttagctcgaagtacgaggctctgagctggtactggtgttgccaccagtagaagttccaggattctgtgcaggctgttgaagactcgcgtgagagacaggaccacccttcgaaaatgttgaaccaactgatccactagaactgcttactgatgaagacattcttgctgaagtagagtcctttgtggatactggtgtaagttcaggacgcaagtctgaagatgaggatgatggtgctagcgtaccaactgaggatccaaccgggtagggagctactggcatatcagaaagtgaagaagctgatggactataacttagtgtttccagtgggtggtcgaatttgcatgctggcccaaacttgcatgctccacgttgagcatagtgagagcaaagtggtgcaccctgaatttcgaacaacatatcaattaatcagaataagttatggaaaacaaaatttaaggggaaagggcgatgtcatttaaaagaagaataaaaaatgctgtcgaagaaatttcggcatattgattaaatgatgatgacaacaattgggtgtcttgacaaacctaaaacggacatgcagaaagcaagcacattttgcaggtagaatcaccaacaaatgtgggggactaatgcaagaaaaataataataaaatattgaatattgtagggtagcaacagagaatatagaagactaaaatgttatattcagcttacattgagtgacataatttggtaatcatcttcataattaagacatgctagaagacaagtatgttgggatggtagagacaaagcatgcaaatctttgcatattacagaaataataatgattaaaaaacaaaagcatggaattccttttaataagaatttgttactgaaaaaacaaaaaaaacataaaaaacatgaatccaataaaaggaaaaagatggcaagtaaatgaatatgctacgcatgcaatttcccttcaaggtagtaaccttggttgttgttaaagtcagaaacatcatcaagctttccttctcacacaaggggaaaaagaaagcttatttgaacctactgtgctaggcaccaaaatatgttatcttttcatatgttaaatgaacaattcacacagaaaaagttaccacgttgaaagtatttatattttcctagaatacccctagtttataacatcagcttttcaacttggataacttcgaaaagcttctttctctataattgtaagttgaatttaaaccaaatgacaaggaagcttaccggacgcataggaagaccagcagagctaaggacaacagtagttttgggtgaattaatatctggtggatgatggtatctacaagaagatccaaatttacagtcaccggttctcatataatattggcattccggttgtccaggcctttccggataagaaagttccttctggctactgactgaaggaacagtaggagaagcaacaggctgatatgttccagtatatggaggtgcttggtgagatacttgacttaacccataaacttgtcctgaaccagcagggggttgattgctatgggagggcactgggcttatagatgtctgcaaaccatggttaaacactcaatgaggggaaaaatacacatgaaacttgaaaatgggagttaagaaaggaactttactcaccatgtaagaacccccccaccccggaaaaggtaccatgcctggggatatcaacataggaccgtaagggctttggacatatgagccttgtaccatggaagaccttgcaactacaactccatattgttgtgatgaggaaccagaaggagatgccattgggggatataatgtaggtccatgaaccggtgtagcaggtgcaggtggcacttgagctgctggtgatgggagcggaagtggcataccagcaggatgggggtggtgaaatttacaggacacaccgaacttgcactgtccagtcttcacgtagtaggtacactctttttcaccctattttagttgaaaaaataaaagaaaatcgagaaatgcagagggaaatgaggtaactgatatggaaagctatagaaaagaacagagattaaaaaagaaaaccgtactggccgcaatggatatccatcataatttagtgaaacagggccagaagaacctcctccctgtctaggatgatggtacttacaagaagcaccaaatttgcatgtcccagtcctcatataatactgccatataagagaattatatcagcaaccaaaaaccataaaaacaaaaatccaaacactgttttttcatctctatcaaataagaaaatgtgcattgcctaatcataagaaaaataacaaatggagcttcaaaaatcaagcagaacaatcaaattacctggcatacaggctgcccatgtcgctctgggtactcccctccaccagccctggcaactcctataacctgagcagtgtgtatctttcaaaattgactactcggaagaagaaaacaaaaaaagaagaaagaaaaaaagacacaaatattcattcaaccactagatatccatatagatccctgctaacgcattaagaaatgaagttgaaaaggaaaaccacaaaatcccacgaaaaagaaaagctgaaaacttgcaaaacccacaatcaaatctacatgcaaaaccacaatttctcaactgcaatacaaagatcaaaccaaattgaaccgtcaaaacaaaaatgatcatgacaaaaaccccatcaaaaaactatccattaagcattaagaaaattgatggaaataaataaataccgccgcgcggtctcggggatgattaaaccgacaccttgagccatacccacaatacccagttctcatatagaagatacaattatcctcatcgggtctttctgggtacgattcttcaccaccaatacccaattgccaaacggactctgcaacatttattcgccacaatcaaataataataataataaaaaacaaaaaaaacccatttcgaaactcaaaccaaaaattcacaaaaataaataaataaattgaaagaaaagaaaagagtccacattccggtcaaaaacaaggaatcggaatcgatgaagcgaaattgaaatgcagtagggaaaatgaagctgaccttcgagccctgtttcaggcccggtaccggcccattccggagacggatcggactgtgacccaccttctgctgtattccgaccgtacctctccattgtacggtctttcccgattacacactctctctctctctctctcttcgagtctgcccccaaaaaacaaaagctcacaacacagtcgccaggtggtagagagtgagaagcaaacagagagagaaaatgagtctgattatatctccgattgttctagaatatataaatattgatatatatatatataatacagagcgagaaagagaatagaatgggaatgagaaccaaaccaaaccaaccctatcaaacaaaaactactttgtaaagagagaaagagagaattttactctttcacactcgaaccaaaaaaaaaacccaactccccaaaagcaaaagacgaagaagaagaagaagaagaagaaagcaaagcttagattgcctgcgtttttcttcactctctctctctctctctaaactttctttcactttctctctctatcagttttcaaagcgtgtttgttttttccattacgtaaccctgaaagagagaaagagagtctcctttttttttttcttttttatttattttttcccctcttttaattaattttaattatttaatagcccctaataaaaaacaagtcagttagtttattacgcgccaaataattaattaattaaatctaattactaaaaacgatttatttagaaactaattaaaagaaaaccccaaaaccattttcactaacaggttagcggtgtctgatgtgaaattacacttatgcccttgttcattacaacacgtgacatttaaagttttttttattaaaaaaaaaataagaaaatgaatggaagttggttgaggggtataaaagaaaatacacattaaatagattgccaaaaaaaagttaatgaatgagattaattaaatctttttgaaaaaaaaatgagattaattaaatggcttacggttaaaccatctaaatacaacaaaaattcaactcaactgaaactcaaacttttgttccctccacgtggcactcaatcagactcttcgttacatttttactaaataataaataacattattatttgtcaataaaaaatagtaattaaccttattattttaagtttcgtggtattaaatagatataataataattggtaagcacaaaaatttatgcataataaattatattaaattgaatcataaacttgaagagtattggtatattaaactaaaaaaggaattgcttttagttgtgttaataatatgttttgtattatatttattagattaatgctgtatttctatctcataatttgagagtt

SEQ ID NO: 93965 - DNA, 2321 bp, Cannabis sativa
gagtcagctagagggagtcagagagtgaagcttgtagcaaaatattcaatgaaaatggagaagtacaaaaactgtgccagagatgttttgactccaaaagttgggtatggcttagcagacgagctaaagcgagctgggtttttggtgagggaggtatccgataagtctcgagttgcaggcattgaaatgagggagcatatagttgagatgatggatttgaggaaagcagagtgtgtggtgcttgtttcggatgatttggggtttggtagtgttgttgaggaagctaagatgaggtgttataagactgtggttgtggggaatgttaatgatggaggtttgaaaaggattgcagatagttctttttcatggaaggagattatgatggggaaagctcggaaagaggctgtttctgttgttggaaagtggaaagaccgggatgttttgaaaggactcgagtggaattataagccagagaaggagaagagtgagtttgatgatgatgatgagagtgaggatgatgtggattttgagaaaaggtttgaggatggtgatggtggtagtttgaagaaagatcacagtcgtttttggtgggagatggagtctgataatgatgattccatgacatctcactcttgtaaatgaatgttcaattaagagatcaaactgtgatgttaatttaatgttgaaaaagctctcaatggagacaaactttgcttggtttagaggaatttcgaggttttaattaggacactggattctcaccattgtttctgttactcaaatcgacattctcgcttgtgtctcagtcttccagacattctcgcttctgcttcttttgctggcgccggtgctttccctcaacactctcctatccatgatgttcaagtactccaaaaaccaatgctcctatatatattgtggaacttgaatattgttgtgtacactaagttaggatgctcctaattcaatgttcttggaggtttttattagaacattggattctcacccattgtttgtgttactcaaaccgacattctcgcttctgcttcgtttgctttccccggagggaacgacctcttaccgacgaagttcaagtacccgaatcccttgagatggagtctaatgatgttgattccttgacatcaaactcttgtaaatgaatgttgaattgagctggttttgtacagtattgtcttaaaagatcaaactgtttgggacaaacctttctatagagaaattaccatgtaatttatcaattactttctcaacttatttatgtttaacaaaagataaacttaattacaatctatagaacatagttgtcttattttccacttactttactaaccaatgaaaagtattacaagttccaaacacacaaaaacatactccattttccactgacctacgtggactccacagcagttactcgttaataatccactgcggtcaagcttaccaagctaaacacttacagccgtcgattcgccaatcatttttcacatagcttaatccaacgatcataaaatccgatctcacctagtctcgaccttacacaatcacaaaactacctggtgtgtttgtgcccactggttactatattctgccattaataaacatttattttcacctctgaaatcaaaatagccataaaaaaacttactttatcaaaatggagaatcaagcttcaatcccattataataaaaattctaacttcgaaaaagtttaaggcatagtcttaatcttagccggccaagtaatatattatatggcttcaagtttttgtccttattcgaaacagagttagtgggtttcactcgataaaatcgaaaattttaaggtgataaaaaccataatatggggaaataatcatctggggttgttagaaaaatgagaaagctttgttttttgagttttcttttgggttttctggtgattagtagtattgatgtcgtttgtggtagttatatgaaatacgacactaaaagtgttgtcgttgaagggaaattgaatgttcatttagttcctcattctcatgatgatgtgggttggttgaaaacagttgatcaatactatgttggatccaataacagcattcaggtatgttctgtttaccatttttgttttaagtttttagtttttggttgaattaatgttttgggttttttgttttttagggagcttgtgttgaaaatactcttgactcagttgtgcaatctttgcttcgtgatccaaataggatgtttgtgtttgctgagatggtaaagcttgaaaaatcattatgatgggatattaataatgaacattgtcatttaccaaa

SEQ ID NO: 93966 - DNA, 697 bp, Cannabis sativa
ataacagtccaaatgtagctaaaattgaaaagagtataaacaaaatttattcaaaatagtggggaagggaaataatgtagaaaacttaaattaatagagtgaagagcatgctttgatgactaatgttatattaatcgttggtgagaattaacacatgtgagatatctattttaaaatggattttacgttgaaatcaagctatttatcttgagattcacgtcattgaaaaataagaatatgtaattatatatttagaatgtacatatatggtcatattttattattttttatggggaaagatataatcatattaattaattgctagttgaaattgagtatgtgccacccctcaattattaatggttattttagtgagagttttataataaacttaatgctaaaatatgttaatagtgtttagtattctctcacgtgagaatattattattgatttaattagtattatgtttcagatataataatttttaagaaatatcgctaattaatcacaaaacgatatgtttagagagtactaagcaatattatatctaataacaatgctctaaattaagtaatggcattttatcatggtccaatttcaaatgtttattaaaatcttcaactaaatttcattaatcttcttcttcttctatttttccatctttcttgtatatgagtcaatgattagaaaactttc

SEQ ID NO: 93967 - DNA, 539 bp, Cannabis sativa
gccgtttaagtctaaagcattaatcagacttggaaaggtcgtttttgacgttgatactgatattaatcttttgttggtgtagggttaaagtagtaaaatcctacagtagctatttggatttaaatttcatttcattataaatgacttaatttagatgattctcctttatatttataagtactattttcatagattctactcaatttacttattaatgaggatttatctttttactaatgatcgaaactgaaaataaatgtgacacaaaataaaatacctttctaattcatatttatgtttaggtttcaacaaatagagtttttatattttctctttttaaacaaacaaatagtaaattgagtaatactgtatgtgctcaaatattatacaattggacttgatattccttttcaaaacaatgtatcctatttataaaaagaataattatcttttttaccccctgtacttatgacactatactattatgccccttaatctattcagcttgttataaatagtccttgtataattttatatgc

SEQ ID NO: 93968 - DNA, 1110 bp, Cannabis sativa
tttccctttttttttttattattataataataattaataatagtaataaaaatggttgagggggctgatgggggggttttcataaataggctcgtgagttagctgatgatgatgaagagaaacaggtgattttgttattgggtgagttgggttgggtgcggtgggtgctgttaatgtattttttttatacgatgtggggtgggattggaacccaaagtgagagaatgcccgtgaatttgtgttattacaattatacaaagttcaaaaaagttttaaacccatttgctacttgtatatcgtttggtgtatcatgattttcatttaatattgtaaccttttatctacatatatatgcatgcttttaataaatgcatttaattttatttattttggaattaatagtaacaactctgaaggtgttttaaatttgtattaatattttagttgttttgataatgtgttgaaagaaagctgggtttattggcgtctggtagtcttaattactaattaatttcccttggtgaaatcatggggttgagatttaatgtgggttctcatttggatgtaataaataatgatccaaaaccaaacaaaaagcaatttctagttttataagtagagtaataaattttttaccacgaatatttaatagtttatatagatacatatctatttaaatatagagaattgttgtgcactagtggtgcaacactttttataaatggaattttacaattagttagcaatattgtttaaaagttatttttttttagttatgtggaacttgatatttaattacatcaataactgtatgacacaaaaaatggtattagcagacccaaaagttatagtgaggggaccgtaattttttttgtaaaagcagagggcaaaaataaatttaaaaagaaaaaataaagtgtaattaataggatttgaaattttatcctctaacatattggtaatctactttaaccattacacaaagtttattattatgtctataaatattattttttttaatataaatatatgctgtaactaattaaaatacatatatattttttttcctgattttctttttttagggaacgactgtccactctcgctaca

SEQ ID NO: 93969 - DNA, 583 bp, Cannabis sativa
ttaggtttagaatttgggatttttttttagggatttaggttttttttaatatttgaaaccgggccgggccgggcccgacccgaaataatatataccgggccaggccgggccaaaagcccgagaagagcccgaataattcgggccacaatcggcccgtcgggccgggggcccggcccggcccgcgaaaatagcccagattgacattcctactttatccccatttttttttttgaaagtaatactttataatatgagattacttaatataatgagtatatataaaattaatagttatctaaaatatacataattaatagtagaacaaagcccataattctaatctgaaccatcaaaatctacagaatgattgaaataatacctgttttttataatataatattaaacatatcctccatctgccttacaaccccaaaataattccataaaactttacataaaaatcaaaagactgaatcagtggaacaaaaccaacctctagaagtatccttttgaaaatttatgattttgctactgaaatcggactaaatccgacagaaatacaaatacctgaattcttttgcat

SEQ ID NO: 93970 - DNA, 579 bp, Cannabis sativa
aacaatcttactaattcagaggaaattttaacagccttaaaagtttaaagggtatgatttggtacatataaaagtttaagggttaaaaatcttagtgaagattagaatatctaaagcaaactaagaatataattccccataatttgggtacattttttttgtccaatgaatacattacaaaccttcaattttaaatttgaattgttctttcctactacaaaaagtactatttccatcagtcccattaaattaattttttcgaggaccgtcgctaataaaagtaagtgagtgtttacaaccgttgactaaatttgagtattctcgacagtttaaaacagctaccaaattaaaacggggcacttttaaaagggaatatataggcgacagttataaaatattggctatactatacccgacggtttaaaactatcgactatagtacagccgacattttaaactcgtcgcctatttcttattctcgtgctatatgaaacccaaaaaatctaagatttgatatttaattcattctaatcttggtctctctcattcttctctttctccctcttaggcgaaccagta

SEQ ID NO: 93971 - DNA, 839 bp, Cannabis sativa
agtgccagggtcttcatttattcagatgctaacttggccctccttttagtgagttgtactgcgacgtggcactagttctgtccacgtaagcatgccgtgtcatgaggataaaaattgggataacacaagacaagatctccatacaaggtatgccaaagcatcaagaaatgagtgaagcgagtcgtcaaggagctataccgacatgttgagctagccaagagaagcctataggccaactaaggtgagcttgtatggccagccaggatctgggcacaagctagtcggccaaaaggtgaattttagactaaggaagttttcgttcgaccaagggaatctgacctctacaaggaaaaagtgtacaaatctggcctccacatccaaaggttggcctcctcatggtagggctggcgggaacatgacttgcaggattttggcaggcacatgacttgccagatcctggtagaagcatggccggcaagacctcaacctgcacacatagcatagccgaccaggcctcatcttgcagatgtatggtcgaccaacttctccctggcaagatattgatgcgcaaccttcatttgtcgatagcaagccaagttacaagttgggtcttcacagcccactaagatgctacgaatatatctactttctaagggcaatttggtcatttgtatttattaatttattatgtaaatatctattattttatctgctatttagggtttatgctctcctatgtaaagagccttaactcaaccctaaaggccgaaatcactttaagtctgatttaggccataaagttctaagtcagaaaccctagttctctctctctctctctc

SEQ ID NO: 93972 - DNA, 740 bp, Cannabis sativa
gccgtataataatactcggctggtggcaccaccgtcgatcggactatacgtgtcgtacgtttgatattcacaatcttttccatggaaggctaaatgaaaatcgataaagaaggaagtgataatatagagaaagatgtttgtttgtactgatacaaaggccaaagggttagggacccttatatatagtggtacagagtagagatagagagggaaaaacatagctattctttaccacggattctaaaggaaatttctctatatatattacaattacactacatttttttttttttttgactaaaattggccggtacaacaaaatttgaaactaaaactaaaaaaaaattactaaaataaaaaaaaaaattgtgactgaaaaaatatcattagaggagaaaaaaaaattagaagcttctttatcacggattttaaaggaataatttccatatattatttcataattaatctaaattatatttttaaatacatattatggagctacaataatcataagcgaaatgcatggtaggttgatcactagctaattaaaagataaatttatgttttgaattcaaatggggcagataagggcacagaccaatcaatagttcaagtcacacactcttataatctcaaagaattcactagcacttccgcgcaacaagtgtaaatgaaataattaagagataatttcggaaaaaaaaaacaaaaataacaacaacaaaaattacaaaaatacg

SEQ ID NO: 93973 - DNA, 878 bp, Cannabis sativa
aatgtttaaaattctgtgaaaccgtatttttattgtttttttgttgtttttgtgcatttgtgaaattaactctattatttaaccaatcaaactctaaaaaaaaccatataaaacattaaaaaaaatctgaatttaagattcataaaaattaaaaacataattaaattaccataaaaaatattaaaattcccttcatatttattttttttaaaaaataaactatggtgttcgccgagttgtcactcgtgctgaaaaaatcaccggagtttgctgtcggcatcggaaaagttgtcagaattagcattgtcgcttgaaaaatcaccaagaaacttgtttcttgataaagaaaccggtttcttggtgattttccggtaattttaccggtgacaatgccaatttcgacaactattttggagtttgatgtcggtgtcgaaaaaattgacggagtggttaccgatgttggaaaaattgccagagttattgcggacgtcaaaaaattcgtcagaatttgtattgtcgccagcaaaatcactagaaaaatcaccaagaaaatagtttttcatcaagaaactggtttttttcaccaaaaaagtagtttcttcatcaatgaactaattttgttacacaacaataataaagattatgaaaacaaaacaaaaatcatatatactgaaaataattgaaaccagtttcatcaataaccaaatagagaaaaaaaaaacacaaaaaaaattaccaagaaactggtttcttcattaagaaattggtttcttgatgaagaaaagaaattaggttcttggtgatatttccggtaatttttcaggcgaaaatgccaattccgatgaatttcccagagtttactgtcggtactaagctgc

SEQ ID NO: 93974 - DNA, 661 bp, Cannabis sativa
tttactcagagtttacaaggcagtgaaaatactaggtggcctttggcctctaaatacctaggacagatcagcaagttagttaaaaagtttgttacactttttcactaacccttttctctgtattccactactacaacagatataaaaagcaaaaataatctcaatcacagaacagaagtaattttctgggctgggttattgatgttcttcatgttcttcatagaagaacagtgaagaaaggaggctctgctagggtttcttaattggggctgcgtgtgtgtttgtaagaaaaaaaagatatatatatgtctgattttttcttagggctgctggtttataaaacgacttgtaactttggtgaataaagctgtcattttggttcattcacagggagtcaaaaaaggaggctttgactgtggaatggtcagatttgacctcagttttctttgtttcctttgctgtgtgtagagattgtttaggaataaaaattcctaaagtggtatcagagccaaacaaggcacaatctgcagcaaagattaataaaaaaaagcatgaaagcataaagaaatcatcaagattcacattcataccagcaagaattcaaaaacacaaaaccaagattgcaaagaacaacaccaggatttttctaaactcattatct

SEQ ID NO: 93975 - DNA, 505 bp, Cannabis sativa
  modified_base (64)..(76): a, c, t, g, unknown or other
atatgtgtttatttcatcattttcgaaagttcatatttagggttttaatcaacatacttgtgannnnnnnnnnnnncctggtaaaataatttccagcactgcccccctccgttcacattggagctcaggaggaggacacaaaagattcttcaactacctcttgctgcgcatctccttcctgacttctgaggccaattttgttaagtataaactttttccagctgattttgtaccaaggctgtgaagaaggcaaaaaagacagagcccgagcaagagactgcacccaaataggagactccaagcaaaaagaggaagaaggcccctccaagcagccatgcaccacttaaacgatctatcaaaatcagagaggagcctgaaagaccttttcggcaattcgccctaatggagggaaagggtaaagtcgttctgacggagcaggaacaagaagactcttcagatgatgagcctctatccgtgctcgtttggaagaatgctcctgcctacg

SEQ ID NO: 93976 - DNA, 575 bp, Cannabis sativa
tcttttgagaaaggttgttgaggtgtattttttttcttagaaattgatagtcactattttttaaaaagaaattaatagtcactaataatatacacaatttttttatttgaactttcaatatgtaattatattaaaatcaattattactatacaattttttaattaattagtttttaaatagattaattaattaacattattcataatctacgattaaaaattaaaattgccacaaaatagagagattagagaaagaagaatataccgctacctctttgattattatttttattattttattttttttgagaattattatcatattattgttgcatttatttttaaataattatgataagttaaatgatcatgtaacttcactttttacttaaataaagtattaatattattttttatcaaaaaaaaattgttattattttaggataaatcaattatttacatattatttataatgtgaaattaaatattaaaattaccataaattatgaaaaataagatgttagaaaataaagtatcatctcacctctctatatattattgataactctatgaaa

SEQ ID NO: 93977 - DNA, 513 bp, Cannabis sativa
aaaaaaaaaaaaaatggcaataaagcatcatctctaatctctaatagacttaaattagtaatgagacttttttttttaaaaaaaattgtcccaatatgagtgaggttgtatttgagattttaaattactatgtataatttgagtcaattatgttttatagtatgataaaaatatgtataagtatttttcactactttgattccatcttatattattactttttttttttttttttgcaaattctttaaatatgtgaaattttcaattgttataaaaaatggggagtattattttctagtttaaaaataatgtaattacataataatttcttttttacttcttcggtttatggtttttatgacaagtataatgtaaatatccttaaaaatttgtttgtttcatttttgtttttctttctttctttgtttctttttttttggttgaatgagttacaatattaattaaacaaacacatctaacttaaaaattccattttatatattacctaataat

SEQ ID NO: 93978 - DNA, 936 bp, Cannabis sativa
ataaaatgatttctgatctttattatttagtaaatctgattatattgaactgggttttatttagggcacaaaacccaacatgaactgggtcggaaaaaggaaaaaataatctgcaacccttttaaagtacaagtgcaaaggcaccatcgccccttgcttagtgtgagcacctgaccaagcacaaaaccctttctgtgggtttgttgcccagtgattcgaagaagggacgtaacactctagttcgcccaagtacccagccttatccaaggccctcatacttgcctcacttattttagatggagggctcacccatctggcaccgaaggcactttgcctcctgcggggaactacttcagtaagctcctcggtgacatagtcttcccccttgaccaagacgtcaccctctgcggacactggctccccgacctcgttataccctccaaaatttagtggttcggccactccttcctcctctgctttggaagggctatcaggacggacatcgtcctgttcttctatctactggacctcaatgtccccctcgtgatcctcctccatggcgggcagatcctgctcggtacttgtcaacatggcaagttgggctacgtgaggatcagacgcatcaattttttgcatattctattttttgcaggccatcatccttctcttggacggatactgatgtgtgtgccatgcaaccgtaacgacagggacaactgttgggataccgagttactagaacttggacagccatcaggaagggtatcaacaacacctggtcggacaatatatgtcccgttggaaagaagatagtgtctccaacccttcctcaattctgaaatgaagcggccgtacccttctcctgcgatctgctcggagtaagagtgatgttgcactacgggttctggagtaggagagcgatcactactcacttcc

SEQ ID NO: 93979 - DNA, 846 bp, Cannabis sativa
ggtgcaggtaaaggcaaagaaaagttagattaactatgaggtgacagtcttctccacaatgtacatattggcctcaccggcttgcgtgtcgagttgccaggagttgttttaggctggctgtatctgctgtgtactttgtgtttaaatggttgttgcttatatttctttagcaaaactttttataacagggattctcagaacacgcttttttatgccgttataatatctgtttttagtgttttattttagttaagttttaaatattatcacggtttttaacaattaattaatctattagtattaaactagtttataaaaatcggtgtccctatagattagggcgttacactaaggggaagtattaaacgagatatcaaagtatcttgaaaaaatgcttaaacctaacacgtgggtagaagatttaactactcatgtaagcaataaagatatatacaaaatcacaagttcattaaaaatatatttgagattgcttgaaataagatcatttttgataatcgcgaggcggaatcaatgattgcttgcaaatcgagggccgggcagataagctgctcgcgcataaagtaggttattaactacttagcatcagaggaaaatacgagcaatagaaattcctaataaactttatgcatgtgattatttaaattgtgaatgaaacgcaagcaaacatccacatattaaagtttaaacttaaaagtatgaggcattaaaagtaaagttggccatctaacttcaaaaatctgtctttacaagaaaaagtaccactagaggcaaaccattgtcttggccaaaaggccattatctaaaaaaaaaagaaaagggagataa

SEQ ID NO: 93980 - DNA, 719 bp, Cannabis sativa
atgaagagtctagtctacatgcaaccaactttagaagtcccgtacagacttggggggcaaatgttatccaaatgtttgcactctggtgtggcatcgcacgatggtgacacgtggaatcaactctatgtacatgctcgcaagaagtgtgccgaatagcacaccacatacattcactcggacgaagtcctcttactcgggcagtgagcaatcaatgcagcacactaacacttagcaaattaaacttttgcatcgtgactcactgaagaaatccctataactttgggatctgatcacagagatatggcaagctatcctaatccaacgatttgtgtattctgtatttactatgtaatctttctacttatatcaactgcaaccagaagggaaatacttccctcccaagcttatagccctataaatagtgattcatattcactgggaaaagggtcgaaaaacttgtctaagaattcacattcagagatactattgttagagctctaagaaaagggaaacatttaccttattcttaagttaatacaagctacgaggattaggctattacagaactgctcggggctgaacctctaaaaaatacttctgtctttatttcctttgttattgttgacctcgcttttagccaacgacagtgagtctaattttataagcgacaagtagttcaatacgattgaaatattataaagtaaataaagacacaagaa

SEQ ID NO: 93981 - DNA, 818 bp, Cannabis sativa
caatgtctcacagaattaacatggtatcagagcgggactttcctccattgacggcgaatatggcgacgatcggagcccaaccttcgcagaacaacaggagtgctaatctaccagcgaatcgaactagtgacagttcttctccagtctcattcaatcacactctctcgatacgcctcaatgaccataacttcttgctgtggaaacaacaagttttggctgcaatcaagggtaacagacttcaaagattcatcttcgaacctccaccagctcaatttctcagtgatgaagatcgtgcgcaatcgaatactagccaagcttacagtgactgggaggttcaagatcagctcctagtttcttggcttctctcctccatgacagagagccttcttacaaggatggtgggttgtaacacaactcaacagatctggaataccctagagaaacactttgcccttcaagtctcttccaagattcttgaattcagaaccaagctacagcagatcaagaaagggagaatgtcattgaatgagtaccttcttaaagtcaaacagatggtggaccttcttgcttcggttggtgaaaaactcagtgcacgggatcacattgcagccatattcaaaggcctccctagtgattatgacaccttcgttatttcctcaaacactaggattgaagaatattcagttgcagaaattgaagctttactactctcatccgaatcaagaatcgaaaagagggacactgaagttgatctaagcgcacacatggctgttcaagatttggatgttaatgctcaaatggaagccaatgttgcctac

SEQ ID NO: 93982 - DNA, 627 bp, Cannabis sativa
tgctgatctttctacatgtaattaattacatattaacccacttctctattctcattaattaattatttttattatatatttaatatttttttaataaaattataccaaatataatatttattcttaatcaacaaatttttcatttttgcagtgaacattgtaactttggcattggcaaatttagttgggggattatttatcattgctcataacgtaagtaatcacaaagatatgtaaaagaaaaaaaaaattgtgtattttttttttttaatatttgtttgaattgtgagcttagcccactttagcttataactctcatcatcctcatcttcattactaaaattctttcattgcttccatgaaaaatatgacatagtttatttaatactaggaaaagaacataacatcacataatttgtgtatgcatatatatatattttctaacaattaacgcatatttatataatatattatttttctttaattttttacatttttacgtttattttttttatatattttgtttattttttttatatatttttacaatgttctataaaaattacacaaaaataacataaaaataataagaaaataacacaaaaaatcaagaataaattaacaaga

SEQ ID NO: 93983 - DNA, 1815 bp, Cannabis sativa
ggatgtctcatccaacatccgatcgaatttttaaaatttgcatctgatccgatccaattatgattggatatctgattctattggatcggatgactttctgcacacccctaataaatagatcgatccagtgatataacactttcctatattcacttaatatatatagaaaagtaatttagtgattaaactaaatatataatcatcataattacatttattttgaatagttagattattataaaatggttacatttaacttataaattaattaaaaataattaataaattacttgtaatttcgtaacttatattattttatttccttataaatttttttgataaaaaataaaaatatttataaatattaaaattaccttattaagtatttttaatttaaaatataattttttaaatgtatagttaattataattactttaagtttaaaaataaaatttgtacctgttaattacttgttataacggttataaaataatataaccatcatagttacatttttaatataattataaaatagttactcatatatatatatattaattgaataattatatactaaaataaaatagtaaaaaaaaatcacacacataatttttatctccaataaatttaaagaaatgacttaaagtgatcatttaagttttatttaaaatagatataaattttattttataacaattaagtcctcatagactaaaattaatggattcgtctaatataaacaataaatttgtaaaaatataagatttttactatttttgtatttttataaaataatcctttttttgtatccattttttttacagtgttaggctgaattggattccatttattggagaacattgtcctacgtaaattaaatataaaagtattaagccatatataagaacatgaactactccactcatcaccaattggttttaagatggaaccccatgattctcatcatggtatcagagccatatccctaacgagctttcgatccacgcctatccattagttagctagccgcatgagatccagatggtgcaaagacgcactacaagaaatgtcacttttactagcacagttcgctactgtgctagtaaaaaaaacttttacaagcacatttcacaaacctgcgctgacaaaaaggtcaaagttttaccagcatacatttgcagtggctgctaaaatctattttttaccagcgcattaatttcacgctgtgaaaagtcatttttgccagcactttttattttgtactagcaaaagttctaataccaacattgatttgccaaccccttttgccaacacatcaaaagtaaattttattttaccagcgcaataccaaacttttgccagcacaataatgtgctggcaaaagtaacatttcttgtagtgacgcttgagattcgaacaaaaaataagcgaacaaatgatgatttgtgataaggtgattcaagattcgtgagcaaaaataactaccatcatgagagagaatattggataacattgtctcacatgaattaaatgtaaaagtattgagtcatatataagaaacatgggctactccactcaccaattaattttaagataaaaccccataattctcatcacggttccttgttcaaacaccattgggtgagtgagtgtgtgtgtggatgtaccttattagttgcatgagcatgaggttagagtgtggcttgagttgttctcctcatgtatagaatgtgttcccatgagttaagctcacgtgcgggccctcctctcctagtggacactcaaagcacccacaacctttcatcaatttgcaa

SEQ ID NO: 93984 - DNA, 1510 bp, Cannabis sativa
agcaacaaaaagaaaaaagcccttctctaactagcacatatgtgttcacattagtagtcactcaaactaaacagtttaggcacgtttgaatttgtttcaagaatgttaacccaattcacagaacaggcaaacatcatgacaattttaattcatgatcgaaagataccattctacggtaaggatggtccatgtcatttgtgccttcattgttgtggtatcctaaaagccaccaaaaggcagaaccaacaaactcggcagcaatgtgttcccccttaagcaatcaactaaatttaccgatttccatcttcttcttgattgccttctggccatggtaaataaaggaatctaggattcccgaaacggtgaaaacacctgaacacaacagccaaccaagcattgcccgttgtttgagttaaataagaagaaaatttaagagcatgtgcattagtgccaccaaatttagataccacagaaaatacagcaaaaagccacaatcaatttataaaattagctttcccaagaatgcaacaaagttaataaactgcagaaactacaggggttcccatagggatatcaaggtattgaaaagttatatttttccgcaaaatagttaagcttaaaataagttgaaatgaagttcgccaatctatactttgtagatgtgtgtgtataatctaaactgtccagtgaaaataattgattaaattggcaactaagagagctgttcctatttaagagggtgagtagggggagtttaggaattacctccaactatagcacacacattagtgaggaagtgtaagaatgatatatgctcctcagcaaaagttacctaaaacatgcaaatcaggtaagatagaccataaagaaatatccacatcccaaacaatgaggaaattcatcagaaaatagaaatgggccaaaaaccatcatatgattttaaattaatcatcttaaaacataagtagacaaaccttgattggagaaaggtcataaaagaaaaatacaccaggaagaaactgaagattcccaaattctgaagtcctaaaatgctcagttacagaaaactgcaatatgcaattggctaaagtcatgctccatgtttcataaatgaaataaaccagatagtaaatatatgcatacataaagagataaccacctgattagactgaatagcatgtccagtcacgtctgtgtaaacagtaggtaccacctaaaacataaacagcaacccttgatctgagagctaatagatttcccttatatcgtctagtattaggtatcaatttgtgcgtgtgttttcaaagaatgaatccaaaggacttaccttgataaaatactgatacatcccactaggtgtggcctgcgaccattgcacactaaagataaaaaggacagtgaagaagcattatgtcaagtacactaactgtaagtagcagaagtaaaagaatttgaactcccaatagaacgaatggctaactagactatgaaggaaaatttaaatatatat

SEQ ID NO: 93985 - DNA, 615 bp, Cannabis sativa
cctaggaattttcgaatctgtacctataaaatcgtgcgtagtaagtgtgattttccttttataggaaaggaaagtcttccttcaaatttttcacaagaaatctgatcaaacatattaggaaactcacacaagattagattagcataactagatagatagaaataggatgagtaatccaacttatcctgtatgtcttattttcaataaatagaaaaactaaacaactttcattccatataaaaatcaattaatacaaaaatatgaaattcaaatacacacctcagccgaattaaataaatatattataaaatattttttttcaaatgaaagatgccaaaagtggaattaacattctccccctttagcactttaattgaaaaaatattttattagaagaaaacctacatcaagtgttagaagcaaaaacaatagagtatagaaaatactccccctgcatgaaagcatactaacacataaaatatataactgtttaaatgaaaaagttcacaaatcataaacaaaacaattctccctaaaaaaaaaggattcagagttgtaaccaacaatccaaaaaacaaatactactccacttttttatctatcaaggagccaaag

SEQ ID NO: 93986 - DNA, 848 bp, Cannabis sativa
aatatatattaacaaaagttattagaccatatatatttagtaaaatgtatataaagacgtaaacctaactatataatagttatatatattaaactaaaatcatttatgcatgctggccaaatcgtctccattcacctcatgcataacgcttgtgcatgtatatatttacatatatatataatatatatatatatataacaaaataaaccttttattattttttgtgtccaagaaaaataaaaagtaaattatatatatataacattgcttttggacaatagtgatagttcctaacactttttataagtggcaccttagaattagttaatgatatttttaaaaaattattttcttatatgaaattcaatagatgattagaccaataacaatataacaccgaaaaattaaaactttaggcacgaataattttttttaacatttctcatatatatatagataattatatggtagtgactattttttcctatactatacttacactttttaaccattgatttatataacttttaaaagtcaaaattgtgtaagatgtatttgtttgtaggttattaattttttttttttaaaaaaaaaatctcacacccaattgaaaaagtgagaattaaaagtattttttgataagacactagtctactgtaaaatgcattggaatcataaaagtgcatttctatttggccaaatgtttgccaaaaaaagatatctattaaataaatgccaaaaagaattgtaaaataaaaatagtataataggaagttaatttttttttttttttcataaaatgaatttcttttttcttgaaattgtgctattactatattataaaaaaa

SEQ ID NO: 93987 - DNA, 1084 bp, Cannabis sativa
tttaatactataattaaaaacattaaaaagttagtaaaacccttggtagaaatcgatggtggatatgattgagacaaagtctgaaatttatcattacaaataaccttttaaaacaacaatttcagttgaaaagtttaattaatatgagatttataataatttttttataacatatattttattaatcctgaaaaatgtaacaaatatagtaataataacaacaataacaaattacgagagtaaaaggataatattattagtgctgaaaaatctatccaacacctaaatattttaataaagtagttacatagattatcactatctcctttaaaaatactcccatatccaaaaccatttctaatcgttttcataattatggggttattaagatttttattatttttattacaattttgttactgttttgataataataatcattatggtgtggaaggttctcataagataattccagaatatcaatctctggatattgacaaattcaattctattcacagaactggatttcatttccaacaccagaagcattggatcaatggtattactacatctatatatttaacatattttgaatcataataattaactcaatgaaacaaaaattaatctatattactattaactcttttttacataatactataatactaatattacatagcattagcaaaatgtttgaatttttattaattaatatcaaatgggttttatttagggcacaaagccctacagaatcacccaatacttttaatactataattaaaaatattaaaaagttagtgaaacccttggtagaaatcgatagtggagatgattgagacaaagtctgaaattcatcattacaaaataataataaccttaaaaaacaacaatttccgttgaaaagttttattaatatgagatttataataatttttttataacatatattttattaattctgaaaaatataacaaacatagtaataataacaataataacaaattacgagagtaaaaggataatattattagtgctgaaaaatatatcaaccacccacatattttaataaagtagttacata

SEQ ID NO: 93988 - DNA, 1707 bp, Cannabis sativa
agggggcatttagtagtatatatatatatcaaagtcaaagttcgagggaaaaattgctaattagccaataaattatattctaattgacaagttacaagtaaataaatttactaaaaaaattaaaatactaaaaatatcaatctatatataaaagatctatatatctttatatattaaaattggctatgtaacaacaatttttggtttaacgttttgcttttattctgttaattttaacagaatctaacccctccgttaacttgtgccattcaatttaaaatgcactgtagattcctctttcttctccctcaaactcaaaatcaaaaccattttatgcgatattcttaatcctcatttattgcgattcttttttattttttccaaaactcatattgttgttgcgattttttttctcttccaaaccaatattgcgaacaaaaaattcagtcatcttcttctaaccctaccaatagctgcaaaggagggaatgccggtgaaaaccagagtcgatgatccctctaaagattgacccttatcaacaatttcaagagattttgccatttctagaaattggtaagtttttttcacttccttttaccattaatattttctctgagttgaacttagcaatcctttattttatgagtaccctagaaaattctcactttcagataataattgaaacttaatttgcaaaattctaattcagattgaattgagaaatgtcagccaaacaataaagaagagatcagttaccaactacaaattcattccctctttgcagaaccctatggtacatatatataagcaatttttcatgtttgtggtttctttttggtagatatggctgagaatcattaaatccatatctcctaatgtgccaatcttcttttactccttcttcattaagctttgatctctttcgatgatggggtcttctttttcacatctggtttaagtactaagaatgaagatggatacgatttgaaatcttctaatggatacgacttagtatccttgaagtaatgttctaatgttggcatgtgtttcctatatactgattatcctaactttatatatgttaatactggatttttcaaacggtttgttcttcagagaggtcaatgaccacttcagctggtgccttctctctggacggggtctcaccgcctttggatttcttggccggaggggacaagctcgagcttccccccactctcttctttaaagcctcaatcattttctaagacatttctggatgaaataaaaataacatagtcagaaaaaagcataagaaatatgaaggcatgataatcaagaaggttaaatgcaagatggagtgctctgctggcaagagtattttcccgaacaagcacggatggggcatcgtcatccgacgaatcttcctgctcctccaggacggctttcccctttccttctacaagggtggatggctgagcaggtagaccaggctctttaatctggattgtatgttcgatgggcctttgcctggtcgggagggattgtacgcgagctgtgcctgctgtagagggatgtgcgagatggggaggcgtgacagggggagtgagttgtgcctgctgtagagggacgtgtgagacagatggagaggtgtgataggaaggagaggtgtgtgggggctcgcatgcgagcccatgggggctcacacgcaagccgtgtgtgctggag

SEQ ID NO: 93989 - DNA, 4207 bp, Cannabis sativa
  modified_base (3937)..(3955): a, c, t, g, unknown or other
tatatatgtatacaaaaactcgctttcaaagctgggctggaaaagtccccatctgaaatgcaatagggaaaacaacattgacttggggttgtgttggatttggatttggactccattgttttgacatatatagatggctgcagtatataattagcttgagtaaggctcttaaatagtgagaccccctttggtgtgtgaatgaggcaaccttccatgcttgactgcttaacccttatggcccccccaatttgatcgagagaggaacgtacgtacaagacaaaatttgatctggtttgaaaatgaaaccaagtatatgtattattatttaattaatttcaacactgaatgagctagctagagactacttatataaatatataaatatatatatatatatttccatatatgccttaatttggctatatctatctattgtcctcgtgtcttaaatgacttgaaacaacttcattatccgactttgtctacactaaattggaccggcccctcttttcttctcttcctgtatatctagctagctatactccattaattaatataattatatatgtacatacgctaaagaatataggcctaatatttttgtgtgttaataaacatgtctcgtttacattatatgcatggatattctctatttagtaagctatagctagatacgtagcttatatagctagtcatggtcataaatttatataaagtaagccataattatatgcatgaatgtatatatttggcctaatttgtctttcttagactataattcagggggagcaagcaattaaatttatgatacataatgatgatatataatcagaattaattacatgcataatgtagtattaattttgatgacatgcatgcatgcatgtatgtatctcaactttggtatatatatacatttgcgcgtagtacgaaacttttgttacagaagacacagagctatattgccttttacaaccctagagccaatggacatgtcaatacatgaggataactcttactagttttacacattcattcaattgcatctctagaagaaaaccatttggataaggactagagtttggtcaagaaatgtatctgtttcgttatttatggaaataattatccactatttcaatatttcaatattacatctccaatcaaattatatatatatagctatatataataaattataaaatatatataatacatatttttcttttctgtaaaagcaaaagaatgcatctataattatcctaagcttttgacttattagagcatttatccacgtacgtaccgacccattataacgtttgaaaattcaaattatctacacagcctccttcccctagctttcaaagaataataattaatgagaagtataaactacggagacaaagtattcttttcttttcttttttcatttttccccttaaagccgtaatattcaccaaacttaacatcaaaggttggactcttgaaatagtcgacattattattatcattattaattatattattcatcgtcttaagtcaatggtaacgctatatacataggaaaacttacaaaaaatactagaattttaattaatttttacaaaaatgttattacactaaaatcttttctgaaacactgaaacacaaaacagaacatgctaaaaagaacagtgaaaatttaatacagtacatagtataaaatttacacaataaatattttaaaaaaaaaaaattcaatccaacaatataaaagtaaaaaaataaaaaatttcaatatgtgctctaattattcttatacaaactatatatatagctaattagccgtgaaagatttctttctaacaagatgaaaaagaaaattaattatatatgtataatactatatagagaatgaaatgtatttacaaagaaaaaaaaaatcagagataaatctaattatttgtggagaaggagatagctgtctggaatttaagggtgttttgtaacattgtttgtataaattggaactgggttaggtatatatgcatgatatatataaataaataaatatatagagagagttatgcgcgtgcgttgactagaatattaatctagctatgtatattatagaacacaaacaaacaaacaaaaaaaggtgaagaaaataaatataaataggattattcatgaaaaataaattgtatgtgatgataataaaacataaataagaatagaggaagaggaagaggaagaggaggggcctatggtatttaagaaaaggaaacaaatggtccatggcagtgtctgcagtaagaagagattgaaagaatggactaacgtgagggtcatgttagttgtcaccccaaaggaccaattagactgatatggtccctaaagctatttgattaattggcatggttggggggcacttaaacgaggctttcacatgccttaataacccttcttctactacaaaccacgtgccccctctcctctattatttaaaatccttttttttcctcttaattaattaccttcctcttcctactcatttaatatccaataatagttttgcggttataaatatatatataattcttcactatatcaagacacaagaccaccatcttgcatgtgtactcaagcctctaacgaaacatatttataatatatatatatctatacatacatatatgatcaggctttgaccttaccggcccactagtatttaattataagtagggtacatcgaattaattggtttttcattttttattattttatcaatattattctagttttgtacactaataaaataagaaccaagagtttgtgacaacatatatttaggtagctcaaacttctcagtttttaactagtttagagaaaatttctgccacttatttatgtaagaaaaaataatccttgatcagtctaatcagatatatttgagagtttggtagaattatttgggtgtaattttaaaaactgaagaatatttgtttcttataatatataccatacgtacgtaattgagacaattgagagctgtgaatgaaattataagatattggtctataataaacatttaacaaatttagccaggcaaccaacagttggaaaaataaaaaattcaacttaaaattccttgagttaattttatggccactaatatatctattatttgggtgtacatagcaaaatgagtagagattatatatatgtgaagaatgaccaaatatgtgtgtcttcatatgtggttgcacaactgtgttatatgtacatagtgtgtcataaattacatcaatcagatggttgtaacccaggattaggaactccgttaacaataatggtccatttcgtagcatatatagtttggataatatagctatatatataatataagccataaacaattaattcgacagcaccaatcatgtattcatccatgcctaccgatattaatattatatctgtctactcttcatctttatgaggtcactttctattgaaattacgttacctacatcataaattataaaaagaaaattatatattttaaaaattatacctcagattattcaaaatatatatatatataaatatatatatcagtttattttgtaaattttgctcttattttaacattaatattaattattaagtatatatatatattttgtaatactaatttaaggcaccgtctaatttgggttttaaactgtctattattattattattattattattgttattgttgttgttattattattagggaaattattttatataatatttttaatttttttttcaattacggttcggattgtttcggtgtggttgcttgggtagtttttatatggattgctatgtgaattttggttacgatttagtaggttgctacgttggtagttacgtgtgttcctatatggatttttgtaaaaatgcaaaaaaannnnnnnnnnnnnnnnnnntaaagtataaaaataaaaaattcccatattattattattgttgttgttgttgttattattaggggaatgactttatataatatttttttaaaacttttttttcaattacgatttggattgttcaagtgtggttgctttggtagtttttatgtgaattgctatatggattttagttgcgatttaatgggttgctctgttggttgctacgtgtgtttctatgtagatttcggaaaaaatacaaaaaaaaaaaaa

SEQ ID NO: 93990 - DNA, 816 bp, Cannabis sativa
agctttccataaaaagattctgaccttagaaggaatatttagcttccaaaaatgtttccatacctgagtcgaaagagatgaaacagagggagcttcttggtctgcgatcttggaagctaatatataacctgacttgacagtgtagaacccagttgtttcatgatgccaaatgattttatcatcgtgagagaaagtggacaaaggaacactaagaatcttgtcaatatcaatatctagaaaatttgatttgagactcggcatatgccactgtcgatcaccatcaatcagctcactaacagtaagattaaaatctgaccctttaaaaaacaatggcttgaatgatgtatggctaggcagccacggatctgtcgcacatttaatctgcaatccagttcctaccttccacctaagaccatgttgaagaagctctttaccccatacaattcctctccatgtcatagaaggataagacccatgtcctgcatctaagaaagttccatctttgaagtatcgctgctttaacaatcgactaaaaagagaggaaggattatcaaggattcgccatgcttgttttgcaagtagagcttgattatagtggacgaagcttttaaatcccatacccccttcacctttagatttgcaaagagcattccatgttttccaatgtattcccgatccatttgcattagatccccacaagaatttgttcatcattttctcgatttggtcaattaattttttagaaagccgaaaacaactcatggcgtatgtaggaatggactgagcaacagctttgagtagaacttccttgcctcc

SEQ ID NO: 93991 - DNA, 1299 bp, Cannabis sativa
  modified_base (1245)..(1251): a, c, t, g, unknown or other
agaattaaattatgtatatttgtccaatgatgatgtggtggtcttcgggatctgtagctacattatgtggagggtctcattcacaagacttagtctgaatagtcgaatgagatataatatctataagagttatagaacatacgatacttacttttagtacaagtgggagattattgggatttatgcccaagtaattaacggataatatattatagaaatatgaaagacaactataagataaatgaatacattaattatagaagtataattaataaatatctaaaaatttcatatggagaaggtataatcttgtaaggatgtacaagagaattaagattatacaatatgaataaaactagttggtagtgtattcaagtaaatgaatctttaatatagaactactaagtacggtttacgatacactatactctggtgattttgcttcgaatcgcatatgtggatagacatgtagtaaatgtgttgtgtataatttgattatgcatgactagaccgatatgtaataacatctttcgttaacatgttgttgagttattcatatcacaacgatgatcattagtagaccagtctaaatcctgagtatacatgaactcctatttgtgttcattaagttctttgattctctcattaaagtttcttagaaaagatgattcttacaacttctattttatgagcttaataacatgagtggctagaaacatgttatacaataatagaatccaagctttccaaaaggatcaaatattagttttcttatagtgttaattatgtgagtactaacatgtacaatactatacatgaaagatttgatttgatgaggaaatttgagtgagaattaatttctatgagaaataaatttttcaaggacaaatagcaatttgtgaatttattatttttaataattgtaataattatgaattgtatttaactatttagttttatttgataaaattatattaattagttaaatataatattattcttaaataataataaagagctaaatatattattttagtaaaaataatatttattttaatccaagcaaaataagagattaatgagaattaatcaattattatttattgaaaaaataaataataaatcttatttgtggtaaaattgaaaaatcaatttcgaactttaaaatatgacacacacgtgtataatgaaatataaagatccatgataattttgtttgattattttattattaaaataaatcannnnnnnttaattaattatcttttaattattgaattaaatatattattagataat

SEQ ID NO: 93992 - DNA, 596 bp, Cannabis sativa
ttgaccatgacagaggtcaaggcagcactcaactcaaaggaaatgcagaagaaaaatgatgagagaactgatggtattgcagacagtttatttgtgaaatccagaagtaatgcaagagatttcaggggtggatataacaagaaaaatcataagaacaatcagaataaggggcacaatcaagggtacaaaactaaagcaaagtccaagcaaggaaatcagtgttactattgcaaaaaggaaggacatttcagagatgaatgtagagcactcaaggcaaaattggagagagaaaagggacaagaaagaggtgctgcaggcattgttcttgatggttatgagtctgcagaagctttggttgtgacaagtcaagaatctggttgtgaatggattcttgactctgggtgctcatttcacatgacaccaaggagggaactgtttagtgacttcaaaaagattgagggtggatcagttctgctaggagacaataaagattgtaagatttcaagaatgggaagtgtattgatcaaaatgaatgatggtcagatcaaactcatacaagaagttaggtatgtccctgaacttaagagaaatttact

SEQ ID NO: 93993 - DNA, 834 bp, Cannabis sativa
tttaactattgacacactttttattaaatgagctataattaatttttcactacttatttgcagagatgctcttaagttgtatgctcttataaaactatactttttttatataattaatttattatcaataaaaaagtagatatcacttttatcaaccaattgctttgtttacatgattaattgatatttataaaaatgtttatttttgaatgaaagatcaaacttccaaatagaagataacaaatcaaagggaaaatcaccctcataaaaatatcaacacaacattgacattgcctagctagataatgagcgatccgattgatagaccatttaacaaaaatataaagacacaatactttaaaaacttaataacaactgacaatcatgaacaataaaaccaaaactagagaacaaataaaaattactcctaatatatagcttgaacagctaaaagactatcaatttccaaaataatcttcatgaatgattgagttttcagccaacccagcacctccttaattcaaagggcctcgaccaccattggtttaatgtaatgtcctggctagcttcaagcctccattgtatcttcccccacgaatttatggctcttatatacatgagtacatcactctagctgcttcttggactaagaactggccctatagaccaacacgagtgtttccagcatgctttgtcctcactcgcacgtttcttggaaaaacttcataggagttcactcatcctgaaattactccaaattaagcatactatggagttctttcgtgatgaactgtcaaaaaatagatgcaccttgttgatataggtagtaccaat

SEQ ID NO: 93994 - DNA, 1131 bp, Cannabis sativa
cagatgacagattcacagttgctggatatcgccaagttttgcaatcgttttcccaatattgacatgagctacgaagtattggaaggtgataatgtgactgctggggatgttattacattgcaagtgactcttgagcgagatctcgagggaaggacagagttggggccggtagatgctccacggtatcccgaggagaaagaagaagggtggtggcttgtagtcggtgatacgaagagtaactcggtgatcgccattaaaagggtttccctccaaaggaaattaaaggtgaagcttgattttacagttgctagtacagaagtgggaaagaagaattacacactctatttcatgtgtgattcatacttgggttgtgatcaggaatataatttgagtgttgatgtgaaggaaggaaggatggcctgaggaagaagagtaatgtttttgacactaatgtgttttctttggatttaaatttgtaatgttgtactagatagaactagttaatgcaaccttgcaataaatgaattttcttctacttttgcaaacactcaaaatttaaatcagcctcatgcttgtaaaacctgctatacaagtaattgtcaaaccaacaaagatcttccttcctaattttctcacaaatccttccctttacatccattttaattctatacaaagtgatagacaaaagaaatagacattgcgaccaaaaatcttcatttcgacattgcaaataactgtagaaaaaacttgactcctaaacttagaaagttaaccacctcaaaatagatgaaagaagaatacttgagtattgccagtccaaccaatgcttaatctcaaaaaataagtgccataatgaaatataaaagatgtggtttaacttgtatagcaggttttacaagcatgaggctgattaatccatatctatatttataaatatatggggtgaacataaaaacgatagaaataaaaaatataaaatgatgtcactactaaagaaaagaaaaaagaaagcaccttgaaccagctaatatagaattagcactttacatatttgtttcccatttcattagtgccttattacattatctcatagattaatatataattatttactctttattacaatgccaa

SEQ ID NO: 93995 - DNA, 845 bp, Cannabis sativa
aaaaaaacacaaatatttataatgttagttcatttccaactactaaatttaaataaaattataaatgtgatcatcacacgaattagtttaaagaagaaaatgttgtcatgttttcttaatcagtaagtctatggtacaatttatgtttcagttcatattgccctaggtgtctactgtctagcactcttttagttgttatatcatgttttatataattaagtatcgagttttatataatttaagaatattattattggacacaagtggtgtccaatactttttataagtagtatctcacaattgattagtgatattccttaaaaattattttcttaagttatacgggacccgatacttaattacactaatagtaataagacaccgaggaggtgctagctagcaattctcataatttaatgcaataacttttagaaaatatcactaaccaatcataaaatattacctctaaaaagtgttggggtctccattagcaatgcacaattcaatccaaataaaaaaaaaaaaaaaaaaaaaggaatgcccattcaaaatgatatgatacatgtaatggttaaatatttgaatgagtttatattaacattaattcgttactagttttctaaagagctagcattattagtataagactctatacaaaaccaaagaccctacattttttatagcaacaagcattttagtatttatattctaaaatattaagacaacaataaattcttatattgagtaagtcaataacctaattaaatcatgatgtattattgggtaggtgaactgtacgaatgaaattaactctgtaatatccactgttcatttactttaattaa

SEQ ID NO: 93996 - DNA, 551 bp, Cannabis sativa
ctaataataatcatgtttaccaataaaaatgtatttatctatgtgtaattggttcttaaatcttaattgttataattatgtagtggttttctttgttatgtgggtttgtttttcttcttttatttaccttcatcttatttgataccacgatatttttccttctcatgaataaatgatgttttgtattatttttttatatatataaaactatgaaagtgcaatttttcttttttaaatattttccccttaatttcttctttatcaaacaaggtacggaattccatgagaaataagaaaaaaattcttagtatgatacgatataacatgatatgatgccacgtgaaaaaaaaaaaaaaacatatacataatgtaacttaaaaatataaaataaatattataggaaaaaaataaagtttctcgttcttaaatttataattattggagggtatcttatttctcttggaaggcctgtaggcctttcttgggtttaagagtggcttggtcggaattatatttttctactatgattagtcttgtcttgttaatatggt

SEQ ID NO: 93997 - DNA, 625 bp, Cannabis sativa
aaaaaaaatgaccgacattcactaatcacttgaatacgtgtccgttactaagaaaatattttctcagaatttcaatgtgttgacctcgcttctagctaacaacagcgagtcaaaaataaagtgattaaataagaaaattaaagaaagcgaaaatagtaaaataaagtgaacaccagattttaaagaggttcagcctcgtaagtatggtaatagcctactcctcttgtgtttgtattgacttgagagaaggaatgaagtgttctttctctcgaaaactcttacaattgatctctgagtaactttctctcttagatcgctcttttctctcttgaatatgtttctgaagtagttttcttgatctccctcatagtgaggttaggccactatttataaggacttaatacatgatgaatagtttcccttttgcctataatgagtaaaataaaaaactattaattccataattacaatgcaagaaataggaaattagaatgtgttgcctttattctctgactcaatcccgtaattataggaatcgtcttcgcaacctggaaacaacaagattgatctttgaaatcgccatctttcatgcttcgctcgacataaacatatctacatcttgttt

SEQ ID NO: 93998 - DNA, 509 bp, Cannabis sativa
tttttttgcacattttttgtaattatattgtttttgttgtacatttatgaaaaaaaccatataaaataacacaggatcactttaaatactagctagtgtattataaaaaaaaatggaaaaaaattgagtaattttatttttatgatttttaaagtataagtttgtaaaaatatagttttttttttcaaaaaaaaaaatctgggaaaattataaaaaaaaaaggttaaaaaaaaatatgtaaaaaaacaacataaaatacctggtgacacttttatgataatcggttacctctctagttacaatagggaaatttacatgatttactgactttttccaatttattacaaaaatactgtcaggtgatatttttttcttttttactgtgtatatttttggattttatacggaaatatactgctttttttgtacaaagtttttttttttttgacttacacgtatttttatagtatttttccacatcaaaatttaaagtttttgttttaataaaa

SEQ ID NO: 93999 - DNA, 719 bp, Cannabis sativa
agatcatatgtcaacctgggtgttcagagcataatagccttcagtaaaacagtcataactcacttaatattgatctgattgacccaatttaacttgtattttcaagctatttcaatctctatcaagttatgtctcacactccaatcacaattttgaagttatttactctaaatttcatctttgagagagttacaaattcaagctacaacttactcaaagtgggttcgcgacgcgactcaagttccagaaattgacggctgacctccaaagtcaatttcacctatggatgatcatcaattgttaaaaatagcctaaatgtattttctatatttttaagaatattatattattaatttaataggatctccttccttataaaaggagagctccaccaactcattttttaagttcaaaaaagtactcataaggtcaaagcatatctctctagtttcgctctctagaatttagagcatccagacttagctaatgttatcctaatttgttcccacatgatgtggcacctccaggtggccaaaagtggaagacatgtgggagacaggtctgcactaaccggccaagctattggcgtatagcccttatccctcaagatctcagggttgcaagatggactcaaactagaagagcatggagacttacaagatccacatcttcaaggttctaaagcaaattcatcctgatatcagtatctccagcaaaga

SEQ ID NO: 94000 - DNA, 748 bp, Cannabis sativa
aaaaaatttgataaaaatattaagtttattaaaaaaaatgttaagtttacttaaaaacctacattattcctaaaaaaaattcaaattttattttatttataaatgtatcttaaaaaataacacaaaaataattaaaaatccaataaataatttaaatacactaagattttttgaaagaaaaaatcaaacttatttatatttataaattcatatcttaaaaataaataaaaataattaaaaattaaataaaaatataaatttattttaaaaataagttagaaattaaactaaaaataaaatgttatattaaatcaagattttttgagaaaaaaatagactcaaaatttacttttaacaaaaattggatttttaatatatttttttataccaaaagagattttttaataaaaaagtaaatattttcttaaattgcttaatcagttttaaaattttaatttctttttaatttttgtaatcattcaaaatatttttttaagatctaaattaattttttaagatttattaaaaaaaaatattgaatttttttatttttattttgagggggtacgatttataataggtgtcaaagtttaggaggtaaaattactaatttacaaagatacatcagcatttaaacggaatatgcgacaatacctaacagaagactatttttttgtaaatataaaagtttaacgagaattcttaacaaatcttatattttaaggagtaaacttaatattgttgaaag

SEQ ID NO: 94001 - DNA, 575 bp, Cannabis sativa
ttatttttttaatatataataaatgagtaaatatggttttagtacaaaaaaaattattatagtcttttaattaaaacaattttattaaaaagttgggttagttttaacttttagctgtggattctccaaaaaaattttaaaaaattattttttaattgcttaccaaacacatttttatcgtagcttttaactttttcaaaaattatgccaaacagaccgtaagtaccttaatttgcaagtagtaagtaagaaatatcatttactaaaaagtaaaaacaattatatatattattaaaaaataaaataattatatataaaaaaaaaatataaaaaacaaaaaaaaaaaaaaaaacaaaaaacaaaaaaagtcttttatttttgtttttatacaacaatcatttttcaataatgttatatgataaaaaacggtacgtagatacagcaatcatcatcaaaagattttcacgacatacaaatcaaaatcattaatctatattatttatatatataaaacactcggtttggtctccaatttttttctacttattttgtctttttctgttttcatttttttt

SEQ ID NO: 94002 - DNA, 652 bp, Cannabis sativa
agcattaaaaataagacatgtaggcagatttactcatcacgttcccattgaaataggatccacacaaggaaaagcacttgccattcgttggttattagggccattgctgccatttcatatgtatatggttacaattatctacgttctcaatgtgcctatgatgtagcgccagacggactgttagctactgtatatcatcttatgagaatagagtatgctatagatcaaccgaaagaatggtaataaagattataaattgacttattaaagaagcgagccacgtctgagttagcttggatatggaagtcttctttcgtttctcaatagtgacataagactaagctcatgagcttattatcctatgtcagaataagttgataggatccccgtttttacgtccccatgtccctcccgtgtggcgatgtgggggcgttaaagaggaaagagagggatagggtttctctcacgttgggtagccaagtgtggagcggataactgctgaaagtatctaaatagtaagcccaccccaagatgagtgctctcctattccgacttccccagagtcttcggtagcacaaccaagacaataaggggttttctgcccttgttggggtggagtgacagaagttttgagaattcaagagaaggtcac

SEQ ID NO: 94003 - DNA, 1040 bp, Cannabis sativa
tagtgaaggtgttgaccatttcttagacttttgtcagaagtatgccaaaaatcctaaattggttctttgtccttgtcttaaatgtggtaacatagatcatatggacattactatgataaaggagcatttatataggaacggaatagacaagagttataatatttgggtttaccgtgaggaaaagaatagagttccgggcaagggaacgtctaaatctaacattaatagtgttaatttggactatgaggatgttcaaattttagaaatgataggagatgcacaatttaaattaaatatcgatcctttgaaatttcaaagttttgtagaggatgccgagaagcctatttaccctaattgtaataagtttactaaattattgatacttattagattatacaatataaaagtcaaacatgggtggaatggtaagagttttacgaatttacttgctttcttagtagagttattacagaaaggtaatgtggtgccttcatcattctatgaggcaaagaagacactttcttccttaggcatgcaatatgaaaaaatacatgcatgtcctaatgatttcattatataccttaagatgtttgtggatgaaatatcgtatcccacttgtggtgagtctaggtggcaaaagaaaaagaattctgacgaggtaaaggttggtgtccctgcaaagttattatggtacttaccccaaatacctcatttggttcagttctttcgaaatgtcaaccgtgaaaaaatttgatctgccatgccagcgatagaatgttagatggtaagatgaaacatccagctgactcacccgcttggaaatcaatagatggtaggtaccctgaatttggcaatgaacctaggaatatctgtcttagtctttctgcggatagaataaatctacataccacccttagcaataagtatagttgttggtaagtttttcttgtgatgtataacttaccaccttggttggtaataaagaggaagttcactatgcttacactattgatattaggcccttcacctttgcaagggga

SEQ ID NO: 94004 - DNA, 708 bp, Cannabis sativa
ttttcttatatacaactgacatttgcaaaaacacggtttttcaaaattgaaacttgtactaaacattagagccacaaaatatgaaataaatagataaatatctatagtacaaaacatataattgttgtttaattgttgcagttcatactacaaatgagttaaaaaattgatgatcgcagctccctactaaatccaagtatgaaaaaactgagtaatgaaacacaacattaacagttaaagatttatattgaaaatcatataattgtttttaaattgttgtagatcatacaagaatgagttgaaaaattgttgatcagagctcccaatcaaatccaaacaaaaattaacaaggtattggattacttctgatgattgcatgttaatgattgaaacatttgattcaaaaaaaattaaaaaaatgaataacagtgaataattattgttgtttgattgtttaatttctgtaaattatttaaatgatcaatttgttcaagtataaaataaaaaataaaaaattgagttacatttactttgaaattaaaagaaaaacgttgatttattgttaataagttggatgaaattgattttctttactccctgtttgttatgataaattctgatttgataaagatataatattgcattaaaaaaataaataaaaattattgatgatttattggttaaaaaatataattcagatgtttctat

SEQ ID NO: 94005 - DNA, 1516 bp, Cannabis sativa
acttaccatttttacctttttttttctaaaaataggaaagctagacaactttccttccaagtttgaatacacaaaatatgaaaccatattaaaaacataccagctaaaaatacaataaataataaaatatttttgttaattaaatatgccaaaaatggaattaacactttgtatccaatgatccaaagaatatagtttacaaatttggaaaatctatgtataaactcaaataagcttctcgtcaatgattatacaattttcattaagtattctcatttggttttgagatagaagcttttgatgattgtgtatatatcacaggttcagtgggagtaagaatatgatattagtattatatattggtaaaaaattgtttgccattaatgatatatacccttttgtattaagaattcaagatatgttgagattgttcttgagatacttgaattataacaaaagagatatatttattaagtattcaaatttattggcatgaaggttactataccaggtgatacgcttgttgctaaaaaaaataagttgtgtaagtcattacactgaaagcaaccttagaattcaataaatatagaagttatttttatttatatttagaatctaatgtatgcttaagcatatatgtgaatttgtacttaacatatatatatatatcaaaaatgttggatagataattaagtaattctataaaaaaacttttggtatgcagttaaatgggttataaagaatttatatagaacaaactactatatgttctcctatcaagagagaaaactagagaaccgtaagtcttgtatttttggaagattattacttaaaatcactacaaaaatcatctctattagatagattaagatcatcactatctatagattaaggtatactttcgctatttgagttcttcttttttaatcaaaaaatgtattctttagatgtatatttttgagcttataataatatgaaattaaatcttattattacatattttataagtgataaaaatttttgaccactaaagtcatgcccaaatgaaattaacaagagttgcatagtgcatacactcattactcattgattataataatgtgatacatattattggtttaatttataattagttgcacaaaattagttcaagtttaggcccataacatgtctcaatcaaaatttaataaatgcaacttgaaagattgaacatatgttttctatatgatgccaatttgttttatcctacaactatcaactatttatatttgattagtggagtctaatccaaattaaatggttaggtaaatcctgttacttgcaccctctaaacattactttatgtttccaaatcattgattttcgtgtgttctcctcttgaagatatacattaaaatcctcttgaagatatacattaaaatctttactgataatatttgttctaagagtttattttttcacataaataaaaaaagatatttacagtgtaacaggctaattcttttgttttgttttg

SEQ ID NO: 94006 - DNA, 762 bp, Cannabis sativa
ttttatttgtagccactattatgttgcattattataataatataaggctgtaggtgacaagtatttcataatagaattttcttatttttgaaaaaggattactaaaatcgaagaagaacaaattatacaaactagaaaatgacagaacttgatgaggatatataattaatatatgtatataagacatgaacgtgatatagtttttaacttgtctggtcctatatcctatggtaacacatgtctatgttgcttaaaaaaatggatttattacaatcacagaaaaagtttaagtctttaagattaatggaatacgtaatatagaattacattttctcaaaaaaaaaaatatatatgaaaatagaatattcaccacctacggataacaaacttcaatagttgaagacttaaagtttatacatatataaatgtaatagttgaatatttacaaattacacgatgcattccttactttatttctataataatatgattactacgagaaaaattgagaataagaagtaacggattgtttttggttggggtagggacactagtttttgaaattattgctgaaattgaaaataacaataatttaaaataatgagggcccatgggctgatgattacacatgtaacgggccatgaccatcactgaaaatatggaattttatagggctatttcaaaaatatgggaaaaattattaaggttatgataaatatgacataaaaagtaaatgccactaaatatggcattatctaacca

SEQ ID NO: 94007 - DNA, 648 bp, Cannabis sativa
ctggactctttataaataatataacacaagctaatacaagatcatttgttatgtattaaataatataatttacattgccgtaaaatatgtaatcgtaataattatacgatataaagttttatccaattatagtgttccttgatattttatataatacgactcttattcgacctaccaaacaagctataaataaatatagaacatgttgtattgtaccaacaaaactttcttagctaggagggttttgtgtgatagccctaatcgcccacctttaattaagccgagacgaaaaatgtcatatgtcaaccaaaaattatgaacaaagaatattggctatacatgtcttttttttttctcataagtaaatacatacatagaatcaaaccgaaaaattatgtagcaataaaagaatagagtttttttctaatagaaattgtatattttattaaacatcaaatttcgctaccaaacaaagaagcaagtcagttagattatcctccaaatttatgcaacaatcaaatataatacaaaagctctaacaaagttatgaattaacttgttaattgatcatttaacaaagaaaatagcaatatttctcaaatcacaaagcaattgcttacaattattaattacctgaccaaaagtaaa

SEQ ID NO: 94008 - DNA, 510 bp, Cannabis sativa
aataaaggacacgctggaaggttctggccaggctgcttctcgcaagaatcggcgtttgccttcagagatttcttgcaagaaatgcccgtagtgactagcaatatcttcctggtggattctcactacgtgttctgtaaccatagcatcattaaactctaatttggaggtgggatttgaggggaagggtttatatgggatggctaattgtgtaggaaactcaaattctaaaacttctggacgataagtttctgaaccagagtgggacattgttgtaagcaaaaagcagtcccaatccctagagagaattttatcaaacccaaaggtataatgagttggagatcttaaaacaacctattgcttgaaccctagtatggacatagatacagtttaaccctaaaaaataccaaaaccatatgagatgacaacaatataaacaaactaagtagcaaattcatacaatgtaacaagcatgagaaagaagaaagaaacttactgtttaaagttagggct

SEQ ID NO: 94009 - DNA, 629 bp, Cannabis sativa
aagagcttgctgcaaaagcttcaacagtttacaaactgcccagatacatagattttgaaagaggttcattcggcatgggaacactacgtttcaaggctaccatcgagattgacaaaccccttttctcgggtttcttcatgaagagggaatccatcaaagacctgtgggtgcaatacaaatacgaaaagcttcccaacttttgtttaaaatgcggcatcatctctcacgaacagaagttttgtttcaagcctcctactgttataaaagattcaaagggtgctttttttccattgttcgggtcatggatgaaacacgacgataaggcgagatggcctttctctccgagtttgcgaaagtggtttgaggagtggatagtgcagaaacgcctgacggtggacaacaagttcaagcagctgtggaaaatggacaaatctatgaaggccattgattcgtgggaggctagagaaacacgaaggcaattacctgggaagagaaggttggttgaacaattagttgaagacctatcggagacggaggaagaacgggttagtagatttcctatggtctcgctacaggggataggggaatttcgccccttcgaggataccgccaacctggtggtcaaaaag

SEQ ID NO: 94010 - DNA, 866 bp, Cannabis sativa
agttggcctcagtggtcaacaaagcgatattccgagcagcctttggcagttggagaattttttgtgccttctccctgagtcccaatgtgaagggaggacgatagtatgagggaatctgttggaaccgagtgtggacgctatccatgccctctataaagtagtactcgtccacaaaataccctattttgctgacattggagtccacaatacccttcagccatttctcgtccagttgggagaagtagaagtaccccggcctactctgcttgggagttgacttcagatcgaagagccagttggtgtcgtgcagggaaggctcaccccatccttgggaagcatggaggatgaatagtgcaataagtatttaatgccctttggtgtgatttgggtcgggcagagatggtagtagtccgcaatcctcttgaagtacggaagtggggcagcattgcaccctgctaaatctgggcacccgaccaggcacagtatccctgtcttgggctggttgctcggtgattttgagaaaggaaaaagcactcgacaccgcccaggtatccgtccttctccaaactcctcagcttgccctgggttactatggatggaggagacacccacggagctccaaaggcaccttgcctctttgtggaactgcctcggcatactcctcagtgacgtaatcatcaccctctaccaggatgtcaccgacctcggacatcgattcccctgctttgttatagcctccgaagcgcaatggcagagcaactccttcctcctcggcttcaaatggactatcaggacgaacctcgccctaatcctccatctctttgacttccacgtgtccttaattatcctcatcctcagcagcaggc

SEQ ID NO: 94011 - DNA, 529 bp, Cannabis sativa
gtaggaaaacaagaaagtaagatggattgattgatagaaaatttagaaaaaatgaggaattaatagaaaaaatagagaggatatttgttatcttttgtgttgttaaatattaattatgaataaaattagaaagataaagagtttaatacatttatatattatttttcataggattagaaaaatattttgcttaacgtttttgttttttttttcttggtttccttcactttgggagggattgaagcttaggtatttggagagagactgaaacagtgtttccctccatctcttcactcgctcttgtcaaacaaaggaatcaatccctttaatcctctcttttccaccatctcgaactccactctaccaaacatagtgttagtatttaagattttttttttttaatttaattgttttaatgatagtgtataatgtaaaattttagaaaaatttaaataatttacagtatcaaaaataaaattttaataattgcttatcacaagtttaagtaaaaattagtcacacttgtaat

SEQ ID NO: 94012 - DNA, 537 bp, Cannabis sativa
gcagcttttccagtgctccatggatgcttagaaatgggatccttacatcaggagagtctcttatccatgtaagttttttttatctaaactcccacaccttccaaaactagtgctgcaggcaataattacatgtaaagtaaatggatccttggaaattaatgtggtattcaagacagaggatagaacttgaaagcagttactagtcttatcatctttttttattctgtttctatctactatacacatgttttctatcaaaaaatacatttagataaatagtaggttagatgattcttgctatttttgtaccaccgcaaattgtgttcccattttcccatctcgttattttctactccattatctatcaaccatcgtatatgttgataagaattaattacagagaggtcttatggctctggctgatgttgagggagcacaagtacatcttaagcgactaaccatttcacaccacattgctagctgggaatccattcaggagatctttattaggcattgcactcgtcagcttcttcatga

SEQ ID NO: 94013 - DNA, 703 bp, Cannabis sativa
ttagtactatttagtactatagggattattttttaaatacctaaaaacaatcaaaattatgtttttacggaattttgagtttttttttaaatttttatagactattttttttcttacaaactattgttggcaagttgtcctgaaaaattattatttatagtataacattgcaataacataaaacaacgttaaaataatataaaattgtaaaaatataaataagaaaattgtaaaaatgcaaaaaaaaaaaaaaaaattctaatatttaaggcctacgtgtaaattttaaaatgtatgttatatatattattggagtttttgaaccacataaatttctaactttttactttttttattatggggcaaatgtttttttttttttttaaatattgtgttttttttaaaaaaatactgcgtaagttttatactgtgtatgttaagtttttacgattgttctatggttattttttagttgtttcactattgttttaattgtttagttttattttttacggttgttttataaaaagacaagatttttgtaaaaaatttcatacgaccgtaaaattgtaaacttttatctaaaattcagaatttttgtaaaaacccctatattaaaaggctttgctcatctttattgaatacaattaaaataaataaaagttttggacctttagggctgaagtgaagtgccttattgggt

SEQ ID NO: 94014 - DNA, 792 bp, Cannabis sativa
tcaattaaaattaataaccttaagttgagcccatcattaatctcactttaattatttatttattttttcaaatagatttggaaatcctttctctcaattattacttttaccaaatacaacttagaaatttaattgtttagtaattaactatagtctttgtgagatcgatcgacctcacttttgtgagtttatttcttactttgaccacgtgtacttgcgtgtttgaaatcgtaatagtatgtttatataaattatgaataatcattactttttgaaagaaatattttactattacttttttttaaaatgaaatagaataatttgtggtataaatatttaaatttatctttaattgtaaataaatacctaagtttaatttttaacggcaataatagctaagttatatttctagaattctgtaagtacctgattgataaatgttaagtaaattatcacgtgacaatctctaataggtcaagataattaatgaattttttatttttcttaaaaaaattaatttaaaaataccaataaaaatatgacacgtggataatgacttgacatttaacggtcagatacctacggagttttaaaaatataacttaagtattattaccactaaaaattaaaaaacttaaatatttatttataagcgaaaattaaacttaaatatttatgtcgtaaattactttaaaaaaatatttaattattaattgcgtattataaagtatgtttatcttatttggacaaacattatcttcacctaccatatttggaaagggaaatttgatt

SEQ ID NO: 94015 - DNA, 523 bp, Cannabis sativa
tatttacgccccccctcactttaaattctaggtccgccactggaatgaaagttatggaattgtcacataaaataaaaatataaaaaggaacacaatcgataaattcatagaaaattcatcatgtaatttcaaaacttttaaaaaaaattatagtgaaaactttaaatgtaattaattaataagtataaattattaaaatagaataaaaattaagaaaaataaatagaatagataatagtttgtagagattttctgttcaaataataattagagaccaaaatattatgagcttaatattaaagtgaattaaaaataataaactaactatgaattgatcacataaaaagtgttaatttttttttcaaagaatattaaataaaaatgtattatcatatggtgtatgtatgcatgataaatgaagaggaagtttaaaacatggcaattccttctaataaacaaaatattaggacacaataaaatacaataatgcatgaatgattgaaaaaaaaattagataaaaaat

SEQ ID NO: 94016 - DNA, 661 bp, Cannabis sativa
ctccaaacgggtctaaggaaaaatatacacgtgaaagaaaattattacttagtgataatacaaacacaaatgttctatcctatctttggtttataaccaaagagatcaaataaagataagaatttgattttttgctatcttacaatatcttattcaatcttataatgtcttatgctatcttataatgtcttatgctattttatgtaccacctataaacttttattgctaatttttaattttgcaattagtttaaattaataatttaatttttttaatgtttaatttatattttattaaaattaacacttattttctaattttaaaatttcaaatttgttaaagtttgactattattttgaatccaattcttttaattaaatgattaacttttaaattataattttttaacttaataaatttctctattagtgatatggtaactattttttataaaatatcattttaatttttcaatttgttgaatttaatttttttttttatcattttaaagtttctaattatttaaaatcaataaatttatttttcacattctaatgttaccaacttatttaaataatttttttaattaaaatataaaataatttacttatcaatattttaaattaaatttaattaatataaaaattaaataattataat

SEQ ID NO: 94017 - DNA, 657 bp, Cannabis sativa
tatatttacaaataaaatgtcatttaaccgtataaatggaataaatttttgtacaccgtatatttgaataatatttcagcgacctgtgtacaattaaaaatagcccttaagatttttacatttaaatttttaaatgtatcaaatcttgaattttttttgttgttaaaaaaattattgaaattgttagatttaagaatttttgttcaattacaatgagttttacttaggggtgtacgtcagtcagtttgtcgatttatttaacttaatgtaaaaatcgggttacaaaaattaagtgcaacccatctaattaagaaaaaaaaattagtagcccgtccaataaaattggtcggtttggtcgggttaacccgtccaaacagacaattaatatttttttttacattcaattattatatttagttaattgtgataataagataaatatatataaattgaatttaaaattcaaatcaactatcattaaagaaacatagtaatttaaattttatatttttttaaatatgtatgtaaattatatgataaaataaacatatatataataaaacatatatacatatatataaaactcttttaatcaggttgatcgtggtagttcgggttgattggacgggttggtattattttcaacccacccaatat

SEQ ID NO: 94018 - DNA, 569 bp, Cannabis sativa
tggggtcgaggcttaaaggtttgtctttctacacttcttccatggctatgggagaattgagtttgagagaaaaaaaaaaagaagaagtgaagaagaggggtcgagtatggctggatgtagtagagggtggagaaaaaaaagaaaaaaaacataatttaaaatgtatttttaattttaattattttttattaaaattattatttggaccaataatcaataatgacttaacacgtgtcagttatgaataacttaacggaactgtcaaatttaggactaacggacttacaaaatatgtgagacctagaggactattaccgctatttttcaaggttaaggactaatctgcatcatagtgaattttttagatacttttgccgcaaatttcatataacaacaacttgttctttttcaaggcttctaatgtatgttgtgtaagattcatgcaacttttgagctgctatggggcagcctcgaatcaattggttaactttgacatgtctattgtttattttagccaaaatgtttgagttgtgagattgctaaaattgttgatgtgttaagtatcaagg

SEQ ID NO: 94019 - DNA, 553 bp, Cannabis sativa
tttcatttctttctctttgttctgctcttctctttctactactgcgtttgattgttgttcagcaatggcaaagatattcaataccagtgtagtccaacgccctatttctaccccattatcaccctatataatggctggtaccgagttcattttttgggcattactcaagtcttcaaagttttgtcttgctaaaagaacaatatcatcaacactaggccaattatcattccataccagtttgttttggtgataccaaattgaccaacgcaccattgaagcttcaattctcagcccttcaaaccaggttgcgaacaatactgtagcaatccctacctcagaatcccacgacaatctccaataaaatttaagcaaacgaacacctaactagcacatgtgaaataatctcagatgcctcattacaaaatggataaatagaggaaataggaacatgtttcctattgtcaattagaatcaggtaggaatgttatttaaacaagctctccataaaatattctgcactttttgaggtacttttatctgccacaactttctc

SEQ ID NO: 94020 - DNA, 613 bp, Cannabis sativa
gtgatcttcgaaatcatctgtgtgataaaacgagagggcatgacctcccaaagagtgataccaagaggtttgaagaacacattgttgccttaactaacttggtaagaaaggaaagtggagcattgtcggattccaaggatgaagacccgaaaccctgtgtcaaaaggatcgcagagacccctctccctaaaaacttcaaaatgcctcacattgagttgtatgagggaagaactaatccgcaaacatacttagccaaatacaacaaaatgatgcaattcgcccgagttagttacgatgctaagtgtttatgcttttccctaactttaactaagtccgcagaagacttgtggaagccactagctccgggatcgattaatagctagaaggatctacaatccgtgttctacaagtaatttatcaccacgcgggagaaaagacatgtaagttgggtccttaaccagcgtcaagaagcaatctaatgaaagtttgaaagccttcattcaaagaatgatggaggcagcttccaagaccaaggttagcaatgatccaaaactgatcacatgctttttgaaatggttaggtccatgcttagctactcaactctacctacgtc

SEQ ID NO: 94021 - DNA, 731 bp, Cannabis sativa
aaatcaaatacaaatcaaaccctagcagcccataattttcaaaatcacatactccagcaaacccaaagctttaaaatacacataatcaagggttctagggttaccttagcttgatcctctatgaataccttgctgaaaacaccaagaattagcaacaatttcttggttccttgctggttttgaagagagagagaatggaaagagagggttcttgctattttggtcttttttttttcttatttctcttttaatttcctgaaagaataaaggttagtacattaaccttggctgaagtaatctcatgctaggtgccaaaatctagggcagcgaccacaccccccacaaactaaattactaaaatgccctcactttcataacttaagcatttttaagactaggggtaaaatggtcaaaaactataaccccgctcaaccccgatactttatttcttcaaacatacatcccactaagaaataaagttctagacttacccatgtgatcaaactagccatccatcgcagtttaataatacaactctaataccaatttttattagagttagacgtgccaatattccattattgttgtagtggttatttactaggaaccgacgctataggatatatatggaatcagttcctagcaaataactgacgtcatatgtacccctaagaaccgacgccaaaagccctaaggattattttttttttcagtttatttaatttaattta

SEQ ID NO: 94022 - DNA, 11391 bp, Cannabis sativa
  modified_base (2661)..(2661): a, c, t, g, unknown or other
cctcacttgtggcggaggaaaatcgtggttacaaatgccatatcaaagaagatttttttttttaaaacaacagcaatcaaagaagacataaacatatgaggtactattaaacaacattacacgacgttctccaatctctactcaactctaaaaatgaaaactgcccaaaactcttggttttgtaaacccaagtagctgtccaaaatctgactttttcccataactcttcaactgaaccttcattccctttaaagattccgttattcctttcaagtcaaattactcaaatgattgctaaaattagcagtcctccatcggtacgatctacgcttactaccctccaccttgctcacaatcattagagggattgatccggggagtacccaatgaatctcaaaaatatcaaatagcttactccataatctttggacaaggctggcaccccaaaaacaaatgtatcacttcttcactacttttcttacagcaaacacaccatcccggggacatacagaggaatggtcgccttttttgcatcatcgggtgcacataaatttttccaaacgccaccaaccacccaaagacattaactttaaaaggacatctgcttttccataaggtctttgtccaaaataacttgccaaaattatgatcgaaagtaaaccagctgaatgctgacttacaagagaaagtcccaccaagatctggtttccataatcggatatcatccgagatgttgagcagtctaatatgttccagtagttgtaataataccataagactaggcatttctctctccatcaagttccttctaaacttaatattctagctcgctaaacagttcttcacctcaccttcaatggcaacaaggtcttttatgctcgtatttttttgccttggataccacagccaggtcccggaagcaactctttaaggatgtttcttcaatccaaacatcctcccaaaaatgaatagttgcggcattgcccactttaaattttaccaactgcaaaaattcaccataaaggtctgaaatatccttccaagggcctcttggagatagcctttgacttgagttagtatcccaaaaattttctgctctcccataacggcttttgatcactttatgccaaaatgaatttgattctaatgggtaccgccaaagccatttcataagcaaccctttatttctcatatctaatctaccaatagcaagacctccctcatgtttaggtgtacacacctcctccgaagccccaaatgatccccacccaatcaatctcctccttcccatagaaaatctctcataattttttctaaagagaaaaccgcttttggagctttgtatatatatttatatatatatatagagagagagagagagggagggagggagggagagagagatatttccaactatcatgccttttagcacatttttccaagacaggtacccaaaacaactttttcctgggcgaaccacctaaaggcataccaagatatgacataggccaattacccacttcacaaccaatctgaccagcacaaagagcaaccacactctcatgcatagagatacccagcaattggcttttattcatgtttacttttaagcctgaaatagcacagaatgcctcgacaattcttacaaatatttgaagtgaggcttcatcattcgcaaaaagtagtgtatcatctgcgaattgcagatgactgacttgaatcttatctttcgcccactaaaaaccccgagaaagtacttgatttcactacttggtcaatcatccttccaagtacatctaccactagcgtaaagagaaaaggtgaaagtgagtcaccttgtctaaggccccgagatcctatgaattttcccattgttcctccattcacgaaaatagagaatgatgttgacgaaatacatcctctaatccatttcctctaagtttccccaaacccctttattgtcataaccaggtctaagaaaatcccattctactcaatcatatgctttctcaaaatcaatcttgaataccaacccactcttagcgcgacaacgataatcttctacttcctcattagccactagaacagaatccaaaatttgcctcccttctacgaaagtcgattgtgttgctgaaatcgtttctcccaatacacctcgaagccttgcggcaagaactttagctatgatcttgtacacacttgttgtgagactaataggcctgaaatcttttaccatacaactattaagttttttaggtataagacagatgaaagtctcattaatgctcccctcaattctgccctctatttcaaaagccttaaaaacttccaaaaggtcatcctaaatgagttcccaatttaactgaaaaaatgccaaactaaatccatccgaaccaggtgctttgttaccttcacagctgaaaatggcttcttttatttcatcttcttcgaaaggtctctctagatctgtagttaaaaattctagaactggttgccactcaatgccttcaattccccaccccggtctcctctcggatgtttataatttagaaaagaaataaattaattcagcaactatttcttcctccttgccaagtgtagagccatcagttctttcaattcttgagatagtgtttcttgccttccttgcatttaataaantatggaacattcttgtgtttgcatccccttcttttgcccatttacatttcgacttcagtcatacactcctttcttcttcagatgtataccgctgccactcccttttaagatttctcctttcatctgcaagagattgatcccacaaattgctcccttctattctctccagtgacaatactcttctttctaaagcattcttggcaaccttattgttcccataaaccgatttgctccattccttattattcttttgcacttttttcaacttgcacataagtttagtgcctggccacccgattgcacttgcatttttccaccgaccttcaaggagcttagagaatgaattgtgttccaaccatagatcgaagtgcaacgggccaggcccccatttgggaggattagagtcaataataattgggttgtggttggagcacgaatggaaataatccattccatttgctagtaaagaggaatctatccaacctactgcaaataggaattgctctaaaattagaccgcgtgaaccttccattatttagattaggatcaatcaatctcatttcccgaatcaactcatcaaatatcttcatactcttagtacatgaactgctattcaacttctcccccaatcttcgcaccacattgaaatcccccctccccccaaacaccatgaatctccacagattgaatagagcccagccaactcatcccaaaagtcgggccttaatttataggaacaaggtccatataatctcgaaaaccaccatggatctatacctttagcttgaatcaaaattgaaatagaaaaattaccaatcaatgagtccaataccttgatactcctagtgtcccatattaacaatgtgcctccagatcttccaatggctagacttataatccacgccttaaaccgtgatctccaaatactgccaatgaaacttctatcaacatcttccttcatcaccccttgtaaaattaccaaatctggattggccttacatattgtcgctttaattacacttcttttatccttgtccccactacctctcatattccacaagaggatctccattaaactttcttcaccaaccctgattttttgaggcttttctcataatttatattgaaagttagattactcaattctctgcttttctttctcgttgacttcctttctccttcaatcggaatgttttcatcattgttttcaaggatctccattcccatctccgccatagattggacaatgttagaccacgaatgaccctcaaaagaagtttgtcttacgttctatccgttcccgagcggctcagtaagtgtctgaatgtcatgttcgttctgtttccacaattctttaatatcacaaataatatcttctcgctcttcattattgttagattcagaagcctccccatccccctccaaatattcactgtctgaactaagacccaacatttcatcttcaattggaactacatcagcctcctccccctcaaaatagagttcttcaactgttgacgccactatttcacttcttgtgtggccaattgaatttctttttttgatataaaccttcgtaaaatgtataaacccctgttcttcttcttgttcttcctctactgtcttattcagaatagaagaccactgttttcttttttaattcaaagtcttcccaaaacatcataattgcagatctaaaatcgactcaagactttggtgtaatcgatcttaatctcccttcaaaaaaatcattaatgatctactccggttttttcttgacacgtatggcgagatcttcgtttccttttttaacccacgaactccatctctgaggcttgagattgagtgttgtcttaaattctggactcatcacaatctttttatgggccaaaaaaatactaaatggcccattattgtaataaatcagtggcctcctctccctaatatgttttgaaaggcggaaatgggttttgaggcgttttgccattgtaccgcgaggcataagcctcgaggcgctccgaggcgtaagcctcgacaataagaataaaaaattcataaacatgatatatatcataaattcataacagaaaacacataatttcataatagctataagtctaaaaatataactaaaggcataaagggttcaaaattaaaatcctaattaatagacatgataaatttgaaatctaaagcttcaaacataaagattaaaagacatattccaagttctaagggggagagaagagccttgtgttggtgttgctgctgcatgcatgaagagaagggagagaggtggagagtattgtgcaaggcaagttatggagaatgagggaaagtgatgaatgtttaggattttttatttagttttgggctttcaaaatttacaaaataaaactcaaaatagcccaagaaaagtttaaaaaaagctcacttaaactcttttaaaaaggcactctgaaactctttaaaaaaactccaatgaaattctttaaaaaaattccaatcaaactcttttaaaaaggcccaaaaaaactcaattagctgaggcgtaagcctcacactcctcggaggcttaagcctcaaggcgtatgcctcacaaggccgaggcgtaagcctcatggacagtgactgaggctaagcctcataggcgttttttgaacgcctcattccaaggcgcgcctcgaggcgttttttgaacgcctcgttcttgcctctaacgcactcttgtgtttggttttatgcgcacacttcttgattttcgacattttctcctttgattcaacaatattcagccaccaaattttatcccaatacagtgcaaacccacaccaataatccaaactcacagcgaaagtgtgaaacaacaatttcaaagattaagataataccaagtaactttccaccacacaattttcagaatgcacaaccaaaacactaatcacttgatattcacttcaaccaaataactttaaacattgctcacgactcataaaatacctcaaggtgctgctgtgttgaggtccatccactgtgagtggcttcggatgtggacagagtagaggtgcagagatcggcagtggtgacaaagattgatgatggtgtttcgtctgttggtgatggagatggtcggagatgaggatggcgatttggggaaagtggcagtggtggtgcgtctggtgtttctcgtgaagatggatggagatgaggatggtggcattgatgcttcgggtgaacgaaatggaagcggagctttgtggtagccggtgaaggttacggctgattatgttcaaaagattgttagaaaagctataattgtataatatttgaaagtgagtaccgaattatatgttaaactccatctcatgattttacaaagtatgttgaagttgatcgtcattttattttattaaaaagattgatttaggcatttgttaaagtcttaaattcctactactcaacaagttgttgaccttctcacaaaggcattacatgtgtatgttcaaaaaattgttagaaaagcttcaattgtataatatttgaaagggagtattgaattattcaaattaattaattagtcaacctttagttcgagaggttcttattaggaatttttttttttttttgttctatacagtatctatgtaataaatatgttttacgtacatggaaaagattatctgaaataatcaaagacttaggcattgtattatgtttttcttcctgtgatttaactgcttttagttagacatagactttaaatttctttgatttaagttatatttgaagagcatttgatttttacggtgacttaactttgacacaaaagacttaggcctagtggttacacccatggtttactcccgtgagatatgggatttgattccagttaggctttcctaacttccatacattctaaggttcagcaagaggatgcatatacttatttacctacacatattgtggtcctttaaacagattttactttggtagacgtactctctaaatcactctgtttcttcttcccccattcccaatgatacctctcccttatatctttgttagaaaaaacccttaaaagatgaaacaaaccataggattaagagccatacttttttgggaagaattagattcttaatagacagtttgagtgagaactaattgatatttcaccaaactatacgatgagaaagaggtaacaaataacctagaataacaagacaaatgacttactgttacaggattaagaaccatatttttgacagaatcaacaataaaaatgacaaaatcattcaatgaaaatagacaggtaagccaagttatttccataaggaattttcttacataaaatagaaaagaaaatttaaaaacttactttaagaaaaaaaatgtacaaatttttggggaaagacatttaaattttacaactaaaaaacaagaactcatcatgatctggattaaagagaagtctcttaacatcttctagcaagaaaaacaaaacataagtctatttaagtaaactactatttgctctaatggcacaactatagtcaaccagttcaactcaagggaaatttaggaacaaaaaaggaaggagctatgtatattatttcttaaattcacatctaattgcagaatataatcttgcacgtccaagtggcttatatgtttgacccgtatctgtccacacagagatcttgtactgtgtagtcatcgaaagccaattacttaatttaggagcataaactaaggatgcaaccaaaactttgaaggatccacccaaagagctccaacaatagtatgagatgggaacagaaaaaaactaaaaaaaaaaaaattaacatcacaaatttgtgttcactttcaacagacggaaaccaaacaatttacaagaagatagaaagtcgtacattaaaccctagttcataggtaatatatttatagtcaacagtcaaacacaggctgtttacggactaaagtattgcataagcatttgagactagaaagaacaatgcatatcatgtcaagagaattatgtttgcataaatttcctaaacaatattcagaaaattaatattacttccacctattgtttatcataaacataagctcatattacaaaacagccacagataaatgcatcagaaactgttcaagtacagtatgaagtttgaaatgttatttttgaaatatgttccgtgtggcttgtgttgaagtgaaaagccacagcctcataaagtttctaaaacatccccaaccttgaattctccaaattccaagtacaattgaattattggatatttctaagaaaattattcaaaaaactgtcttaaaatgtctagatctatagaaaatgaagttttgtttttgtgctccttcgttgtaaggtcttatctttgtggtaatcaattaggttagctcataagccaaactgaaattaaaacaaattatcttccaaaattatcaatctctttcaatgaacttcagcataccagagcataattccacataaaaacagtgtaaccgtctcttttaaggcagtgcctgagatgtaatgtcctgtatgtcaactactgattttgcaaacacaattaacacatgattcactacagatcatttttcaatacaacatcataagcaaacatcagtagaagctaacctgtttaagtaagcacattatttctcgtagctcagatacattgagcaagtttaatatataattcatatcatcgtaaagcagttcgtttgtatcttcaaatgaacagaaataacctgatgctgaggaaaaagaaacagatttaaattggtctcactcttaaaattttggcaaaatatgttaacacacacaaaaaaagtatatgttaaatcaccagatagctcttttatcgccttcactaaatccaatatttctgaatagaatacatttgacattcgaaaccatgggcctatgcagcaagaaaaacaatagaataagttagcatttagagaaaaatggaggtgcatttttcataaattgtataataaaaccagacatgcatctggaaaataagcagctaaaaatatataatgtttgaagtctactaaaaaggaataaaccttttcttgtgtagagacgaacaaaaagcctctggctgtcatcagaaaatgaattaaatgactctgccaattgaacaaaaaacataaacactaagaaaaacacacaagtaaatgccaatgacttgaagaccaaatcagctagtttagtacctaaaaaccctttttcatcatctaagaagaggtgaagattattttttaaaacttcttgcacaagaacacaaaagttttgctggtattttgctgtaccagatcgaccgtgctttgtggatccaattacttgttgaacatttctccataaatatctgaaaagctcaacattatcatcctctagcatttcatttgatagagccttgtgacagaaaatctgaattggtacagcatcaagggtgtgctttggaacaacagtcacgtgtccctataagaaattccatgtatctttagcaagaagagaaagggattatgaataacaaaagggaaactactaaattaaaaagtcaaatatcctaggctcctagctaattgggtcaaagatggatgttcaaaacaaccgcatgttctattgagaagtacaataacagatgaatttcctgaaggatgtttctgcagtatgttggttaaagtattcattatatttaaataatctaactcccattaaagatattggatacagaagtaacagaactgatcagtatatctcagaagatgtcaaaatataaatttccttatgtttatattggctaaacagtattacacattcaatagaagctcaaagacagctctttttttctttttctttttctttttcttttaaaattatgtttctttgccaaaaaaattcctgcttatctatccaactaatcttactcttgtatcaattgatattatgcctgtgtgaaaaaggagtgcagaattatcatccagcttgataaacatttacctcaaagcttaggcagtacttctcaattaacggagatagatattgagctaattctcgaggaacaaaaccaaacactttagagtcattagaatgggcagaaataacctaatccaagaaaaatatgtaaggcctcagcataagaatcaaagaaacaaaaagtaagatctaaatcacaaatagaagcaaagaaaatggaaatgaaccttgatagcattaggatccttgacattatgagggtctctttgaagaagtatgcctgccctatcatttatttccttttcatcactaaacttccgaccaacaatgaaagtttcaagaacaacaccagatatgtcatccaaagtagtgtgcacgtcacaacagttgtttgtgttagaggcctcattcttgacagatattgaatgcctgtcaatcatagcatcatctgtattgttaccatagtttgggttctttgatacatcatctatttgaatctgcgatgcagactttagacgcagcacggaattagaaaggacactgttattttcttcaacacccttaaaattatccaatacatgattatcattccttcctatattctcatcacaactagcaagtaatatgtcatttcctatgtgtccactctcggactgcgaacagaagttcatttgaagaagcgtgcgctgggtcaatttccgctttttagctgatttgcttgataaacacatgtctggaaaacataagaacctatataggttaaaaagaaaagtatggcattcacgaaacataaataaatttaagcttggaaagcctaggccagtaaataattgtctaaaatatagccataggtaggacaaggtaggcactacataggaatatatctcaaggatccaaacaactaccataacaaggagttgatgtgattgatagctcaaatagctttttgtttatttcttttatttccctttcctcctcaaatagattagaaatatctttgccaacattcaaaactctgaaaagctaaaagcctaaaacaaaccaagcttacccagatgagagttgacactgctgcaatcccctgtaattttattgccgcaaacagggcaagttactttctcactcttgtcagaaagttttttcccaccttcaaaatcctccatcttgttcctcgtatcactaatatccaccatcgaagatgcttcagaactctcaatggacgcgaattttccatctttatcagtacacagattcaaagggctctgcaactcacaacacatacacacatatttacatatccacaacgtcgaaaatgaagaaagaaaaacagaatggggaatacctgaataggagtagagagtatagattgacgtgttggaaggaagcgcctacgttttcccaccaatcgaatcaggctttctcttcccctgagcatgattttgacctaatcgaaccagaggttcaatgtgtccaaattttgaagcccgtagctttatatttatattgtcccgccaaacaacagaagagtctccagtcgagccgttaatttaatttgtcacctcaaaatgtaacttatataaatacgtaattgttcatagtattttatttaattttatcataaattaaagggttatttgcggcaaaatctcctaaagtagggaggtttttgcaactaacccccaattctaaaatttttacggtaaaactccctaaactcaagt

SEQ ID NO: 94023 - DNA, 628 bp, Cannabis sativa
aactatggtagactcgaatcggatcaagaaaattacataggctatcatcccaaccttatccactttactaggccacattcttctaacaaatccatctaagattgacaaaggtggattttctcctaacacataacaaacaattcaaggggtccagaatgagacctcatcctctatatcttccatctgtattttcactcttttcttttattcatttgacttaaaagtgctagccaaattctttctaacagattcagatcactgaacagggggtacagattcgttaccttccgaaaattttgtggagcagagttgattcgcctgcagaaaaaaggcatactccgagcgaacttcctcttgttgttgaattgctttcagagatgatttaggggatagtggtgcttgaaacacatccgtaatctccgggtcttccaagttgtcgccaccatcctcctcctcttccgaaaacacaataggctccacgcctaaaatttcgtccattgatttcaccttccgagcaccagaactcgaatccggtcctttcttcttcttcttctttccaaattcttgtttcccaggtttgttcgacccctacgatgtctttcggggacgcccacgacctgccatagcc

SEQ ID NO: 94024 - DNA, 1160 bp, Cannabis sativa
ttatacaaatttaaaacttgactactgaaaacagcaaatcaaattgacagatccgtcaaatttataacactaccacaaacccatcaaattcctgaaaataataataacaataataatgataaataaaatcttaccatgtcaccatcttgtacgtaccagtgtagcttattgataatctgcaaaacgagtcagtgtaatgaaataagtataattaaagaaaaatccagtttgcaaacatttgaggaaagaaataatctgacaaattaaaatctgtgataaagttgtacaaataataagaaaaatattcagattttagtctccttaattttaattaataatatttaactgatattaaatttattcaattctattcttaatccaatacacaaattaaaaaaaaatacatatatcttattaactttttttactcaataaattttattccattctatccctgtccctatcccccctgtccctatcactctcccgctccctatcctattctcattactcccaatcaaatgcaccctaaaatacaaacatatgtactgtatgaattagcataaatatgctttaccactttccgaaaggaaaactaacaactgtcttttcagagcctaccatttctgagacagacacaaggaatttctgttcagaaatatccctagataatgatttaattggcttccactatgaataaaatgagcagacaaaacacaatgtaaaatatcaaaataaacctgaaggaataatcattccgccaaaataatggtaaaggcagtccattacttaaaactacaacaaaacaaaacaaaaggaatggaataaaaatggattccttttgattaccaccaaccccaaccaaaaatatccagtgtagctatttaaggctatctttcagagtaattctaatctcttctcttgtctttattatattgacacaaaaaagtttctttaccagaaaaaaaaaaaaaagctactttgtcttcaatctaacattgagaaaaaaaaaactttacttgtatcactaaacacgtaaacagaaagccactttgataagacgacaagatcatggggataaaatagaaattaactgggaaataattttgccatggcttggagcaaaacacaattatattacctcttcaagtttctccacc

SEQ ID NO: 94025 - DNA, 582 bp, Cannabis sativa
taaaattttccataatttttaatagtattatattactcactcaatttccaatagcaataaacaaaaataaacaccttaattgtgaaccgaattctaagcatgacttatttagtcaaagttaattattttagtttgaacttgattacgcattgattaatgttagccataagtgaagaataggaccttttttttttttggctgcgagaaaaaaccgagagaaaatttattaactggagaaagggaaattaagcatattaaaatctccaaagaatatacattaatatacttttaagtattttaaaatataacttgtatttaaatatgaggtgataattatatataaaattttattattttattattttatactattagtatttatattgaaaaaataatattttttagtaatcaatatttgaaataaaaaattttaataattactcagtgtaaagttaaaactcttctattaaagtgtaattaaaccatgaccatacaaatgcacactaatagaatggttgctattaaatacaaattatacattaagagaatctcaattattatttatgagaaatgctaaaaggc

SEQ ID NO: 94026 - DNA, 655 bp, Cannabis sativa
acaattaaacagaggacttaatatttactactcgttaccatgggcggctcttatggggtgcaagctgggctattgtacagggccccaaaaaaataaagggcctaatatatatatatatatatatattttaatgcttttcaatttttttaatgaactcaattttttaaaaggctaataacttatcattgattatttctatgtcaattttcaaaatctattctcaattctattattgctttttaacaaagaaataaaaattcattattgctatatattattttttaaaaaaccttttatatttttttctataattttttattgtattgcaatcaataacaatttttataaattaattggagttttttggtgttttgtaaaatatataaccgtatgataatatttaaaaatattatttttaaattatattttttttttataagggcctaatttttaaaattagaacagggcctccaaaatatttaagacggcgctgtctcttatggttttcaatgaaatatttattcattgttgaaaaaaaaaatcttgaaatatttagcaaagaggagtgttaatcacactctattttacactcttttttgcagaccctttatattctaatgacaagtgtcatttttttttaggtaatgcttatcat

SEQ ID NO: 94027 - DNA, 998 bp, Cannabis sativa
agaagaagagaaagaagatgctctaatatcatgtgaagataacgagagtagagagaaagaattgaaagttctgtacattgataaaaaatattttacagaggtttatatacaagtattggataagcaagtaaagaagagaagttgttacaacaacacagctagttacaacatttaactaacaattaacaaaaagttagttgagtaaaaactaactaacttagcttctcttgacaaaataatggtataaatatccatttatacatatttataaccctagcattatatataactcgtctcaacctacaagtacatataaaaatttctctaatatagattccttcatcaccatatttatatattatataaatatatatacaatatacatagacttgaatatttatagatttatctatgtttctttattttaatctcttaattgtactttaaattacaaatattattaatcttatatttcctatcatgtttgatggtatctcttcatcttccttgtccacatctagtattgtataataaatttgtaattaatttatttgtgttctttctcttggctatgcaactttggtactttcttttttcgtgcatgctgactgttgttatttttgtgtttgtttggttatgggtttagtcttgtattaattttgttgttatttgcaagttacacttgtatcttaatatttgacgaaaacagagaatatgcccagaagactcctaaaaaaaactccatggaaatggcccaatttgacaaaatgtcaacatgggcgatgggcccagcgcctaggtcaaattgggctctaggtccccgcttcggcctctaggttgatccatttttctcttaaaagctcttgtttctccatattggatgaagacgaagaaaatacttggggtagttctttagtttgatgattggaagcatcgcatgttaacaatatgtcaacctaggccttgggtgcctgggggctggggcaccaactcaaatt

SEQ ID NO: 94028 - DNA, 983 bp, Cannabis sativa
  modified_base (643)..(654): a, c, t, g, unknown or other
ctatgcttttatccacaagcctattatatgaagaaagtttgagttgaatattttgatatatgtatattttgatatatgtatgaatattaaattattaatatttaatgttgattaatttatatataaatataaaaaaaattattcatacatgagattgtgatttatagttgtacggagaattaagaccatttagtcatgaataatacagttaacaacatattaaagttatgaaatttttgatcagtggttgttagtgcgattcattgatgcccgttattcggtgcaagtaatcttgattcggattactgttgtagcatgacattaagtaaagtgttgtatataatagaaattatatgtgacaatgaccgatatgaataaacttttctttatcaaacttatcatttactataaagatctaattcatatcataatgatgatcaatagtagatcagattaaagatcttgagtaattatgaactcatgttcatgttattagtgaaattgattcattcgttaaagtttcttagagaagatattcttacaacttctactttaagaatctaagtctaataatgtggatggttaggaacatgatagaatgttgattccctttaagtgttaattttagaattaaaaaattgtnnnnnnnnnnnnattggatataaattatactttcatgattatatcaatagacactgcattaaaactcagtaaatataattctataattaataagagttcaattccatacatatatagtgaagtattcatggaattaataaatacgattatttaataaaattcaataaataatctagtttataaaagcttaaaattataggtccatgtgcttggattgccaccttgaaacactgttaacgggtgtgataaagttggggaaaatctattttgaagccatctatattttgttttatttttttaggttaattaatttaatatataaatatttgaatttaaaaagt

SEQ ID NO: 94029 - DNA, 754 bp, Cannabis sativa
aacaatcatcctctatcgaacatataacaatttaatacaaaagtataaaagtcggatacactattgagcccacaccgtcctctatctattaaaaaaataaaatatgcaataacaatcaaacctatcatcgggcccaccatcgtcctatgtcgaaccgagacacattttataaaaataaataaaaaaaaactaatcagactcactatcagcccttacgttatcctctatcagacctaagcatatgtcctttagcatcgagcctatgtcgaacctacatcgtcctctatcagaccttatcttcaacctcttttattgcatcagacttatatcaggcctatatcagacatgtattggatctaagctaaaacccagatttcacgcagtaacacatataggacccaaaataaatcctaaatctcatcaaactcacacacatcacagattaggcattacaaaacaaaaatataccctaaatcaatgaacaattgaactctaaaacaaacatatgcataaatttttataaaaaagattcaaaacttaccttagacatctctgtgcgtggttgtggtctgggtttgggtagtaacggtgatcctagtcgcgagatttagttgagacagtggtcctggccacaagtttgggttcagacggtggttgtggttgaagttttgggttaggatgctagtttggacaaagagagcgagagagaattgagggacagagagagacaagtgacttgggtatttgagagggg

SEQ ID NO: 94030 - DNA, 834 bp, Cannabis sativa
ggaaatcaataattcaagtctattccaccatttaaaatattatcctgctgtcaattcttgcttaattaattatttcaatctttacatttcagttttagttcaaaaatcaatctatttaatttgaataaaaccatgatcacaataaagaaaatgcacacaccaacttcagaattcaatttaaatccaaaattaaaaattgtgctaccattttaagatgttatcaacaaaattgaacaagcaaaaagaagttaaatatataagcaaaaaatcaaactaaataatatatgattgtgctcctcaactctgtatattgaactacaagaaacaaaaaataaataaataagtcaataaacaaaggaatagttttgatcagctttgtttcaatgtgctgaccttctcaagtagattactcatggtaatagaaaatgaatcttgaaacttttcaaactgagaatctgtatcaccataaaccagaccaggcaaaagttcataaacaatgaaccttctcatatcatccctttctttcttagatatcttcatcaacacttcgaccacattaacctccatttgtctcacctctttttggtcaataaaaacagagtactttgcatgatcttctggcaaatgccatggatattgataaaaagctgtgaatgagtcaaacaacactggtatgcagcctgatacaagagaatcaaacacagattttctagttgggctatctcctggtggctgcaaacagaattcagactccatgaaaagctcgataacagactcgggttggctgcagccacctgaattgcagtcaagaaattgacagtcttgatcatctac

SEQ ID NO: 94031 - DNA, 802 bp, Cannabis sativa
tatgtgtcaatatcactattagtctaacgaaatatcaggtctcatatataatttgatgaaataacctttaaagagtatcgctagctaatcgcaatgcgacatatctagaggtgctagacactattggtgcctaataacaatgctcatcttttaattatgatcattgctattagatatcagtagttcccaacaccttttatatgtatcgctctacgattggttaatgatattttctaaaagtgattttgctaagttgtatagaactcgatacttaattatattaataaaaatatcacaccaagaaaaatgttaagcaccaataaaaactgtgaacaattttctttaattattaatttatatttatggtacaaatcaaagataagttgtgttgtgtgttaatttgtgctattccttaaaaaaggacttaattaaagcgtaacttagccgttattatcagctaagaaaacgtctaattatgattgataagatcaatttttttgaatatttatttatttttttaacacaattttttgaatacatattacagcttatattgagcatcgtttttatttctacggcattttttatttttcatactttaaaatcacttcatgaattatttttttatggattaagttactccagtgattactatggtctcgtttggtacactgtataatggtcgtattgtattaaataataaataacactgtgtttggataaagcaatgttttatattaattattacgaccaaagttttttttttttttttgaatgaattacgaccaaagtttttaataca

SEQ ID NO: 94032 - DNA, 774 bp, Cannabis sativa
  modified_base (710)..(731): a, c, t, g, unknown or other
acgatacgtacacttgcgtgtgctaaatatcgcaacactagcacccaggttaacgatttgtcactttgggcaccttccaggtatcagattgacaatctggcttttttcattttcttcatcttcatcaagaatggggaaataggtctttttggggaagaaacatcaattcatgggtgttagaattaaggcccagcccccaagttgacacttggggctggcccaacacccaggttgacttttcgtcaacctgggatgatttcatttgatgttttttgagaactcttccgagaatcttttctattttcagaaaagattgagattcaactatttttagagactaatttttttttgaagggccataacttggacctagcgctcaggttgacacctggcactaggcccagtgcgtaggttgacatattgtcaacctgggctgtctccaatcaagttcatgaaaatgtgttctggatttttttttgcaattagaaataatgaatattcaagaaaaacttggggagaaaaccataaacccaagctcttagaaatagggctagcacccaggttgacctagtgctgggcccaatacccaggttgacaatcaatctggggcgttgttttcaattactcaaatgcgaaatctaatttgaccaatgaatcccaaatggtcaaaaatggggaaggagacctcgtcctcaagttcaagaatcttnnnnnnnnnnnnnnnnnnnnnngggagctcgtgaatagggtacccatcacccaggttgacaaatg

SEQ ID NO: 94033 - DNA, 840 bp, Cannabis sativa
acaacaaaaaagccaatatcccccacttttttttttttcttcatttctattttaatttagtttatagtagatcatacgaatataatcacattgattttgctttaagttagttgataaattatacaattaatttgtgtagcacatataatcgtacgtttatatataatgaatagaaaagaaaaaaaaaatagaatcatttgattcagttaacaccttgtacatatctcatcattttatgcttaattgttatttaatgatgattttgtgtttttattcttttgggtctagtttgatttatgttatgtacagtcattaagttattttccaatagtaaatttgattgtgcaaaatttcttttaggggatttaattaattatgttaattttttacatgcttttacataggattactttaaaataatcaccgattcatcagtgaaaaattaaattaaaagtataacatatatgcacggttaactttaaaagtgagaaataattatatgccaaagttgctcttaataatattaaagttaataattaagagaatcttagactttactcattcttttgcttaattataaccttttttcttttctgtaatatatatccaaggtaagcttccactcttcataacctttatcaaaatttcttttaaagaatgattttatgtggtgggttcctatatataatagacaaaaataataacaatttacatccgaaaattcgtttgtgaccctaattaatctcatgtacagaataaaaaacaacattttatttataccaaaaaaaaaaaagaactagcccatacatttctctattcctattattgagaactaaagct

SEQ ID NO: 94034 - DNA, 730 bp, Cannabis sativa
acgttgtaattcagctagtacagaagcttttacaagcacttcatctgactcgtttgcctggaagaacaagttagccatataacattaacaaaccaaaatgactcaacaatccactgtaatacacacataaatatagaattgacgaatgttcataacaaaaactttggtaaaatttcaccaccattctataaaagtaatgaattccatatttatctttctattttgtttattttttagactcataaaaacaagaaaatgagaaacactaactgtttgagtaacatatggaactgtttcattcaatggaatggacatgaaaagtagcatacttcaaatggaaaccaataaagccataatcaaattcatattagcaatataaaataaaggtatacctttgtactagtcagtttcaacaatccaatatcaccagagtatcttctaaccaaccagccacgaatagctgcaaaaagaaatcgtcaagaataataagctttagtttacagtgtagagtctgctagccaagaccgtaaggaatatccaagattcgcatgcactgatcttaacagtgattctagtgtaattcaaacatcattatcattgggcattagctcttgtatctgaacatgttatatttacacttgatgcctttcagtaacaagacaattgatatcctaaattcaggctggaaatagattgaaatggaaacaaaacataataatgcaaaattaaa

SEQ ID NO: 94035 - DNA, 624 bp, Cannabis sativa
gcatgaagtagtagaggtggcttccagtgaagaggcaagccctattgaagaacaggcctacctatagccatgatggccctcagttggaatgctcgagggcttgggagtgattgaacattcctcaacctctccctggtggtcaagatgtacaagtcttccttgttttttgttatggaatctagactttgtaaaggatctattgatagacttaggaataagctaggttttgctagtggttttgagtttccccgtgttggtttaggggtggcctcttaattttctagattatggatattaatgtatttaatttcaattattatataaaccatgttcattgttatgtcttcggtgctaatctttctgcttttcattttactggtttttatggagcccctactccttcgaatgtaactaacacatggcaactcttgcataaaatttctcattcgtgtgcccttatatcgtggctcattatgagggattttaatagttttttaacttgggaagataaaagtagttacaacgttcgtaatggcccatctgaccattttatagatttcatagataaatttaactttgaggttattgattttaaggggtctcgtatgacttggaataacaaca

SEQ ID NO: 94036 - DNA, 649 bp, Cannabis sativa
aagcttctatgatgaagtgataatagaggttgtttcatctaaagggagttcagagtcataggaaagggatttcagctcaatcgaagcaaggggagcttatcttcgaatctaaagggacttacatttgaatctcggatgattaatcaagatcttagggtaaatttttgtaagaatctttgatgtattgttttacatacatttgatttataaattggagtttgtatcttgacattgatttttattggaggttatttaccctaattggggaacctaagcactagccgcctagaatgtgtttctagggcaagtgaagcttgtcaatctgtggtgtcactactacaaaagtgtatttttccgtcggttaatgccaaaaaccgacgcgaaaaaaccacaataagatttttcgtcagtttggaaccgacgccatattcaacatttgcgacggtttaaaaataacatattcaacatttgcgtctgtttataatagacgcaacctagcgtctattataaaccgacgcattaaatgaaaggaaaaaaggcccaattcaataaaggcccaattaataacacataaaacctacatataaactaattaatataaacccaaacctaaaacccaacaaccgcaccccatctctctctctctctc

SEQ ID NO: 94037 - DNA, 888 bp, Cannabis sativa
aaagaaaaaacattgtattctactaataaaaactctacaaaaattcctatgaagcttcttcttcttcgagaggaacgagaggaatatcgacttcgagtccatagtgtaatgacttgtaatgttcaccacatgccaacatggctaatataatagactcgtggactaaggatagttaacatctgaaccacgtacaaatttcatgtctattatttattattttatttctttcttaagctctaaatattcggtttccaaaaatctcgataaacagtttggtgctttcattaagagctgaggaaagatcgaaacatgcacgatgtttgtcaaggtgaatctcaagttacaaaaaggaaagcatgtccaagaaaaggaaaaaagacacgacttaactacctaccaagatcgggttagaagtcgaaggcttgttggccaagggcgtcgtcaaagatgaaggcctacacccctgtccaagcaaggaaagtggagaaggtggaagcaaacagtcttgaaggcctcgtagcccccgtgcatatttggaaaaactggaatctgaccagtcaaccctttagtagcacgaaaagccagcagtgttctcgagcttgggccccccgcggctcacaaaggcacgaccatgcagaaacgacgagatatgagaaatatgtgggtctagagggaaagctaagactagttgcaccggcagcaagtacctacgaggaactactagatataatggacttgtcaagctaagcatttcgtcactactccgaggcctcaactgtcgatccctgtgccggtgttgatgctggtgccaggtctgttgccgtcgactacttccactgccttttcactgagctgtgaagttgatcagaaactgacattacaggcccc

SEQ ID NO: 94038 - DNA, 782 bp, Cannabis sativa
aattgaatgttaaatttaatatttaattgaattttgcaatttatattataatttttaatttatgttgccttcataagtgatgtgttgtccaagctcactgccaacacatcatcaaattcaaagagacagaaaacaagtttaatattttccccactacttttttgacatatacattttctatgcattcttgtccagctcacgcttcacttgtcatgtcaaccgtgaacaagtgagcataatggtctgatcttctttgaaacgttagggataattctatatccaaagcgaggttattttgcatttatgattcacttgttgtaatatttatttgagtaatgtaaattatattccacttttattgttatgttttttatccatctatactactatttatgttattatatactaaatatatatagacttaatcattctttttctatatatttttatttagtgattatagtaatgatagtattgttcatttctatcttttataatcatttttatttactttttgttaaatgatatataggtttagccatcctttctctatgcgtctaaaaattaataaaaataatattaatgttcatttcttttactatcaccaccatctttatctctttgtctctattttttttactaatataatatataggattagtcatgttctttctatgtgtttctagttagtaaaaatattattgatttatttttatgtttatccttttattacattattgcttgatgtataatgtcaattctaggctctacataagattaaa

SEQ ID NO: 94039 - DNA, 562 bp, Cannabis sativa
cgtagcttcatcaacaggtggctgcactctacagcagtatgagtcttcgaagcagcataattcagagttcgtttagctagcaggtgaaatcaatccctgcacaaatagatgcatctacattgatcttaatcttgttgacatcaaaaacagaattcttctgtgcatctctatattgagtaaggtacggtgatgcagaagaaaccacataatctgccacaccagaagtaaatatactgaaattgattatagaaggcatgtaatgtgttacagatactaattagaagtttaaaattgtgttttataaatatgaatgtacatcctaaattaaaagatgatcatcctcacaaagttcagtcaaaagtaatatactaatattgttagcaagtatacatactgatcaaatctatggccatatattgtctgttattcttacgaaagaacagatgatcaggtacatttatgctgataatccatgttttctaataaactgaataaccttataacataacaacaaactaaccagtgaaccagtgtactacatttgatgcagatcgaccttctg

SEQ ID NO: 94040 - DNA, 558 bp, Cannabis sativa
ttaaaaaaaaatatatatgtatgtgtttatatgcaaatgtgttgtatttttgtgtatatatatatatatttatgtgtatatatatgtgtacttaaatatatataattatatgtatttaaatatacatgtatttatatatatgtttacttatatatatgtatgtatatatatatatgtacgtatatataaatatatgtatgtatatgtacataaataaatatatacgtatactagtgtagaattgtatttattatttttatattttaagctttttttagtaaatatgttttgggtgttgctttgcttgttgcttgaaaaaattcacttcttgttatagttgaaggttaatttgtttttataatatgttaataaaaaatagttttaatattatattcaacaaattcataattttggtgtacttgctcatacaccatagaataaagttgttctaaactttatttgccaagtataccaagttatggatttacctgaaaatatctattagtaaagtttaaatattttatatattcattcatattgaaaatttaagaatgatca

SEQ ID NO: 94041 - DNA, 752 bp, Cannabis sativa
aataataataataatacatatttatttatcaattaaaatgatactacatatttatattttaataattataattattattttatatgattgtgaataattattgttgataaattatataaaagtaattgaagttattaaaacacacatttagtttagtagttagcctattatacttgtaataaaaaaaaaacacgaatttgagctcgtataagatagtagatggttttgtttaagaaaaataggtcaacccaagtatagtatgacatgattccgattacaatacgaaattcaggtgtaataacggcatgttagaatatggattagtaaaatcaattaacattaattgttaatatttttataattaattatgattttattatgttatgggtcccattattagaaatgggcactagagctataatttcttaatttcgaagattttataaaactctaggagtattatttgtgttgtatatggttatgcaatttttatgatttttgctcggtgacgacgaaaaatgcgttggatggctaagtcacatggataagtttagaacatttccttagtgcgtcaaatatttgagatattatcgagtttgagcggggttatgatttttgaccattttacccctaagcttgtattacttaagttgtaagtttaaagggcaatttggtcattttaatttattgtggataggtgtcctattttattagtggcagctggactctcctttaattgatgataataataa

SEQ ID NO: 94042 - DNA, 612 bp, Cannabis sativa
tggttcttgaaaagctttgatttgtggtgagtttaagctttttggttgtgattatgtgtgtatggttagcatggttgaattgatgtgaagagtgtttaagaacacttggatttcgtttagaaaccaattctagaacctatgtgaatttatgtggaaatagtaaatgtcataaaattaaatatttctttttgtatatagtttttttctttcttggaatttgttatttgttattttgcttattttgatttgttattagagacataaaataacaataatttatttaattttgttgctagttatgtgaatttttttgttcataaatattaaataatttaatataaaagtaacaaattaaataactatccaattcgtacttttgcggattcaaatagattgaatttgaactattgtacagatttgattggatccaaaaaaataaaatgcgcacttagtgcggatcggattcactataagcaaaatagtgcggataagattagatgaacaccgctactgtgagagcataatgtatggattatatatatgagaagagttatacgagtaaggcataactgggttagacttgataactataactgagataaaccatattaa

SEQ ID NO: 94043 - DNA, 795 bp, Cannabis sativa
tcggttccggtggaccttttatgtaatgaccgagaggtctagtttgtttttgaatgatatgaacacgcttattttcaaaaaaaaaaggaaaacaattttaccaccctcaaagcaatggttagacgattaaaaattctcactaatttatggatatgaggtaatgattcctgtcgaggtagtatcgaaaaacctgttgaagaagtcagttcaaaagacaactcaaagttggaactctgatcttacaaaaaagcctttattgtttaaattatttgaaaatgatgataatctcccaagctttggaggacacatgtgttatttgcatgcagttagaaatagtaacattttaatttttttcattgttttttcatggtggatgtattttacacttagtcaaattttagtttgtaaagatacccaaggtactgtgagtggtaaattataatgcagattccctcgtccccgccccgttaggagattctctattccatgtccgatgggaaatatgcaggtataggaattaaaatctttaatggagatgggaatggagggagcactccctgctaattccacgtaaaatatgatgaggtagttgcattaagaaaaaagtaatcagcaatatatacatgtactcggcgaaacattgtctcaaaagtgaacaaaacgaacaccactgctgggagacttcaaaccaatttacaagcgacgctgggttggattcgagcacagcaacttctatttgcccttgttgtataagttatcaacgacctcggtggttcacagtttcaaccaccggag

SEQ ID NO: 94044 - DNA, 1039 bp, Cannabis sativa
ttaccaaattcacatcaatcattggaacctctgaactcttacggtttaccacaagaagccacggaatcaaaaacttctctcttccaacttgaaatgatctgaacataaacgaattcatatttccatatgatattaagaccttcccaattcaaaatcttccatctttatgcaaataatgtcatatgtgatcagtttaaataaattgaaatcaaattacaggaccggaaatccacattctacaacttgaaagaaagagggttataaattgttcataatgtatcattaaacctaattcttattcaatttcttagtgaagtttgacatgtaaactctaaatcaactaacactttatgaatcaaaacaagaaagaaaccttcaaattcgaattcattgcacaattatatcagctatggtagtaaaatctatacttacaatttgtacggatcagcaccagtgtaacccgtgggcttctgtataggaaccagaacctatacatagaaaaataataaaaaaaattattctcagaaagacataatcagtaataataatcgcaaatgtaaaggttgatttacctcacgattgacgccgaagattgggcaatggcgaccgatcacgtcttgccatacagttctagactgaaatcacaaataaatcaaaaagaataaacaaaattgaaactctaaacaccatgaattgccgataaagtatagaaatggcaattaaatctgagttttcgataagagattacgaacagagtggtattgacccatcttgctcatggaaactatgtcgccaggcctgtaagccatcgtagagtaaggaaagtaaaagaatagtagaaaaagtaatgaagacaccattgaagttgttccattttccaccatcgttctggaatttgcctctgacttcttcttcttcttcgtcttcttccaaaaaacgatacagagagagagagagagagagagagagagagtctgaagctataacagaccaactcactgagccaccagaagatggtaatcgtgtgggccgggccttt

SEQ ID NO: 94045 - DNA, 939 bp, Cannabis sativa
taaagcacttttacgaatatgtttagatctgtgatttatatatttctgaagtgttttataaatcctaacaagtggtgccagagctatcgttgttgaattaattgaagatctgataattttatttatgaaatttagggattttgaaaattagggtttttttatcttcatatattgtatttttgtttcaattcggcgttgaaattttgattgagtacatatatattatatgtttcaaattaatgggtttgaatttgatattgtttatgtggttgatattgattttgtttctttcgattacgaggatatatataagtgtatatcaatatttttttaaatcttatgttttactcactttcaagcatgttgggcgaccaattggtaagaggaccatcatgtctttaccaatgcaagaaaagcttaaggtagagtggtacattctgaacaattataatgtagtggagaagtatatcttgtaagatactttttgcattcttaatttagttttcttcactcgcgacattctcttacaaaaatttatttatgtgcagtgagcataggaacgagctacaacttagtggtaatcaaaatcttgacacagttcaagagaaaaagttttccaattggttcaagtctcgagtaagtattgctttttactaattttttcattcaaatacaagttcttgtactagctagtattgattacatctttcactcaatgatagatcaatcaacttcgagcggatagccctggggaagtatcagatgagttgcacgccatcacaaattcctctagtctagcatgctattgttattttagatgtattgttaacaatgttaaattcctagttgtggattgggatgacaatcgtaacacccaaaacagtggtattttggtgcctagagaaggtggtgaaattttttatggcgtactcaaacaag

SEQ ID NO: 94046 - DNA, 679 bp, Cannabis sativa
gatgatgaataggaagagagaataatgagaaagtgagattaaagtgaaatgaacgggtattgaatatttaaggtatcatatttcttatcgtcaattttaattaaaagaaaatttaaaaaaaaataaaaaagtgacaacgcaagtcaaatcacacttttatcacttaaaatacaatacaattttaattaaaaaattaataaaaaaaacatgtcacttttgtgatagtgacaacattacatattcaattttttgttaatttatatatatataatgtgagtggactgtagctcaaaattaaaaaaaaaaaataataataaaatatagtatgaaaaaatagtacacagtataagaaaaaatattagaaaagtaatattttccttacaacaataaaattaaaagaagttttagtaggggcatgtctttttggcccagcatcaatatttttggcatagaaataaagtataattcaaatatttttgaaagatgttgtaaatagtagtattttaagcctcctagaagtttgacattttgtaattgaattcaaaacactaaatttcatgtgtgtatataggaggcttctaaatattttttttttatatatatagtttacaatataaaaaatttatatggccgaatatattgtaattatttagaaatatttataaatttggaagatatt

SEQ ID NO: 94047 - DNA, 623 bp, Cannabis sativa
gttccaaacgagcccttaatctccttccaactcaaactcacataacaaacacccaatttttatttttgatgtctgaataattataatatcaaataggtataaagtaaaagagacacactataacaaattgttttaactctattatgttttaaacaattacgatcttaattgtcatatgaaaaattgagaataaaaatagtatgaggttaagaatcccttaatctccatccttcttcactaaagtccaccaactaaaaccttttataccaaaatttgtatataaaactatttttattgctttggagttcttttggagaaggctataatgagaacattcttccttttatgttttgctaagaatttctattcattttcattagatgaatcaataatttagacaaatatctgaaatatttgatcaaaacaaaaaccatatacaagttcctcacaaatatgcaaacaaaatctttgttaaaagatgaagctttttgatgtgaatgttgttgattaattgaagagtcatattacatttactcaattctaatcctaatgcatataacatgttcaagcttccatatgcaaaaccaatggaaatacttacagaataaccaagtatggagctg

SEQ ID NO: 94048 - DNA, 744 bp, Cannabis sativa
  modified_base (480)..(483): a, c, t, g, unknown or other
gtgttatgctgctgagtttttattgttgatatgtgggtttgaagctcaagtttgagagcttgaagttgtgagttttaagcatgttttgagttgattttgtaatctgaattttgaagtttattattgaaaattgatgcatgaattatgtattttaataccctatctttgagcttgataagttgtgaacatgttttgagtgtttgcttgtgatttgggttgaaaagattgggttggatggctgaaattcgtgttcttgcttgctggtttctgggtttggaacccaggtgccgcggcatgctctgagcatgctgcgacctgcccctgttgtgggaacctgggagttggccccaggtgccgcggcatgacttgggcatgccgcggcccgccctcgtggttttgggcagttttgtgtcgaactttgaaaattcatatcttgtgattccgaactccgatttgggagttctatatatcgttggaaannnngttccgagctctgtatgattatatgaattttaaatgccatgatttaattttatgagttgaaaaccaggggttaaccctatttgtgaaaatcccaaatttgtgtgactaggattaccggcacctgatcaggagcacccggggattcagaatctctgtcgattgcgggacaacaggtaagacagtgattagcatgtagagtatgggcagtggcacctatattgaatgtaatgaccgctttagtaatttggattagtaaaggca

SEQ ID NO: 94049 - DNA, 762 bp, Cannabis sativa
  modified_base (26)..(48): a, c, t, g, unknown or other
  modified_base (693)..(700): a, c, t, g, unknown or other
tgcataaaatcaaaatccaccattannnnnnnnnnnnnnnnnnnnnnnactcaaacttggttaaatctaacaaacatgcatcaaaccttgcttgaatgtactcaaacaagcattatataacctctgaaaacaacaacaatcaacaacaacacgcatagcaacagattttatcatttcaccattaaaatcaaggttttgagtcaaaattccaaacttgaacaaaagcaactaacatgcatcacaaccagctctatcctactcaattaaacatgtttaaacatctgaagacaacatcaacgattaacagcagcaacaacaatcaaaaactaagcatgcaactcataaactttctcaaaaattcaagaaactttaaaagaaagctataagaatcttactaaccatttgagatcactaaatcttgttaaaatcagcttgaattaccaaggaaaagccaagtctttgctgctcaaaggggggccgaaaatagaaagagttgagagaaaaaatagaattttgctttttctttgcttttttctattttctaactttgaataaaataatgagtaaattcatataataaatccttatttcagccaacaagattccacgtaatcacataacacattacactaagtccactaaagaacaaaacataaatcaggcaaaataaccattttgcccctccacactaannnnnnnnaaagggcactaaagggtattttggaaaattctaaatttccgaccactctcgatattcccaat

SEQ ID NO: 94050 - DNA, 536 bp, Cannabis sativa
tccctttttgtagttggcatctttcgtgtctgagcagtttctttcttttactaatgttttgcgagaactgtttatttcacatagttggatttctaaatgaacttttacttttgatacagctcctttcaagtttgaaagcccatctcctgacgatttggtttcaattggattgcgttcatccaaaatgggtttgaaaggtatccatccttttccgaaaaataaatttcagttttcgtatgatttgctgcaagttcatttttacattgaacagacatgtcaagtttttatggagcataatattacaagttatcctttagttatgctttattactctgtaagttacatttgattatttcatcaggtaatacatataatttgtagcctgtgtgagagaaagtagtcttttccttgttcattgttagtgttagtaatgagaatatgaaaaagtaattttgactcggaccgtagattatttttcttgcaaaaatgtcgacgttcaccaacagattctgtctttgcaactcttcctgtttggt

SEQ ID NO: 94051 - DNA, 1427 bp, Cannabis sativa
aaagattagaaaaacttataggatcgaattttaagaggtggcagcagaagatgttcatctatctgactgcaataattcttgcaaaattggccactgatgaaatcagagctcaaagaagatgagaaagacaccaaagtcatcgatattgttaaagtttgaaagaaaacaaattttctttctcgtaattatattataaatagcttagacaatgtatgaagtgtatcataaaaagaatacggttaaaaaattgtagaagtctttggattgaaaatataaaattgaggatgctagctcaaataaatttatggttggtcgattctttaattttaaaattgtaacgtccccacttcaagtttccagtagaccttcccccacagactaatgactcttatacacgagtacgttactcttcgctacttcatgaaatgacgattgaccctgcagaataacacgagtctttccaacatgctttgtccttactcgtctgcttcctagaaatttttttcaagaggtcaactatccagaaattaccccaagtcaaccatactgaactttaaagtcctttcatgatgggctactaaaaacaagatatatcttgttgatataggtagtatcaatcaatctatttaaacccttttaaaatgtgtagtctcatacctacgcagtttcagaatcatcacacttaacctttctcaggcaatgtagatttcacagcacccagtctttccccttgcggatcacgggactctctcacaatcaccccttttgggggtctggcgtcctcgacgaccacactttcgactgggtcaggctttgatactatttgtaaattcctcacttctagccttcattgggccttctcccatagactaatgactcctatacacgggtacgtcactcttgactgcttcatggaatgacgattagccctgcagactaacacgagttttgcaacatgtgttgtccttactcgcctgcttcctaagaaaactttcaaggaggtcacttatcctgaaattaccccagatcaagcacgcataactttagatctctttcatgatgagctactgaaaagaagatacatcttgttgatacaggtagtaccaatcagtccatttaaaccatttttaactgtgtagtctcatacatacatagtcttaaaattatcacacttaacttttcccaggcgatagtgggattcaacaactcctagtctttctccttgtagatctcaggactctgactatcacaaaaatggtatattctaaaactgtgataagtcaggttcaggaaattctgtcgatcttgcataagatacattctgagggaatgattcttagggagaccttccaaatagctactatggttaagaagttgccctttcctggaaggagtacaaaatctatcttaagcacaagtaaaaacag

SEQ ID NO: 94052 - DNA, 3437 bp, Cannabis sativa
aaaaatatttttatatttctaattaaaaaaactatcaacttattaaaaaaatgttacgtgaaacaaaaatgaagggtcctgttgaccaaaatgttatatgtcaaaatatatttccaaggtttgaaaattatttattccaactatatgttgttgttgttttttttatctttctcttttatgagtctaacgtatttgaccaatggttgagatttgaaaataatttataacataatatttagtattttttattttttattttgaaaaaatgagttgtagccgtaaacaaagaaatattgttcaaattaagatgactgactagttgggccaagtggcaagtaccatgtcttttggtggaattttacatttatataaatataaatatatacatcttaatttcattagtttcttgatacattataattaagatatttattaagataattatataataacataaagtaagtaaagttacaccttattatatacaaaaaaatagtctataatctataattaaaagatggcttttgtattaaaagactttgttgtcctagtcaaaacgcattatttctctttcttaatttctgttaattaacaaataaccactacaaacaaaccatgtaaacaaacccttttacacttcaaaaggtaattagtaatatatatatatatctttatatatgggaaaatttaatcatgtgacaaaatacacacatttttttgcataattttttttaaacaaagaaaataattccattaataaaataaattagtccgaagacacgtcaaggaataaagctagtttagttaaagtatgtgcatttacattattaattttcttacaaagatttaaggaggggtgatcaccatagtttgatatttaaaaacgtctaagatagcttagtaaattatattattatcgttaaaaattaaacttaactatttaataactgtaaattacactataaatatatacattattatcacttatgatcacataacaaataacctagtaaaatcgttaatatggtagatttacatttgaatttgtaatatgtattagcctaactaaataaacaactttaacacaaaaacagtttttttttttattgtttttaataataacacaaaactgtttttagtttttacatgtataacaacaaaatgtgtcgatcttcgttcaaaagcgcgtgtctttgacggcaacgacgttaaattagacggcaaacccgtttgacgggttgacggcgttaaattagttaattttccccaaactttttttccttctctattatatgatctttcattttcgtcttcgtttctctatccccattttctcttatcagaaaccctaatttactttctaccaatttcacaaaaattgtaaagactctgaatttcacttcaattgatctcatgggtcagtctagttcttcgcttggacctccttcgtcggaggattatggccaggaaatttctcggagttgcagatttagcttcaggtcttcatcttcttcttcttcttcgaaagaagaaggtgagatttttaatttgaaaagcggtggttttgatggaggaggaagtagtggatttgggtttgactatacaagtaatcttcctgatgagtgtttagctttgatttttcagtcacttggtgctggagatcggaaaaggtgttctcttgtttgtaaacggtggtttagagttgatggtcagaatcggtatcggctttcattgaatgctaagtcagagatattgacttttcttccttctttgttagctagatttgattctgtaacaaagcttgctcttcgttgtgatcgtaaatcgattagcgttaatgatgattcgttgattttgatttcgattcgttgtcctaacctttcaagggttaagcttcgtgggtgtagagaaattaccgatttgggtatggagttttttgctcaaaattccaagtctttgaagaaattctcatgtgggtcttgcatgtttggtgcaaaagccatgaatgctctcctcactcattgtaaagctctagaagagctttctgtaaagaggcttcgaggaatccatgaaggttctgagttgatcggggaaggcatggctgcttcatctcttagatccgtttgcttgaaggagttgatgaatggacaagtattccaacctcttatagttggagcgaaaaagctaacgactttgaagttgattcggtgtgttggggattgggatagagttttggaaaagattggaaatgggaacactggttttgttgaaatccatcttgagaggcttcaggttagtgatttggggctttctggtatatcaaaatgttcaaatttggaagttttgcgtattgttaaaactccagagtgtacaaactatggtcttgtgtgtattgctgaacactgtagccaactcagaaagcttcatatagatgcatggagaaccaatagaattggtgatgagggtcttattgctgtagccaaacaatgccttaatttacaggagcttgttctgattggtgtgaaccccacttcattgggcttaacagcagttgcttcaaattgccagaagcttgaaaggttggctctatgtggtagcggctcggttggtgatgcagaaatagcctgcattgctgcaaaatgtttagccttgaagaagctgtgtatcaagggttgcccgatttcggatgtggggatagaaacccttgcttggggttgccccaatttggctaagattaaggtcaagaaatgtaggggagtgagtggtgggattgctgagtggttgagggaaagaagggaatcattgatagtcaattgggatgatggtttagacaagcctttggttgatgctagtgttagtagtagtcacactggagctcaagaaatgggaatggtgcttcaccaaacggttcgccgaggaacagatgctagtactgcagcagcttcagtagtagtagtagtagtagtaatggtccattgacaatgtttagaacaaaaattggtgtttttgcatatagaaatttagtgcaatgtgctttcagcagatatccaagtgatgataatagatcatccaacagaaacttgtgatgatatccagcttgttattttcttgaggcaaagcattattattcttttgtgtactatttactgatttgtatgtatctttggggttttcttttagtgaaattgaattgctttagctctgcattttgttaaggttgcttaattgtacattatgtgttttaaatcaatctctgtaagtaactacattatgtgatgatcctgaaatgcacgactcccccggagttcaagttctggtaattgtaaatctttcatttgttctaattcttcatcttttctttaattttgctacatttttggttctttcaattttactgcttatgtcagattatgtaagtaatgagcattattactctt

SEQ ID NO: 94053 - DNA, 855 bp, Cannabis sativa
tttggtattgacttgtattaattgattgtgtaaagttataatatatttttaatacactcgatccaacaccaactacgggtccggtcctgggtaccgggtttgggtcccaggtccgggtccatgtcctgggtccaggtttgggtctgggtccgggtcagggtcagggtccgggtcggggtccgggtccgggtccaggtcgaagtccgagtccgggtccgtgttcgggtccaggtccgggtccaagtttgggtctgagtccgggtcggggtccgggtccaagtcggagattggtgttgaccccaaatccttggtaaatattataatacaagctaatacagactatttattatgtattaaataatacaacatacaccgtattaaaaaaattagtcataatatttaatacaatacattgcttaatccaaacatagtattatttattatttattacaatacgacccttatacgacgtaccaaacaagcccgtaatgatataaattctcaatcttagaaacatctcctacttgtacaagcttactaaaagaaacttaaacttagagttaaaatagtagtagtggtccaagaaagaataattgctcaagaaatatttggtataaatttaaagtctttgactttaaattttagatttcacatagaaattttaaattttagtttctagaatacattggacactacattataactttcacaggctgttaatatccattttctaataattgatctgaagtatatgttaatgtatagattatattttgtgaccagaatctacttgaactattctaagaactctttattgtaactagacctaagtttcatcaaaccacaataatatat

SEQ ID NO: 94054 - DNA, 596 bp, Cannabis sativa
  modified_base (37)..(40): a, c, t, g, unknown or other
aaagcttccaccaatgcgccagtttcatccctaatcnnnnctgcaaagctataagttgcagttcttgaaaaaatggcagtatctacattaatctttcaggtgttttttgctggtttggcccaagtttcagcaccatcgacatcaataaggaatgcagccgtaggattaaatattgaatcttcagcccgagggtaatctacgagtaaagcttgagctaagtgagcaacactcgcaacactagaaaattacacttcttttctttcttttttttttttttttttttttgaaggaaattacacttcttttcaaaataactgaattatgcaaaacaattactttaaataactgattttgaaaattcaatccaaatttaaattacacttttttttttttcaatagaaatatctttatatttcatttcttagattccatcttataagcctctattctagtgaagtggttaatctaaattatacttaatttcgagagagagaaaaaaaaagaaatatgcaatataataatatttatatattttaaaatattatataatatttcgtaaatataagttgggggagattgtgtttctgtgtatgtga

SEQ ID NO: 94055 - DNA, 518 bp, Cannabis sativa
aaatttcctttatttgtcaaatcagtctctcacaatatatatgtatatatattactgagaaatacagggaaaatttttgtatgtctcagaaagaaaattattatgtgaacagatatatgttgcatgtgacctatatatctatataatatatatgaaaattagtgtgctgattataattttttaaataatttttatgtttgaaattaatatttatcattatatatgaagattaaaatgtttttttgcctcaatttagccagtccatatatatgtatgtatgtatgtatatagctatatatatagggtatagttagtagggtaattaattagtgccgaaatcattattagggtattgaaaaattaacaacgtatgaagatttgataggaattttcttattcttctctctctgattgggtagttttgttaatttaagattaattattattacatgttttgcttaaccaattagtttattcatctaattatattaatgtaataactaattactacgtgattc

SEQ ID NO: 94056 - DNA, 861 bp, Cannabis sativa
tgcaaataacttaatctactaccaaaaagcttcagaacttcaatcaaaatgacaattatactcacagcaccaaaactcccaaaatcaagctttaaacctattttatgctcactaaaatcaaatagaaaaagactaggaatccataccttaatttgaattctccttaatgaggttagtaagactacaaatccagcaacacaagcccttttcttgctggttctttagggtgcacgaaagagagagggaaagaggaatgcttcaaatctttcttcaattttctctccttaacctttctttcttttaatattcttattattatctaaatataggtttaataaaaggtagcttctactacccactaaaagccaaaatactattaggtaaaatgacctatttacccattcaattaaaatcaaaaactaaacaacctaaggacaaattggtcatttccaaatcccgacaattaacacttaacaaaataccccgagcaactaacatacatcaaaatataaaatatgactctctataggctccaacgtcgctttccacagcttccgaacacaacacaaaaattaggtaattaaacataaaatagcataaaaacatatatgatatattaaatatatttccaaaatatgcatttcataattattaatacataaaccttaattatttaataatacaaggtattaatcatatgcggtctttacaatcatccccccgttaaaaggatttcgccctcgaaatctaccagaacaatccaggatgctgagtcctcatatcagattctagttcccaagtggcttcttccactttactattcctccagagtactttaaccaacgatatggttttagttcg

SEQ ID NO: 94057 - DNA, 588 bp, Cannabis sativa
aatttttaggtgttaaatctatttttttttaatgtatttttgtattaaagctattttataattatatgaaaaatatatttgatacaaatttttcacacaaggataaattaatggcccccctaatattttattctggctcagccctgctcacagctccactaacctggatatatctgccggatctgagcacttccatcgatggcttacaaaccttcattgacctacttttccgacagaactccaaaacagccacgaggaagaagaagccgcgtcgcctgaggaagaccacctgttcgctgcttgagaaggcgctcccctggaaatatcgattcgataaatacccatatatgatacgcaaccttaactaattatatgagatatttcaaacatatatgatggttaacggtcgcggatcgtcactaccatgtaaataaataaaccaaatttgacgccatgcatgacatatctaaaacaagctcgagatttaattttatcatagtaaaaaaatatgatctgaaccaaattattatataatgcatgtgttactgacatatagcttagaagtagtcgtgatgaccaaataaaccc

SEQ ID NO: 94058 - DNA, 718 bp, Cannabis sativa
aaaaaatcttaatttgtttaaattaattattgaatttttaatagtttcagtttgattttaccatccaagccatagagaattgggttcctagaaaccatctcactacgatatggtaccgtgactctctgaataggaacctcagtgaaagttttctcggttatctcaatttccattggttcaaccatgggagtgtgatcatcttctacaggtgtggaagatgaaagaatattggttggagttaattatgaaagcatttcctctagtactaccttgatgtgaggcttgatgtccttgatatagtcattttgtagaaatatgtcatttgtggaaacaaacactttattatctttataactataatagtatccacccctagtctcattacaattaccaaaaaatgtgcaaaatttagttcgtctttctagcttcccttcttcatttcgtaagacatgagcggtgcacccacagattctgtaatggcccaagctaggcatgcgaccactccataattatacaggtgttttgggaacagattttgatgggacttcaattagaatatcgttcgccattgttaaagaatatctccagaaagatactagcagagttgaataactgagcatagacctcactatttccataagtgtgcgattttgacacttcgcaacaccattttgttgtgaagtagatggggcaataagttgagatttaattccaagct

SEQ ID NO: 94059 - DNA, 738 bp, Cannabis sativa
ggtagaaggggtgcaaacctgattcgatttgaatttactccagatatctttcgatttggcattgaaatctgctttctcaacttcctcagcccagctcactgacttcggtgagacaaacggaccgttgtcaactggatctccttccaaattctcgctcgagtcaagaaaaatctcaggggcaggctgttcgtcattcgcgattggggcaggctgttcgtctatcgcgaatggggacggagtagcttcagagacattctcttcggtttggatcgaagggagatcgaaggtattctcgacatcagcaacgattttggcaagcttcgaagtcgcccgtttcttcttcgccatgagaggaagcggaggacttcacacgctcccactccacaagttattattaagcaaataatatatgtatactatttaattggtataaaacttaggaaaattctataatgcacccccttaaaaaagatgcatcgatatatctctatttgttttagtatccaaaataattttttagttaaattttttctcatggtcatgtaaattatagttatttaagacatcttgcaaaattttaagaaattcggaaaagttaaacacaccgaaaattgtgtttaaacagtatgttgcacctgtgactattttatcttatacgcgtataaaataaactgtttgaacattattttctacattgtaaattattccaaatttctcaaaattttgtatgatatctta

SEQ ID NO: 94060 - DNA, 855 bp, Cannabis sativa
gcagatccaaaagtagaccaggactgaggaacaagaccagaggactaggacccggtctcggtcccagaactagaatctgactaggacccagacccaaacccagaccgggacgcagacccgaatcaaaactcggatcgggactcaggacatgaacccaatctcagacacggacttagacccaaacccggacgcaagacccagaccgggattagagactcggacctagaggtccctcacctagattgaagatccaaacccaaaattagaaccagaatttggacccaggatagggattgggactcaagacccgaaccgacccagtctcggtccttgacaaggacagggagagggacccaagatcctaatcagaatgagattgggacccaatattgggatctggatcatgacccatgacccgggcttggacctaaccagtagtcggtgtctagatcttggaatcgtacgaagatccgagcctggaaccatttccaaaacaagaaccccacctagacttgaatttgagacccgaaattgaaataagaactagaatcaggaccttggaataggaataggaccaggaccaagaatcggatctagatgtggaatcgaacatccatccggaccgagactgggatcgataccatgacctagacccgaaccaagacgtagacttgagcatgtacctgcgacctaaaacttagaacccaagactcgcgacctagactaaaatcatgaccagtacaagaacccgaaccaagaccccgacccctacccaaaaccaaacaaggactcggatccaaactcggacccaaacccagaccaagacccaatcccagacctagagccagactcata

SEQ ID NO: 94061 - DNA, 818 bp, Cannabis sativa
ttccttagacaaggccttgtctgaacctccttatgcgcatgtcgaaagctgtatgtagcctcctcccttggtcaaccatgctcattttgtgcacgaatagtatgcattgcatactatccagcttgcattctttcaaattttcaaaattttggcttttttccatggattttaatttcgatttttcggtagattttttgtgtagattttttttcaaattttaaaactaattatcatattcaaattaattatttttatttaattaatttagatattagaaggctttgaatttaaaaatatatattattctacaaatttgctattttggttagtttatttttttaattttcattttttattattttattttaatataataaggtcatatattttgtatttcatttatttaaataattatataaaatgacctttgatattcaaatatgatataacttaaaaggataatctagataattttgaaaactaactaggtatttatcaattttttaaaagttagttactttatttaaattaaattatgagattagatcaataataattatttattattttaaagtaagataattttgaatagttagttgatatttttttgaaaaagatatttagggttgttataaccgtaatttttaaattttaagatttattttattttattttaaattaaatgaatcctataactagatatcatgttacatgtttatctaggtatttaattgtttattcaattttttttaataaacttattatttattttatttaaattgctatgactaacctgttgatatatccaatgatctaaa

SEQ ID NO: 94062 - DNA, 1293 bp, Cannabis sativa
gggggggggggaattgggggtaaaattagaaccgtcgactatactatacatgacagttttaaattgtcgggtataataagggcccctaaaaatttgtgttttttgttaaaaccatccctatttcgttaactagtgttttaaaccatcgagaatactcaattttttccgacggctttaaacagttacttaatttttttaacaacagtccctgaaaaaaattatttttaggactgtcgtgaattatgccttttgtaatagtgtatgctcaatattattacttagactactactcgagaaaatatttttaaaatttcaagtgcaagtttgttggaacatagtgaaattttacaaatgagaagtgaagtgtgtgagttgagtcccacatgggataggaacacttcattagaagtgtatataatgtgcaaatttggaataggttgactcccaagaggtacccaattttgtgcgcatgggtgatgactcacacatcggaccactatacacgcacgcaccgttgccgttcgtccgaccgtgttgagctaagctggcgagcaggtgtggtgtcactttatttttttggagaaagttttatttaataaattattatttttatttaattaattaaaatagtttttaaatatgtttaattaattagtaaatagagacgttttctcgtcttgatttccagcatcgtgcacgatccctcgtctcatgatcaaagatatctttcttcccgttactgcctactgtgcatttcctatataatgcatcagaaccaataagagaaatacataattttctgacagaaaaatatatacagttatatacgattatattacaaatgtgttccgagcagtagtttgattattggatgtggtatttcgatggttctctatcgtgcaatagagctccgatatagtggttcgattggattgttttatcttgaagacgaggagactgatagtctgcttgtataattttaggcagtgtcgcgaacgtcttaaagagagcaacctaatccacgactcaacccaaattttaattcagtaaatttgtttttcatgcattacgatattcgttgtatttcatacattacatttttatatatattttgtatatatttggctttgttacatttttagtttattatattgtggatattgtcccacatggaatagatggtgcataattgagtcatatataagaatatgaactactctacttattactaattggttttgagatggaacacaatgatcaccatgttactttttttttttatttttgtatata

SEQ ID NO: 94063 - DNA, 530 bp, Cannabis sativa
agtcatatttccaaatgatattttaagaacacctttacgacagttgatgattgcattagatgtggctaaaaatagtctacccaaaatgataggaatttgagcatttatatcttcaacaaaatgagtatcaataacaatgaaatccaacaggaaaataaatttatctacctttatcaaaacatcttctatgatacctctaggaattttcacagatcgatcagctaactgaagtatcatagatgttggtttcacttcccctagaccaagttgcttataaacaaaataaggcaacaaattcacactaggtcctaaatcaagtaaagcttcgtcacatgatcaccaataatacatggaagtgtgggacatcccagatctttgtgtttaacaagactttcatattgaattatagagctggcttattctgttaaaaatgccttcttcagaatattggtgtttcttttcgcagtacacagatctttcaaaaaatttgagtaggcagatatttgtttaatggcatctaagaaagggat

SEQ ID NO: 94064 - DNA, 639 bp, Cannabis sativa
ttccataagcagtgtcattcggatggcttgttaatagcccaaagatgaacttttggatagcttactgtcagataggatgtaaatttggaaggaacgtggattattgttgcctgtcatgagctggagcatttaagacattgtaaatgtgtcatgatagttttgtagctaattatggcaacaatgtaaatatataaatagcgatcaatctttgtaatctgaagatgaactagaacataattgcttgagtaaaaattgtgatagtgtaaggttgagaaagagagtttaaactatagagagaaacgttttctcttaatctttgagagattgtgacgattcttgtaaccttgataacactgaaatcaataaagatatgattgttgttgttttaaccgagacttagagcattgcacaaggctcgaactttttaagcttggttttatttttcttgtttaactattttaaatctttaccttggttgttgtgatttcttgataaattgtttttaattatgttgcatgtttgttggtctggtatactgaatcgatcgtaagttattgattattttcattttgcacaacaaatattttatagtacaaaaatgttatataattaaccataaatatcatagtaaatcaatta

SEQ ID NO: 94065 - DNA, 1231 bp, Cannabis sativa
atatctacgaaaatttcataaatataactatgaaaaattaaacttaaatatttatctaaaatcgaaagataaaccttaaatatttataccacaaattacaatattcattatctctaatatgcaatcaatttcaattagaaagtgtatagtagattccaattacctttaattatatgattattatagatttcaatgtgaacaattaattcaatgtgacaatccaaacaaaacgtgtcgttgaaataattagacagagtgatgataggtcattttcaacttcatcatcatctttctttgagttctttccaaccattaattatataaatatgtacacatagattatagatatataaaaccccattacgtgaaactactgttacatctaaactaaatagttaagagttagagaaatcaatgaaaccaagtttagtaattatagtataatagtagaatggaaattgttgaggatgttgtgattgtaggagctggaattgctggcctcactacatgcttgggacttcacaggtaatttcttaattaatctctctctgtttgtgtctccataattatatattatatatgatataacaaaaaaggttgatgtgtgtgaattaaggttgggtattagaagtttagtattggaatcagcagagtgtttgaggataactggatatgctttgatgatatggaccaatgcttggaaggctttggatgccattggtgttggacactctcttcgccaacaacatcacacccttcttgggtaccctacttattctctctctctctcatactaatactttattaggaaaagtattaggagattctacaatacacctcttaaaatgatatttcgatagattacatatttaatttggtatttagaacaaaatttaagtctaattttcttttatgatcgtttacgttgtagttatttaagattgtttgtaaaattttttgaaaattttaaataatctatggtgtcaaaaataaggtataaatattttattagacctgtgtgcgtgttttttttataagtatggtatgtaactatttgaactttattttcagcatagaaaaattatatggaattttctgaaaatttaattaatgtacgtgagaaaaaaaaaaatagaataaaaaaatcttttataaaaaatttaccaaatactcattttgaggtgcataacaaatatatgtatgtatgtgtgtatttgtatatatgtaaatt

SEQ ID NO: 94066 - DNA, 668 bp, Cannabis sativa
acacaagatgagtgtttggtcgaaatatcgaacgataaacaagcaaatatgccaaccaggagtacttaacagattaaagaatgagggtgcccaaagaaaagtcagaactcaagaagtcaaaaattttctcgagttagggcaaaaaagttcatgaaggttagataagcaagatgaaagacagacgttatgcagttcaaaaacaagctttatgactataaaatcacgcaaagacatgataaagaagaatcacaaaattttctgggcctagggtttcctagacattttctacagcaaaatcgaaggtgcattcaaaatataaacatgcaaagataagcgtaaaggaaatcagaaacttactcaagagtcagatgtttgagtttgagcaacgtcaatccaacaagcagtttgtacgaaggcacttcggcaactttgaagccaagaatctctcttttcgctctaaagcttgcttagcaaagaaggatgatgaaaatgagttatgtgccaatgctgtttgatatttataggcaagtcacgaaaagaggtaatcaactcaaagaaacctgagacgcctcggtttctctccttaaaagcgaataatgggaaataaaaaataatcaagtgcagccgtcacccgtggagagagaaaatcagatttcgaaatattaatt

SEQ ID NO: 94067 - DNA, 648 bp, Cannabis sativa
tttcataatctcatactttgtagttttctcgtactacttgtaatttttcaaaatttttgtatagtttacgataccgaaaaataaagtttaaataattactaccacgcaaattaaaaaaatagtcacgtgtataacaaaaaaaattctttattgtcggcactataaataattaagagttttctaagaatttacagatgattctaattaaatataacctaaataatcttgaaaataatttggacttaaaaattctcttggatacaaaaataaattaagagtataccaaaatagtttagaagatataatatagaattacccaataatttgtgtaacatgtaataactaataagtataaaaaaaaatactttatttaacatatagtacacctcttaaatggtcgttttggtatatcactatctattttggtatatcaaagaaatttttttattctattttgtttttatgttagtgtatgtttgtaattatttagggacacttgtaaaaaaaaaaaaaaaatcaaattataatgctataaagaagattagaatattttgttgcacttatattttttttcttttatatgcgtggtaatcagttgtttaaactttatttttagtactgtagaatattcaaaaaaatttaaaaatt

SEQ ID NO: 94068 - DNA, 521 bp, Cannabis sativa
tgaaattttggcgatagaggcacggcttgcaggggttaagagtgggaagaggaagagaaatccccctatatggtttcgtgactacacggagatgaagaagaaatagaggccttctttgacgtttaatcccctggcgccaccggatgagcatttgttggatacttttccggaagtggtgttctggagtcattcccaaccaccggcttcaggatttgaaaagtagtgattacggtccatcgttcatttggaagttgttgacactacaggaatgccttacagatgacgtaagtaaactaatttataattttactttactttataagtcaactaatctgcaattaatatattttattgtctaactactttctctaacctttatatgcaacagtccatatgctgaggaggcgacgcttcgactatccactaacatttccgcataagggtatcattctctctacattcgttaccagcatgatcagcagtgcatggacgaatcacaagggtcccaggagaaacttttt

SEQ ID NO: 94069 - DNA, 561 bp, Cannabis sativa
agatggtaactaccttcagtttcgacattacacaaggggcacttggtatctggcaatgcaataaaggaaataagcttgtctttggtgggtaggaattcagatagaattttccaccacatcattttaagcctattatgcatgttggtcccccaaatgattttccacttcctctccgattgagctccgggatcatgatttttgaggaccctataagccgatttcactgtgaaatgcccattcgactctggtagccaaagccaagagtcgggagttgtacagttagggagggtgatgtttaagatctttctagcatcctcctcatggaaccaatgcttgatcaagtccctatcccattggttgttatgtatgaaagaacttaccaagcttactccgcctgcagctagcacacgaggtgttggttgtcggttggtactcggcacccacggatcaaaccatatagaagtagtccgcccgtcaccaatttttcgacaaaggccttttcgtaactcctcacgggtgtggagaatagccttccacagaatcgtgtcagttggtttggcc

SEQ ID NO: 94070 - DNA, 748 bp, Cannabis sativa
tttctcataaaccaagaatttagttatataggcacactttatatagaatagatatatctaataacactttgagtccaattttttttttaaaaatatatttttaactctaaaactttctcatcctaactttatcttattacttaatttctataatcctaactcaaaaaaagtttgacaaaattaaacccagggatcattatgttttattttgcaaaatttaaagtctaaattattatttaactgtagtaataaacatagtgtagactctagtaaaatcatacttctattcaacagaatccgattatcaaatcaaatgtttgagttcatgcatattacaatcatataaatgaaaactataaaatcaaaatacaatctttctatggtaagaaattgtacgagacacacctctgggcgagttatcactgttcttatactaatattttaatcatcataaacctaattctgtttttactacttatctgaatccttaaaaaaataaaaataaaacataaacaaaaaggaaaaagtagaaaggttatattgattgtaacactattaccattaaaaacaatataaaatttaatgaacataaattaataaaagacaaaataatgttatattataatacataataggataaattttcttaaaaatggttaaatagacaaaaatttacctaggaaaaaaataagatttataaaagtagactggacatatcattataaaaatagaaaataaaacaaacaaa

SEQ ID NO: 94071 - DNA, 563 bp, Cannabis sativa
tgtttaatcagtctcttctagctatataggctgctcagttgtataacttgcctgactctctggcggccagggtaatgaaaaggttctacttctgtaatggccccctaataactgttaaagtgacaaagcgtgctttttttctttggaaaagtatcttatggggtcgtgatctctggaaggattgttatcgttggcgtgtgggctccagggagtcaatcagatttcatgaagacgcttgaatcccaaaggatcatgtgggacggacgtattccttttcggggtgggccggacctacaaatggttagtgacctcaaaattgattctagaagatggaattcttctcttgttgaggagtgtttcgatgagagggagacttctgccattttgtctatcccgtgctccttgtttgattgtcaagataggcttatttggtatttttcggacaatggttcttttcagataatggttatttttcggataatggttcttttcgggtgggtcagacctacaaatggttagtgacctcaaaattgattctggaagatggaattcttctcttgttg

SEQ ID NO: 94072 - DNA, 731 bp, Cannabis sativa
  modified_base (251)..(252): a, c, t, g, unknown or other
ctctcttctctctccttcgattctggcctgcgattctcttctccatcttctccgattcacttcctctcttctccatgcgcaaattattcctctcattcaaacaacactgacctgaaaaactcagaaaatataaaattcagccatggccatacagacagaagcaaccagcaacatcgacaactgaaaagcaatgaagctctcaccttaaagcagaaaacgaaaccataagctcaaagcaccgatcaacctgnncacacaaaattcaatcaacaaatcaagccaactccgatcgtccctgtcaacatcgatcaaaataaaatacaggtacaattatataaattatgctatgaatattataggtatatatatactgcgaaagaaaaatacaccgaatatgtgcatttctaatttaaacttaaagggaaaaaaaactagattgaaataaatttcataccgaaactatatgatcttgcattgcttcataatgaaatgttcatacttaatctagattgagactatgaagtttcacaaacaaaagacaaaaagaaaacgaaaattaaacattctgaaaaattcagttttagacgtacacactcaaaaatgaaaagattactgaaaattatgaatataaaaccagtttctaaatacattatatattttaactaacagtttttaaaatgatattatctgttaaacataaacaaatataaagtaatgttggaaaccagttt

SEQ ID NO: 94073 - DNA, 1371 bp, Cannabis sativa
taaagcaaatttagctaaaccatgtgctgcttgattagcagttcgtttcccataggtaactaaaacttgagggaaaaaagataaaagacgacgaacatccataataagatcagaaaagcaagataaatctatagatgaaagatttaaagcataggagactcttgaggcatccgtttcaatatgagtaagagcaagttgtgactgcaatacccaattaagagcatggaaaagcgtttttgcctccatttcatctgatctaaagcttccttgaacagcttttgaaaacacagcaaccaccattccatttatgatctttgattattgcaccaattcccaatttcttttgctccaaatttgtagctgcatccacgtttaatttaaacccattcagctgtggtggcttccaattgtgaacatgctgaaccgtgtttgatcttggcaaagcagctacttgattgttgttgacagcatcagatggaggatggagtttgagacgggtaaaatcttcatgaaatctgattgtgtactgaactatagcagcatgttggcgtggaacaccaccatgaacaacccgatttctatccgtccatatcccccacaacacacataaaatgagctcaaagtcttgctgctgatggatagtagataaatggcgcaaataatcaccattaaacatactttaagcctgacgaaaatcaagttaaaacttggaaaattttccatatggctttagcatgcttacaaccaaagagggcatggccaatagattcccaacttgaagcacaaagggaacattcacctgaatttaacaccttcttcttgaacaaagcagtagctgtaggaagcacattttggaagacttttcaggcaaaaattctgatctttgggggcaaattcaggttccaaaaaaatttccacaatctctatgctgattagaagttaaggaacaatgttgttctttcaaagatgtggctaaatggaatttggatttaacggtataagagccatttgtagtgtgatgccatattaatcggtctgtatcagcaaaataactcagaggtataaacaatatgcgttcaatatcagttggctggaaaaacttattcagcagtgatacattccaaactcgttcctctgtgatgaaacttgataccggcattgaaggatttctagaaaaactaacaagtctaaactcattgtaactcggtatccataaatcatgcccactttcaatatgatttctgttttcgattttataccgcagccctttaatcaacaattccttgccccaacaaatactttgccaagttaaggatggtgagtggccgatgttagcatcaagaaaagaattgtttgaaaaatacctatgct

SEQ ID NO: 94074 - DNA, 522 bp, Cannabis sativa
gataggttaggtatttgacataaatgctcagccaacttgatttttgagtgaaaaaacaagtttatatagtgtttaagagaaaagtagttgtttatagctgttagcatgcttcccgagacaaagtcagccgtgaaccggaattccagatgggtactggaattttgcattgatgacagctagaatttcagattccaaccaaaattctagatggctaacaaaggcaaaaatgccatttttcgggacaaagacgcgcataacttcttactcgattatccgattttagaaattccaactttgttctcttagttaaatgaaatgtgatttaaaaaatccaataattttttttttcaactatcgtgagaaaacttgttgcacaagttagtgagtgggctaaaatttaaatttataaaacttaaggtgctacgcaaatcactttaacaagactaaagtaaatttataccatttgtttttgagtagtcttgatgtagatgagcctcctagcttgatttgtatgtttttgat

SEQ ID NO: 94075 - DNA, 674 bp, Cannabis sativa
ggaggccattcttagccacatggagagcgatgatttatgtacaaaagagagaatagaagctatgagtgcaaaacaaagaggaaacatttaatgtttttgcagcaactgatattcccacttgttgtagagttgatgtggtggatgatggtctgagagtaaaaaggagaaagaataagaccaagaaacaaccctattatattcttagtcgtaaaaaggccaagtgacctacagtgaataaggatgagaggattcaggtggatcatctaattgagttggttcaaaggctaatggcgagcctcgtcatggaaaactttttcaccgatctgacacagtacatactgtaccagtggccaccgccaccaatagctccaccatactaatgtgacttgtatatcgaggtaagttttctttctttattttaatagtcacattggggacaatgtgaatcattagtttgggggaggaacttaaaattgtttaatttcttttagttagttagttatttgtttttgttgtttattttagtttgtaagccattatttttgcctatattatattactttgcctgtgaaaaaaaaattactaataaccgtgagcttgatttaactattttggagtttaatttaaaaagttctgtaggaaatttttaaatgtttcacaattgttatatattt

SEQ ID NO: 94076 - DNA, 829 bp, Cannabis sativa
atttttcattagatgaattcaatcatcctatacatcaaataattattcactctaataaactaattcattcgaaacaacattaagattataaatcaaacgcgcatttgctggcaccaatgaggaagaactcattgggcgtgatgggactataaaacaaatcgaccatagaatgagaatggtcatggcaaacaagtggaacgaatccttattattcatattgctcaaaactccaaatcagataaaaatccaaaaaaacaaaaccaaaacaactaatccttcttctgatctatattccaagggcaacgaaaaaaatcctaaaatcagcacacagaaagttttaatttttaatctcctaaacaatcaatctaaaaaggtaaaataggaaataaatagaaacaaaataattagctaaacggaataggaattacgttgataaatttgagattatacagagaaatttcagtataaataaaaattggcagtatatttggacacaagtgggaaaacacaagttatttagagaaatgttacgtaccgagacacgtatgattagttttagtttagattttatatatatttattttttaagtaatatatagtgttttgtttggaggaataatattcatattcaaaattttagttaaatatattaaaaataatgatagtgtatttatgaaaattgtaaataaatttaatattaaaatgttaggttattctttttagttcttttttgagcatagtattagaatgtaattgtaaatgaaaaaaaaattgtaaaataatataattatatgaacgatgaaattcattaagtcaaatggtgagtcag

SEQ ID NO: 94077 - DNA, 638 bp, Cannabis sativa
aacaaaataaattgcgacatgtttttgttccgatcagatattaagtataatttttcgctaaaaaagatgcatcttgttcattttcataacaagtaatgtttattttacaagatgtgacaaaaccaattactctaaaaatgtatcttcaatagaatgttaaaaaaaaatattgtattgttaaatttaacacatgttaaaaattatactaaatttaacacaagatatagtattgtgttaaatttaacctccaataaatactaccattttatttattataatattattatttattatgattaacttttactaaattttatattctttatttagtatattaacattatttattcaatgaaaagataaaaaataataattttaatatattttcaacaaaatattatataactatcaatataattaattattttacatcttatgcactgaaatacaattgtagtaaactaaatatcatataaatttatcttttatactaaatttaacacaaattttaaatcttacaataaaagtgatcgaatattaataccaaattaaacaaacaatatacaataacccttctctaaggaaatgttagagaaaacaagactattatggggtttctatttcacattaacatattt

SEQ ID NO: 94078 - DNA, 649 bp, Cannabis sativa
acacagaagaaagtgtagaaatggttataacttaagattatgtagaaactatgaaaaagaaggccccttaaatagactagccatggaagaagatacctaaaatggaagagccattttggagagaaaaaaagatgccaaatcaatccaattattgatctttcgtaggtaatatcttcgtatgccaggcttcatcatcaccaaaacacctctgggaacgaaaacgatggcagagagagggagggaaaagattgagcaagagacaagcaccaaagaaagcctatagagtaataaatgcaagggaaaatagtaaaatcaaaacaataaatgcaagcttagaatgaaattaaagcgaggattatgggtgcagagaaagagttgggatgattagcttaagggtgagagggatctggaacaagccataggaaaatgtaacaaagacctagaggaaccacagaaaaatctaaagagttcttaaaaattatttattttaatattttttattcattttaataaataagtacataaatataataatatgacacacatatatattaaaaaaaatattttaaaatattaatataatatttatatctcaataaataatagttcttgacatgtagctaaccactatttatgagctaaatctctt

SEQ ID NO: 94079 - DNA, 869 bp, Cannabis sativa
tccttgggtctacataatttatcccaagtactccaatggagtttcttatgatcttttgtatctccccaccagaaattagcaaccaatgagtggagattgttaatgagcttttttggaagacggaaacaactcatggtataactcggaatagcttgtatcacgactttgattaatatttccttcccggcttgagaaaacatcgaagatttccagctcttaagtttgctccaaactttttcttttattacttcaaaaacctcttgtttctttctccccacaaaactcggcagccccaagtatttagcatgatttgggacaagccaaacccccatcctattagccagatcttgtcccatagtagctgatattctctttcccatactcacttcagatttttctaagttgacttgttgacccgagagccgtgagtattgctgtaagatattcttcaaagtattgcattcattctcctttgcatcaaggaaaacaaagctgtcatcagcaaagaataagtgcgaaactttgattctatctcgcccgaattgaatcccattaattcttccagccctctcggcttcatgtattaggcaagaaagaccttccgaacatagaagaaaaaggtatggggatagcgagtcaccttggcgaagaccccgagtaggttggaaattcccaattttctcaccattgataaggatcgaaaaggccacactttccacacatctcatgattttttcaatccactgttcttcataacccaaacccctcatcattgttcttaataagttccactccactctatcataggccttggacatatccaacttcaaagccattttccttccattcccaaatcgttttgtcttcat

SEQ ID NO: 94080 - DNA, 751 bp, Cannabis sativa
gatgggttatttttattaaggatatttatagcaataatattcaattttttttttgttgtactttaatattcatttttttttctttttgtagtaataatacaaaagattaatattttagtgcactttaatacacaattttttttgtgggtaatattacaaaaaaagtaatattattttactacaattaagtacaactggttaatttttattgtcaaaataatgacttggcatcatatattaatacttttttatttaggctatgttgggtagaaaagaggaagagtaggatggatgaagagtgtagaaagaatggagagtaggaatgatggagaagatatttgttctcctttatgttgtttggtattaggagtatatgtggaaggatgagagtaaaatagatattaaaattactattttattatttttaatacaattatatattattttttcaagagtagaaaagatattttatataattttcttttgtctttttcttgaattcctccatgttaggagagattaaaatagtgtatttggagagagattctctccttttatctcttctctcccttcttctctccctctggccaaacaaaaggattctccaaaccctctattcctctctctccaccctctaccaaacatagtgttagtttatgtttaaatattcttttatgagtcaatattgtcatgtcatcctttaacattaaaaattttacccaattgcaaaaaaaaaatgttaaccttttgt

SEQ ID NO: 94081 - DNA, 860 bp, Cannabis sativa
aacctgggcgttgggcccaaaatagccttcagtaaaacgatcataacttactcaatattgatcctattgacgtgattcaacttgaatttccaagaattttcaatgatatatcaagtcatgtctcacactctaatcgcaactttaaattttttgactcaaaatattactctcaagagagttacgaattaaagctacaatttactcggagcgggtcctgctcgcgggactcaatctccaaaaattgacaatcaacttcaaaagttaattttcacaattagatcatcatctaccgtaaaaaatagtctaaatgtacatttctatatacttttttgaattattctattcacatttaataggtactccttcacctataaaaggagaacaacactagcccatttttcacattttgaaaagtactcatatggtcagagcatctgtttctagtttctctctctagaaatttaaacttttacacttaactaattttcttataattctcgtgagaaataaaaacctgaagtagacgtagctccattaacattacgacaaggggagtgaactactataaattttgtgtgtctctctaaattatttatttaaacttattattcacatcgccaatctagcaagctggtattgaccatttttcagcgtcaacaaatatcctaatcattttttttgataaattatgtaattttattaatatctattatacctatatttcgagcaataaatatatggctttatttgcatgtcacgtgtattaaatccctcaattaatgagctaatagttcaactcactcattaaagaatccagatttaacatatacctctcgaagaatactggttaagtgaaatat

SEQ ID NO: 94082 - DNA, 524 bp, Cannabis sativa
ttgacctaaagtcattcattttcagccgttcatggaattctaaagatttctaggtatctttcgaggttttgaacttctgggtttggaaattctatttttgaataaaatcccttctttttgtctttaatcttgcctggtcggcatataaaaccgatttttcaactttccatccgtccaactctcattttcttgtcacccatctttctgtagatgaatcctggtgatttctgggaagacaagcaccatatcaaccaggacttacttaaactcttgtatgaagatcatcctcgtctctgtgctagcccgtcttcatctagtgacaaccttttaaattctagctttaaagattgggaagtgagtaccgagcacacaccatctccagagcctgaggtgcaacattactagtaccctgaccaaatatgtggagaaggttataggtgcttcatctgggcgttaaagaagggttggaggagttatctgcctacttcttgaacgtataaggtccatcccagggttgctgacat

SEQ ID NO: 94083 - DNA, 605 bp, Cannabis sativa
ttgatggtaagcttgttcaactcccggtattcaatacacattcgcagggatccatctttcttcttcataaataataccggagaaccctaaggtgagtagctcggtctaatgaatcccagattcaataactcttgtagttgtatttttaattctttcaattccgtcggagccattcgatacggtgcttttgatacttgattcgctcccggaactaactcaataacaaattcaatctcccgggtaggtggcaatctcgctaaatcttctggaaagacgtcaaggaactcgcacaccaatcttgtattctcaggtccagatgtcacaagttggctggtacccactgtagtaactatgaatcccagacaacctctgctcataaggtccttagctttcaagtgttattcttggtatgcgtgtcccttgaactttacccacaaacactgtcgggtttgcactatcggactcaaacaccaccctcttccgcttgtagtcgatcgttgcaccatacttagacagaaaatccattctaaggattatgtcaaaatcagatagttgaaattctattagattaacggtcaatgcacaaccgtcaatccaaaaggaca

SEQ ID NO: 94084 - DNA, 552 bp, Cannabis sativa
actctcgtttcacatcaaaatctatgtttgttctattagagcattcctaatattcacttctcagattttatattaggatcatgaatcatgtttaaggtggccaatctaaaacatgtattaacacaaataagaataaatcacaatgatccaaaaagaaaactaacaaatcacattaataaattggaataacatcaatcaacattcatcatatccctaaattggataattagttcataacttctaaactcaaatccatgttcaaagtagaaacaaaaattaacataagaaatttaaaaagggagaagaaagaactagatggtgaacttgatttggatcgccacgctcacttcctcaatctccttctttgttactagggttctctttctgaataattggcataaaaatttcaaactcttttatagaaatcaattttacacttctgaatggacaaattacaaaattgcccaaatttggcatactgagcaatctcgtcgtgaccatgaaaggttcggtcgcaactatattgttaagccaaaataccttgattctgcc

SEQ ID NO: 94085 - DNA, 1525 bp, Cannabis sativa
ataaaatccataataacatccataatcaattctaaaacagaaattaacatagaaatcaagagtttaagaaagaactagttggtgattgtgctttggatcgccacaatttcttcctttgcctccttctttcacttttgcgtccaattcctacctcccttcctcctaaaacacgagccccttaaatagaaattagggtttctaactctgaatggtgtccaaaactgcccaaaattctcgtattttgcccatagtcgcgactacatatagccttgtcgcgaccataggcaaaatacaaaatcaagctctctgcttgctccatagtcgagaccatgaaaaagggtcgcgaccatggaaaatggtggtcgcgactacagaagcaaatttgatagcttcagcatctttcagtaaaatataaataactttcacatacgaactccaaatgagttaattcaagatgtgttggaaagaagaaatagaattctaaagcttctatgttttgacttattccaaaatatgatcagaagatagtcaaatttaggcttgaagtttcagctttattttctttcaaaatgttctctatacaatagattgttgtttttcgaaattcgatcaattgatatattccaagtgtgaaacctaaaaccaacaaaaacaagcgtaattccattccaaaaataataacaaagaagaaaaacaactataaaaagtgacccaaaacgtaggctaaaaatagcctaacagcatctgcgtcagcctgagtcatggtaaaatgtcgtcccgggttctgagtagattctttttcggctcatctttctgtgcatgaggacaatctctaataaagtggcccaccatgccacactagaaacaagccttggcccgacattcaccctgatagtgtttcttgcactttggacactcaggataagatcagaatgaagatccgcggccctgacgaccacctctgtttcccgaaactttctattacaccttgatgtttaggaagcatcagccttccatttgtgatcagggttaccaccatcggtccccttactgatattaccactagcaggaggattcaatgtcgtggcagaatcctttgctgtctgctcttttgttacatgttgctcagcttcctcagtaatttaggctagctctacaactttcttgtacaaagtgtcatgagtagtggtaatcttcaagtcccgactgattgtggcattcagtcccctcacatatttctattttctggtgaaatttgtaggcaccggatcaccagcaaatttggatagccgatcaaactccagagtgtatttggccacagacattttcccctgagtcaattttacaaagtcctccatatgtgaggttcttacagtgatgttatagaatttttcctcaaacagactcctgaactcttccaaagtcatcacactgacatcgcgaatctgccccactatatcccactagacgctggcatgatcttatatcataaaagctgcacaatttactctctctgttcccatca

SEQ ID NO: 94086 - DNA, 1230 bp, Cannabis sativa
aggcaataaagaaacaacgaccaaagttaattagctttacatagctgctggatagtgggataggtaaacctttgttcgtctctctaataaagaagacaaatgaaaaattaaaatttttcttcttcttcgtgaagcttcctacaggcgtggctctggtattgatcagcaagggcttcttgctttcttcttccctaagctttgcttctcgtcttcatctcttccccctcttgtctgtttggtttttggtcatcttgtctacattaattgcgccaacgtcatccttaatcattaggaaaaaccccttaatctctcaagctcagaagctatttaatgccctctctctctatcgattgcatttaattttaacggcacaatctttttctgcatttaatgtactctcagtctttatatttctccctctttcttcgtcgaatccagagagatacaccaaccgccatttcctctctcacaagccttcccatcaccataatcattaccttcctccttcagacggcttctgcaggaatcgaagagttggttcagaggacgattcaatcttcaagatggcccttctgctccaggtaattctctttccttgtttctcttactgcctatttattttcaccatcatttccacttcctatcatcccaacttcttctcttccaaatattcctacctatccttctcttccttctttcaatggcttcttcttcccgtaccctaaattcccttactgcgcttgaggatgaggaaagtctcattcacgactttgaccacatctccttgaaaatcacccatctgattccaactctttttgcttattcttcaaactccttaaaaatctgtcaagccttcctggattaaaaaggccatgtccgatgcttggaatcttcgcttccccgttcaaatctctgagtatcactcaggtatttttcttgctaccttccagtgtgacggcgaccgtcgtcgtgttcttgaagaacaaccatggcactttgataagtttctaatggtcttcatctctccctgttggtcaagaagcaccagccggcgttgctttttgttatggagactaagctgccgcctggccgtggacataccttcaagcacaagcttcattttgacaatgttttggaggtgcctcggcaaggtttagggggagggcttttgcttttttggaacaattgtttagatgtaactgttatttcctactcccttaatcatattga

SEQ ID NO: 94087 - DNA, 651 bp, Cannabis sativa
aagcgttataacactctcgggcacttccttgatttctaaagagacaaccgataccagccgttgtatggaattttatggacaaataatacactaaagagatggctcgaagttcatatagagcaagccttccgagcatcacattgtatagagacttcacatccaccactatgaacatggccatgatggtggtctaaattggggcagtgctgatgttgagtggcagtttaatcttgccacatggagcgttgttcgctccactgaaaccatacataagctgctcgcatggttgcagattttttaaggtcaaacccattatgattagggcttacttgaacaggatgtttgatgatgcaccatcatcgatcatcaccctggccaccatcatattatctatttgaacctcaacaactaaaagatcgttgtaagggtagctgacatgatataagtccgattctttgagagtgataggttcacatccgtagcgttgagactttggagggtgttctaccacctccaagacttcggctcttggttcatgttggagtgatcttgaatacctttctaaggccttccttgaatttatagctatgtgagggcctccaatcccaatttctagcctacctgcaattagcacaggctgaagaggtgcat

SEQ ID NO: 94088 - DNA, 808 bp, Cannabis sativa
atgtgttgatgctttctttccacatcggagttttgttgtggtctctcaacacaagaatgataatgaacaatgcctttagaagcatagaaggaatgcatgttgagttctttagtattgtcggatctaatagcttttatgggtttggaatattgtgtgcaaaccatgttatagaacatgggaatgatagattgcacatcggatttatttttaagcataaaagtccatgtaaaacgatatttgtcatcaacaatggtgagaaaatatctatatccttcaatgcttatgatattgaagggtccccaaatatcaatatgaataaggtcaaatatatcatcaacaaaattatggtttgatatgaatggcaaccttttttgtttggcaatatgacatatatgacaatgctggttttttgaaacatttgaaccagaaaagaactttttattgaatgtattggaaatgtacattgagggatgaccaaggcgtttgtgctattggtctccattattagaagaaagtaaagaacaagtagaacttgcaataggtatgaaatcttggagaagaacatagagctttccaagtcttttagcagtcccaatcaccacattcggagaatgagcctgtaaagtgcaaaaatcatggtgaaaatataccatgttagctgggtgactaagaagaaatgttggaatggataatagattgatgtgaaatgttggaacaaataaaacatcataaagaataagatgtggatttatttgaactgtaccaattccttgaacacatatttgattggcattagggagggtcacat

SEQ ID NO: 94089 - DNA, 647 bp, Cannabis sativa
aaaaaaaaaaaaaaagtgcaaaaccactaaactatacataaccacattttaaactttaaatttaattttatcttatgctcaacaatattattgcgcatgtttaattaataggaatacaataatttcatttaatattatctttggatagagaaaattaagtgttaagattaatattagacaaaaagctatatattaaagatgaggccatttcttctggaaaaagaaaagattcgtagatatttttgttcagagaaaggcattagtaatagtaataataatagtaaaacataaaagtgggaagcagtaagtaatatgcttcgccactattaccagtaccacccacattatacttaagcgaattttcaattctaccctcctttcttgaataatatttatttacacatattaatatgttattttaaataaagaattaaaaaacatctcaatgtcaaaattaaaaaaagaatgctaattacaaatgtcattttagagacggactgcattttagttatttaaattattcttagttcagtatctataccttttaattttagtttatttgttaaagattgtcaagttattttatattctttaagtaatgtttttattagtcatattaaacggtctgctaacaaagtcgcgcactg

SEQ ID NO: 94090 - DNA, 519 bp, Cannabis sativa
gctcaacacgtggcaattatgaataacttaacgaattcgtcaaatttaagactaacaaacctacaaaaaaggtgatcttgaggactattaccgctatttttcgaagttgaggattaatctgcatcatagtaaactttttatgtatttttgccgcaaatttcttaaaaataaaaattataaaacacacatttattttttttatttttaaaataaaaaaaaattgttaaagaatatatttctattttttgaaaataaaattttaaaatccctttaaaaaaaaaaatttaaaaacacaaatattattttgtgattaaaaaaataaaaaacaaaagtgttagaataaggataaatactattttggaccctgtattttgtaaaagtcactaattagatcttctgttttaataaatgacaaaatagacgctatattttccaaaatggtataaataagacccttaattgatttttttgtcaaaataaaatttaataataatatgatctaaatgtgttatgacaaaa

SEQ ID NO: 94091 - DNA, 606 bp, Cannabis sativa
ggcataacaatagttaacgagtgtgtgcaccataaattagaactcatccggagaagcttcttctgggcaaaacttataacaatttaaggtacggagaaacatccaatactgtcaatgcacttcatattacttctcacttcaaaattcaggacaaattatgaaaattattactctaagggtagccaaaaatgaacgattctagaaaatctctattgaattataaatacaaaatgcacaaccagaagttaataccttgaatagacatgagatgatggctctattccccttgctcgcatactctcaaaggtttcacgggcatgatgcatgtctcctctccttgcatagtactttaccatcaggccatactcccttctagaaggctagtaaatagtatatacaattcatagcaaacagaggaatcgtcattctttttcagaaacatggacagaagcatttggcaaagattttagcttttcccagcccaaagctacatatcaacacgtcattgcatgtatagcttattcaagtaataagattgaacagaaagaatgaaaatagtagataccattagtcaaaatttcattttttttctcatccaaaatccta

SEQ ID NO: 94092 - DNA, 4036 bp, Cannabis sativa
ttaaaaaaaattcagaatgaaattttagttttaatatacccaatttttttttttatatatattataatataaatggcccaattataaacttttatcactagcatttttcttattagaaatttcatttcttcatcttttataaaagacaccgaacttaatatccgatcctaactaaattgaattacttttgttttcctatctcaaacatgatgaaatagataaagtgtagtaaaatattaagtccaatcaatcaaaatcaatagatagctagcacatcaaactttattgtaactgtttactataaattctcctattggctttagtaattgtttgtcttttttcctacctagccatacgtttttgaactatacgttacaatgtataattgtacttatcttacgtgggaaagctaattgacgatcgaactaataaatgaaaatcatacgtaccttaaacttctcaaaccccaccaaagacaatagaaatacttttcgatgaaatgtgaagaagcaatttcactggtgaaagcatcagcaaacattccaaactcgaagttgttagcatcgttaagtgcatcacagctagaaagaacttgggttctctgcagccaaaatcggcgttcggggtcgcccatatttttgcaatcaagaaatttaggctgacacgaaggagaatgtgtgaaatttatttccttgtcacattcttgcttccaacattggtactgtctttgaatcgacaatacgtaccaacatgctccaacaacctgcactgaccacaatcataaaatatttttattaatatgtagctaaaaccaaatcaccaagacgaactagctacctccctactctttaaggtatcccctttttctcaaacacacccctgtacacatcctaaaaatactagagaaatttttaaaaggatataagaaacctaacattttaatgttcatgtgaatatatgtctattttagaaatagtattaattaatgttattatatgttaaagcattaaattacttacatgactagctagattgtagaggaggagattgtatgctgcccctgcccaagcagtcttggctatagcacctgttgttttgatgatcctttggtttagaggaaatataagaaagaaccgaggaacatattgaacgagaacaataagagatagggtgtgattagcatgagccgctgtcggatttttcactgctggaattacaaaccatatcataatctacacccaaaaagtacacatttttaatcaacaataccatataatcgatcaaattactaataattgatgagaagtctgacctgggggagaggaagggaagctgccagatcaatgaagaagtcagacttgaggtaccgaaccgcgatggcccaagggtcagtgacgagctcgccacggccaaagacacgagaactaggggcgacgaaggctgttcggaacttcatgacaatgtggaggaaatagaaggtgtcggctacggtgcggaagaaggtgacgagaatgccaaggcccaaatctatctccatgcagaccggtccgccaatgaccggcaagtagaagtagagagggtcgatgaacatggcgattaggcaggtcacgaggaacacatggttccatttggccacaacctctgaaccagggtccaaaatttggttccaccaagggatctttttcctcagtgtcgataatggctgtagaggtggcctcacaaagtggcggaacttagatgaggaggacgagatgactgttgcagccgctgtcgcagtgtaaggacgtgaactgagcatcgtggccttaattatgaattatttcattctttttcgaaagagaaagaatttgagagatttgagccaatggtaaatgaaaggaacaagtctcttggttgttttttctgttaggatgatgatcatcacattattacggaaattgcgcgccaattaatggttttaccttttagtattacatatttaggaaatgacaatattgtgcatttttaataacaaaaaagcattaactaatattaatattaagaaagagaaacaattacgatcaaataatattattgatatattttcacatttgaatatggttggcttgtatatctaattaagaactgcaatataatatatctgtttattaatttaattcaatgtgatgtgattttctcaaatgtagaatatgttagaaggtctaagttccaattctaataaatcacaaagttacaaccagaagtgaaccagaatctaaagaaaattcacaggtttagaaagcttgtaatatgagaagacataggagtttgtatacacctttgaaattatgatcattgctgtacagaagaataatgaagcacaggagtgtaaggtcctcttcctgtgaagataaataagtgctataaagggatttgctctgcttcaagatcttttgtgtgcattgacgatatacagaagtagtgaggaagaaagaaaaatgtggctaagaacacaagaactccaagatcagcctcttcaccaactgcggctcggcgaggatttacccagtatatctggctaaaacaccataagcagtacaagctagctacaacaagaataagtttcacagactggtttgattgttgttttattgcgttaaaggatttaactctgcgtaacaaaggaattgaaacgcaaatgtcaagaaccataataagaatggcaaaacaaaaactaaactcgatatgaaaattaaaaaggaaatacctattgatgtagatgaagccaccgattaggcaagtacataaaataccaactataacaatagcatctgggttattaggtgctcggttcttccaccaaccagtgcttaatatccaagtatacatagttgtgtgtccattttcctgcatgatagaaagagagaaagataaaaaaaaaaaaaaaacatccatttgaatcacactatgagtgataaaccagtataaaatttggaattgaaaacagatgggcaaagaaaaattatgataagccaacgtatacttaaatccatctccttggctatccacaatgaccagcaatgtcaaatgtaaggcagtccctaccacttccacaaagcagcaaaaacatagttaattttcctaaactgatctctttgtagatgtcaaacacaggcctaagtccacaacggtttacaacataactcttttcttccaaggactttcaagtataaaaagatcataggagaaactgttcttttcgtttgacttgaaattgaagtctaaacatttagccaactacagaaggttaaagcttactattatgctattcaatattctgaagtagaaccagaaggttaaacaacaaggcgtatcaacttcaaatattattacctcaaacaagtgatctaagaaaaaatgggataaagaaccagctgacaccaaaagcaaacattgccttttagaaaggggtacctgtacaatcaaaaacaaccaacaggagtttaagatcaaaaatgtaatgtaatatagcaataatcacgcaaaacatctttgtcaaaaaagaaagaacttcagccatcagaacacaacccaatatatttccaaatactacaagcaatattctacttagcttagctaaaccaaaacccagatcagcaattccactcaaacccagcacacatggtagcaataaaacaacccaaatggtccaaatttatatgcacaaattgtttattcataattaattaaaaatataaccaatttggttgattatcgatgatacacagaaattgagcaaaccccaaaaacacaaagataacaaagatcaaactagctcaattagaatatgctcaaactggccaatttcccaaaacattaattacttaaacaaacgaaagggacaacagagaaacttaccccagaaattgaatgaaggacacccttttggataaaaaatctggagagccaagagtagaagaaagaaagaggaagaccaaggatgaggacgtaatagaaggggtgatgtatggcatcggcgagggccgaaccgaagccg

SEQ ID NO: 94093 - DNA, 915 bp, Cannabis sativa
cttgagttggccagactcaggaaagttgtgggctgtgaatgcctaattgaagaaccatgcattgctgactttaatatgtttgctctgcagagatgcgaatcccttaaagaaccacacgctgctgatggcgatgcactcgctcagcagagatgcaaattcctgagatggatggatgactaggagctttcgatctcaccaggtagagttagatcgccgcaacaaagaggctaataatttaattaggcgattcaactagagaactgatagaagaggcgaggatctcatcagagatccacttcaaggaagacttgttgatagatcagggatgttctatcgatatactgattaacccatttcctcaggaacaaggacaaatcttccatttccaaagggaggacatacctttccacaaaggtcaaacagtgaaaactgctagatctcagcaatcagcggcatggggggctggccagagatctcaggctcaacaacaaccccctttgtttatcctctggttggccaaccaccaacaggagtccccatggccagtcagactcctccagtagtccccgtggctgaccagactcctccagcagtccccatggccgtccagagaagaacactccctttcaaaggggagcgagtcacccgaaggtcaatttctaaccgacgaggactaggagcgggtggaaacactcaaaacaacaatttgagaagtgaagttcatcacttcagacagttagatccactaaactccaacaattggtgtgaactaccctatgtcaacgcacaagctccaccagccaggtagagaagtgtgggtggctaggctctgcccagcttagggatggctgaccatgtacaagcaccagagtcatagttggccggccttgggtatgccctctcccaaggtatggt

SEQ ID NO: 94094 - DNA, 607 bp, Cannabis sativa
tttccaatatagtttattcagaacatttgcaactcattgtgtctgactaatggggtccctcccacaccctgtcatacaatggctacaaatattatatcaatttttttaatgactttagtagatttacatggatttacctgcttaaaaatgaatctacggctcttaaaaccttccacacatttatagttgaaattgaatttcaattagaaaagaaaattaaggtgttccaatctgactggggtgatgagaatagaaatttttttgaaccttttaaacaagttagaaaactccataggcacccttgtcctactactcatgaacaaaatggattagttgagagaaaatatagacaaaaagttgagcatggcttaactttacttgctcaagtttcaatgccattgaaatgttgggatgaagcttttattaggtgtgctgtctaattacacaatggattgcctactcatgtcttaaaccaacacccacctattgaaactccttcaatatacaacctgtttacactagtctcaaagtattcggttgtctttgttacccaaatatcaggccatacaacaaacataagcttgatttgagatcctccccatgtaca

SEQ ID NO: 94095 - DNA, 638 bp, Cannabis sativa
ttaattcagttttccaatgctatgtagagtaccctcacacccttttgtctaaacctcccgctgttgttaacttggcttggtcagccccacctctagattggttcaagcttaattgtgatgtggcggtgggcaacaaatgcatgatggcgttgaaaaatccactttgctcatcctcttataggagaatttgaagcctaccttatggcgttgaaggtttctgctgagaagaacttgtcttttatccaaagctaatcctaaaatcttttatcatcattaagagtgactccaaagttgttgttaagactctaagaggagaaatcaatcgatgggaaatagcaaacaacacttaccactattctgttttatgaaaatcttttattgcttgtagtttccttaagattgatagatcgtgtaatactactgcccataatttagctaagtgggtattactctataatgtttctagttttgttgagtggagtttgctcccaaatcacgtcctttgtagagactgtttagtttgacgttttgatttatatataaacgcttctttaaaaaaaaaaaaagattatcttaagaatattattgttgtggccctcattttagccaaattgagtttattcaatttggttaacatt

SEQ ID NO: 94096 - DNA, 689 bp, Cannabis sativa
  modified_base (627)..(635): a, c, t, g, unknown or other
ttgttgaaaacaatatgacgggtgacatgaagatggttagagttaggatgaagacatagataccttttatgttggctgttatatccccaaaaaatacaagaatatagcaaaattgaagtttgtgagcattgtaaagatgaagaaatggtaaacaaccaaaatttttaaaaaatatatcataattggggattttgtcatagagaacatggtaggggctacgtgaatgtaaagcacgagtaggaagcctatttatcaagtaaacaactgtagaaaaagcatatggccagaaatgaagaagcatatggcatgggctaagaaagtgagtcctgtgtcaaccacgtgatcatttttgcactcaacccgaccatttttttgaggtgtgtgaggacacgaaagttcatggaggatgccatgtttacaaaaaaagttagagagagaacaatattcaccaccccaatcaattcaacccattataatttcagaagtaaattgagtaagaatcattattttaaaagtgagaaaatcttggaaaacgtcatccttaggtttaagtaggtaaaaccaagtaaaacgagtataatgatctataggctaattaggattttttttctccccgaactttgacannnnnnnnnttatgccccctgaactttttttgccgttaaaaatttcctctgaactattaagat

SEQ ID NO: 94097 - DNA, 718 bp, Cannabis sativa
caatctcagccctcagatcaaataactccctcatctaacggttgtcgtacatcacgaaatacattccgtgaaagtacaatcacgggacaaaatcatgtcccgtaatttttaactgtccgacctttctcgttttacctgtcagatcaattctagcctgccacgtgttatttaattcgatgccacgtcatttggacggttttgagggtaacaggtaatgtattttaaagaatttgatatggggtgaaatgtaaaaatttaagataaagtaaaaaaataataataataataaataagatttttgttgatttattttgaaaaatagagtaaaaaattattaaatatattttttttaaaaaaaaatattaaaaaatattttaaatacaaaagatgacgacaaaaaaacactttttttttgttatccttaatcaaaatagtaataataatatatattgaatttggttttaacagtttaaagagctcctagaggctcaaagaatttaaataggataattagtatttttgcttttttgacatgtactaaatcatgtctcttgaattattgagattgttggatttataaacgtttgtcttctaacatagatgaaagtttaaaatgtatgatttgatacatgttaaagttcgagggacgtgattcggtaaatattaaagtctggagcatgatttagtacataagaaatcactgaaatagtaaaattga

SEQ ID NO: 94098 - DNA, 567 bp, Cannabis sativa
acatccttggtcgaatggtccactcaggacatcaccccatgaggctataatgatgtatcctactgattcaggctggtcgaatccctttgttcggacgatactatagattgaaaggataatttggatttgcactagctgcttcaacaattctaacatagtatgttgtacttccttattcccctaatctatctagtgcttaagtcattatattctaaccaactatttaattgaatgctacatgtcattctctctaatgccacatcactcgagcaatttttaggacaatagagagaaacaaagaatgaataaaagaatgtcatgaaatgaggaaaaaattacgcacaagaatgattatgatatatatttactataaatacatagatattatctctagaggatttgataatattattgtaatatattttctctttttaaatttattttgaaataataattattttttatcaagaaaaaaaaaatttattaattaacaagcaaacaaccaactacaactcaacacaataagcatccaccctacaaagaggtcatttttaacaataataacct

SEQ ID NO: 94099 - DNA, 811 bp, Cannabis sativa
atggaaagacaaaaacaagtgaacagggcttatttcagttcaaaattaacatctgaaaatggataatggatgcacaatggttgttgatcaagatctggcacgaccaacgctttcaacgtcttgttttcagccatggtcttgtgataattggttgaatcgttagaatcaaactcgtgattagctggtaatggctctttgacaggaccaagacgttgaaaaagaggattatcggtgatagtctttgatgagcgagaagtagatgatgattcaagatagtactacacccttgatagtctctcttgagtatcgtcttcactagacatgtacacctgacaatgccaaagtgaaaactagttagtaagacagaaattaaatatgaataattaaataacacaatcgtattcgacaatagtgccaaaaatttgatgcgtgtcatatgttgtatcaaatttactaattaatttaattccaatacttccaattatttaagtataaaagcaagtacgggttgatcccacgaggactatgtttaatctattattcaataattaaaatgtaataaaaatggagattgtttttattttttttagaacaaaattaacaaataaaattaagaaagtaaataaaatgcgatactacgatattaaagaaatagttaaaggttaatttccaccctcaacaatcatccttacctactaataacgaatggtatttaaattttccaatcatattattaatccagtagacaacgctaaagcagacaattatcccaatctccctattacaagtaatcaaggcaaagtgctcaata

SEQ ID NO: 94100 - DNA, 1257 bp, Cannabis sativa
tcgagtacgttaccggccttacacaatgatattggccgctcgccggtgtcggagaagacgcgctatacagctgatatctttcattggccggcaatggtcaaggaggagtttagcttgctgatcaccaaggaacccgtacctggtgcgagctgtttgatgacggaacactgtagaagacgatctgagaattcaagattatcaaattgtaccttccaaccctataaggttaggcccaatccattgggttactttttaaatctggtccataagaatacccgtaacacaatggccttaatgttttcctcttctactagagcaataatatcatataagagaaaccacaagcccaattcatttaattacattattgatcgggcccacttaagcaaagaatactcaagtaatgggttggtgatatgggacccaggagaaacccatttagctttctcagatcattctgtattctataaaagatcaactgctggcatcatttagatagtaatgtatgttgatgacatcgttattactggaaatgatactgaaggcatctcctcccttaagtctttcattcatacccagtttcagacgaaggatttaggtatttcttaggtattgaagttactcgaagtaaacaatgtatttttctatctcaaaggaagtatgtacttgatttgttaactgagacagaaaaattgggagcaaaaccttgtaatactccaatgaatccagctttgcatcttacacgtgacggggaatcatttgaaaatcttgagaaatattgcagattggttggaaagttgaattatctaactgtgattcgtcaagatattgcattcccagttagtgtcattagtcagtttatgtcttctccaacaattcattattgggcagcactagagcaaattttatgttacttgaaaggagcaccaagataaggtatagattacaaggatcatggacatactcggattgagtgtttctctaatgcaaattgggcaggctccaaggtagacagacgatccacttgatattgtgtatttgttgggggcaatctgatctcttggaagaataagaaacaaaatgttgtatgtagatccagtgctgaatcagaatatagagctatggcacaatatgtgtgagataatatggatttatccgcttttgactgaattcgggtttaagacttctattccagcaaaattgtggtgtgataatcaagccgctcttcatatggcctcaaatcccgtgttccacgag

SEQ ID NO: 94101 - DNA, 595 bp, Cannabis sativa
agtatttttgtaaaaatcctttttttttttgacattttgtggaaaacacaagcatgacccgtaaagcccaacgggctcacagcaaggccgaggcccacaaaacccacattaggtccaattactgttgttgtctacaaaaaaataaaaagcatttcattttttatgccacaggcccacaacacaatgacaagtacatctgttgtacggaacccacatataaatattaattaatgttatgaaaatccaaataaacttaaagccaaatgcaaattgcaaaattcacttcttgtgcaataaatgagatatgacaaaacactagttgttttgtttatgtaataccaattattctattcacttatatacatcacataacattattttaagaaaaattgctatggagtgatccaacatctctatttataattaattaatagttttttataattttttttaaattaaaataaatgagacttaatattaaattataatagtgaaagtgtaccttctaatatttcttctaatttatgtcacaaattgctcaatattaacatttctgataatttaatccaaactccatctttctttctagttttac

SEQ ID NO: 94102 - DNA, 702 bp, Cannabis sativa
taaattccttaggtggaaaattgtgccgtaaacttacctttcacttgcctttaaataattgtaacactttattttgtctcgcagacatgcacttcgaggatgttatgccgagaaatgggaagaagagagtgaccgactcaagggctcctacaaatgtcaaagtggagcctttgaaaaggcaaaggaaaactaccgctcataaaaagaagaaagcctctcagcctatcaacctcgaggtctctgagactgagactcaggaacaaactcctcctccggtcaacccaagtaccagcgagcctcctcctaacacaactcacgcctctgcttcctcgagccaggccattgaaacattgtctgttgcgacagtgaagactggctcagagttttcgcaggagtttggaactgcttgctggcgccaactcaaggctctccttccccatgattgggatttaatcaatcgtggggatctagaagaaatggttacaaggggcttgtatcataccctcttggtaagtttattgtcttaatccatatatttcttttcttgtttccccttgtttcttatacatctttatttgtaaatcttcaggcttctttcatctcttttgccgcccagcggcaaatcatagagaagataaaatacctggagagcaaggtccaaaaatcactagcccaacgtgaggtcgtggtcaagcaatggaa

SEQ ID NO: 94103 - DNA, 524 bp, Cannabis sativa
aaaagaagtccaacacgctcaagtgcactttgtccaaagttgacacgtggcagccactggcacgttctgacgctgtaatattgcgtgcgtcagcgaactttgatggttttgtcccctcgcttgcatagtctacttgtgtattttactttctcctttcgcaagtgggctttgtctccaaccgtatatttgtaaataaaaaactttgtaaattgtatttttaaaatcaataaatagcataaatatttattttgtatatatatttgtaaataaaaaactttgtaaattgtatttttgaaatcaataaatagaataaatgtttatttttttccttataattgtattaatattaattttgggtagtattagcttaatttagaaaaaatccctaaattcacattggtatttgacatatctacttggtattcaaaaaagttagaactgtcttgctgtatgcttaaacaaaatactaatggaagatattattattgctactcttttttattaaagattatataagtaataat

SEQ ID NO: 94104 - DNA, 578 bp, Cannabis sativa
actaggagggtgataattcagcacaacaggagatgcttaagaagcaaactaacaatgtagtgagcggggttgctagtaggaatatcttccagttcgtttggggtagttgagcttcagactcagatgttctaatccgattaattttttgcacacgaagcattcatatttttaaaaggtaaaatatcatgtttcagtttcgatccttcacacccctttttgttgttcaaatgtaaataatatgtaaagttaatggcatatagttgaatgtagatatggccaagtatatgatttaggctagccattcttagttagcgtaaatgctttatgtttgagattacttggtgaatagaagattattacattaaggaaaacgaaagcatctgtttcgattcatcgtttcatattttctatatgtgtgcatggtaattagatttacatattgtgaagagatcaactgtgttgatttttattcatgaggaagattactttaagcttctttcagtctcaatttatttcttctcttctgtgtgcagagatcggtattctctattaccgacccatgtttatctttctgctga

SEQ ID NO: 94105 - DNA, 709 bp, Cannabis sativa
tttctgctgtagcatggatgacaggtcactatgaaccttcaaaaaatgcagccgagcctctaattcctcctgttgcagcaaccaactgtgtggttcaagttgcaacttactttggcacacttctagctcttctttggcctttgcttctgccacatgaagctcagaaaaaccttgcttgttgatctctttcaacaatcccttcaaagccttgagtcttgtaactacttgatacatctttgttccattgattggttgggcccaaacatctttgattttctctgtataagtcgggtaagaactccacattctaaaatatttaaatggttttttaccattagatacctcagaatggaaatttaacacccccggggaatggtcaaaaactccttcattaaggaataaagcttcagcattcgagtatttacccatccaacttgggttagctaggattctatcaatttttgaatagatcctatctccaccatgttgcttattattccaagtgaagaaatttccactcattttcacatcttcaagctgacatttttcaacaacttcaatgaattcagtggccttatgataatgaactcggtctcccactctttcttctctattcaaaatttcattaaagtcccccaacactatccaaggatcacttgttgacagctcttttagatccatccatagtttcctccttccttctttatca

SEQ ID NO: 94106 - DNA, 963 bp, Cannabis sativa
  modified_base (705)..(707): a, c, t, g, unknown or other
catccattcctctcattagaccatttgtagcacgcatagctacagctctaactgattatttcctaataattgctgtacttcacaagtcacattaatttattgatcaacagtatctcgaccattaactatcagagcattgtaaatattaggtattttccccagtggaaaagctacatccagtaccagttatgccccaggtttttatttttaagcgcggaaaccccaggactagaagtagttggatttattctcataaaaaagaaaaatatgtcaaatttttttgtgaaattgaaataaaaaataaaggttcgagagcaaagcaagttaagttgatcggttaattcaattatgagatgggtgttagcacttaatctagaaatcaaaaggccttattgttcaaataatagaaataaataataaattaaaggctttggtttgacatgaaacggatatatctctatatctctgacttagcttagatttatgagatgatataattatggtaaaagttataccaagaagtgattcacgtaagaatagacatacgggttcacgtaaaaatacgcgtagaataccaaagggagttattcatgttcaagcaagtttcaacgatctggctctacccaattcttttggttcaccccaacattccccacttgtctaactgatgctgagcagtttttgggtatcaaacggacctccccnnnaggtaattttaatgtggtcgatttcccctcttttgcaatcttgctctaggtttacatacaactacattgatattagtaaaaggggctttagatgctgttgcgatattttgcacacgcaagtgtacgtatcgtttcaggtagtaaactcaccaggagtacagtcgatcccacagggagtatagttaaatacgttaaaattaaacttttacttctatttggctaaataaaaattaagaaaaaaattaaaaataagaaa

SEQ ID NO: 94107 - DNA, 902 bp, Cannabis sativa
  modified_base (61)..(63): a, c, t, g, unknown or other
aataatttataattagttactgaagtcttaaacaaaaaccactagaacttatataaaactnnnatttacgtggctcgcaacgtaactgtcatctagtatatatatatgtatatgatgtacatgtaagaatcttttttaatattagaattgttaattatattaattttaattgattttatttaaagacaatatttagtttaattgaaaatatattttaaatatgatcaacattattaagttaccaatttaaatttaatgagttacaaaattttatttggggcttttttaataatatacctaaatttaattttatttacaaaaatacctttaagaaaattatttgtgcaaataccgatgtgccacgtcagcatacataccgaaattaaaaataattaccgaaaataaaaaaaattagaaaactcttgtttccagaaattttccctttttgggagtttttaaaaaagtaaccatttagttgtttttgatgtgaacaagatatcaattagttactttttcattaaagtatttattgaattttacacatatataaataataaaataaccattttaatatatgagaaacatttatttttttgtctcagaaaaaagactactaatattaaaagtaagttgtttgtttcttttttatattttattaataaaaaataataaaattttaaacttaattatattcaacgtattacgtaatatcataaattattgtaaatttttttattatattgtatttaaagttaccatatagtatactaataaaatactttgtggtaacatttttaaataaaatgaaaaaaaaaatattttagtaacctataaaatcggcttgttatttaagatatgtttatgttatttttattaagttttcatattaactttaactatat

SEQ ID NO: 94108 - DNA, 3351 bp, Cannabis sativa
  modified_base (3322)..(3325): a, c, t, g, unknown or other
atggcttcctcaacccaagaaaacccgaagccccaacatctctccttccctcttcccttgcgcggtggtgctgtcaggccacgatggcctctctccgactgtggtggtctaaatggaccacgtgatgatgctcacatcacctggaaacccagacggtggtggtttccccttttgtttctcattacaacctaagcggcagcggtggtttctcattcgtctccggtcttcttctcaaacgacgaacaacccagcatcgtcgtcgacgagctaaacgaaggtcaccgctggctgatattttactgggattcgatattaggcatttcaaaatatttgtatttttttgtttaaagatttaaggattatagttttattttgaatgtatgtaaatgccctttttttttttttttattctgagatttgtttcactgcttaaatggggtatagattttgattaattattactatattttgtttcttggtttgtatatatattttttggtatttttgttatattgatttacattaactcttgatatataattaattaattatatgattaagtatattactattaaaatataattaattaaattattttaataaattttataatatataatctgaatttaaaaaattaatatttattttttttaaaaaaatagatatagtgacactcctaaagagtagctgattctgacaaattttgactctaaacgtctatagtgacgcacagagagtgactgtaaaagtgttcagtgacacatatgaagtgtcactaaaaattgtctttccagtcaccttcattagtgacgcgcggtgaagtgtcactaaatagttttagagttactcaatgtgggtcactaaaacttatttttctagtagtgttagtggttaatcttcatgtaagctctactatataaagagcattagtctcaccctaatggactaagtctcaagccttaagtctgaagtctctcagtcctagctctaaaactctaagtctaaaactcacttctctcttctcctctctctctctcacacgcccatctattattctcacttgagattggcaaactttggttctcacttcgtaatcttaagagagccactacagatcccactactattggtatctaagtggaattatctttagtattaaccaaaaggggagtagctcattacccgctaactcagggggcagaatctctataaaatttcttgtcttatttactttattattcttattgtgtaacacgtggcaagcattagtattaaatacaaccttactgtcagttggccaaatctgagatcaaaaatttggtgctttcattgagagcaagttgtcaatttatctaatcaaatgccatggttaacaaacggagaactctggctaaaacttctctctcatcgtgtcttcctcaagaccatatgattgagaatcctgatgttcgtctttcaatcacaactggaatctctatgaactcgacggatgtggccaaccctaccatcttagtaggcatcataaacttggccaccacgactggtcaggtggacactacctaccttgttggtcctaatggccaacctctattgcccagggaggactctccactggcacctcatactgaaggaatggccaacatggggcaacctccgccatgacaagatctggtccccaatattatgttgaagagttggggccatgaattggtgatccagccattggagaacctcatgtagacttgggaaaatatctcgagttagccagacttagagaggtcgtctgtcaagttggccaaactgaagaaccacgtgatgttggctacaatccattcgcataatagagacacaaatttctaatatggatggatgaccaagagtacatcctctaatctcatcaggaagaattagacgtcttaacaaagaagctagtgatctaataacacagttcaatgaaaaaactactagaataggtcagggccttgtcagagatcctctttaatggagactaatcgacaaatcggtgaggttctacagacaatctgtctgaccaagttcctctagagctaggacaaaccctccccaacctgaaagaggacaagccttgccacgaagatctagtggcgagaatagccagactctggcaatcatttgtctgggggccgaccagggttctctagcacagcaacaccctttattggccaacctttggctggccaacaccttagtggcgcacctctggccgaccaataagatgaactcctatcccagagcatcggggagcgagtaacccaaagtccaatctttaacaggctaggcctgggaacaggtggaaacactcaagatgataacaacttaagaagtgagaccaatcactttagatacatggatccacctaaccccataaattggcgtgaactgccctatgtcaacgtacaggctccaccagctagtcaaagaagaatgggcggccaggccctaccctacacaaggttggccgtccatgaatatttacttggggctggccggtcttgaacataccctctcctaggatatggccagccaggctttggccaatctagggttggagctcaatcaagaagggctaatcaaccaggcccctgcagcaacatatccttctatgcaagcacagttggatcaaatatgagacattctcaaggccttagctagtcaaaaaccattggaccttgagctagatagttcaagggatacacctttctcggcatacatcaatgccttgcctgtgtccaaattcaagatgccaacttggaagatgtacacggggaaagatgatcctctagtacacctgaaatactttgagatccaaacagatctcgaacaagtatttggagatgtgtaaggccaaatctttctggcaactctggctaatatagcccaacagtggtattcaagctggccctaggaaggtttaattcttgggaagaattgtctcgagagttctgtatcaagttctcttcctcaagaaaaatagcttcacggctagaggatcttgttgagataaagcaaagacaagatgaacctttgaaagaatatattcaaaggttcatggctaaggccaccaaggtcaaaggcctgacaaaagaaggccgatatatagccatactcggaggcatcttatcgttgagtgaattttggaaagataacaaaaggatctcagctagaaacatgaaggagttccttgagcgagttgatggctttataaagttggaagaagttgtttggcaagccgagacaagagggcaggtcaacgttgaatagacatgtaaagcccgcttagttnnnnttggaaattagcagttaatcacgttt

SEQ ID NO: 94109 - DNA, 6573 bp, Cannabis sativa
ttgtgactaaaagtcacatttatgccaaaaaaattattatgttgtaactaaaaggttgtcactaaaagtagcagttttttgtagtgtaatacatttaatcacgaaccttttagtcacaacataataataatgatttataattagttacaaactttttacttttaattacaaattttattgtgaataaaaaaaaaaaaatttatagtagctgtaattttagtcacatgttataacttaattacaaaaaataataaatgttgttagatacatttttagtcataatacgattaaaattaaattagtaatgatgttaatatttattatttcttctgtaaggagtaatgatgatatttaaatactgtgtaatttagtcacaaagagatgttcttattactaaagtattatcactaaatggtaactttaacttagtgttgttgcaatagtatcaaaatgaactaccatattaacatatgtgtaggaagattcgttagttggtataactataaatacgtacttgttgggttagtctgacttatattataagaagcttgcaatattatagatcatatcgtactgacttataacaagatatgggttgtttaatgtcatgcaatattatgttgtactcatgttagtttgttgttgatttgtatatattgttttttattattattttaatgttgtttggatgttattctccttttacttttatgtagttttttagttgtattcgtattatttttatagaacaccgtaaaaatataagaaaaaatctttaaacgtaaaatataaattttttacaaaaaaatagtgttttacttaattatctttttttttttacaattaacaagttgatacttaaattataggggttttttcaatattatacctaaaattaattttatttataaaaatacattcaacaaatttatttgcacaaatactgattcccacgtcagcataaataccaaaatttaaaattattaccgaaaataggaaaaattggaaaaattctgtttccagaaatttcagtgttttgcaagttttaaaaagaataactttttggttgcttttgatgtaaataatatatcaattagttactatttatttaaaaaaattgtttcaagataattttcttctcatatacgtttagttacttattttaatcagataactttaaaattatgattttatttattaatttttaagctatgtgttattttattatttaagatactttgaggttaacttttcgttttagcaattttaaaccatattttaaattatgagaaacatatatattgttttagatataaaaaaaatatgaacaagataaaagtaacattttcctttcttttataaattattaacaaagaagtaactaaatattatatttgaacaaaagaagtataccatctaattttatgggttacaacaataaatattataatatttcatatttaaaaatttgctaatatctaaataaatgtactctaaataagtaacactaacacatcttatagagcacagaagaggtcaaggttaaaaatttagtatcttataagtcattttagaaattagttggtatttgaaaattcgattttctagtgaagaaactaaaagattatttctgattgtaattattttttctgacaacggtaaaaaaatatatgcttcccatatgttaaaacgatcatgttaaaaagtagattgcggttatataattgttgagttgaaataattacttgtgtaactaaaaaaaatattttaaactttctttttttttttaaaaaaaaaaaaagagaaacaaatatataaaatggatggacagagacataaaaaaagacaaaaaaaaaattctgacacattatatatattaaagatatatatttaagttgttgtgtacatatttatgctcagataattatttatttaaggaaaaaaaaataaaagaaaattctgacgcacgaaagaaagagaaaataaaacatatgacaatttgaatgtataccgcatactaaattaagagaaatgatattgggtatatacctaaattaaataagtagtcatatatctataaataaaatacaattaacgtgttttggtacaattattccttttttaaaaggatcagtaagcttgtgccataaaaagattattggtaagtttcacataagtttagcccatcaggttgcataatcgcttaaaatattaggttggcaaggaccaaagtaagaaaaatgcctaactctaaggcagtcgcggacattactcctggaattcaactttgtgaaaggaactaaagcttgaagatgtgtcaaattacgaaggatctctttctgcgaaaagaagccatctctgggtgaactctaagcgagtgatttcttgtaagtaaaagtttgagtggtgggccaagaagcatcacggcccccgagaatgaaataataaaatcaaaaaaaccattcctggatcaattgaaagattattaagattaacaggaaaagttgaaacaatagccattggaacaagttgttttggtgacacaaccagagcctaagaagtctatcaaacaaatctccagagaaaaatagtggagataatccaatttactattacagtaacccccacaggtggggcaaattataattgtctttacaattgaaaaagtatagcgaaaggggatatatacaaaaagaaaaacaataaaaataatttcaagaggcctgccagaggtttaaagccaagcaccgcctgaccgggaggaagaggctgcaccagacatctgccccacagtctccatgtaaagatcatgaacagctttaatactttgtatgaagcgggcctggcgggcattctcctcctccagttgcttgttcgcctattgcagacctccaatctaaaacctagcattagtaagttcggaccaaagggtctcattggtggcacgcatgtcattgttggctgctttggctttctctagctccgtcaccagcacaacggcctccttagcagccctctctgctaacaaggccatctgctagaataggccaagttagataggccaaaatgtcagaacagggagcagaatataaaaaaaaaaaaaacaaagaaaagttgaataaagtgtctcaaggcctaaccccaactacctgctgcttggcaaaatgggccaacatcaagacatctgcgctactacgggacacccaggtctacatgggcaactaagagacgcatccagtcgcctgttctagaagctcggcaacaaaaggtgcgatctcttgccccaccttgtaggctagctgcttctctaaggccttgacttcccaggtcttccccgcaaggggaaaagtgtgcatgccatcttaaattttggccttatggatcacggacagcacaatcggccttttacagacttgtagtctttcgacctccaaacgctctttcagggccctgttcacttccctatccttctgcatgtggagaggattttaaaggaacagccttcctagggaaggttaaccccaccggaggtatctttggcaaggtcaaagggtatgaagatcgaggctggcccagccttaattcgggatcgtggcattgggggtggacccccattccaggagcagacacctcaagcctcggcttcttcctggcagaactgccacctgttccttcagtggaaaaaatcctctccattgcagacttgatgtacctgtcagaagtcgacacaatatcaaaaaggggccattgcatgacccccgaaatcctcgaagatggctaacaaaaaactagtgttcctaaagcaaatgcaccctcataactccctcaaaactccacaaagagtaaacaaaaaagaaaacttaccgattgtgaagagaaatctgaggctggtgatcttggtgcaatgtcctcatcgagagaattggtatcaaaaaagtttcacaagataggggaagaactggaattaaagaactctaacttgacagacgagaaaaatgaagagagtggaatagttgctaagggtatttaaagggaaccttccacaagaagcaaatggtttaatttgttcgcccaagggacagaccacggttggataagtgggaagctgagaagatgtatcaccacccaatagacggcttccatcattgcatacatcgtaaaaagcactcggcaatgggaaagtcgactcaaatccaatcattgccgtttttgggcatcccataagacacgcgcccaacacgcgcacaaaatacagaagtagcatttaaaatcccaacaagaagatagaagaaattataccgcttgaataatgacacttcagtttggcggctgatgatgtaatgcattaaagggcttgtcataaatcccacatgcatgaaattttttaaagaggagatactgcaagctcccagaccatattacgtctcagaagcttgggggtaaatgttatccagatttttgtaagcctgacatgtggattttaatcaaagaaggccaaggggtcattaagtcgcccaaatgcttcacttagtgctctggaaggataaaggcattaatctagcgggaagggcttccgtgaaggaacatttcctgactgctggccacgcaagagacatccgtgaaccaatgactcattccattccaggatcaaaggtcatctgttcccgctaagatatggatctacttagaaaggtcaaagcacttcgtggatacaccagcccagggtacgcctttggcacgcggaggcttaacccacgggtgttaggctacggacccagcgaccagacttttttatgtacgatgtaagaggttatctcccacaacacgttatcgtatagagcatgtgtggccttgtgtactgagctaaacaatccaacggctggggataagggaaattcaaataagtgaaaccccgaagtgacacacgtccaaggcccggcctatccagtcactacgatcttacaaccttaaatgtcatatgggaaatatgccacctaccaatccaacggtaggatttcatccctactgagatccatcaaaggcagcacatacatgatgattggcctataaacaccccaaaaaaagtacaagagaggaggagattttccttcggatcgaagactcactctttatcacctaaaacaaacacatttatgtgaaactactataaactccagaatattcctactaagcttcctcttcttcaagaggaacacggtggactatagaaaaagtctattgtatgtgtatttgtataaacagtcacaagccgatgagcctaataaaatgggctcgtggactaaggatagttaacgcatgaaccacgtaaaaatctcttgtttgttatttcattatttagccattattactttcttaagctctaaaaatatttagttgtcaaaaaactcggtaaatagtaacaaacttgcttctgggaatgatttgtcaatggtggaagggtctacgttcacggagctgaggtacgctcctagatgaacctatccaattgggcttggctcactttgtcttctttgggagacccactgatggcccttggatgctgacctagattctacgtgtctaatgacagaaacgcagataacagtaagcctaaaaaggattaatttgattaatcttttctctctattatcgtgatataatagttcttgctcatgtattgagaattgaagaagaacttcatatactctttatcctattagcccacactagtccttgtgtgtggtggaagccctagaagactatagtgtgagtattttgagatcaattaaggatacaacatatgaaaagacttgaggataccctgataggctttaagaggtaaatctttcatttatttttactttaaaaaaattttggcttcctttctctatcaacgtctcggatttctaaattctcattaaatatacatatggttatcctaagaatatagtacgatgataatcataaaacttttacaccgctgcgtacctgatttagtaccataaaccaacagagttgtcctagatgattcaacaattctaacatagtacattgcacttccctatcttccaatcactccatccggcttccatccttttgtatatgatatatatcgaccagctttccatttttatgccatgtatcattttgtctcatgccacgtcaccctagtaatttttgagataacactatcattttcttaagtgttgactggactcattaatgttaacacatgtcaacatataattagtccacctcatatagtattttactaaataaataatatattttaaacttttataaatggagactttaaataaataaataaataaaaaaaataaaataattaaaaaaagaataaacatttacaaatctagtttcggtcactcttgatctctcttccaattctcactatctctctccagtggcactcgcagttctctctggcgttaacggcagggccataggaccatgatattgttggagattattttacgaggatctagatttactaccatgtatgttattcaacatcctaaatatgaattttaaaataattgaatttaaacacat

SEQ ID NO: 94110 - DNA, 595 bp, Cannabis sativa
tgcctgcaggcgcgtttaggctgacttgctagctcggtgtgccagcaagtgccgcacgttctacctacttgggggtgtccaaataggcggcccgtgacacctagtatcctcctacatgtcaatatcgctattggtataactaaagtatcgggtctcatataatttaatataatagcttttaataaggagtatcgctaattaatcgtaacgcaacatgtcgagaaaatgctaggcaccactggtgcctcatagcaatgctctttaataaacaagtacttaattccgattacatgtacacgtggcacttgcaatcaatgatgtatatattgcaataaatgtaaataatacaaaatctacccgaattattattggtgattattgcacaatttgatcttgatcgttaactttgacaatacattttttatacaactttgagagaaaagaatacagaacttcttcacaacaagaagaatagattataggaatactattatcacaaccatgggatgggattcataggaatataaaacatcactaccaaaaaaggggtgatgaccatctttaaatacccttctgtaacttgtgtagtagaatc

SEQ ID NO: 94111 - DNA, 804 bp, Cannabis sativa
  modified_base (539)..(545): a, c, t, g, unknown or other
gtataatttagtggtagttaatccaattccttgtggttcgacctcacctgtgtgagtttactacttgattgcgtatacttgcgtagtgttcataatttttgcaacagctacaactggccatgaaattctagctggtggatgcagacttagttaattggttttaattaatcaattataattttaaaatcagactatgtgttatttatgaattttcactaagtaagggcttaattgtgaaaaaaagagatattgggatttatttattaattattaagagactttgtatggtctaattaatatataatataaatgttaattttatttgataattaattataattataaataaatagttttgacatttataggattgaaattagaaaatatagcattattgaaagaagaataagtggttaaaataaagtggcaaaattgtaactagagaagcccattaagtggccaaccactagtgtgtaattttgcctattattttattcttttttaatccatataattcaatcctaaaccctagttgaaannnnnnnaaaggaacatgatgctctcattctcatccaacactttcaacatagcaaatatagtttataactctgtcagataactagtagatgagagacaccttctatagtgatttcaaaacctccttgattgctcttcacctattcgccaatagtgatagagtgccatgccctcacatagcaagtcaagtactcaatcatagtgtagaagatggtggtaaccaaaccgaaggagagaaggaggtcaaggctcagatcttgttattac

SEQ ID NO: 94112 - DNA, 805 bp, Cannabis sativa
tacgttaccattggtcaataatttcttttgctatgaaacaaagattcattaagccaaaacacaaagtttggtgagcacatgggaactcatctcccaaaaatgcaagaagctattacaagagtgagacaaatcccacctcgcaagagcatgagtagccttattaaaaacacgcgaaatccaactaacaacacagtcaccgttcacgaatgaaacacagagtttagaaaacaagaaatgtaaattctagaatggagagtgcccagccaccaatgcattgacaagctgaacatcatctgaaaagaaatcaatccctccaaactgcatttcaaggccaagtcgacaccaaatcgcagcgcctccatttctccatggaaaacactctgaacatccaccttctttgcaccaaaagctttgaccgaactcaaattatcaaagaacacggccgccacagccccaactccgtcagccaaagcaaaatccacaaaacctctaactctgccaggtctagggagaacccaacgcacctctgccacgcctcgaagaccctcaccattacctttctcttcaacaagaagccgattatgttctagaaaataatcctccactctcttgcgcaccatgtccacatccataagcatcccacggtgaaaaatctcattatggcaaagccacaatttatggtacaagatagcaccataaagaaaaaaaattagacgcttccacattggacaagagatgccgaaacggaggttggagaagccaagaaaccacctctctgccacttgaaaactgaatagaatcaagt

SEQ ID NO: 94113 - DNA, 821 bp, Cannabis sativa
  modified_base (30)..(42): a, c, t, g, unknown or other
  modified_base (592)..(595): a, c, t, g, unknown or other
  modified_base (686)..(696): a, c, t, g, unknown or other
  modified_base (765)..(783): a, c, t, g, unknown or other
aattgatttaattctgataattagatttgnnnnnnnnnnnnnaaaaatctaaatacaaaattacacaaaaaattcgaaattaattccatgaaaaatgaaaaaaaaaatggacaaatttgtatttggggcggatggtatgcattgcataccatccacgcacgcacgatggtgtacatggccgaggaaacacagcacaagaggctgctagcagcctctccgcttgcacagggaaaagattcagatatctcagctcgtcttgactgagaaaactcggacaaggcttgtctgaatgcgcgtgaacccctaaaatcaaggggatccgcgcgcgtacgtggggtgataccacccctgatttttctaaatttcaaaaattcataactaattcaaattaaatcaaaattgagatctgtaaaaaaaaagtgaattgcttaattttttccaaactatcaaacaaaaataattcgagaaacaaattcaaatttatttttcgtaaaaaaatttgcaaacatcaaacaatcatcaaaaatacatatatcaacatgaatcacatccaaatcacacatatatcattttaagtccaaatttcttgaannnnaatcaattaccatggctctaaggccagttgttagaattattttagcaggatctagatttactaacaagtatgtttttaacatcctaaacannnnnnnnnnnaacgatatgaaataaacacatatagactttcaaaaaacttacaatggttgcagcggaatataatgtctnnnnnnnnnnnnnnnnnnnacccttgtatcttttctgtagcagagtatcactaagat

SEQ ID NO: 94114 - DNA, 1288 bp, Cannabis sativa
tttttttttggtcttgattaatttttcatgcagctaaaatgtggtgttactgtcgaacggtttatttgcccatgtcatatttatatggaaaaagatttagtggtccaatcacacctcttattctacagttgagagaagaactatttactcaaccttatgatgaaataaattggaagaaagtacgccatttttgtgctaaagtgagtgaaagtaacaattatgttcatatattcatggataattaatgttgtattaacattgctcactatgttcatattttcatagtttgatcagatacataacagatattatatatatttttatgtaggaagatttatattattctcatccatgggtacaagagtttttttgggatagtttgtacatgtgtaccgagcctcttcttaatcgatggcccttaaacaaattgattagagagaaagctctacaagtaacaatggaacatgtccattacgaggatgaaaatagtcgatatattacaattggttgtgtagaaaaggtacttaatattaaataacgaagagtataatattctttttcccttgcaaaaaataatgtataaatatagattttatacatatacataaatatatatataactcaattgttaaatttaacgtgtcaaaaatataatatacatttttttaaaatagtcaaaaataatatataaacatgtataacattctttgttattttttatttttttaatttaatcattaggtgattagcttggatgtaatagtatttgtcacataaatccattagtcaattttcagaaataattattttaacattaattcatctggaacattcataggtcttatttatgctttcgtgttgggttgaaaatccaaatggagattattttaaaaaacatcttgctaggatcccagactatctatgggttgctgaagatggaatgaaaatgcaggtaattaaattatataatcgttttttcttattatgttctttatacttttcatttttttaaaattaaaatatagattaacatctattgcatttacatatatagagatgaatgtgctttaaattagttaatattgtaggctaattcatgatataatatacattttattagttcaatgatttttagcaaaaaaaattacaatttattgtaaaatcaattaattacaaaaaagtggataacaatttgtaacaattctatagttagtttgtattaagtttttatttaatcactaaatttttatataaaaaaaaataatttgtaaatttgacttacaaaaaa

SEQ ID NO: 94115 - DNA, 537 bp, Cannabis sativa
gtatataaaattttattatagttgaaaatttatttttttaataaattaagtagaaaagaaattaaaatgttacttttgattttagttatcttttccgatgatggtaaaaaaaaaatatatatgtttctcatatgttaaaatgatcttcttgaaaaatagataatgatggtataatttttaagctcaaataattactagtgtgattaaaaaaatatcttaaactttttcttagaagagaaaaagaagagaatttcttttttaatattaaagaaaactatgaatatttttatgtttcatagttaataaataaaaaagagagaagaaaaaaaaaagaaaactaaacaattagtccatttacattgatatatgggttgctagtctttggcagaataattacataagacactattttttgtaaaatatttacattttcatattcaaagaatgttgttttacatttttacggttttccaaaaaataacacgaaaataacataaaatcaataagaaaacagcataaaagtaacatgaaaataac

SEQ ID NO: 94116 - DNA, 543 bp, Cannabis sativa
ttatcagtttcatcgacgaaaaattaaagttcatgatcaaaaccaattgtgttgtgtttttcctccatgaccctaatatgaaattgttatgtttttactatattttttccatcataaaaaacatttaaatgaattaagaaacaataacaactctgttgatacaaggaagaataaaagatagaagtgtttggataagtagataagccagagttcttgccaaaaaataatgttgataagcggaactttctataacattaatattaatttataataaatgaaaataaataaataaataagaactaaagatgttacggatatatacatttaaaatacttctcaaatttatatgtatttatttattttagagattatttcataaatatacaaaaataaaagaaattataaaaatacatttatataaaattttacataattttacgatttttatgattttatttgtgaaaaatacgggcttttgtgtattttatcttgtactttcattgatttattgttgattttttattgtttgtatgtttttttttt

SEQ ID NO: 94117 - DNA, 574 bp, Cannabis sativa
tttatttgctgtaatttcgtgtatgttagtagaacttgtaattttgcggctcataatgtagttaattgggcttttattcacaagttatatggtactattccgacctcttcagttttggatgaccttttatgtaatgaccgcaaggtctaattctggttatttaatggaacgaatacgcttattttcaaaacatatgattctatttttattttcggtgaattaattatggttcatttcttgaatatattgagttatcttgtacattaccttcaaaccaattttttttttggaagacttcaaaccaaatttaaaaactaatgaattaataaagtataataagttatcatacaatttattaataaaattagtacagaatattttttttttttttttttgaaatatattgccttttatgatgtttgaaatacatgttggcttccaattttgttttagaattctatcaaaactgctctataaaatattacgggtgattctacaatgcacctccttaaaagagatgtattgatacacccctacttgtttcggtatctagaaaaaaaatttagtctatttt

SEQ ID NO: 94118 - DNA, 852 bp, Cannabis sativa
taggagattccccgccccgtccccgcccccaataggggattccccgtcccatacttgatgtgaaataagcggggatagagattaaaattcttaatggggatggggacgggggagcactccccaccaattcatcgcctcgtgtgcatccctaggcacatccgacatattttgtattgttcaggggttttacaagtttgaatttcttaagtatgttaattttgtaaattttacctaattactaaaaacatagaaatattaattattattgatacaaaatcgtatataaaatatatgaaaattttgtaaggggttatttcagtagatttttatctgtttcggtatttaggagagctttagtctattttttatctataatcatatacgtcgtagttatttatgattacatgtgaacttttttaaaaaaatggaatagcttaccataccaaaaataaagtttaaagaattagtaattacacgtacaagaagaatcagtcacatgtgcaataaaatactttaatcttattttggatattgtaaaaactattcaaaatcttctaaaaattaaagatagccttagataactacatcgtatacgatcatcaaaatatggattaaaaagttctcttaaatgtcgaaatagatagtgagtctatcgaaatacccctttaagatagtgtactatagactttcccaacaataaatattaaatcgacaatccgacttttacatctttttcgtcttcatcaaaattaggtagataggttctttcggggaagaaataacatttatatttataatttttttttataaacaaccggttatgttatatttataatttttgttattgtactt

SEQ ID NO: 94119 - DNA, 851 bp, Cannabis sativa
caagaatctcgaaaggtcctataagcctcgggcataatttgcctcttttcctaaaacgtttgatcccttacatgaaactctataattctgcgttttagatctgcataactcttttgcctactctgagaggcaagcattctggtcataatcttttttattgcttcattagtctgttgcactgatttcggacccagatatttcttctctcccgtttcatcccaatgaatgggagatctacactttcttccattaaacaattcatagagagccatccctattgtactctaataactgttattacatgacaactctatcaatggtaggtatttattccaggagccctcgaaatccataacacaggctcgtaacacatcttccagtatctaaattgtcttttcggactgtccatcagtctaaggattgaaaactgtactgaatttcagtttggtacccatagcccactatagcctttgtcaaaatttagaagtaaactttggatctccatccaaaactatagtctttggaacaccatgtaatcttactatctctttgacatacaaatctgcatactgatccactgtaaacgttgtttttaccgatagaaaatgtgcagactttgtgaatcgatctatcacaaccaaaattgaatcgtatatacccgtggttctacgtaacccaaccacaaagtctatggtgatatcctcccacttccacttaggatgtgtcaaaggctgcaataaacatatcggtgtctgatgttcagccttgacctattgacatgttaagcaccatgatacaaattctaccacatttttcttcatcgcgctgcaccagaagtagggtttaagatc

SEQ ID NO: 94120 - DNA, 994 bp, Cannabis sativa
tcaaggggtaggaggatgcctccgagagtatggtcgtatatcagccttcttctaacaagcatgtgacctaggtggcctcagctatgactattgaatgtagtccttcaagggttcatcttgtctttgctttattttgacaagatcctccagtcgggcaggtatttgtcttgaagtagagaaatgaagacagaactctcaggaaagctcttctcgagaattgaatcttcctggggctagcttgaaataataatgttgggctatttaagctagagttgccaaaaaaattgacattgcacatctctaaatacttgtaggagatccgtctcgatctcaaagtacttcaggtgtactagagggtcttcttttcccgtgtacatcttccaagttggcatcttgaatttgggcaagggcaaggcattgatgtatgccgagaatggtgatcccttagccctatctagctcaagttctaagggctttggactagctaggcccttgagcatatctcatatttgatccaattatgcttgcatagaaggatctattgttgtagaggctcggttgactagccttctttgattgagttgcagcctcagattggatagagcctagccggccataccttgggagagggtacaatgaaggccagccaatcttgagtctagtgcttgtacatggtcagccagccctagctgggcagggcttggccgcccatacttctctgcctagctggtggagtttgtgcgttgacatggagtaaatcacaccaactgttggtgtttggtggatccaactatctgaagtgattaacttcacttctcaaattgttattttgggtgcttctacccgctctcagtcctcgtcggttaaaaattgatcttcgggtgactcgctccccttggggagggagtgcttttctctggctggccatggagactgctggaagagtctggctggccatgggtaatgctagaggagtttggccagccatggggac

SEQ ID NO: 94121 - DNA, 734 bp, Cannabis sativa
  modified_base (43)..(53): a, c, t, g, unknown or other
  modified_base (358)..(366): a, c, t, g, unknown or other
aagttgttggtatgatttctatagctctcttttaagtttcttnnnnnnnnnnnaagaaaatgaggatttgcatgcttgatttggttgtgttgttgctgttaacttttgatgatgtttgcataagtttaatcatgattatttgagtagtttagagctgcttgtgatgcatgttagtggtgttgtttaaagttgtgaatttttagttcaaaagctatggtttttcaaagagaaaatgaagaatctgttgctgttgttttgttgatgcttgctgtagttttcagaagttattatatgcatgtttaggtagatttgggatggtttgattgcatgttggtgatgtttaaccaagtttgagttnnnnnnnnnaagcttggagctttaatggtgatttttgattgtatgcatgaagcttggttttgatgcttggaaaatgtttattagggtctagttagaaggtctggaaagtttggttaagtttagaaacattttggttggagaattgatttttggtggttttctgggtaaaaccagctaaccggttttatactgcttgttaaaccggttacccaaattttgcagtaaggtgtgaaatcggtttttttcaacttgtcatttcgtgctagtttcgggttttcaggcagtttgttccctgctagtttagggtatttttgtatacagttacagtaggttaagtttggttttaaaacctttttcccggttgtgatttagcgtgt

SEQ ID NO: 94122 - DNA, 514 bp, Cannabis sativa
aataatttgaaatctaatattcttatatattacaatactattaaaatatatatatatttatataaacttccttttttttatatagttacaaaggtataagattatgtagaaaaaaaatataaatagaacaatcattaaatagtttgtgagttgtcaaattttaagagataaggatagaacactaataaaaattagaacaattaactataatgtacttttacaaaaaaaaaaaaaaaaagacggtatataagtaaatgtatatacataggggcggatccacatagaggagaggtggggcagtcgcccaccatgaaaaaaaaaaaatcgggaaaaaaatatatatgcattttagttagttacaacatttatttataaataaaagtgatatctatacacataaaataagctttggtataatagcaaagtcatttcatgcatttaaaggaggtcatgagttctaatcccaataaaagcatcccaataaaagcatgtttactttagtatttttatttta

SEQ ID NO: 94123 - DNA, 1103 bp, Cannabis sativa
tatatttgtattattttaacataaggaattaacggtgttaattttaaaaaatatacttcaaaccatcagttgtatgcgtacctattttattttaaacacatgcaacaacatatttttactttacttttgtcaccgtaattattctaaattttcgtaaaatggtcaagatggctattacagctacaatatacaatgtcatatgaaaaatagaatgtaattttttaaagcatgagaaataaaaaatgttcctacctaagaatcttcatatataacatgcatgtgttcaacttacattttatcctaaattaaaatcctagcaaaaagtgtaaagatgacaaatatgtatttgaattattattattattattattattattattatttttaattactcaatcatttataaaagcaagagtagtttggttgtaattgaaaatattttaaatgtaaatcaattttgatttctaattttaattaatcttttaaaaattatgatccaaaatataatttttaaaaaaattaatgttatgatacaaaagtatagagctcataatattataatcatatttttaaaaataaggtcttaatagtaatcttttttataaaacaaggttcaaaatagaattttcaaaaatatagagtttagatttgataattcatcaaaatataatattcaaaattgtataaatctttttttttttaataattatatgtgtgtcatttttttcttctaaaaaagtacattagcttaaatttttataaaagtatatgataataatcttagttatataatataggtatggtagtaaagatttttttttttttgaaaaaataaatagagaattaccaactgtaaaaaaaatgagaaaggaaaattaaaaataataaaaataaaagaaggtatattaaaagaaaaaaaatgacaataataagaaaaaaaattaaaaatattgagtgacaaaaaaatgacaaaggcgtattaaaagaaagataattataataataaagacttttttaaaaattcttaaatttttacaaaagtataaaataatagttatagttatataatacacgtatgataaatatttttttttttttgaaaa

SEQ ID NO: 94124 - DNA, 2851 bp, Cannabis sativa
agtcttgtctattgacatggttttgtagttttctctctacagtggttttcttgtttttgtctgttttctgatcttatggcttcatcgagtacgttatacaaggatatcgaagatcaatatgctagtatcacacttgaaggagaggatgatagtgattttgcttttgattttgttgaagagggtgaacaaccgattgatgagaagtggtgtattgtgggtagatttttgactgaacgggctattgattttgatgtcatgaggcatatgatggcatcattatttcagccagggaagggtatgtatgtcaaagaactcgagcctaatcgttacctctttcaattttatcatgaaattgatcttgagagagtaatagagggtagtccgtggacattcaatcgtatacagtttgtttttgagcgtctgcattatggtcaagatccgaggtcccttactatcaatcatcttgatatatgggtgcaagtgcatggcttaatgccaggctttaaatctgatcatgtactgagggagttaggcaattacattggtacgtttgtaaagacggatccgaagaactttcagggtatttggcgcgattatcttcgggttagagtgacactggatatatctgtcccattgaagagacgtaagaaacttcgtagaactagtgcagatgaaggattctgggcggtatttaaatatgaatatctccctacattctgtttcatttgtggaatattgggacactctgatagattttgcccacagttgtttgtactgccggcggacaagattgtgaagccttacggagccaatatgcgagcacagccaaggcggaggaaccatctgatcggagccaagtggctacgaactggggtcgacgatgatctgcaatcaagggatatggccggagttgatgctgtcaatttgcccattaatcaggctgccaaccaacaggagataaattcggcaagaaatcagggacaaggattcaatttgtcaactgatattttaggcaataagtttggtggagcaaatcgtggaaagaatatctccaaagatatttcattgtcaaatagagagatcaatatggaaaataatgaaagtgttattggtgagaattctgaacttaccatattagaaattaaaagaaggaggactgaggagttgttgttgggtgatccacgtgtgataagttcttctccaaatgggccgaatgtgttatcagcccaaagcaaaatggatgtccaagatgtcaatggtaatgcgaatggggcttcaaaaaacgagttgttggtgggtgctggcttccaggcccaccgttcatcatgagtattttgagctggaattgccgggggcttgggaacccgcgggcttttcaattcttaacggatcttattatccaaaagcgtcccaattttgtttttctttgtgaaactttgtgtcgaaaacatgttattgaaaggctgaaagtggttgtgggtttcgagggaatgctatcagttgacgttagaggccacagtggtggaattgctctgttatggagattcaatgatgaggtaaaattaataggcactgctgtcaattatattgatattgaagttactttggcaagagaggaaccgtggagacttacaggattatatggcgaacccaaccgaagtcagcgacataaaacatggaatcaaattcgaaccttacacgctgcatcggctttaccgtggtgcatcattggggacttgaataatgtcttgtctaatgctgataaaaaaggtggtaactgctatcctcaatggcttattcgtggattccagcaggtggtgaatgattgtaatctccatgatttagctctttcggggtatccttttacttgggaaagaggccgtggtacaagggaatggattgaaatccgtcttgacagagcgctagtaaatcaagcttggtctcagaggtttgcttctgctaatcttcttaatattgaagtgtctatgtctgatcactgccctattcttcttcaactttgctgtcagattttttcgagcaacaattcttgtttcaagttcgaaaatgcctggctccgagagcccttttgtcgtcaagtagttgctgattgctgggagttgagtatggggcggccaatacatgagaaaattaaagcttgtggggagaaattactggtgtggggccgcgattacacaggaaacttcaaggatcggattgcaaagtgtaagagaaagatccaattgcttaagagtagccgtgaccaagaatcaatggagcagtacaaaattgctaaggctaaccttgatgagatttacaatcaaagagaagttttttggcgtcaacgttcgaaacagctttggttgcgagagggtgatcaaaacagtaagtatttccatgctaaggccacctctagaaagaaaaataacaccattcgttcattgaaaaataattctggtgtttgggtagattgggaaggcggtttagatactgttattgtggattatttcaaggagctatttgaggcctcaagtgctgaattcgaacaagttactaatggcatttctcctattgtcactagtatacaaaatgctgcgctacttcaaatcatcactcccgaggaagtaaagaaggccttatttcaaatgactcccgataagtcgccggggccggatggaatgaccccgggcttctaccaaaaatattgggatattgttggtagcgatgtcatttgtcaggtaaatgatttcttcaactcttgtagtctccctgatggtatgaatcaaactaacatagtgctcattcctaaaaagaaaaatgtgagtactatgggtgatcttcggcctatatctct

SEQ ID NO: 94125 - DNA, 592 bp, Cannabis sativa
gaattttattgatgtcaatgacggagttactcaaattgatgttgaggctactgttcagtcaggtgtgaaagttattgagattatgataatgttgtttgttttttgatttctggctgttttatggttgtgaatttgtaggcttcttctaattttttttataaataaaaaattatacagatgacttcaggtgagattggtggtgattttggtaaccaagttcaagatactgaagatattgagattaaggagcctcctgttgttggtgttgtggtatggttatttttctatttttagtagctcaatagttgtttatttaatgactaactttctatttttatacatatttgtttatatatatagatggtttcaataggtgtttgtgtagattctaatattcaagttgtagaagatgatccaattgcaattgaggaaacttctgttgttgaaaagaggaaatcaaagaaaccagtagctttgacgtctccctttatggagtttgactcttcgatttcaagttctaaagataaatctggttatggagttgttaagtatgtacctggtttgtgtgctcttgatgataaaattggagaag

SEQ ID NO: 94126 - DNA, 865 bp, Cannabis sativa
gcttgagggaattcaccagcataagtctttgttaacagtttcctttaatccttctttacttggttcagactttaaagttttttctctgtgtaggctggtttgaagttggcttatacctattcccgagctaaatctgctgcctccaaaaatgctgctatgtccaacaccatgagggcagaggtggacttggctaggaaggatgctgatgacgccagggtggaacttggagctgtccggatggagctgggtgaagtcaataagaagctttttactgctgagaggaaaatagtcgagttgactaaggaccttgaggcctccgaccagcttgaagctaccattggcaccttgtcggcagaagtgaatagccttcaagaggaaaggggagttcttcggattgtcttccgtcagctgaaagaagagaagaagactaaggaggaggcgcttacaactgaggtcaagaagcataaatcggggatggcgaggctggaagagaaaattcatgccttagagacagccggtctcgatatcttttatgacttttggaaggctaaccctctagcaaattttgattacttgggtgaagccaaagacatgtatctcgagtagtgcgcttcccaagtggcttatggagaacccaaggcgactacttctaccgctggcgagaatgttgatgttccttccgctcagacaacatatcctccagctcctaccagcccagaagacccgaaccgagagcctgggactcaaactatttaaatacttctctttttatctttcttttttatacatatcttattcggccataagtcctttttctgagacatcatgaccggccaagcggtctttaaacttggaattatttttc

SEQ ID NO: 94127 - DNA, 592 bp, Cannabis sativa
ataataccatgaggttatggatattttgttttttttttttacatttatatgggattttttatgctatatttttgtaaaaaaatatgtaaattccatatttttaagactaattaggatttttgctcctgaattttgacatgtaccaaattatgtccctgaacttttaaggtcattaaaaatgttcctaaactattaagattgttgaatttaaagatttctgtttactgttatttgtaagagtagtttttagcttgtataaatatttatataaatcatcatctcactatagaatttactctttcagtttcaattcaaaaaaagatttcactctattattgattgttttgttagtggtaatggttatagttacagtcatactgtgtgtgctgataattatttgccacacgtacaaatttaaccctatgaataggaggaaggcacatcctacactgattgactatattgccaatgacaatcaacaattgtaatttgagcaataataataaatatagctttaatttcatatacctatagattaatatttctaatatacaaaaatattattgttataaatattaataattatgtggat

SEQ ID NO: 94128 - DNA, 700 bp, Cannabis sativa
atcacagagacaaaactaatcgcagtaacaaaagtcgaattgaagtagcaaaacacatcccgaccaagctgcacctaagcccaaacccagagaaaggccgacgagcttggctggagaaaaaaaacgacttcttacaactttaaatttagaaacgagaaaccctaagtgaatacaattagataatttacaaactcaaacataaacaagattcaatttttcagttggtagactaacaaaaacttcacttgatatgtttaaaagtgccatcataaataaaataaagaagatatttattcatgattcagaggacacgatttgatatatgtgaaaatttgatgagaaaattcctcaccaactatgaaaattataaataaaataataaatatttttcattttaaattgactccttttagtctcaaattatgtaatagcaaaataataaaagtttctaccgaaaaaatgaaaataatccaatttgaaagtaagctaattttatttattaaattgatttttttttattatttataatcatctaattttattaagaatgatttaatttgttctccccaagttttaattttaatttgtattaaatgttgtaaatatattttttttaaatatatatttttaaaatgggtaaatacaattttggaccctctgttttacaaaagttaccaattggaccctgcgttttgttaaa

SEQ ID NO: 94129 - DNA, 575 bp, Cannabis sativa
actttagccttgttaaagtgattttcaaagtatattagaattataagttcaaagtttggctcactaatttatgtgacaagttacttttcaaaaatgacatataagttttctaaattagattttaagattattcatcttttaattaagagaatgcaactggaatttttgaaatcggataaacgaggtaagagttatgcgcgttttatgtcaaaaaaaaattatatttcgctattgtgccttaaatggtttaccgttggacaagcggtgaactatttggctcaggtaacagttacccattcgtgaaattgtgaactgtttaagcccaattttgtcttgaatttcgtgctaacaactataaacaagtagtttcttcatatgctctatataaacacatttttctcacaaaaactaagaattgttgagattctattcgtcttattatatcattctaagtgttctagctaaagaattatcatcttttcgtaaacacgctaaccacacacacttgagccaaactcgttcttatcttctctattgcaattctctctaggatttcacattgtatttcatcttat

SEQ ID NO: 94130 - DNA, 651 bp, Cannabis sativa
gaactcaatttaacccgaattaactagaccagtatcattctttttagttttgtacttttaaatttttaacttttattataacataaataataatgtataatataattatgaaaaaaaaccccaatgacctgacctctcacacactccctctctttctctctaatgtttcatgtgttgaaatttcatttacaactaaaaaaaaactttaggtcggttttgacgggttaaattgaccaaacagtcgatcgagttactattttttttttgaattgggcgagtggcacttagaattttgcaacctgatgtttacattgggttagaaaatatgtagtataagccgatcaaattgaccaatgtataaccctacttaaaacaactaataattcccactatgtaatataaataaacttaccacaatagagtttgctttatatgagttgtgtattgccaattttgagccctaattttttacataataatattgtagtagcactactattaggcaactaataaacaatgcaggcgcaactatgtatgaataatgtgagtgaacatcgttaagaaaaaatttgataaagtattattgtacttgttgcccctgaattcacccaaaatacgtggaccagtcgaaatgggacacgtggatcagat

SEQ ID NO: 94131 - DNA, 1255 bp, Cannabis sativa
gttgtgttgttgttggcattttatgctctaaataaaactcatttttatacaatcagatttactacttaataaaagatcaaaatttattttgtgttgcttattggcagtattcatgttatttcgtggagcagttagagcagtctttttgtaggctctcccatgacacattttcctttgtcccttgcaggatcaaatgttccacgatatttcaggtttatcttcatagtagtattttcctgaggagcagggtcatcaaaaatattttcatcggaagccacttcccctgatttaattatagtctccaatcttgctagagtttctcgcatttgacgggagaatttctcctgatccgccagcttctttatggttttagcaagttctttagccatttgaatgacttaggatctggctcatagtaatactcctcttctttgtcttttccatcacctttaggatcttcatcctcaggatcatcctctggatcttatgtgtcatcttcattgatgggatttccatcaacatatttttcagtatgttaagtctttgtagtaggatgactgggcgcctctgataggtttccatcgactcttgcttttgcttgagtagtaggattcacataatccatgggagtatctccatcactgttgatgttgaaaagtgaccaacattagctcgctagattggcgagatgaataatgaatgtaagtatataatttagagacacacataaaatttatagtagttcactttccatgtcgcgatggtaatggagctacgtctactttgagtttttatttctcacgagattgcaagaaaattggctaagtgtgaaagctctaatttctagagagagaaactagagagagatgtgttacgattattgttaactacgcaagtacacgtatcaagtagtactcacacaagtgaggtcgaactcacaggaattgaaattgattaccattaaactagacttatgtttccatttggttgaaaaataatctttgagagaaaataataaatattgacagaatattaaagaaaacaataaaggttgttcaaatatggatgagaaatttaggatatgaatccagtttgttcaattactcaattgttaatgctattgactattcttctttctttaagtgatgatagattataaaaataacttaaactcttttcagatcataaatatcctaaactatatgccatctattgcatctctaagatagaataacatataatttgcattaagaaa

SEQ ID NO: 94132 - DNA, 855 bp, Cannabis sativa
aaaaattttcaggatttttttttcttacaaactattatttttacattgttttaaaaaaatgtttttacattgcgattgaaattataatataatgttgcggtaacatgaaaataatactatttttttcttaaaaaaatatcagtaaaaaaattataacaacaaaaaaaaaagtatgattttaaatattttatgtaaattttctatattaaaatctgcaataactaattgtatatatatattttgtaacgaactaacgggtgaaaatcgcttggttgcttaattaattgtataaattgattcaaacctgcatattatcataaacaaaaataaaatatatatatatggaacattttttaatgggtattacttatggatggatactaaataaatttaactataaatttaattttaagaatattaaaccattagattttagtcagataatgaataataaaaaataaatttgaattttatacttaatttagctacttaattagagaaaatataaaaaaaatatctctttttattctatatcaaaaatatatttgtatgaaaaatatttaagtcaaatttaacttttttttttctatttttttgccaatttgtttttattatttttttagctgatagaataattccagcccatatatttgtaaaaatgaaaattgtttttaattaaataaaaaaaaaataattataaaaagtaaaatttttctaatattactcatacccctatatatataagacatactataattaatgtcgatggaaaattagaatttgcaaacattagtaatacttaaaattttccgtacggggagatgaagctattagtatttttttgttaattgggaa

SEQ ID NO: 94133 - DNA, 765 bp, Cannabis sativa
  modified_base (357)..(361): a, c, t, g, unknown or other
gggattgcacagcttacccggtatttctccttacggatcacgggactactgactgtcacagtgttagcctaaggagatgggcggtcttgggtttcaagatttttactttttttaatcaagctcttttggcaaaaaatgtgtggagattacttctatacccagagtcgttacatgccagaattttgaaatataaatactttttaaattgttctatcctagaagccactgaaaataatggttacttttacatgtcaatcaacatttaatccgcacaagtgcgacctttgaattttccaatccaatccgatccacacaagtacggatatctgcactttgcgaattggattggattggatnnnnnggattggattggattggatcgattattttatgaacacccctaatctttagggctttaacccacaaaactccagttagctccaagcaatgctcaaatttgctgctagaaactaccttggcgatcatgtcagttgggttgtgttcagtagggattttctttatcatcacaactcccttttcagcaacttctctgatgaagtggagtctgatatcatatgcttggtcctctcatggttcactaggttcttagacagttgaattacactttgattatcacagtgcatagatattcctttcaactttagcttcaattcttcaactaaaggagtaagccatagagcttctttaacaaccttgtttgtgccatgtactccaattcagtggttgacagggccactacctttt

SEQ ID NO: 94134 - DNA, 637 bp, Cannabis sativa
cccttcattattagccacagacacgaaacaatttctctctctttctctctcatatatataatacatatattttaaacaaaatatgagtatgttaaagcgaagaagtctatcattgatcataattgctttcatgattgcttcattagtgtggtgttcatgcttaaaaccttgccatgctaggcaatggaatctaaatatcccaacatggacaaaaaacaattatcacaaaatagcaccagttgaaaagcttagtggtactactactggaaacgctgccgttttcaatgttttgaactatggagccaaaggtgatggacaagctgatgacacaaaggtcagcttcttctatatttatataaatttatatatgatatccatattatatatgcatatatactttcgttcataatgatgagtacgttattttgaccactaaacatgcacgggacttttagttcttatgataccatatttgatatcataagaactacagtcaaagcacaaatcacaggctgcaagtaatagtagtagtatgtataatagaagttgtcctcgtttactaatcaattggtttaatttctcatcatataataatatatatatatcactgatgaaacgacaggcgtttgaagcagcg

SEQ ID NO: 94135 - DNA, 812 bp, Cannabis sativa
ttcacttcgaccaggtcctctaaatgcaatgggagttggcaagaagaagagaattgtccatggaattttgaggagaaagccttccaagcgttgaacaatcctggtgtcaacttaaaataccattgctgggcggcttctgagagtgtggcaggaaaaactcggcagcatacatctcctcatactccttgtaggtccatttgcatttgaaaatatttaagatgtgataagggatattccttcctagtatacatcttctacgtcagcatcttgaacttgtggagcaactctataacattgatctttaaagagaaaggggatccacgtgctcagtccaactcgagatcattattcttctgaccggctaggccttagaacatgttttttacttcatccaactgttcttgcatggatggattaacttgttcggtctcttggccgaccaaagtcacatcaggatcgctttgagctagattttgagcacgagctgagtggctggtgagacatagtgctcgtctaaccctctccttctgtttagatcatccttgagatcatgagatgctcccagtctattgaataaaaatatacaaggttgtccaagtggttgattattttggccaagcacttgaccagaatcgcagtcttggcagagttattaggtattacccctcttgacaaactaccagacaaggtctggctgcctaccacttgaccctgaggtggaacctgtgaccagggattgggcggttgactattcagagtttgagatgctggtcgcaggttgctgattaatagcttgataggccattcgtatc

SEQ ID NO: 94136 - DNA, 578 bp, Cannabis sativa
aggcccccttctcgttggaggttccatccacatagaccctccaagtagccaacttagggactggatcttttgggaggtcatttaagctttaacactttactacaaagtcaacaagggcttgtcctttaatagatactcgcaactggtactagatatcgatttggctaagttccatggtccattttagcaatttgccaaaagactctcacttttgaagcacttgccacagggtatgatttgtgtactcttatggcgtgggctttgaagtatgatctcagcttttacaaagcgctagcaagaaaaatgtcaatttttcgatcttgggatacctggattctgcacccaataatctcttgcttatgtaataaacctggcactggaccaggtcttcctctcgcataagtgcggcactaatggcgtgattagacactaccatgtacagaaacaaaccctccgcttacatgggctttgataaaataggagctcgagtcaaatgctccttcaacttctaaaaagtagcctcccactcctcggtctacacaaacttcttgttaccttacaactcattgaaaaatgga

SEQ ID NO: 94137 - DNA, 1163 bp, Cannabis sativa
aaccaatccgtgaacacccctactcaatacataccaattgatgtggtatccaataattagttaacaattttctaaatcgtttatttaaattaaaaattttgagagttggtattaaaatacaccaataattgtatggtcccttttgtggtgcttgccatcttaatgtgtctcttatcatttttgttattaatatgtacaaatctttataactacgattagaatttcatttttttttttgttaattatacataagtttgcaagaacatctccaatgagagatgtaaaaattgtatatttggcaaacaaatttttttgtgatatatttgtatcaatttttagcattgtgctccaataatgtgcagttgcaaaacttgatgcaaaatttactaattttattacaagtataaaaaataataattttattattaattttttaatataaaataataaaaataaatagttcataattaacgctaaaaatatactaataaaataataaaagtgacataaaaataaataataaagttgtgcatttatcatgatgtaaattttgtattataataaatattttgtcaaatttagctcaatatttactatgtggtaaatttacatcaacttttgacacaccattggagaataatttttgctatgtgagctatatttaaactttgcattacatattaatttacatctccattgaaattgctctgagttttttataattctttttatttttgtcttattcatactgtttataattaatcatttttattagtattttatttttttttatcaatttatttagtttattttttaaaaaatccacatgtgttggatatacattaaagtatatgtgcatttcataatttaatgattctccataaatttgaaataaatatatcccttttgttaaaatagatgaagtaatttagttggtagataattacatattaaaatattttcaaaaccataagtaaattttataataaaatttatgtggggtcctgtataataatacttgagtataataatatatttttgtaaatgttttatgtttacttttaataattttttttgattttaaatgaaaaataaataaaaaaaattatgcataaaattatttttttttttactttttctgcttatttatttattatttgtaa

SEQ ID NO: 94138 - DNA, 536 bp, Cannabis sativa
caatcaaaactaatcaaaaaaataactttattatgacaactataaaacaactaaaaaatgatttaatatttatactataaataactaatcaaaagtaactcttacgccacttgaaagggatgggccagttgccgagacttaggacgggggcaaagaggaaaactctataggacgtacaagttcctccgggcaatccactgtcacccaggaggaatatgaagccctgaagtgaatggtggaagagcaggaagcacaaaacgagtggcagaaaaataacaatgcaaactcataatcaaatgagtgtatgtttcagcaacaaatgagtcagttcgcgacatctaacattttagaaaaaagtttaaaaaataaaataaaattatttatgtaaaactataacatttttaccagggcagttcgtgagatacaatgataaaagtgacttttgccggcacattacactattatgctggcaaaagtaagtacttttatcaatgcacttttgcgatggtacataaaaagtatcaaggggaagggtt

SEQ ID NO: 94139 - DNA, 1860 bp, Cannabis sativa
  modified_base (29)..(37): a, c, t, g, unknown or other
  modified_base (703)..(706): a, c, t, g, unknown or other
  modified_base (1587)..(1592): a, c, t, g, unknown or other
taaacgagacatcattggattcttatttnnnnnnnnnttatcctttagtttttcctcttaactttttcattaagaaattgcttagataatatgtcattggacagaaggtttataaatcatctgcttatgatgtcactctattttcttctatagaataagtggcgtagatgactatatttcagatattctatccggaaataatatatatcctcgatcttaaaggatctcctacttgtatatgcttactgttgtcaacttaaacttagagttagattagtagtggtgatccaagaaagaatcattactcaatgaatatttggtataaatttaagtctttgcctttaaattttagattccaaatataaatttcaaatttcactttccaaaaaattagacaatacagtataactttcacaagttattaatatccattttctaataatgaatctgagttgtatgttaatgtatggattataagttttgtaatctgtgaccagaacccacttaaactattttaaaaactctttgttgtaactagacctaagtcattaaaagaccacaaccacataatatgtatatatctatggcatttgcatcttgttcatagtggtgtagacaagatcattctctacaaagagaaaatatgccaatatccacttgaaagtaggatcatctatattcgaacatatggatgtacattcannnntggatatgagttatcgttatattcttaagatgatcactctagattttaccttatgtaaagaaatttgaaaggtttgagaaatttcatgaatttctagcattgttgaaaaacattaaggtaagaggttaaagatcttgcaaactgataggggtagagaaatatttgattatgatcattagttgaacttcgaattatattcaaacttacctccctagaaattcggattgcatgttgatgaaagtaaaatgtctatgattagttactagtagttcgctaagtccttcaagggacatacactagtgataggaatactttaaaatgatggaatggctgtatacttaatgtacaccattactagattcatgggtgtcttgatcatgaacctaagaaaagctagaactattaacttaagtttgcatgtttgacagttgttctaaagtgattaggggtggaccatcctatgatcattaagaaaagaaagtgtttgtttcaacaaatactatttttctaagaatatgactaaatctgaaagtagcaaagtagaggggatattttaattcataaagtgtttaatcatcttattctatataagatggtcccactatctctgttgtcttgacacaaccgataaggtcaacaccactaatgttcctagactaatagtcactgtaccttgtcgtagtgggagggtttcaatgaacccaccctgttctgacttggaagacacttgggataaaatccattgttagtttaaataagtaatggatagtcagaataaggaactaagaagcaaaaccaagagaactatggttaaaaccattcatatggagtaaccaaaaagttttctatttacaaggacaagaaaggaaatttggttagtnnnnnnattcaatggacttaacaaacttcctgatcttagtatagtaggtttgagattatctaaacctatggcttgtggtatgactggtaatttacttactctagtgcaagtaacttacttttgtaagatgatggaccatttttctaatggataattttaaaggaagccttttggctcctagacttggattttatttatctaaggaacagttttaactattccaaaaaagataaaagtcattaaaaataagtccttaagcatcaacagtgagagg

SEQ ID NO: 94140 - DNA, 568 bp, Cannabis sativa
atctcgatctcttctaattcttctacaggtccaacattgctgcttgggtccccaagtcgaggatccacatcttcatccccgccttgggaagttcgttacttggaatgttttttcccttgtctgtgctctggctggaggatatttcctgcttagccttggccactgcaaggttgtaacattcatgagcagactgctggtttcctcttagacaccccaccccattctttgttgggaacttcaggtacgagtgaaatattaacgtggcaagagattgatctcaggtgagaaaggagttccgcgtgcccgatccagctcaagatcattgtctcttcgtcgggctaggccgtaaaacatattttcagttcgtccaactgtgcctgtatggctgggctaacccgctcgacattctggtcaatttgaattacgtcaacatctttttgagcggggatttgagtacgggttctgggatgcacgattgtcgcgacattctgctcgtctactcccctctttctcttaagatcattccttaggtcatggggtgcccccaacctttcgaatacagaagtgc

SEQ ID NO: 94141 - DNA, 838 bp, Cannabis sativa
ttatgaaaaatgttaataaaaggccgtgcttcacatttttttatttattaatattattattactataattaaatatgagattttatataatttaatgtaataaatattgttagctaattgtaagatcacatgtcaaaaaaatattaaataatagttttaaattattgttgactaaaaggttaaattattaaataattatatttttttattatttttttgagcattgctattcgggtgcctaggcacccttaaaacgtatcgccttgtgattgactagcgatactttctaaaaattattatattaaattatatggacccgatacttaattagacatatagcgatattaacacgtaggagggtgcttggcaccagtagtactttcagcatttctctatttttttttaacaattatatttcttagtataataatgttcactgccaaaagattgaccgtgtaagtcgttctttaagtgtaataacactaatagagcggtcactctctcatcataaatacacctagactaaaataaaaattagacgtttggttcaccataaatgtaatagtaatcctaatgtaatgaatagtttattatattgtttgtttttttctaacttttgtaaattacaataatacttattacattgacaattgtaatgataattacttatcaaaattaatgtaattcctattataattaaaatcataataataataataataatattttaataaaaatatagtaaaaaagttgaaggtctatattattattttttttttgaatatttaatttttttttatttataaaaatatcacttgtaaaaataatattaaatagt

SEQ ID NO: 94142 - DNA, 739 bp, Cannabis sativa
ttatcatgaataataatatgttcgggatttaacaaaatttttatattaaaacatataattatgaaagaaaaatgtgaaccaagtaacataaaattatttttgatctttcatttattagcaaataagattacattaaaatgagttttatttagggcataagaacccaacattctcctctagtgaaggtgagcatttggtatgcaagcttaagaagtgtatctacagattaaaacaaacaaccctatagattaaaacaagcatcccgtcaatgttttctaaaatttcattatgtcatctcttcatttgaatttgaagagaatctcatggatcaatgcatatacaagaaggtcagtgggagtaagattggtattcttatttttatatgtggacgatattcttcttacatctaatgataatggattgttacgtgaagtgaaacaatttttttcaaagaactttgagatgaaagacatgggtgaagcatcaagtcataggcattatgattcatagagatacattctaagatatcttaggtttatctcaagaggcctacatcaacaaagtcttagaattatttcagatgaaagattgttcaccgagcgttgctcccattgttaagggtgataaaatgaatttgagccagcctccaatgaatgattttgaaagagaagaaatgaagaatattccttgtgcttctgctgtcgaaagcgtaatgtatgcttaagtgtatactagacct

SEQ ID NO: 94143 - DNA, 611 bp, Cannabis sativa
  modified_base (283)..(286): a, c, t, g, unknown or other
aatcaattaattttagtcatgctagattaaatgagttctatccactaaatatatttcatgtatatctagttcagatatatctaatattttagatttaatattttttgattagatcgtattcatctaatattttagatctaataatttgattagactagattaattcatccaatctaaaaataaataaataagtaaaattttatttttaattttcatatatacatatatggaacacttctcaataggtattacctattgatgggtactaaataaatttaactannnntattaattttaaaaatattaaaacattagatttttatccaatgacaaataataaaagagaaatttaaatttctatgtttaattaactacttcattataacataaaattaaaaagtaattctttttacactacataaaaaatatttaagtaaaattcattttttttaaatattgtttttaccaaaaaatttattttattattttttttcaaggaacaacctcactctatataatataaaagttaaaaaaaaaaaataatcaattaaaaaaaatatgaataaaaactcaaattttttgaatattacgcatgttaatgatctatattc

SEQ ID NO: 94144 - DNA, 1042 bp, Cannabis sativa
  modified_base (811)..(811): a, c, t, g, unknown or other
aataataataataataatgttcatcatgaatcacatcccatttacattatatcctttgattaagataaattaatttctttgtctaataaattaaaatattaatatacttgatatcaagtccacaaataatattctttacaataaataaaattcacaaataataaaaaaaaatacgaccaaaaatttgaaaaaaaattacaaaaatattttaacagagaaaaaattttatttttaccctttgaacttttttatttacaaaaataaatttttagtaaaaacaataatttatttatagttgtattaaagttgtcatgaggttatttttttagaggttttatagtttatttataattgtcgtgggattgatttctggctgttttttagttgttttcttactttttactgaacaaagtgtatttttataattttcaaattttgagagtgtattttggtacataaaaacttaggtcgtaaagtcgtaaataaaacataaaaagggttttgaaaatttcccataaaaaatcgcaaaaactaatttatattaaaaagaaaaaaattacaaataattcaattgatatccataccaagattcatatacttctgaagacgatgtacccccacattttatggttcaatctgtagaagaaggatactctcaaactgagcctattgtcaaaagtgaggatgaaagtaaagaggaagaagcaactacaatgaaaacagaatccactatcatcaaaagattaaatattctatattttaaacttttactcttgatgacactcccccatctaaatggcgagaaagattncaagaatttcaagcttggcttagcttggaaacacaaaaaccgcaggcacagacagggacaatcctcttgaattttgtctcaagattcaccgaaactttgcaagattggtggacaagcttaggtgaatacaaatagatgactttctcacaactcccatctgtcgcaaatgccctaagccatctctatgtcgagttttgtggccaagatgcacaagtaactgaaagacttaga

SEQ ID NO: 94145 - DNA, 658 bp, Cannabis sativa
cggtttgtaatttttatcggttttttcggttcggtttgggcgggttattcggtttaggcggtttacaaattttttttgtacagccctagtttggagggtttatcgtcaaaatttgagcttagagggttaagtgcaagtgaagtaatagttgagagggtttaactgcaaaaatttctaaagaaaattataaaattacgggttgtacgaaattttcaatatttttatggttgtttagattttatttacataaacatgactttttaagttttcatgtatttttatgttgtactattgtttttttttgttattgattttttgttatttgtatattagttttgatgttgttttgatgtcaattttttgttactttcatgttgttttttattattttcttttgtttttatagaataccataaaaatgtaaaaaaaaaaaaacctttgaacgtaaaaatacaaaaattgatattttatgtaattgttccgaacagggtttcaatataaaatcctaagcacatggtgtgtgtaattattttccaatagaataaaagaaattaacggttttttttctatgaaataatgacttcattgaatttaacattcttaatacaacaaagcttgtaaatcggctcaaacgttatgttgaaaaatgctacaacca

SEQ ID NO: 94146 - DNA, 524 bp, Cannabis sativa
aaactcctcctttgcatcttcaccgaaagatgctatagtatggaagaggttgataaaaacagccgtagtagaaagtaccagggctattgtgtctgttatgatgaaggcttgaaatgctctgttattccttagaactgcgctaccttgttgtgtatgcccaacctcgtcgcttatgtaacctcccggtaatgtaaatcctgctgtgaatgtcactgtcgcaatcaatgcagccgcaaccagagtagactctctaaaatttgcaattctagtccttgttttttctttttgctcaatctttttcttctcagcctcggtcaatattttttcgccgctgtcatctcttgcaagtgattttcgcaaccaactctttattgtcgggtttttaccaaaaagctttggcaaccctctctgtcatgtataaatatgcattatcatcacatgaggactagctaactggattaaaaataaaatataaaagttctagttaccttctcatattcactggaatcaagatcatatgccat

SEQ ID NO: 94147 - DNA, 1205 bp, Cannabis sativa
tctctctctctctctcttgctttggaagtggatctactataatatagatgtctcatgttcctggcttttgtttttgatctatatttgaaaagcatgttgtatagttagttgttttctctattttgagaatatatataaataaatcaaatatatagtttgtgattttctctatttttctgtgcttttgctaattttggaaatatctttatgctgctactgctgctagagattaaacttctttcaatccaaatctaactccgacagatacaaatagtagattaggattaagctcatggcgtaaagaattttaccaacattttagagataacattatagagttgtgtgattaatttatcatcttagcatctcttaacattgatgtgattaatttgtttattgctttgtatgtaggaatgtcagagaaagtttcaggacctttggatatcaagtttcatgatttaacacttatatattggtgtaatgagatttattaaacatgagtttattggatatgttttatatttgactttttggatattttgttattttagataatttgaattttgaaacaagttttatgaaataaaatttaactagtctttctaatcaattgtgttatgaagaaaaaaaggtattatagaaattaatattttttattatttaggcttgtgagaataataaaataacataagaaatattacaaaaaaaatattattgtttattattttataatactctttaatattaatgtgtaaatgtattataaaaattaaaataatatttatattttaaacttataaaagtaataaaatattatacaaaaagtattattataaagtatccaataatactttcacaagtgaaaaaataaattatcaaaattataaaagataatgttgattcaaacatattataatattaagataatactaaaaaaatattttttaataatactttagtataattcatagaatatattatgaaaaaagacatgatttatattaacacagctttatttaatgttttaaaaatagttaaggttttcctaaatttcttttacaacttcttctcttttgttctacgcgaaataagagcaattcaaaacaaaattttcttgatcttattttcttctacccgaaataataagcccagaaaaaataaatcaagttctaaaattttagaaccgaacccagaaaactctccct

SEQ ID NO: 94148 - DNA, 1078 bp, Cannabis sativa
tacaagtaaaataagaagaagaaggagaagttatagttataagttttgatgaaactaaaaatagagagagaaataggagaatgttaagaaccatttcttcttacttgtccagattttattccaataaaattcataaaagtaggttctaaacctcaacttgacctgacacatttcatctgattagcaataaaaatatacatatgtatagactatttggattgcaggacaataaatttaattagtactattttgaacagctcactaactactcatgtataaaataaatacataaatcgaaagacaaaccataccatagcagagtacgtcctcttctatattatcatcattaactcttaacatttcctaatatcccagcagcactacttctaattttagtgttatcagaatccccaatcccagcttcataatctgcattcaaaattagaaaaggtgttggaagaaagagttcacctcattttgtagtcgtctctgccttcttcattacgcaaacccactacgagagagtcttgttcaatcttggtgagagtattgctccatcgtcattcttcaccgcatcctcatcaatcttctcttcctcagaatcagaaaattccaccatatcgatctccaatatcgccaccatagacctcgtctttctcaccaaaatagagttagaagttgtgggaaactttcgtcattacttaaatctttctcagaactcactatactacttttaacaggcactattgctttaacatttgtagagtgattcaagatgaagacacttataaagaccattaaaagtgaagattaacatgcttttggagattttttatttttggctgcagtgaaagctaattttctttattaaacatgaaatcaaaaacacaacattgttccaggtaacttatttatcacactgtgagaaattaaaaaaattacaattcaaattgcctagacaccataaattagaagttcttatttgttggtagagttcagtcttttactggtctgaatctttctcctaaaataataccttatttcaacatttttcttaaggtttgagttcagtctttac

SEQ ID NO: 94149 - DNA, 507 bp, Cannabis sativa
aattttattttgtatttttacactataaaatatgtaatattttggcatttaacactttttatacatataaatatgttacaattttaatatattatttacataattttttaaatttatatatataaatttaaatttgtaaataaaaatattcttatttaccaaaaaaagtgtcacattgttttaaaactctttaaggtgttgtacatgtaaagtataaataatattttttaatatgtaggtgattaattaatatcttaaataatattttgttaacacagagtttaggtgaaatcttacatttttctattgtattttgaaaattttgtaaggtttttcaatttgtttagaagaaaactacaaattctgtttagagaaataaataaataagctgaaaaataaacgacacatataaaattatgaatattatttcttctacaaataaattaaatctaaaatgctcgcatggcttaaaaattattttaaatacaattcatgtagattatgaat

SEQ ID NO: 94150 - DNA, 666 bp, Cannabis sativa
attaagctaaaatgttttttttttaaaggaggctaaagtggtatcttactcataaaaatgtatataaataaacagcctaaaacaaaggctttttttttaacagcctaaaacaagttaaaaaaatgtaacctgattattactgcaacagctcaattatgaactaattttttttagcatttttaatggagatgcaaataaatagtggaaagttaaaatataaattatttaacaaaaaatgtgttctaatagtatgtcaaaaagtgatgtaaatttagcacatagtaaattttgtgccaaatttgacacaatatttactatgatgtaaaatttacatcacaattaatgtactatttttttatttatatttatgccatttgtaccattttattaatatatttaactatagtattaaattatgaagcatttatattattttttttattgttttatatattaaaataataataaaattgataataaagttactaattttcatttttttaataaaaatatattaattagataataaattttatatcaaaattttgtaattgtgtattgaaacacaatactaaaattctatataaatttaccaaaaaacctttttttttttgccaaatataacacaatttttaatctcccatggtcttaataaacaagtatcaa

SEQ ID NO: 94151 - DNA, 691 bp, Cannabis sativa
ttcgtgccccctccccccccaggcgggctataggggcgaaacctgcccggagggccaaaatttttttgggtacttcgcccaaaaacaagtccaacagttgggaatttgatttgtgtgtgtcatgtctccggaccccgagggtgaccaaatttgcacgaaaatttcacgattttcgcaaatttcggcgaaagtgctaaaatcgaccccaacaagtgtgaatctgttaaaaaacacgcactccccggaccaaaacccggttgttcacgggggtcaaatttcgtgaattttggccaaatttcggccattttttgcgcaattttggccaaattttgtcacattttgtgcaaaattgtcacacttttgtacacaaaatggtaaactcatgcacttcaaattcacctttgtacacattgattttgtcacttaaaatgacacggaaaatctgcttaaattccgcgcgcaatttgtgcacaatttttgtacattttgtgtaaattttgtgcaaatttgacacaaaaatgacacaattttcccgactgaaaaaccccgggtttccggttgttcgagggggtaaatgccccaaaaatacccccaaattcccggagtgccccgctgcgcacatttttccggaaatttaagcaacttaaaattcccgtgcaccaaaaattttaagtattttaagaaattcggg

SEQ ID NO: 94152 - DNA, 501 bp, Cannabis sativa
tatttaaatattatgttttaattagtcacaaataattttttgctttgaataaaagttacaactaatcacaaaaaaacttttggtaactaaaaagttctcactaaaaataatttttttatagtgattttagaaatttgtgtcctttttatatctctttgttattttgtaaccaattttcaaacaaaacctataaatttttccaaataatatactaattgtaacacacttagtatattagttaatgtcactataaatttagttaatgtcaccataaatttaagaaaaagtgatatatatgattcaccactcattgtgtgtaaaattatataatctgaatgtgtgtctaatattattttgggataattagatgagaaagatttttttttatatatatatatatttttacgattttttataaagatagtacaaaaatatcaataaaataacattaaaataacaacaacaaattaacaagagtacaacataaaaagtccgtatttt

SEQ ID NO: 94153 - DNA, 689 bp, Cannabis sativa
aaacttctaaaaatccttactatagtaaatataataatattaataataataaaacagtttgtttattttaatacaaagctagataaagtaggatggaatcaaaatagtaaatatgactaattgcaacatataaataaccatcgttatcaatttaacaaaaaaataaccatcgttatcttgatgaagattctatcaagttggaatctcttttatttatttgtttattaaatcgaatctaacatattttttatggtgctgaagaaaagtgtcatttaatctaacatatatgagagttgggaataagacttgtttatttggaataataagtagtgaaatcaaaataaagaaagaaaaagcatgaatggaagaaagagtcaaagaataagaagaggccatattctagttgatcattccttttcaagaagcaaacaagctagcattggtaatggtaaagcctaatcctagctatctccacacacaagtattcacccatcacatcattattcaactttttgttggtatttacttacttttggttttgaccaatcattctctctccaatgtacaattatgtgaaatttgacaaaagggtgtacccactgtgttcgtgtttttgagagtatacattatagttacctcacaagttattgtacccgataaaaattataatttcaaatttccaaccctta

SEQ ID NO: 94154 - DNA, 667 bp, Cannabis sativa
aagattccgaggaggaggctattatcttgaatcgtcgcaatggcaattacaattcaaaggatgctactttatgctacactttacccattcatggatatggagctcctaataataagcttttcttgacgtgagtgagtttctgaagtgaaagcttttgtatttatgttgtgtttctacttacttacttacttgtctatcacacattttatcgaacactttgtctgattttaagcttaacttttttctaatgcttttgtagttatacaaaattgaattttgttatgtgagaatagatcaggacgctttacatttttatatatgatctttttttctttttcggtttgtaatttaccatagttgaattgaagatagaataaataggggtattttacccttgaactttggccctaaaaagttatgtcccctcaacttttaccgattttatatcaccgtcaaatcgtaccatttttgtttaatagaagttcgggggcacgatttggcaatggaaacatatgatagtggtcatattttgaaggtaaaattgctaattattaacagaagtctaacaaaatctaataattcgggggccacgatcttattaaaaagttcaggtgcaaaattcaaagattgactctttttcatttacattatacaataaatttgaaaa

SEQ ID NO: 94155 - DNA, 1038 bp, Cannabis sativa
atcttcgtcttgatgacttttctgataactaatcacctcttctggttcattagaatctccagctctggccctaggaccagtgaaacgaagaccaaattgggttcgggtgagggccatgataactcgaatgtaatctgcaagtggtctcaccactttcttcagttctcaataaaagcaccaaaatgtttaccgagattttcaaaaatagagtataaacgaaaagaaatgaagaataaataatcaaaagagaaagagtaacaagagacaaatagttttttacgtggttgggtcattaacgagccttagtccatgagtcagttctcaagttttcctgagcaaagtttgcaagagagttgaacccctaatccataggatttgtggggcatttatcgtagtttgagaaatatattaggtttcccttttcctttaatgtggagtttacagtaaataatacccttaggctacctcgtgatgtccagcccataaagaagacaatttactgactaggtagattgaatttggattaatttggtcaacaccgcgtgcactgattgtgggcaattaatctgtgaattaatttcataatatttgttataagaagtttccccattaatcttgatacgatactctgtcataacctgataactagaatttccttatttgtgtacaggaataaaaatggaaaatggaagggtcttccaggaatgcactatctcatcctaatgatctcacagtacaagacatgctttcgggtagggcttgctgaaggcataaggctttgcgagtgcagaaccaagatacgttcctggaaggacatatccaggtgggctttgccatttttacccccgctgagagtctcacactgatggatctttgatgctgacctagagtccatgtgtccactattggaaacgcggataacattatttaaaaccaagtcaaattttagtaatataccttcttcttggcaattttgttgtgggttttgcgatttcattgtgggacttgcaactgtctcttatttttgtggttgaggtt

SEQ ID NO: 94156 - DNA, 528 bp, Cannabis sativa
atttagaaaattccgaataatttaatttatcgaaatcaagaatgagatagcttgttgcacgcatacttgtttcaatatttatatgttacatgtactgaaaatactaaaagtacctataagtagttattgaaaacaatcactaccactatgttacccgtacatatatatataaaaacacacacatttacattgtataaaacctaaacaaccagaaaacatggcagactccaaaaaacattggcaatgaagagatgtaacactatttaacgtccccaattagtacaaaatcaaccgataatccaaattaacaactaattatgcagaaaaaaatacaacatcgatattatacctatttagacatgtaacatcaagggtcaaagccaccttcccgccggtatgaaaattgataaaacaaagctgcaagctaagttgctgacctgcaaaacaagagcatagaccttgaaaacttagcttcgaaacttttcacttgcaaactcatcaatagacaacaaaatagcaataatgtca

SEQ ID NO: 94157 - DNA, 563 bp, Cannabis sativa
tcatttaacaaaatacagggtctaattaataatttttacaaaatataaggtctaaaatgatatttacccgtaaacttaactacacacttttaatatttcttttattataagtcattaaattaaaagttaattttaaaaaattaatatttttaaaatagacatttaattatatttattttttgaaagttcccattaattatccattaaaaaataattcacatatatttttatatatagggattcttttatatgacattctaaaaagactctattggtgagagtatttgggaaactataaaaagttagcacctcatttaatgaagttatattttgtttatatgaaaaacactagattattgagcatctttatttttaaattattttttattttttaacatatttttttttttgtttttttagtttttctctcggttttctctctctaaaattttatgcacccactctgttttacaaaccatcgacaaatccaaccactatatccatcaatgaacccaactatcacctccttcaatgaacccaacttctaatcaaattcttaattt

SEQ ID NO: 94158 - DNA, 540 bp, Cannabis sativa
ctcctttcttttgaagaaaaaccacctccttcatggctagaaactcagaaaatgttaataccccacatgaggaaactcatcatcgtcctgggaaaaagcccgtgggctacagaaggtctatcaacccacagtctagacggaccgcccgttctaggaggactcaacttgagggtggccccagcacacgaaccacacgctcccagaggactcaacgtgtcgttagtcctagtacgcgaacaacacgctcgaggagaatttagtgtgggagtggccagaaccctgagacaagggatgaagagcccaatcgtggaggtacccagtctatgggagaaggtacttatgaaacggaaaactgtcgcctaagacgccgtctggaagaggcgcaatggcagaacactgaattagaacatgatgcagccttggccaaggcggcataggtgacgaatgctcaaaatcaacctgaacctggagtgagaagaccacgaggcaggcctcgtggctcacgaaccaggagacaggaaaatgcccgggaagaacaac

SEQ ID NO: 94159 - DNA, 1046 bp, Cannabis sativa
tactccacctccactcatactcatcaccatcaccaatccaattgatattgattttattttaagatggaaccccatgattctcatcaattatgaatacaataattagtgaggcaacaacatcataagtgcatctcgagcttgatcaagataagcaagacatgtatagaatacaaagggatgagtcgttggaaagggtggataacgagttctttaagagcttgcagctcattgacccacatactcataagtatattgaaagactatgggatatgagcaaaagactattcatctcggaatgctcataaacgacgtgagagaattgaacttaaggagcaaagaaaatacattcctaagggctatcttaagacttgtcttaaacaataaaagccaggaaacacctcgactagcgtctcgcaaaatacgcctagtcatctccaatattattgaagaatgtgaggcatattatggggatgtaatcttggtaaagaaattattgagattttatgccataaataaaactcattttaataaaatcaaatttactaattaataaaatatcagaaatcattttatattggatgttgacatgattaatttcatgattgcatgtttaatgtataaactctattaaatccctaacatataattattcatgattatagtatcgtctacacagtgaaaaataattatgagtatatgattctagtcctacaatttatcagtaaactggatttacactgacgtgatgattagcgtacggtttacttacacttgtataagtggaatgtcctttccaatgtatttacactagtatcggatgtatcggctatacattggactggaccgatattgaaagtaaactacttattgttatgtcttttctaagttaatgtcactttgttgatcttaggtcaattgatgccaatcttgagatgattgagttctagcttaattgtactatacaagttctttgacttgttcgttacaactgaccagtcgtattagtccaatacttacatcttgggaacttggtagctgaattgagt

SEQ ID NO: 94160 - DNA, 861 bp, Cannabis sativa
aaggaacttagagccatgcttgagactcaaactggtaggaaaattaagaagcttagaactgataatggtttggagttttgtgcagatttgtttaatgattattgcaggcacttaacagttctaagaaatcctcagccaaatggcattgctgagagaatgaatacaactattcttgaaagggttaggtgcatgttgatatactctggtttgcctaagaagttttgggcagaggctgctgtcacagcatgctacctaatcaataggtgcccttcatctgtaatcaatttcaaaattccaactgaaatgtggtgtggccatgtaaccagttatgaacacttgaagatttttggttgtgtggcctatgctcacatcaaacaggggaaacttcatcctagagctagaaaatgtatttttctaggatatcctgaaggggtgaaaggatataagatgtggagcatagaagaaggaaatcatcaaagaaatttcatcagtaaggatgttgtgtttgatgaaaacaccatgtacaaggatctggcaaagaattcacacacagcaaatgagaatttcaaagagaaagttcaaattaaggtggagcaaactgggaaaatgcagataacagatgctactgttgaacaggaggttgaacaagaacttgaagagcaaactgatgaagaacttggaaatgatgatgggcaacagaattatgagttaacccgagatagagagagaagaaatatcagaccaccaagcaggtttgggtatgctgatctgattttctatgctctaaatatttctgaatttgatggtgaggaacctggctcttatgaagaagctatagtgtccatttacaagctggaatgg

SEQ ID NO: 94161 - DNA, 920 bp, Cannabis sativa
  modified_base (864)..(868): a, c, t, g, unknown or other
gatgccactgagatccttgttaaagtagatgatcttcttgctcaaaaggatgctcttggcttgagagaaggtgttcaaaacaattttactcaaaagccacctgctcctttagtcgaagaatccgatgtttatgggaggcatgctgaaaaggagaccattgttgatttgctgctgagagatgatacagttggtgggggaaatgctatttctgtcattccgatcgtcgggatgggtggtgttggcaaaaccactcttgctcaacttgtttatgatgatgttcgtgttagaaaacatttcgagctaagagtatgggttactgtttcagatgagtttgatatttcaaagataacgagagagatctttgagggggtcacttccaacaaatgtgaaatcgagaacccagatgaaattcgaagaagattaaaggaagcattgcaggggaagaagtttatgtttgttcatgacgatgtttggaatgagtcttatactttgtgggactctttgaagagttgtttcgattctggagcaaatggaagtaaaattgtagtcactactcgaagtgaaagtgtcgcctctactatggccactggggatattcatcatctccggattttatcaaatgaagattgttggcaattatttgtcaaacatgcttttagaaacaatgacaatctcgatactaagtgcaaagatttggaagtacttggtagacaaattgtggaaaaatgcaaaggtcttcctttagctataaaatctctcggtggattattgcgctctgaacgaaattctaagaaatgggaagatatacttatgagtgacacatggaaggagttgtacaagaaggagggttccattcttccagcnnnnnggttgagctatcgtcacttacctggacatctcaagcaatgttttgcttattg

SEQ ID NO: 94162 - DNA, 670 bp, Cannabis sativa
tcgccttcttctgttatgaccaccatcaattgatgattggctctcctattttgaagttctatgcaataacattcgcgagccaacaattggtcacatcgtactacacccactcccgcttgtgttgggaactttagtgatatgtgttttatcgaactgactaccccttgtccaattaatacagggcgacccatcaatatgttataaactgatggaagatcgacaactaagaattcctgcattagtgtcgtggataacagtggctctcctacagttaatggaagttcaatgatgccttggctagcgacactatctcttgtgaatccacataagcttaccatgcaaggttttaactttgcatcttgtaacctcattttattcaatgtatccatataaaggatatttaccgagctcccattatccaccaacactcttttcactcttttgttcgcgagctgaactgtaatgactagggctgagcataaaatcatgagaactgaaaaaaccgttcaaaccgacctaccaaacaccgctggaaccgaaaccggcagaaccgaaaactgaatgaaaccaacaacggtttaaatcgccaatagtcggtcggtttttttttggaccgtaaaccgaccaataaaaccgaaaccgaccgaaataccttatacatatataattt

SEQ ID NO: 94163 - DNA, 2405 bp, Cannabis sativa
atctaacatatagtagtagaaaaatatttaatggtaaattggtatatgtctcactaaaatactttttacaacttaaatttataatttaaaatttttccatccataaatgaagagtcaatatcctaaatatcacaaaaattgagatacccgaaaaagttcccaaccaggcaatcaaattttcaaccgggtgcccaaaattttgggcaccgccagaacaaccgagcgtccgcttctatcatccgggaggccgaattttttcaaaattctacaactcaaaatattttgagttctaacctttcaaacatgttccaaacttaatcaaactctccatagccatttttttgtaaagggttactggttttggttttgccttatttggaggtgattgtaaaatgttgtaaagatgttaattgagcaatataattaatcttattcattaaaaaaaaaaaaataagggttgatcattttttttagaggtgggtaattgctctccctcgccaaggcaggtctgtccttgattatcattttcttacactttcttttcttattgaatcaatatatagatcaaacatagtctaaaaatagatagatacaaatctggtattagccagagccaaatataaaataaattcaaccaacaaaccaaaccgataaaaaagctataaacaaaattcctacaaaaaagaaaaaaaccaattctacccacttaactaaaatttaacgacatcacatctatcaatcaatcattcaatcaattatgtgtacctatctttacgaggaagaacaaaaaatgaggatgagtcataaaagaaaacaactttgttttttcttggcttcactgttaatttggattaatatggcaatggctgatgagaattcatcatcatcatcgattcacattatatacacagaacagcccccaaacaacgaggaaccaaaggcttatcacattggaatcttagcctctgttctgggtagcgaagccgcggccaaggaggctctggcttacagttacaccaactctgcttctggattctctgctaagcttactccacaacaggtcgccctcctttccaaagatccacgtgttcttcaggttctcccaaatagaaaaatggagctgcattcaggtaagaataaagccatagggatgttacattaacattcaaccattaatttaattaatttctatattagataatatataattaatcatggagctaagagagacagtcgggcctctttctttcttttttttttttcgggacaatataattagtttttgaattttcatgatggggtagtgttttgattgatcttgtattaatatattgtatggtactttagcttatttaattgttgtggtaaaatattacttattttatataaagggaatctctcataattgctttgaagaaaatgatcaaacttaaaaagtggaaattttatgtaattttaatgttttctcgtttgttgattggtggtggtacccctttctctaatgatcatattgaatttaagtcaaatttgggaaagtttttgtttacaattttattttaaaattatatttgggtaataaataagaactcattatataagctctgggcaatcatgagagagtcacttcttttctttgcaagtttgcaaaaatcatcaatattggacaatttgtacagaatatttattgaatctgcagtttaattcttgcaacggctaatcaagttaattaataaaaatattaacaataatcttatcttattaatatcgagaccttccacactaacataatcaacatccatatacaaattgtcaatttgatgttgcttacaaatgatttaaccctgtaaaaaaagcatcacatcctaagcatctcaagtagcctattgtttttagttgaagttcaattcaattataattttgtaattaaataattatttcattaaaagtttatgatctaaatatttaatgaaaaatctcactaatttggtaggattatattgattactctgtttttaggtagctcataaattcatttgaatgctccaactactaattttattagatggatgttaggtttttagatgaaagaaatcctttacttaatataaatttttcaatcattattttttcagggtaattaagtgattaattcactctcaaaaaaattataaaaaaaaaacaaacgaagtgattaatgacaaaaaatatcaccacaactggaatatttttgtaatttctctaataaccaatgaatgacaactgatttttctcgtgtgatggcatgtaatttttcttgtttttacttctctacccaaagttattttatgtattgcatgatctaaatgctaaaataaatcacttctcactcaacccattaaaaacttatgattttttttttttttttt

SEQ ID NO: 94164 - DNA, 519 bp, Cannabis sativa
aaatacaattttgggattatttattggcattttattgatgtgtgactaatctgaaaatttatttaatagtgtgttatgtgataatgaccattttgcccttgtatttgtacttaagtgtgtgtatggccctaagggcatttttggaattttgtataattaatttactttcaacaaaaggcattgtttggattaaaatgagaagcattttctgggttttcctcacccaaaactgacccctatctctctctcaatccatctctatattttgttgaatttgttgataattgcttggacttcaagcttgtaatttggtgttgataaagtttgatctctgctagaagcttgaggtagtttctacaactttgattttttgatttttagtagctgaaattgaggttgaatattatgattttgagctttgaattatcttcaattgcatgtttgtgatagttgggttgttcttgttgttggaatatattttaccaggatcaagatttactaacaagtatgttttcaaca

SEQ ID NO: 94165 - DNA, 897 bp, Cannabis sativa
tgttaaatgacaaaatagatcctgtattttttaaaattgtacaaatagaactctaaaccgatttttttatcaaaataaaacttaataataatatgatgtagagatgttatgataaaattagttacatttaatgtatctattcgtgttaaaaattgtcttgaagttagttatattaaaaaaaattgagtttagggtcttatttttattattttgaaaaatacatgatctattttgtcatttaacaaaataaagagtctaattggtaactttttatacaaaaatgtgagccacaaaatagaaagctaagaaaaagaatgatggtaattaatatcaaaagtaattaattggaagatttgcacatctatataaaaattatttataactattaatatatagttgataaaatacaatcttcttaaaattaattacatatacaaaccaaaaaaatacaccaaattatcacattaaattcgagcaagaataaatatatttaattttgtcatttaatccaaattagcaaattaagaattttacaataatatttaattagtagcctagcgaatctatatgaagagcccatttttttctctttaaaatatcattttcttgcactactacaaaaatcatttttcctgttgatcaaaaaattgattttttttaaaaaatgtcactaataaaattgagtgtttacaactaacacctagagaattcttatcagttttaaacatacacatcaatttaaaatagctatagaaataaaattaaaatagtacgtatcaatatgaatccccatcgactcaaaatcatagagtatactatacccaacaattttaacccatcaagtatagtataccacacggttttgaaccgccaaaaattctcgtgataaaattaaac

SEQ ID NO: 94166 - DNA, 3782 bp, Cannabis sativa
gacatgacatgtgaaaaattggacacgaaaattgtaaaaaactcagttataaatgaattgtctaaaagagataactaataacgagcaatattggtctcgtattatgcattggcagtaagacaatgagataagcgatgtatggcaagatgataaagatagaagtctctttgggtgtaacagatcgatacagtatcgttagaaagggtaaattatgagttctttaagagcttgcaactcattgacccacatactcgtgagtatattgaaagattaaaggaaataagcaaaatacaacttatttcagaatatcagaagactaagactaagcattgtcgtgaaaggctatagcgacaatatatatcttaactagcatctcacaaaatgcgactagcttcctgaacatcgatggaaaaacacgagtcatggttagaatatgctacctcaaaaagaagaagactacatccaaataagatcaaaagacgattatcaacaattatttaattttatccacatgtaaacatgaaacgtgaagattattcacgttttatgaacggttacctagatcagatcaaaaagaataattgtcatagtaaaaaccctataaatagggatagaacctaagaaaaaagagatggatcattttggtaagagaagacaatgtgagattaagtaaatatttatagttattcctttataatccaagtacactaccaagaaatgctcagaaataataatgactcgtaaagtatgtagattttaattacaaaactacctacaaaaatcttagtgtttgacatatatatattattaattataaatacttaatttttatttataaggctttatttatggttaacaaaaatatgacttaaacagtttggtactttcattgagagcctttgtaaaaaatagaaaaaaaaattgaaacacatctccccttgtttcatttcatcatgaaaaatactcaacttgatgaaccaatcgtagaagaagagaccacacgtcaaccaagaaggagccctagggggcacaaactcagaccaaccaaggatgagatcttaccaggaactccgagagaagtggccctaaggaaaaaatttctaagagaaggaagtcaaatgcatatgaccccacaggatatgtccccattgtggagttagaaaattgacaactccattggaggctcgtagaatccaatcgaagaaatgaggaactagaatgggccataactgcagcttgagtgactcaaaatgttgcagtaccaatgcaggaagagctacctacgggacgaatgtgaggaaggccccgtggtaatctccacaattaccacctctattaagtgtgtaaaaaggtgttacacatggcgtaccgatcggttaagcatccctaggcagtaattgataatgtcttggtaaaattggtgaattcatcttcctagttgatttcattattcttcatatgaaggaagatgcaaatattctgatcattcttgggagggcatgtttagctaccagaaggacaataattgatgtacaaaagggggaattaaaggtgcgagtgcaaaacgaagaggtaatatttaatgttttggtatcaattgatatttcaactcgttgtagagtagatgtggtatataatgctgttagtaatttggaaaccaataagagaaaaaccaatgttgaaattgttagtcaagcagttcgtcattgttggaaatgagtttttagtgggaaggctcgaatgttatatgagagggtaaatgttccaataatttgtggcgtcaaaagaagaattttcacttatgatacttttgcacttaaggatgcacgaggtggacttgacccgagttgagaataaaaaagagagagtgtctagctgaagacgttaattaagtgttattgggaggcaacccaatttcgttattttgtttttgtgtgtttttgttttcataattgttattattatggaacttattttaatttttatttcatttataggtttagtttgatttttcattagttttgtaaaggttgaatcgttcaatacgtgaaaaaaaaaaaagcatttgtgggaaagttgtatggttacatgggatttggtatgggcacacaaaagctttagtccctaaaaaaatagaaaaattgagtttatgggcaagtcgtgcaactgcataggtgtttggcatgcccgtaccagtagaaagcacaagccaaatggagcaagttgtgcgctcacaccagacgccaaaaaagtgtcttccagtagagttgtgcagctgcataggggtttggcaaaaccgctgggcccattttcaaaaaagaaaattccaaaaaaaaatcttttctgttgttgttcttcttcttgtattttcttcttccattccacaattctcattctaaattattattcttcatcttcctctattaatatttcttcaaattctaagaatttccacttccaagctccatcatcaaagtttggttacccatatgatgagggtaataatgtcagtccatccttgtgagatttttaatgtcaagtaattttaacttttatcgtaacattgggaaaatatttaatttaagtttgaggaagagatttagatattactttttatgtattgggttagtttgcgcatatgtttggtattttactgttgtttttgtatcaagttaagttgtgtgtgaatcaagctgataatgataattcgatgagaatacatgaataaattatttgaatagttggatggaaacaaatgccactttaaaatttgtgtgcttaattgaaatcttaatttagtttgcttgagtttgggtaaatatttgagagcttaatcgtgatttttggataaatttcttgttttttgaaaatgtttatgcttgctgaatattctgaagaaaaaaaatgaaatcaaaatgtagctctcttagaactttcttgccttctatttcaaatcctagatgacacatgtttaggaaaatgatttaagtttttttgaaacgattgggcctttcatgctaacttaggttatttaatcactaattttcctttttgagttttaactataattttattgttttacatctatttgagtctattgaacctcttttaaaaattattttctcttgaatgatgtcataagcttttgattgaatgagtgggaatgatttgtgccggggtaaataatgtaaagttgatgtgaataagaaaaaaaaagtgttaggtctttttttttagtaatttagttatcaaaatattttttaatttatgtgtatttttattaagcatttaaattgtttttattacattgattttgtgcatttaattactcttttcttctaaggaaagatttcttctcagctggtctctttttagtttaggaaacttcttgtaagagaaataattctcttatggaaagttgtctaactttaggaaacttgacttttcctttttctaatggatgatttcggttttgcctttattagaacaaatcaaataaactttatttggcagatttgaagtccgaattcgtggtcttggttcaatttagaaagtttcctttctggtcctgatctactgctgcaaaacccgattctgatgctgcaaatcaagaatttttataagaaagttttgtacagctgagaaatcatttttgtggctgtctctagggttatagtagagagcatccaaacgattttatctcttgtattctcatatttttaaatctttctttgtgagaagagtgtttcatttgtaaaaacctagagtgttcaactaggttt

SEQ ID NO: 94167 - DNA, 1403 bp, Cannabis sativa
taaaagtttatctttataaaaaaagtttacattaaattatacttttttttcattattttcaatttttttataacaataaaattataccaacataaaattacattaacaaaatttttcttaaaaacttaaataaaagttttattcatttaattacaatttatattaaaattaaaaaaaaatgcctctttttttaactttttaatttttaatatttaaattatttattaatttatttataaaataacaaattactaaactttactttctaaaattatataacataacttaataatttttttaaacatactattataatttaaaattttatattatttattaaaatataaactaattttttatttaattcctaaacttaaaaatttatctttataaaataaatttatcttaaattatatatttttaatttttttttattattctcacttttttatgataatattacatttttaacatacccaacaaacttagataattcaaataaaatctaaaaaaaaacacattattaaaaacatacatttcgcaaaagaaattttgtgtacatcttcttcaagctactaaagatccttttgtataatctgaaaataaaaaataaataagtacttttaattacagaaataaattaaaaaaataataaaaaaaaacatacaacaaaatgcatattaaataaactgtacaaaatatatttattatataaatacatccaaattttctttttaaattatatacacatatatataaataaataaatcatatatacacacagaaaatatattatacttcaaaaatatatatatacacaaataatatatatattcacagatatatacatttaaataatttatatatatagtagactaaaaatatattacactttaaaaatatgcatatacacagataaaatatattttccacaaattttttcgacaaccataaattttttctcagacaaagccgtatagaaaatcccgttaccaaatcaataatcataaaaaattaatgcaaagccgcacagaaaaatgagatctaaagaaatacataaactcgttaccaaataaaaaacaagccaaaaaaacaaatcaaaaataaataaaacgccacacagaaaaatacatcgaaaataagaggaagaagggtttgggtccatacctgtttggagtagccgcacacaaagagaaaggttgtggtggtggtcgcctatgagaggagaagggggtctgatggagtagtcacacgaagaaatgaagaggaaaagggggtctgatggagtagtcgcacgaagaaatgaagaggaaaagggggtctgatttagggtaagggatttgaagaagaaaatgggaaaatgggggttgtgggtctgatggggtatatatagaccaattagc

SEQ ID NO: 94168 - DNA, 630 bp, Cannabis sativa
actccacactttaattcttgaagtcatcttctcaactaacacagaacattcagctgaggatattcttttagcacatattggaactacaagatatttaaaaggcacattgctcctttgaaaccctgaagcatctaagatcctttgtatttcacttgctgccatcccactacaataaatggctatcttctgttgatttgggtgaaggcctaaagataatgagaataacttgagacccttgagcatcagataaatactcttataatcacccctgcaaaagagaagaacgtcatctgcaaaactcaagtggttgagtttcaacttcccacatctttcatggaaatgaaagtcttctttatctccaattgccttcaaaattctgcttagatactccattccaattacaaagagaaggggtgacattggatctccctatctaagtcctctcttagctgcgaagaaaccatgtaaggatccattgaaaagcaaagagaaccttggacttgagacacaagtcatgattaatttaataaagaacacagggaacttaagtgcatacatcatctcttctaaaaaatcccattccaatgtgtcataggctttctgcaaatcaagttttatcatacagttagc

SEQ ID NO: 94169 - DNA, 997 bp, Cannabis sativa
ttttaaaattatcttaaatatattaattatttctttgttttttaaaagaggggattcggggatgctctccctgaaagcagtgctctccaaacggtgttgaaaggtaggactcaccaacttgaccttttgctgttcgctcatgtttctttttttttttctagtctcatttggttgtgagttgatgaacatgacaatgtcgcaaatacatctccatcatagttattttggggactgattaagtaggttaaagaataaattggaacgaattaccaaataaaatttatggccaagtcacaaactatgttgcttttttaaagatgtttcgtgactctatcgaaagtgtacacaataatttatcaaccatggtgttcctagaataaaacaatcaccatatatgaattataaggaataagagattttgttctctcattattctgatacgacttatatagagaagttgatcaaaaataaaacagtaagaaaacagtagataaggtcgtggagaccttggttcatagtaaaaaaaaacggatcattcactgatcgctttcattgttttcttttaattaatgataaaaacaattaataaaatatttatttcattaaataatttttctgtaataaataaagtgacaccataccaacccgtcaactcggccggatggcagtgcgtgtgtagtggtttggtgtgtgagtcctcacccatatacacaaaactgggtacccttagcgaccaactcaagtgtcaaagttgcacattgttagagagtcacatattgataatattatacataaaatacatgtattactcttctcattaccgttatcaaattagaataaaaaacgtaagctagtcgtttagtaaaagttttttaaaaatataattttgagaattcaatattaaactaattttagtaatatatgattaaattattcaaaataatactctaaccaaattaataattttgagcacaaaaaaaagtcaaaatttattaca

SEQ ID NO: 94170 - DNA, 694 bp, Cannabis sativa
  modified_base (351)..(357): a, c, t, g, unknown or other
aataataaataagtgaaacttaagtctcaacgaactcaacatgccaatctagtggtcttcattcctttgttgacttagtcatactatatcctctttgtcttattacctttagctttcatcccttatagtttctaacacttggaattaaagagaagagagtgtgtaacacgaccacttcacctaatggtgccgtgcccagcattttaagaactcacatatcgtttattacttcaaatcaatattaaattttatataatttaatttaataaataacataaaacccctaatcaatcacaacgtgccatggatatgttattaagcactatataatacataataataataataatnnnnnnnataataataataagagtattgttagctcaaaactactgtattatatatatttatatagccggttgacattgacccttttgatacctttctttcataaccatccaaaagccaaaagccgaaaaaaaaatccaatctttttctctctttcttgttcttctttttgtttttatcttatgtttatgtaaacaaactttctcttaattcttcttcttcttcatgtaatctgcaaaaggacccttttgacatttctctgcattatttttattttcttctctgtacaatggaaaataaagagcataagagattttcagatgtgttaacagagctaatatcatca

SEQ ID NO: 94171 - DNA, 655 bp, Cannabis sativa
agttattttaataccaacacatactaaccaataaataaataaagtgattaattatcgttcaaattgtgtcaaatttataaataattccttgtaaaaatttagtgacttattaaagtcacatagctacttatatgtgtacaaataggtccacccaagtaaagggtccgaataggttgctatagaatactctagataatttgcaagtgaccaagaatctaaagcctgctccgtcacttggggggcacctacacccatacaaaattggaaagatggcatgaaaaatacttaagaaattttttaaatattttaattttttaaaaaactaagtatacatgcaaaaataacaaagggtttatcagatatataaaggtttttagcccgggattaaaggttgcccggtcagccatatgtgcatacataaaaataaaatcaagtttaaagactgcttagtcagctcattgtcttaatataaaggcacgtaggccgaacaaaaaaaggaaactaagatattgataaaaagaggggaatcagtccattaaagtggtcgggtttagatccttagtgtccttaaagtcgtcttgatcgatggctaagaaattagggtcaactgcttcaacctactcgttgtttctacgaatagtttcatcagcaagtt

SEQ ID NO: 94172 - DNA, 755 bp, Cannabis sativa
gaacttcagcgacctctttacgggtgagatccaaaacaggtcaagccggtctatttgcgataaattaaaaaaaaaatattaacgacttcataaggtaacacaaatataaactaagtgttgagatatgcgacgtactagggcgacggttggaatttttcctaacccctggtactttgaatacgtaaaatcacttagatttccagtccctcccccttggaaaccaaccatgccttctacccaccctattaatttcagaagtggcccacttgctgaaacagtagaagacattgtcggggcccacactctttatatcataaaagtaactgaagtcctccatcgacctccgagcatattccatatacatcgcataaaacactaaggctatgcaataactattcggggttaattggaagagagagacatcgtagcgtctcaggatatctttcatgaaagggtgaaaaggtactaaaaccccacatcgaagaatggggactgagataaccacgtcctctgtacggataatcgcaggattggtgaagggaaaatgaggcttttaagatgtgcgaggacacatggtaccaagtcacagcaaattcaaccttgtgaatgtatctatgtctgatttggtaactcgcaaggccaggtcctcgcatgagaagggttcgttcaattgggtgttgtcaaccgaatccgtctcacttccctcggcattctctgttgggttttgtgccttaaataaaacctatttcaatata

SEQ ID NO: 94173 - DNA, 1622 bp, Cannabis sativa
ttatttaagtcgggtccaagttcggttttgaagttggggccgtggtctgagtctaggaatggggccaaggccatggtccgagtcttggaatggggttgtgtccaggtcccaaggtccagattaggattggaggccaaaatattaattaacaaaataaaattatttaacaaaattttgaaagtggtttctttttattttcaaaatttttaaagttttgattctaaattaaataattgaaaagtgaaataatttatagaacatgtttttcgaaaatatatttacttttttaattaaaaaaaataaaaaattgattaaaaaattattaccaaacgcacccataatttataaatttatttatgtagaattaaaaattttattcaaatcgtaagacattttataaaaattatatttacttaaaaaatagttattttataatttagtattaataatttttattgttgttgtcattatattgatatttttttggagtttttttttttagttaactctatttaatataacctcttaattagaatatgatttgtttttttttttttttgaatgaagaatataatttgtttagttctaagtgtactcttaaataaagattctactatatatatatggaacaattttatgaaattatgtatctattgatatttactaaaaaaaataattataaatattaaatttaaaaatattatatctaatgacaaataataaagtaaaaattttaatttctatacttaattcagcttcgtatttaattaaaaaattctatacttttacactttgtcaaaaatatctcactcaaacttaattatttttctctctcaaccgatggaacaccaaaacccatataaaagctataatgtaaaaatgataattttttttaattaactaaataacacaattacgtatataaactcaaacataatacaattgtaatatttttaataaaagacacataatgttcttactcatcatggacacaatgtatctataaataatatatatcttttgaggagtgctacctcaatcttttttttcaatatttacatctaaaaatacaacccaaaatattttttttctattttttttatggtgatattcattgtaattataatatctaacttgtaaaattttaaaatattctgaattgtttaatgtttaggggtgtttggcgattaaattccgtttttaaaaataataaataacttttaaaaactaataagggtgttaaaaaaataattttttgcaaactgagttacaaaaaactaaaaaacataacatataaaattgttgtttttttttaaaaaaaataatttttatttttttttggtctaaaatatttttctttacattttctctcacatgcccgtacctggacttagatctagaccatcacttagattcgaactaggacctagccctaagacctagacctagaccccaggaccgagacacagaatcgaacccagccctaaacttgaacccgaataggaacccgagactgatgcccgacctcagacccggacccggacccgacaatgggactcggcccaagacttagacccacacctagacctacctagacctgaacccgaacccaatcccggcct

SEQ ID NO: 94174 - DNA, 743 bp, Cannabis sativa
tacatgtcaatcaacatccaattcataaatttaaaatttttcaatccacacaagtgtgatatctacacttttcgaattgaattggattgaattcgtgcgaattagattgaattgaattaattattttataaatacccctaaatcttcttgctatcttgtgtttcacgagcacccaattaatttgggcttaattgatttgtactcaacaaccaaataggtctaccaaatgagtttaatagagttgaagcaattatatttgggccgtgactattgtgagcaaaatagagatttgaattaacttcatatccatcaaatacatattgcattgcatggtcacattttatggggatgagtttcaccaaaattggcttgaaaaataattgagtgtatcttgaagctttctttcaactttctaccactttcttgctccaaacctaatatttaacacaaaactaaaataaattaacatttttaatttaaataattaaaattatgaaaataattaatttatattaattgtatatgcataaataaagaattaaaatatataaatttaaaccttaatcataatattattgataaactattgataaaatatcgatatttgttggagtataaaatcctaaaataaattatttataaattattaataaaatatccatataccatcaacaaattctataattttataacctaaaatctttagcaacattatcgacaaactattaataaaatgatatact

SEQ ID NO: 94175 - DNA, 946 bp, Cannabis sativa
gatcttccatcaaggatgatacttctatgagaatggatcctcgatcaaggagggtccttggctccttcacaaggatggtcaaggagggtccttgtatgaggatggatcctatatgggggaccatgtcttggcttcgcattttttttaccaatcatctaaactttttggttactcgccgaatctagcttctattctgatgtcggtggtggtaatgggtatgtgaggaatcactatcgtcatttttttcatgcacttctctcctttatcgacaaatcttatgggtgttttgctagtaactaatttttttgagtctacatgaaaaaaaatgtttgttataataagaaaccaccattaatgtggataccaaactttctcttcaagctttttatgaaatcaccaaaatattaatcgagatttttgacaactaattaaataaataaatatttagagcatgaaaaggaaaaagaatatggagaccacaatttttacgtggttgcagcgttaatgaaccttagtccacaagtcacttatattgatatgaagaagatggagttctctctctaaaattcaacaacatttttgcataatacgagtgagagagaaagagaagagtctctttacatatgatcgtatgattctatttatagacagacatgaagtttatttcttttattcgtctaaatgcttcacttgatggaaggaaatacattgatagacataaaaacaaatattaattattggcacatagacttgtcttgtcttgtctcttcagctttattggaaagactttctgacatgtcacatcaattttattgatagctgtgtcagctagtgggtggaccatcatttgtcattgtttgacaaaaattgagacaacattattaaataactctttttcgtcaattgtgcactaacgcaagctagcgttagttataaagcgacgcta

SEQ ID NO: 94176 - DNA, 709 bp, Cannabis sativa
attatatttatatatatcttaaagagtacaaaacttcatatgtgatgtctccatttttgtatggggtcacgtttttcttcactatacaataaacataattcttgagtctactagaaagagccttgctattaagtacagtatacttatgttgtacaataccatattaacgtggcaagttgtgattagttattaattttttatattatttattaaattaagttgtatgaaatttaatatttatttacactaataataataatatgtcaactcttgtaatgtttggcacaataaaatactctaaatatttcttgaaaaaaacacacttgattgaactttgtataagacgtggtgtgaccggtgttcattgatttttattctaatgattcccgatcaattaattcaacaaatacaattatattaatcgttatcgaaaattgtcatttctattcgaacatataatttagatattcgaacattcaatatccctattcaattcaattagatattcaaaaataacatttaataattacaattaaaatatttattgttaggcaatttattggtcatttgatcgatttattggtgtaagattgttttcacttgacaataataataagttagtgaccttccttaaaaaaagttagtgaccaatatctaaaatattttgtaagtagaaaccaaatcatattgaaaactaatcatatcatac

SEQ ID NO: 94177 - DNA, 1079 bp, Cannabis sativa
gcattgaataaaactcttattactatcataccaaagatcaagaagccaaaaacaatgaaggactttcggcctataagtctttgcaatgttgtgtataaactgatctcaaaagttttggctttgcgtttaaaacatgttcttccacatgttatttcagagactcagagtgctttccttccaaacagactaattacagataatgttttggtggcctttgagatggttcatagtttgaagaatcgaaagagaggaacaaagggatatgctgctttaaaactagacatgagtaaagcctttgatcgggtagaatggtcttacttggcagcggtaatgggcaagatgggttttaatattcgatggatttccctcattatgacttgtttgcatacaacttcattctcattccttgttaatggagaaatcaaaggctcagttattcctgaacgtggacttcgacaaggtgatcctctgtcaccttatttatttttgatttgctcagagggtctctctcgacttctgcaacatgaggaagctattggtaggctgcaaggattgtcaatctcacgaagggcaccttccatcactcacctcttctttgcagatgacagtttgctctttggccgtgctaatgatcgttcctgtggagctattaaaagagcattagacatttaccatcgtgcttctggtcaacttctaaatgaggacaagtcagttatgtccttctcaccaaacacttcggatgctatcaagaattcttttagcaatattttgggcatgcctattagtgagtgtcatgaaacatatttaggtcttcctgcatattctgagcatgacaagaaacatctctttgcaagtattaaagaaaggatatggaagctccttcatgcctggaatgataaactgttctccattggtgggaaagaaatacttctcaaagcggttgtccaatcaattcccacttacgccatgagttgctttaaactctccaaaagtttttgccatcagttggatactatgatggcacagttttggtggggttcaacagatgacaagaaaaagactcattggaaaaagtggaa

SEQ ID NO: 94178 - DNA, 601 bp, Cannabis sativa
  modified_base (50)..(80): a, c, t, g, unknown or other
gtcacatgtaaggatacagattgtgggtggagattaagagcaaagaagannnnnnnnnnnnnnnnnnnnnnnnnnnnnnnatttcaaaatgtacatacatgttctctttatgttcgaggaaaagataatcgtaaagcattacctttgataattgcccacctaattaacgataaattcacaattgacgactcagatcgtttggactctgatataaggaaagacatgcacaaggatttcaagatccaaataagttataaaaatacttagaggtgcagagagaagacactacacctagttcaaggtacacctaaagattcatacaagaaattacttggttacttgcacatgctaaagttgagaaatccaggtagcatcactgattttgtggtagaagatggtcgcttcaagtattgtttcttcttgttgggtccttgtaggcttgggtttaggttttgctgatctattttatgcgttgatgggcaactattgtgtgtagtggcactggatttaggcggccacacttttttgatagctttcgcagtagattgacagtgacaaccacaactcttggaactattttttgagaaaattgaaagaagcg

SEQ ID NO: 94179 - DNA, 561 bp, Cannabis sativa
ctcttgtcttagacaggatcctcctcgttatatattaaaagcctcgcttgtggtggaggaaaaccatggttacaattaataacaaaacagaaattctaaggcaagcgtactcccctgatttgcctcagaagagtaaaaaaactaaacaaaaccacctgctgcccctatacaattgttttccattctctacataaatctaaaaaggatagatcctcaaaatgtttggttctaaagacccaagttcttttgattacacaatgaactcctctgattcttattcaattttaagttatatcaccagaaacaaaataaggtgtgtaaacaaaagttctgtttagacacattattttgcttatgcggacgcactacttactagttataacatcaatattgattcaccatgtcactgcaataaaagattagagaaagtttatcctatgaatatcaattctaatcatatccctacaagcacctagagtcactcccaaggaaacactagtccagactaagcccaaagatcattcttgctttgggcatcttacataacgtaaaagccatgca

SEQ ID NO: 94180 - DNA, 722 bp, Cannabis sativa
taaaaaaatagcacgtggataatggcttaatatttaatggttaggtacatatagagttccagaaatataacttgggtattattgccgccaaaaattaaacatgatatttatttacaactaagagttaaacttaggaatttatgccgcaaattactatttttttaatatattatctatgtaataaaagtaagatgattagattttaggatttttttttatttttaatatattattgttattcccaagattcggctatgcatcagaagctgacacgtgtcttacaaaaagaatatgaatcaattcaaggaatataataatgacattgtgttattaaatgcaattaaaataactcgttctaattagatagaaatattaaaactcatggattgcttagtttaatgtaagacaagaataataattattaaattagaattgacaagacacatgttcgtctcgatataaaaagaacagtaaaatatacgagacgagatattcaaagacctcgtgaatcattgactctcccatgagaacaaagtgaaatttatgacactcaatcacctcgcgttttgcacaacaaagaagtcatctcgcaacataaacacaaataaatgagtacatcaagatgaattacttcaacacttaggtggaatttggttgggaggaatgaaaatataagaataggaatgagaatgggaataagaataggaatggaatggaataaa

SEQ ID NO: 94181 - DNA, 811 bp, Cannabis sativa
atctctacttgtataaacagttaccggtcgatgagcctaataatatggactcgtggagtaaggatagttaacgccttaactatgtaaaaatctcttatttgttattttgttatttacgttattctttactttcttaagctctaaaaatatttagttgtcgaaaaactcggtaaacagtaatgtgcacataattgattcaaagttgttacttatattaattttcaggtcttccaatcgaagatgctattaagatgtaattgtttatttagagtaatgataaccttgctgattcatcaaaaaaaaaaatattaagtgtttggtatataaattttataacttatgagaatatatatacgttctcataattttctaacatttgggagagttacttgttactttgagtcaccgccaccattatcatcaaaattaagtgtgtaaaaagatgttacacatcttaattagaaattcttaatgctataagaattatggtgtgtgcatgagttacatttaagtccataacatctatggggtgttatgagtttttatttcaaatggtgatatcctaaacactatataaagatgtctaagatgctcatatggagatgagacattttctatgaaaaaagcacattgctagaaaactttaaggcctgataattctcaaagctatttcctagagagttcctttaatgattagagataggggaaataagcttttggaaaatggtgtcataccttgttcaagtcatggtggtcagtactcaaggttgtgagtgagtatatatacatattgttgggtttaatgccctaa

SEQ ID NO: 94182 - DNA, 1570 bp, Cannabis sativa
ctaacagaacttgagtttaggaagtttcaccgcaaaaattttagaattgggggttagttgcaaaaacctcccttctttaggaggttttgccgcaaataaccctttatattaatttatagcatatataatcacatatcacatatgatttgccatgatgtcattgactaaaattattgcatagtctcttaaaaacataaattcttgggtagtaaaagagtactataatatagagtactaatatagttagtttatcccagtaaccagaagaaacgtaattaagttgggaactgagaaaacatattatatgaaaatagctaattattggtacagttggtaggagcattaataaatatggctaacttcaatccaagtaccaaaggcaaagccttaattgaaacaaagtagtgcatttaagtcgaaatatgtttttcatataactcaggatccgatcagctttatcaagtagaattattatcacaaaacccaggattctaacaaccaaataatcatgctactcatctacctatctacctttataaatataaatataaataccagtttaaatataaaaacacactatcttactcccatatatttatatacatacattgcataaacaaataaatagtacttattagagaaagagataccattttgccaaattctgtagctgtctgtcctttactttaaggtaaatgaaccttcatagagaatgtcattctcaatgacataaattattgcctaaccaaaagaattacaaactattattcattagccatttttttccaaaaaaaaaaagttttggggaagttagaaaagaaataaaaataacattagagaaataagcgatacaaaaaaaggtccctctattttagttaaatttcaatttttatcttttgttttgagaaattataaacaaagaccctttaaaatggtaaaaaatggtctttggatacaattttagtcaaattttgtttattttttttaattgagtttaaattaaggtgtcgtttggtaacatttttacttttaaattttttaatcacaaaatttaagtaaatttttgtttttgaaaaaataaaaatgtgttttatagccacttttgtttttcaattttaaaagcagaaaatagagtgtgttctgtaaattttattttcattcgttgatcttatttaaatcatgtctgggtccaggggtcgagtttgggtttggggctgggactggggtccaagtctgggttgacgatcggggtctagataggttggagttggaattcaaaatattaattaagaaaaaaaaattgtttgaaatttaattttttgaaagtaattacaaaatattcttacatttagtgacaacgtactttttagtcacaacatatattttttttttgtgactaaatatgatttttagtcacaacaaaatattacttctgactaaaatatagtatttagatacaagttgtaactaattaattagttttagtcacaatacttctaaaaatatatttagtcacaacaaattatattttttgtgactaatacatttagtcacgaaccttttagtcata

SEQ ID NO: 94183 - DNA, 788 bp, Cannabis sativa
aaatgtttaaaattccgtaaaactgtatttttgttgtttttttgttgtctttctgcatttgtgaaattaaccctaattacttcaattagaaaataaaagtagagtattgatttatatattttaaactataaatcttagtttattgactatctcaatttattttataattagggaataataccgcgcttcgcgcttaacatttgagaatggtaaatatcaaaattattttatattcttatagtaagctatatatagtttttaaaatttttctcaatctctcattactattatttaaagtgattactctgtttaaattcatggttaaatttatggttttgatgtaatttaaattattataaaaataaataagtattttttttccttgaattattacaaaataataataataataataaaaagtcatgccttaaaactattcttgattttatatattctaataaattattcccgagttgtgattttttttagttgtttataatattaattaaaaagtaattagaatttatttattttattctctcttttaataactaataataaatattgaataaaaaattagaaaaaaatcacaaaattggataattacaactctttctaaatagaatgtgcattgtcacaccttctttatatgagagaactatatattaatagattattgagttttcactcttcctttataatattttttagttactaatactattattaattataaagtaattataatttattttgttattttcttttaattaataataataaatatt

SEQ ID NO: 94184 - DNA, 557 bp, Cannabis sativa
gcagcaggaattggtctgtcatggtgccttttggtgcgaagttccttcttaagtaaagcttgttgggcacgggttcgagaggaagggccctttggagttaatgctgcagaaaccttaccagttgcagcaggaggagattcagtatcaagagaaggagatccctttgaagatgaagatgacgaagtgcgaaatttcatgggtctcattgattttcgagccacggttttgggatccctttttctgggaatagaggtcgaggctttcttgacagccacattctttgattcacgttgaggacgcgatgaatctcttggaattgaagaaattgcgtcagtaggaggcaattttgaagtcacaggtgaagtatttgagggggcagttttggtttccaccatcttgtttgggtgccctaagatctttgtcttagccatgaaattttgaaaaagaaattgaaaaacaaagggacaaaataccaacaagatgagcaatcgggtagaagagaagatggtgagattaaatgacaaagaaattggtttaaataaagatgtgaaagagga

SEQ ID NO: 94185 - DNA, 523 bp, Cannabis sativa
ccagattgaattaattaggggctatgccatccaatgattggggatatgaaaggtttgcatttaatgcgcctaaaggaaaagaataaagtatttattcctcatcatttcgtggtatcatccctaacatgctagaagcctagcgtctcttcaagaccagccttcatttgtttcccctgagaaacatgcttaaaatttagagtgtgagtttcacaactccactaaccgagcaccacgctttagcaaatcaccagtgatattacaaagcgcgacaacctttcaaatgctcaacatgttgtggaagattccttccatattctgatgtgtggtcaacaatttggaggtacaaaacaggcatccgggagaaagctgcaagctcccaacactcttaagtcctaggagcttagggtaaaagttatccattttcctagatgaatcgtacgtggcaatcacagaagggaaccacgtcagattacatattcttatcttatatcttccacttactagggttatagaaggcattgta

SEQ ID NO: 94186 - DNA, 590 bp, Cannabis sativa
cctagattttaaaagaataattgagtttgggttctcttgctggggctgctgctgactcggtggtaaggtttttcctagtcaagtagaggatgcatctcgtgggttctttgtggttagttttgatggctttgtggtgctcggtggtggatgtttcaggcaggagtgggctgtggtggcctcttgtgcttggggagggggcagttggttgctctgatggggatggctttggctggcttgatgtgcggtggtggctatggctgatgctccatttgctctgtttttcagttttttcttttgaataatgcatccattattatgggtttagtttatcgattttttttagggctcacatgtaaaatgactaaatttgaaaattaagttagtaaatgtcttttttttaaaaaaattaagaaaatggtcaaatataataaactaggcaatatagtcccttttcgcgcgattattttaacctgtttaggaatgataataaaaaaattattaactaaaacaaaataattgtaatatacaatattatgaaaatgtagtattaataattttaattacatagatatttttttaattaattaatc

SEQ ID NO: 94187 - DNA, 1527 bp, Cannabis sativa
  modified_base (1091)..(1108): a, c, t, g, unknown or other
tttaattatgaaactagaatattaattatgatttgtcattttatggagatttatttgaatttagggtgtattatatatgccatatatgaaattttacgtttttacatgttttgtatccgacaacattagaacgcaacgtttggctaatagaatcacattatagtatttagtagtagcggggcaatatagttagacgctgggaatgtagagaatagtcaagattttaggaatgaccaaaatacccataagtgataagtgtgcttgttggtgtgagtaagggcaaaatggtcttcttggcctttcttatttttgtcctttagtgagatagattaaatcatattctgattttaatttcccttagttagataatattaagttaatatctcttttatctaaaaaaattagaaaacacataactcaccttctctctccttagctctctctctctctctctctctctctcgaaccctcttgaaggcagcaaggattttggtttctttcagcttcaatccagagattgttagctgaattttcagtgtatcaactcaaggtaaccccttagcaccattctctttgattttcctatgttctaagctaggttttgtgtttgattttggacttagggttgctgtagttatgttttatttttgtttggttattttgaagttatgttggttgtagttgagatgttttggtgttgtttggagtcttgaagttgtgtttgagtaaagattgagttttagaactcaagctttgctctctattggtgaattttgacagagatgttgttggctggttttattgtatggattatgtttattatggtgtataaaatctggatgttattgtgtggtttggaatcgatttgaggtgtgtaaaaggttttgagttttttttttgcactgaatcggtcgaccgattcagtgggacttgtaggaaccgatcgaccggttggtcctcagggaaccccacagaaccagaattctggttggggaaccagtctaccggtttggacattttagggaacctagtttttcctatttttgcaatatttagggtattcctatgttatccatcgatagggaaacttnnnnnnnnnnnnnnnnnnccccaaaaagtgatttagcatgtcacttatcagttttgtgaataatgtgatttaggggcctgtaatttgtcgagcagctattccacacgggttggccgacatacctgaatttagaaacgaaagattagtataatgattacataaatatatacatgtttaacgtacattttagttgcagtcagaataacatatcaaggtatcaatgaggtatacatagagttgcaccgagatactaatatacctatgttaggcatatcaatagccatcagattagcatatgagggttccagtaaagtgtacatatagtttcacagagatgccaacagatatatgttaggctattagatagtatgaattaactgcttccacattagtacgactagagtactgagtataggctgggtttgtagttagtcata

SEQ ID NO: 94188 - DNA, 708 bp, Cannabis sativa
ttgtcaaccaaaggagagtgggggccttggcctgcagagatttgaagacataaataatgcccttctgtccaagctgtcatggggtattgcaactcaggaaaataagctttgggttgagtgtctcatgaagaagtactgtgggtctcaaaacttttggacagttcaatcaaaggactgtgattcggccatttggaaaagtattgtccaggcaagaagtacgatattgaaaggagttactacacttttgggaactgggtgttctgtggatttttggcaccttccttggattccctggttaaattataatgaatttaaagatctgatgaggagcattaaagggaaggggtatactgcaaaaaaagtggcagatgtatctgaaggtagtgagtagaatcatcaaatcgttctgcagatatttggtgaagagatgggcaagaaaataatctcaattcctagactgccgcaggcacatgaagatcagattatttggaagaacaagcaaaatggtaaattctctgtcaaaaatgcgtacattattgatcaaatagaccgatttcaacctgtgtgtaggttgtggaaatggatttggcaccccagtatacatcctcgcattgctacctggttgtggagagttttgaatgaggcttttcctttcaaaggcaaacttcctttcatctcggataaagcttgctgcatctgtggaggaaa

SEQ ID NO: 94189 - DNA, 961 bp, Cannabis sativa
ccacatacacctccctattgcggctgatgagatctttgaacattttattcacaagcctttgatatgtggccctgcattttttagcccaaagggcatgactttgtagcaatacatgcctaagtttgtcatgaagcttgtacgctcttgatctgacgaatgcatctttatttgggtgtaacctgaatacacgtccatgaaactcaagatttcatgtccagtggtggcgtctacaaggtggtcaattcttggaagcagaaagaagtcctttagacatgccttttttaggttgatgaagtcgatgcacactctccacttttttttgggtttgggtatcagcacaagattggatacccaaagtggaaagaatgcttttgtaatgaagttatgggctcatagccttttgacttcatctttgagcgcttaggcgcattctttgtctaacaacctcctcttctgttgtacaagtcaattgtttggatcgatattgagagcatgtgtcatcataaaggggtcgattccgaccatgtctccatgtgaccatgcaaagaggttcaagtttgcccttagaaatcttatcagtaatgattttatttctgcgctaaacccctcccaatcttcagtcttctagctagagaagtgagatcaacctccacttcttttaactcttttataggtccaaagctgtctataggatcctcaaagcaaggatctatgtctgcttccccacttttggctggacttcatttccctttactaggctcttcttcagagctcttggtggcatcttctttttcttggttttggacaaggccaagttgtaacagtgacgagcagattgttggtcttcccttaaatatcctacccgccttcaggtcgtatagggcaggtcgacctaccatggccttgaaagcagagggaatgtcaattacgacaaactatgccatcagagttctggtggttg

SEQ ID NO: 94190 - DNA, 1280 bp, Cannabis sativa
acgatacccacatattctaataaaatctccgtaattaataaattacactttaaataattatttactagtcacactaatcaaccctaataagatcataatcttaccttattaccggaataatttacatatttaataaaatatgcctaattagatatcataatattttccaagatattacaatatgcctcatctgtcacacaaaaataaagttttcacctcgagcaaagtcatgtgtcttcattggctatccatacaatatgaaagcttacattttacttgacattcaaacaaacaatattttctattcccgtgatattgtcttcaatgagaatatttaccctttcaaaaatatttctcataatcaaaacattgatcatttctttcactacactacaaaattcactaccaccagtcaagaagatcatcatttcccagcacacaattcttgaacctatcccaaatgtcactcttctcaataatactgatgtgcacatccaaaaaccagacacaacaaaagacactagatcaggtcgagcacctcaaaaaactcccatcttaatgactataattgtgacttagttactcacaccgatacccaacaccttttaaccaacttcatatcctatgacagattttctccatcttttcgagctgctatacttgcccttaatctactatccacaccaacatcttataaacaagcttccaaacacaaaatttggaacaaagccatggatgtagagataagtgccctcgaaaaaaaatcatacatggattgttgtacccgtacctccaaatcaacatgtaactggaaacaaaggggtatataggatcaatataatcctgatggattagtagatagatataaagaacgattagttgctaaaggatatgctcaaaaaccaagaattgactgtttcaaaacttatgctcctgtagcaaaatttaataccttaaaacttctctttgctcttgctgccatcaataattggcatttacatcacatggacataaacaatgctttattgcatggagaatcaaatgaggatgtctatatgaaactccctcaaggttactgtccaaaaggagacctaacaaccaatgcagtttacaaactaactaaaagcttgtatggtcttaaacaagccttgcgccaatggtatgcaacactcagcaaaacattattacaacacaacttcaaacatgctcaaaatgaccattcactctttataagaagccaatctagtgtcttcttagccttacttatttatgttgatgac

SEQ ID NO: 94191 - DNA, 823 bp, Cannabis sativa
attctaccaaaatagtagaaatatcattccattgaaatcacattccaatactttaaaatgcaaccaaacaaaagaatagaataaaaattgtttcatttccattctattccattctataattacttccaaccaaatgccaccttaatctttctttcactcatcaaaatattattgataatttggagacatagactttttttaagacagcttcacagctaaattaactttgaattattcatgattaattcattagcatataaattattcaatttagagaaaagtcatttttaatgctaggctcttgagattcatgaaaagtcataaaaaaaattattattagaataaaattgaggatataggcgttgacataacatcattaacactctacactatttttttatttttctaattttttaatttgctcaattttaatctacattaatttcttttcaaataaatattctatattaattaataattaaaataaaaatggagcatatataatcatcaacataataactgaaatccctaatctccacgttatgtatatactttctttctaaaaaaatcacgtgtataacaaaatggcaaactaatctccacgttaaaccttattaattgtatttttaccaagtatttcaatttaaaaaaaaaaaaatattataataatagtaataataaaatatcaatgtttgaactaaaaaaaatcaaatactaacataataaattaatttatatatatttacgtcaccacaaaacaagcgattgataatattaaatttgtggtaattgaaagagaatggtctaaaggaccctgcgaatg

SEQ ID NO: 94192 - DNA, 670 bp, Cannabis sativa
taagaaacctatttgcggtttcaacgagtaattacttataacagtaatgattgtatcttttactcgatcataatcgagtcacaaacaataataatcgttatgtgtcattacctcgatcataatcgagtcacaaatgataataattgtttcatatcattacctcgatcaaaatcgagtcacgaacgataataatcgtttcttaacattcaaatcacaacaaacacatatcgggatctcgatcataatcaagactataacattcatatcgttaatcacaaaagggtgcataacacttttctttccttagtccaaagattaagcgtgcatgccggcctaagtggaaaacaaagcttgacgatcccatgtcctatgtcagacaacaacatacaataaataccttaaatcaataattccgggaataaccctaattcccataaccggtaaaccttaacttctattagctccaaaataggctttacaacttctaaacaatatataccagtcacagaaatcaccccaagccctaaaaccgaccctgaagaaaactgaaaaatttctccctgcaaggaaaccgatagaccagttctgttgcaccagaaccaatcggtcgaccagttctggcagggttgcaattttcaaattttcgtcctccaaaaccaatacaaacacc

SEQ ID NO: 94193 - DNA, 679 bp, Cannabis sativa
aaggagaaccagtaaagttagagtgtctaactcaagaggctaagacatccgccaaattgttatcatttttgaaaatccaaaagatattacaatctaaaacaccacaactagaaaaaaaagaaacataatcaaaacaacaagctcccatcttggccattttcgatttttcgtagcccaacaaagctttttgtaatatgaaaagaacactgaattctctatcccaagctgaatgacctatggtactacaagaattccaccacaagtctcagcatcttaaaagcattcgagaaattgccatggagacctaaaaacatctttacacaataaatgtatctatactttcgcaaacaaaaacatgagaacaccaaaattttctcactttaatgaaaaaacttgacatagatcaggaaataaaacttgaaatgctttttagcatttctctttctttaaggggtgctaataaagtatgttaatggaaagaaaatgaattaattttattttattttattttcatgataatattattttgttgactactatcttaagtatgacattttaattgtaaatatatgcctttatggtgtcaaatataccgacatgatattaatattttaataacacttagttacttcatatagtgtttgacaccttaagatgtgctctagtatttaatatcaaa

SEQ ID NO: 94194 - DNA, 505 bp, Cannabis sativa
ggtgagatttcttatttgtttgccattgtcaattattgaatggaagattttataatggaaatggaatgctatacaaagacaataaacataaaatagatcagaactaaaagaggacaaggattttaagaattttattgatgcaattcagtaaaagatgtcatatcgcttttaatgcaattaagtatcgagtctcatataacttaaggtaataattttgggagaatatcgctaaccaatcgtagggcgccatctctaagtggtgctaggcaccactagtgtccaatattaatgctctttatttttttagggtgaagtctcacagtattaattagagccatcctacgaatttcaggaggtttagttagaatgattataaattaatcatactcagattgctatttcactgttctgttccaaatgttatttgggatttgatctcaaggccaccttccaagggcctaaccatgactgactcatcatgtttacatgttctttgttttgagtt

SEQ ID NO: 94195 - DNA, 1195 bp, Cannabis sativa
  modified_base (1000)..(1000): a, c, t, g, unknown or other
tcattaaggatgatactgccatagtaagctagcctcccaaaagaccaagcataatccctcttatgaggggatgtggtgggattcgaactctttactcaaacaaggaagaatgcaagtaaaaacattgttgccactacaccacacaatatgtgcttatatattttagttgtttttgtggttgttgttgtttatgataatttttttttatgtataggtttcaaggaggctagtaaaccatgttgtaaagtagcaacattgagtgaaggagggaatggagtgttgtgcaaaagagaaggatcagtgtgtggaaacagaagcaatcatgtcttttttgatggattgcatccaactgaagctgtcaatattcaaattgctaacaaggcttttgcttctactctcccaactgaagtttatcccatcaatattcaacaactacttcaacttcaaactacttactaattagttactagttattattattaattaatatccaatcatatatataatgtaggatctagttactaatcttatctagtctagtgctatatatgttgtaataataaatgcttggataactagattttagtcttaattttattagtttttagtcatcatttagagtctagactagttagtagttgttgaatgaataatcatggtgttatttgttcaaaattattatatatttagagaaattccaagaaaattctatttgcttgctactctcttatatatgcttgataaatggtattcaaatattttgtattttcaaaaaaagtattgatatgcgtttggttggaggtaatgaaatggaatagaataaaaaggaaataatttttattctattcttttgttttgttgcattttaaagtattggaattggaatgttctttccaccattttggtggaatggctattccattttaaaaagaaaggaatgaccattctaatgtgacaaaaaaaaatttaataatttttttattaatttttttatgcattntaaattttattccattctatttctattcctatccccattcccattcctattcctatatttttattcctctcaaccaaacgcaagagtatctagccaccactataaatagggcttaagaggtaattttttgtattttcaaaaatatgggaaaaatgagtcatcttatgataaatatggcaacaaaactaaatgcca

SEQ ID NO: 94196 - DNA, 633 bp, Cannabis sativa
tttatttaaaaaaattaatttaggagtcctatttagtaccattttagaaaatacatggtgtattttttttatttaacaaaatagaacatccaattaataacttttgcaaaatacaagatctaaaatggtattaactaactttttatttaatttgattttaataattgttttaaaataaaataatttaattattgttttgaaaggttcatctcttttgatttgaggttattgtgagttttttctttggttttgcaaagttaattatctcaatttaataatatatttctcataaataacctaataagggttaatattattttaaattttgtgttttgtaaaaattactaattagactatctcttttgtaaaataacaaattaaattttaaattcaattttcgataattttcttaatagaactaacttaaagataatttctaacatgaatatatgtaaaaatatactcaaatttgtcgtaacaactctacatcgagttattattaacttttattttaataaattcagagtattattttgtacctttttagaaaataaatagttcaatttatcattaagcaaaataaaaagtctaatccatagcttttgtaaaattattttgaattttttaatactt

SEQ ID NO: 94197 - DNA, 585 bp, Cannabis sativa
tagatgatatatataccataatctttaaataattaatttttctaataattctaaaaaaaaaaaaaaaattaatgatatttttatgtgacaaaagtcaatttaataaataaatagtttaaaatgatcatttctctaccagttttgaaataaggacatttactaacataatcttataatttaggattatttgctataattttttgaaatgagaacatatactaatataatcctataatttgaaccatttgctataattttccatattttaccaactatacaaagttatctaaacattctttaaaatttaattattgaaaatgatctaaataatcttttctaaacataatgtgaaatctcctcgtcaaagtaacctctttgatttttcttttttttttttttaaaaaaagtgacctctttgagggatgagcgcgtacgtactgcaaaataattagcaacaaattcagcgatattgactgttaattattagtgtacatacttacattgcatacacataagatattatagaaaaattgtacggtgcactgctttggtgttttcaacatacaattaaaaaaaatgtaataa

SEQ ID NO: 94198 - DNA, 1003 bp, Cannabis sativa
aagtagattgttgatgctagcagctgcattctcacttgcatggcaaaagaaatagctatcgtctgcaaacaacatatgagtgatagatggagcacgattagcaacccgacaaccttgtaaaattctatcagcctcaaacttttgaatgagggcagggagaccttcagcacacataatgaacaggtaagccgatagggggtctccttgtcgaataccacgagatggacaaatagactccagaatgtggccaccatgtacaactttgtagcgcaccgttgaaacacaagccataatcaaatcaacccatctactaacaaatcccattcgaatcataaccgctcttaaaaagccccattccactctgtcgccttgctcatgtcaagcttgagcgcgatgaaccctttcttgcctttcttttgcgcttcaagtaatgcatcacctcaaagactatcataatgttgtcagagataaggcggccaggtatgaaggcgctttgggtttcagagatgatatggtcaattagatcccgcatgcgattagaaatcactttggagatgatcttataaagaacattacatagagagattggtctaagatcactcatagcaaaaaaattcttcttcttcggtatcaaaacaaggtgggtatcatttagtccagcaggaagtaccccagagacaaagaaatctttcactaattgaataacatcggtgccaacaacttgccaatgatgttgaaaaaagccaggacacataccatcaggactaggtgctttgtcaggatgcatagaaaacacagcagacttcacttcttcatcacggattggttgtaacagtgcctcattgtgattagcatttaccgaagctcttatgttgtcaataatcagctgggacgaagtattggacgattggaaaagattgagaaaatagtcattgattacagtatcaaggccggttgaccaattcttccaaacaccatttgcatcttgtaattgttgaatttg

SEQ ID NO: 94199 - DNA, 999 bp, Cannabis sativa
atgttgaatttccactttgattcaacaataacttttgccggtgcaataatgtgccggcaaaggaattcagtaccggtgtattattacatatatgcctgtgaaagatccaaaatgaaccgccaaatggcgcgaggacgtttccacgtctgtaaggcttttgccggtgcataactatgccggtaaaagtgtacaatttttttgtggaaatcttgaccacctagaagaaattttgggggaaaaaattcccacgtgaaaaatgttggtaggtagggatacttttgtcggcgcaataatgtaccgacaaaagtattaatctaaacagtgcgttcagatttagggttttttgaccacttttactggcgcatttcaatgtgccgataaaagtatttatataactgcgatcagaccacattttctccattttttctgatttttttttcatcccattctctcaatctctatctcaattcctttcaatccctcttaatccctctcattacctctcaatccctctcaattttctctctatttcttgaaaaacccaccatcgttgggcaccacaccgtcgaccaccaccaccaccgtcagccaccaccaccacaggggcggacgacggaccacctatgccagccaccaccgcagaccacctagccccacctctaatttatttgaggtatttttattttttttaaatatttatatatatgtatggatttgtgtatgtatttgtatgtatatttatgtgtttattaatgtatatatgtgtatatatatgtatttctgtatgtatgtgtatgtatatttatgtgggtataaatgtatatatgtgtataaatgtatgtatgtatgtatgtatgtatatgtatgtgtatgtgggattatgtatatatgtgagtatgtatgtatgtgtttgtgtatgtgggtgtatgtatatatatgtatatgtgtatgtgagtgtatgtgggtgtatgtgtatatatatgtgtatgtgtatgtaag

SEQ ID NO: 94200 - DNA, 708 bp, Cannabis sativa
tccttccaaagttcaccgaggactcaatgctccccagtatcgctgataactttgcatcttcggttacccgtgaaactttagtcgtctccgtcatgaatctactgatatatgcccggagaggctcgcctggtctttgcttaacttcgaccaagtctcctagatgcaatggaagttggcgtgaggaagagaattgtgcatggaattacgaagagaaggttttccatgaactaaactttccatgagccaacttgaaataccattgctgagcggcttccgacagggtagtagggaaagttctacaacatacatctcctcgtaccccttggaaatccatttgcatttcgaagtacttaagatgggaaagaggatcttctccttgtgtacattttccatgttggcattttaaacttgtggggcaacaccaggcgattgatctcgggtgagaaaggagtttcgcgtgctcggtccagctcaagatcattgtttctttgtccagccatgccgtgaaacatattttttagttagtcgagctgtgcctgcacggctgggctaaactgctcggcattctggtcaatttgaattatgtcagcatctttttgggcgagaatttgagcacgggctccgggctgaacaatcatcgtgacattttgattatctactcccctccttctgttcagatcattccttaggtcatgggtcacccccaac

SEQ ID NO: 94201 - DNA, 772 bp, Cannabis sativa
aactccaaactactgttctattctatttacatttattttgtttactcttctacacgcactacttctagcaaatattcactcatgtagggagacaaaactacatttgggcttgatccctaaaaagggtatgtaggcagctctaccgaggcagcccccctccctctcttataataaccatttttttcctctttttaagagtggcattcagtcagaaagtacgtgaggaagtttgagaaagttgtacagaattggattctgaagtggtttctattggataagttaaggacagagaatatattcagtccctttttgttatgcctctcccagaagcatataatcggtctccgaaactttagtattaccatctcgagcaagtgaggtgtttgagaaagttgtacaaaattgaatgaataaggggtaagttaagaatgaaagtacatatctaaattttgaagggtattggccaaaccaaatcagtatagttctctattctgttttttttacttaatatttctgaaatgatcacattgcacttcttctcacaattttaatactaatatttaataatgatatgggcagtctgcagttgcatttaagaagtagaaaacatatgttttctgttcaggaatattcagaaatcagcatcataattaacaactaaaaagcaagttcaagcaatgataataacattgaaactttaaaaaggcagcatttacaggtcaacaaggaaaagaagcatcttctgtgtaaaggtattgttatttgttattgc

SEQ ID NO: 94202 - DNA, 729 bp, Cannabis sativa
gtaactgggacaatcagtaatgaagagaagattcacgaactacaaagattattggccgagagggatgaagaagtagccccactctcaacacaattatctcatcaaactaacatgagacaaaaggagagttaagctggacaacattcctcgtcttcagcgccgcctgtaggcaatatacaaccgtcaccactcggtgtgcaaccaacactagctggtgttcaacctaagtaggacctgaaggcttttatcatggagagtattcgggaatatcaggctgcaacaatgcctattcttggatatcataagccatacccggcttattatgaccaaatctcatttccaccaaactatgtcagataaaagtttgaaaagtttgatggaattaactgttctccccctgagcatttggcctatttcacctctgcatgtggtgaatctgcccaatcagatgcacgattgattagacaattcgtgcagtcgctaaaagaggcagcattcacctggtatactcagttaccctcaagatcaataaatactttggatgacatgcagaaagctttcctggcacaattcgtgagctcaaagaagaccataagtctccatgacctggtggaaatgaaacaacgaaccagtgaaagtattagtgagttcataaccaggtggagaaatctcaatctccaatgtccagacaggatatcggaacaagcagcggtttcaatgtgtgccaaa

SEQ ID NO: 94203 - DNA, 514 bp, Cannabis sativa
tttggcccctgctaactcgattggcaagaaacactctcagaagcaccattttttcccttccacttcgaaaccagccacaaccaaggaaactgctatatggagaggcttcagaccagtaacaacaacttcagaatgattcaacaacattgtctgctaaccaagtagttaatatttctccatatcacatagaaaatgagcatattgatagaagaggatctctattttttgcaccagcagctctgaatttagcaaccatgttgcccaataacaagtccgcctctatggatacaaatgttattgatgcttttggccatcataaacaccaattgggagactctatttgtggtattgcacctggtttttctgtaaaatccaatcaaacacatgatcgggttctaatggaacaggaatcaccaaacatcactgtgactttttccaacaaagtcacaaacaaaactgttgtctccttatcatcagacaatgtcttgacaccctcctcatcaccaaaggaaag

SEQ ID NO: 94204 - DNA, 1008 bp, Cannabis sativa
aaggaagaaaaaatgtattttatagcctccatctttgacactcacggatagaaccaccacaccaccacgagaacacccagaaaataatcattaattccagggagatggaacaagaactatgaaaacaaaaataaattatggaaaacaatcctaaaacaacactaaaacaaatcaaaataaaacaaaggaataaaatcttaattaaaaaaactaaccatcttctgcacagtctcaacacttgatgcaatagaggctatatttgcaagtccagttttggaaaatcatattaaaaaaagtagaatttacgtggagtatgggttttttaaaccttttatgataaatatggcataattgattgtggacactttatatggctttttttaaagtttgtccatagtttatgggattttaaagcccatacggctagaatatatttgtcaaaagcccatattgtgtgtattgtagtttatttaggttattttagtaatttgaggtgtttaaatattttggttcagttttttttttttaacataacggtttttttttttttttttgtagagtttcgcatgtaatcatcacgatttgatggttgcttctacattttaatttacttttgcagttttcaattcaggcctattttctctaaacctcctataccattatctctctccctctcttttttcatttcactatttcttcatttccctctttcttctttttttctttcgtttcatcctctattttttttgctctcgattttttgaggatattgccgccattgttcttcgggtaggagctaccattgttcgtgtgttcttcaaggtaaagcatgagttatttccctttttttttctctaattttagggttttattccttttcattttgtgggtttgttgaagttgcattgttcttaatcattcttacattcttatttttttgtttttatttttttattttgcattttgtggttgagttatgcttaatccgaagagagagagagagagaga

SEQ ID NO: 94205 - DNA, 682 bp, Cannabis sativa
gtcttgcctgatgtgtgcataacagacacatctgaataccttcaagtgttcataacttgttggcttccttgaccacacctcatccgacgtcttgaaatccagtgatgttgacaaacatttgtttatcaaataagctgcagtggacacaacttctgcccataacactttgggtaatccagcactcaatagcatgcatctgaccctttccaagatagtcccgttgaatctctctgtgagtccattttgctgaggagtcttcctcacagtcttgtgccttgctattccttctttcttatagaacacatcgaactcatctgaatagtaccctagaccattattgattcttagtcgtttcactttccttctagtttgattctcaatcattatctttcagtgcttaaatcttttaagaaccttcgtcttattcttcaaaataaacacccattactttcttgagtaatcatgtgaaagaaaatacttgctcctagagtacgatggtgtcctcaagggtccccataagtcactgtgaacgtaatctagtgttccctcggtatccttttggctagttccaaacttaactctaaaagctttaccaaagacacaatactcacaaaaatctaactgctcaagctttacttttccaagtaatccatgcttatacagttcatgtagccctctttca

SEQ ID NO: 94206 - DNA, 519 bp, Cannabis sativa
  modified_base (228)..(233): a, c, t, g, unknown or other
atccttcttaataatcaatttttgtgaaataccttgtcacagtctagtatagcatcaactatcctaagccattacctacttcctataggttgggattcctttcataactaggtgtggagactgcttcttcaaccatttgtagacaggggcaattctatgcattggtacttagttggctattaataaataatataaatgacaatcttatttgataattaattttaattnnnnnntaaataattttgacatttataggattagaattgcaaaatatggtatttatgaaataatagataaatggttgagaaaaagagaaaaaatataattagtgtagggccgactatgtggccggccactatgcccctatttttgctattattttgtcatttttttatattatataattcaatcctaatcctaaatgaattagtatataaaaaaaatagtctcttaatccaactaatgcttttaaacctagttttctttctgtcagataactagtgttttgagacttcttct

SEQ ID NO: 94207 - DNA, 543 bp, Cannabis sativa
ttggactgtctcaataaaggtgttgatttttctgaaatcaactccactcttgtagtcttaattcccaaaaaagctcgtgctaatatgcttaaagactttcggcctatcagtctgtgtactactttttataaggttatctctaaaattttagctaatcgtcttaagcatgttttggataatgttatctccccttttcaaagtgcatttgtgtctggtcgtattatttatgataatattattttagctaatgagttagttcataatataacgaataggaaagttggtaaaaggggttgggttgctttaaagcttgatatggccaaagcttttgatagggttgaatgggactttttaaagaatattatgtttcatttgaacttccctgttaattttgtttctcttgtttttaagtgtttaacctcggctgctatttcttttgctgtaaatggtgtagttagtgagcctattaagcctactaggggtttacgtcaaggggatcctttgtcaccttacttgtttattctttgttctgaaggtctttct

SEQ ID NO: 94208 - DNA, 645 bp, Cannabis sativa
gagatgttgcatgaattgagttaatagacagcagggaagatggcctcagaaaatcgcaacaaaaaatttcaaattatcatttagtaacaacaaaaataaaaatcttataactaaacaataaaaataatatacagatacaagttaaatgataaaatttattgtgactgaaatcatattgtaattttttttactcatactttataattttttaggaagaattttagtgtctttgagaagttggaaacattctccactattatacatagctatggacttttagttttaacagagatgaatcaagcatacttgtttagaaggccacacctggcatagccaaagggctgccttattaacttcatgaagataacacattgactataaactacacattctcttggaaagatttgcagatgaagaaacatattgattattttattttccttggagcactgtcttgcagaaatatgatgttacacctccatatattgcataatgtaacatgtttaatctctcatcaaatgaaaaattatataattataaccactagtatgtcaaaaatatctccactgagattaggatatcaccctgtgttaaacttactggaaaatcaatgttggtgtatgcaactttttactgtttggtaat

SEQ ID NO: 94209 - DNA, 933 bp, Cannabis sativa
tcgcagagaagccgctgaaattcttggaagcctccctgttcaagatcgcgattgacgactactatgcatgaccttgaagttgcgggaacacaagttaattccagagaacgtcagccttcatcgggagccagtgtacaaggagccgtctgagaagcaaaaggagaggatagacaagcatctttcttagcagaattcttgaccgacatcaggtaacatattgcatatatatagacttatgcatttgaattcattgttattttaacttatcttttcttgtcctcgcagagatgactttcttgaagcaagcacctgttctcaatcgcaagccaaagactggaacagcagcgacatctcctgtcattccccataaaaggaaaagtacgtcgtgattactccagttgttgatacgtctaagaagttggcgaggttctcgcaagacaaggcgaagaaagttgtgatcgatctggctgttcgagctagcgatatcctaactcttcaagagaagttcatgggcgaggagttcatgtcaaaggttgagaggactccttctgaggaattgatgcctcgttctgcagagttggcttcgcagttcattactatgtttttgagggtgttcgttgctggttccaaggatgtcgagcttttaaaaaagcagaatgtgtagctttaggagaacgtcaagaagctaaagcaggatgcgactaccaaggacaaagagctcgaggaactccataagtctaaggagcaagttgaacttgacgccaaaaactctcaggcaaagattgaggagatatctcgcgacttggaggccgagaaggagaatggaaagaagtagtacaaccaagaggtctctgactacatatacacaactcattccaagattctagacttcgacttctcgatccttggggcagaggcggctgagatggctga

SEQ ID NO: 94210 - DNA, 575 bp, Cannabis sativa
ttatcagacgtaaagaagtggttacccgataaattccaataaggattcgggatcaaaatctatagagatagaaagtgaagaatattagcactttctcaagtaacttatattgataaggtgctaaaaggattctcaatggagaattccaagaaaggacagttatagtcccgacatggaattactctatgtaaggatcaatgtctagaaactcctcaaagaggaaaaagacatgaaaaagtacccttatgcatcagtagttgggagcttgatgtatgcaatgttgtgtaaaaggcttgacatatgctacattgtagggattattagtcattatcaatctaatccaagtttggaacactggatagttgtaaagcacattcttaagtatcttcgaagaattagagattccatgcttgtatattctagtggagagttgaatcctactggatatactaattttgattttcaatcatacgaagagggtcgaaagtcgacatctaggtcagtatttactcttggtggaggagctatagtttggagaagcattaagcaaacagtattgtagattcaaccatgga

SEQ ID NO: 94211 - DNA, 914 bp, Cannabis sativa
caacataaactttgtaattccaaaatactatcaaaacgaaacatcctgttcactgggtcgatacactgcgcctgatatgtacattgctgctacgacctcgaactcatggctgctcaacctttgctttccccttacctgcaccataaaccacctgtgagtcacagagactcagcaagaaagggaacaaaacaataactgataatgatcatcaattcaaatatcataacaacatgcttacacatcacataatatcataaacacccaatcttggtactttataaagtacccctttaccactcgtgaaccacgagctgtatatgtcactatcgttgcccaatgaagcaaacgataagtaagaaacctatccgtagtttcaagagtaattactcgtaacagtattaaccgtttaccatcttaggtcataacctaggctcaatcaaatgtttcatcaaagtcttgataataatcaagggcactacaattcaaccctcaatatttcaccacatacggtgcttacaacttttcttaccttaattcagaactcaagtgtacgggccgacctgagtggaaaacaagctaggcgatcccggtcctatgtcacaacaaccaaaactcaataaaaaccttaatcaaatttctaataatagactctaattctcacaatcggacacaccctactttcccccagatcaaactagcttaaccatctctaaaacaccctgaatttcactccgaaagacaccccgaatcagatcagacttgaggagaaaaacctgaaatttccccctactggccaaactggtcgtccctttttctgggtgcctaaaaaaacggcccaccgttttttcctggaagccatgggaatttttggtttttcacatctaaaactgatccaacctcttccaaacctgctc

SEQ ID NO: 94212 - DNA, 583 bp, Cannabis sativa
aatggtcgagctctactccgtatagtcgagctctacactaacatttcaagacttttgagactacattggtctagctctactaaaagcagaagagatttatactaacattttaattataatctcgaccatttatgttcgagctctactaacaccaatcaagctatataatatatcaaactgactttctcaaccatatttggtgaagtcctacccatttacctcattatttgattgagttgttgttgtacatgtgggaggagttggttcgttcaaaatcaactgtcgttggattggtttatttggatctataatacttagtattttgcttcatgtcattgaattaccaaaatatagtatgttagagttgaacttgggtgattgagcaattgcataacctaaaaatgataatcataagtaaatatgcataagagccaattggtgcaaaaatgagaaaaatatcactcttgcctaagaaaacacaatataaactttaattgtaactgttaattcataattcataaaataatgtgatattaatatagtagtgtatttatttaaatttagataacaaaacaaataaaat

SEQ ID NO: 94213 - DNA, 967 bp, Cannabis sativa
  modified_base (53)..(55): a, c, t, g, unknown or other
tatgaatgcacaacaatcttaccatatacggaaaaattattttgtcaactaannngccaaaaaaggactttacaaaacttccatctcaaagctcccgaagacaacctaaggacaaggctaggtacccctcctaggttgactgcttggactcgagtctactaacctccatgatgtcatatttcttgccacgtgtcaaacattgatgtccacgttaccaaggaaagtttttgggttaatattttcccttaagtcagctttgcacttgtgtataattgacttgatgacgtgaacttggcccgtttctcttgaaacaagtagacgtgcatcgattttgacaatcttagtcaattgtttctattattcaagcatttccaatagaattaagactttgcattccctggttcttgtgtagggaaattttgaaaattaaacagtcaaagaaaaagaggaaaaacctatcatttttcactcatcttttatctttttctttaaaaacgtgcaattttcatgtatttcttgtggaactaagattaattcgattcaaatcttaatttttttttttgataaatcaatgaattgtattgcataatacgaaattttttacaaactatgcgcacccaagaagggccgaaatctatatacctctatatacaatggtataatctttcccttttcacattgtgtttaaactctataatgcaaaaaaccattctttgtcaatgttcttaattttttttgggcaaaattctctcaatccgagcctttgaagtccactgcacttcttcaacaattcgatccatgctgacagattgttctttccagactacagcatttcggcatctccaaatgctatataccaggccgattaaagcagcagccaaaacccccttcttgaatttagacaatctagatcttcctatccacctcaaaagttgctgaaagttactggtttgggcatgccacccca

SEQ ID NO: 94214 - DNA, 951 bp, Cannabis sativa
ccagccatgttagatgcagtagggattttgtttgtatcatcacgagaagtggcttggctcaagtgttggctgagaagagaaataaggtgttagcactggggagacagatctgtatgagttgaagtgctaagaatcacatccgaactggtgctggcttgatttgcagctggtttggatttgtctggtttctttttatcaccattccctggaggaaattcgtggataaaataacacttatccacgtaatggccaggtgtgccacaattggtacaagagggccttggcttcttggatcttgggggagggttattggaagatgattgagctgatgctgccagagatgaagcatctgaagaaccaagagtgtgttgcctctcttctttaacaatcatagcaaacacccgtgaaagattaggaatgggttcattgaaaagaatttgagcacgaacggatgcataggactcattcaagctagtaaaaaactgcaagacttggttttgattgtaatattccaaaaaaaatttcatggcaccacaggtgcaagtggtgtttggttggaggagttctcttagcttatcccagatggatttgagcttggtaaagtatgaggtgacggactgatcaccttgttggagacgtgttaattgtgtttgaagctgaaagattcgaggtccactgccctcattgaatctttcttgcaaatcatgccacaaatctgtggcaagatcaaagtacataatactttgtgctatcacagacgaaacagaatttacaagccaagacatgaccttgttattgcaacgaatccaagaatggagaaggggattacaattagcaggtccaggaagatagccgtcaatgaacacggacttgttcttttgcagtgagggccattgtaatttcttttttccaagactggtaattagctctattaagaatggtggaaaccaa

SEQ ID NO: 94215 - DNA, 1099 bp, Cannabis sativa
aaaaataaaattttacctattagtaacctactattattggtaaaagaaaaatgtaactatgatggttacaataaaaatataactattgagtagtcacctaatatgtaattatttatgaaaaaatgtatttttacataattcaataaattttttaataacagtaaaaaacaaataagactgtaaagatctacaataatatagattagaaacttgttattgcagaacacaaatttacattaactttataaaataataatgcataatataaaaacttaacacaagataattatatgtgatatcattattcttttaaacactcttagtccatggagtcgcgctcagagaataaaatcaattaataaagtttcaaacaattacaaatacaattgacttaaataaatataaactccctataaaattttgtcgtaatcttttgtactttactttgccaatctaatttctgatcagcaccacaaaacaatgaactcccttcgacttttaatgtgtgtgtgcttatttcctcccgaagtaagacttggacaagtcttctccagaagacccttctcttgtttaatgaagatcttcaacctattctaagaacagtataagaacaataatacaaagactaaaacctagatgaacacacaaggttttcacaaaaaaaaaaaaaaattctcttctcacaaagatgaatttatgaaaaataaaactagaagagatgagaaggtttggctaggtcttatttatagaacatagaaatcctagagacagccacaaacacgtttacacagctgtacaaaattttcctaaactaaaccttgatttgcaacgataaaatcgcactcaacaattgtagattaggccaaatcgggaaatattctaaataagtccaagatcacgatttgaactttaattctagccatagatctgttatattcatagcaaaaccgaaaagagcaactaacaaaagggacagacaatttttccaaataaaactaatttaatcaaatttttcataaaaagaattcattctcttttttgaaaactattctaaatgaaaaaggtcagttgtgaaatcgaatatacacacaagaaaaca

SEQ ID NO: 94216 - DNA, 588 bp, Cannabis sativa
tgttataattattttacattatatatataattttttcttccatgtaaaaatgactttaatttataatttagttaaactaaaaaccttatataaagtagtatatatacatattaattaatattatgttaaatatcttccagtgaactcacattatcgagcctaccccataaaaatatataaataaatgaaataaaattaaattattatcagattacaagtaatatttttaattatttttagttaatttctcgcctaatctcgatattcaaaatatctcaaatatttttcccattaagaattaggttctaaacttactcacgtgactctaacggtcatccatcgcattttttattgtcgttgagcaaaaatcataaaaattgcataattcataactaccataaataatactcttagagtttaataaaatctcaaaaattgaaaaattatgactctaatgcccacttctaaaaatgggatccataataatattgtggtatttttagacataagtctaatattcaggacatgtggcactctcggattggacagtttcaaatgttagttttgttagttggtttaggagggaaa

SEQ ID NO: 94217 - DNA, 625 bp, Cannabis sativa
tggctgtcacataagaatgagtggtcccagagtcaaataacatagagaagtaagagttgttgaccgagagctgacctattaaaactaaggggctagcttttgcatcttcctgagttaatgcgaacacccttgctggagcaagtttcgcagcaatcttttgttcttctttcttaagttgtgggcaatctcttttgtagcatcctggcaacccacacaggaagcaccctttccctctacactcacccagacgacgctttttacaactggggcattctgggtaattataccaggtttcggagctaccgtgacgattgcctcgaccttggttccctcagaacctcttattctgacttgagacactagatgcagcaggtgcctttcttttttggtcagtggtcgagccactatctaccctactaaagcctgaggtaggaggagtaggagccccaccaacgaaccaacgacctgagtccctcgagacttctgggtgcactccactgcgcccttagctcactatgcctttcccaccgtatcagcataggtggtgttgtcatcagtggtgataatcaggtcatgtcttatcttggaattcaatccatctaggtatttctctttcttactaaaa

SEQ ID NO: 94218 - DNA, 749 bp, Cannabis sativa
ttttgtttttctgtgtttatctctctattatttttctgttctcactcactgactctcttttctttctttgcatgaacttggaacaacatttggagctgaatacttccagatctggaaactagggctctggttttctggtatctctcaattgagagattggtaagtctctggatctgcttttatagatgtagtttagggttgatcaagatcagggagttagttataatttcgattgtaactaactaccagatcttgatccactagaggcgaagccacataggatctggtctggtttttatttgtatttattctcttcttgtaaaactgtaataataagtattacagagggatctaatttaacattttctaacacaacacttatctaaattcagatttggtattagtgataatgtgattgaaatgatctgtaatgtgttccggcccagacactcttacaaggctccttgttgctcttattactttaaatagttactttttttgttggctatgtttaagaacatattctttgttttggtctttgacttttaaagctttagttttaataatgtttcttaatatcggcagatggtattcaatttatcacaacacaattgccaatttttgaacttatggattgtggcatggacacatgtgatcccaattctccatagcctatctcagaagaaagtagtgattgtgaagtacaaaaaaaacatggtaatgccacagtctcacatatttactagaat

SEQ ID NO: 94219 - DNA, 810 bp, Cannabis sativa
tgtaatttcgaaaccaacagaacttcatcttaattagagaagcaataaaagtgcagttgctctataaaccagaatttcatctgaattacatgtaatttcgaaaccaacagaactctaacaaatccttaaaaagtacccatgagagcaaattataagcctaaccactgcatctaaatgaatcacctatctttctccatctattatttcaatacataactaaagtttgtgaaattcaactgaacagtttcaactgcaaaagcatatatggcataacaccacgagacctgggatttgttttaagccacacaagtcacaacgtgttcttcatttgaaagttcaatacgaaatatataaggtaaatttttcagatcacagtcaattgggactgaacgtgtattttctaatgcatatccgaaataaaagcatgataataaatgttaactagtaagacatgtggagtggtttaaacttcaaaaccgccaaatacataggcgtaagcttattcgtagttagtgaagaaatacaaacccacctggtcactttcaatcaactcagcccacatcttcttcgaaattagttctcgtactttttcatgtggcaaattgattcggtaattcagatcccctaaccaaataatttttctgcaagagaaaagcaatagagtattacttagtcatagtctaacacaagagtaagatacacaaaatcatgttcaatccaagccgatctaattcaattattgaaatgaatgacaaaagttgaatagtataaaacgaaattccatatgtactcactcgtggtcccgaatgc

SEQ ID NO: 94220 - DNA, 970 bp, Cannabis sativa
acttttggtgggattttaagattcaaagattctgttaaaaaccagaactagtttgctcatcccaccttccattcaaaacttgaagatacttgtaggtactctttacactatatatattcaaactctccttattctgatgccattggtcctcccctaacccatcattaagaacaacactctgaattaacaatttatctcgctcattgaaaaggtcatagaataagtcaacatactaaacccgagacctcatggctataagctgagccaccttagcattcgccagaccatgatgagtcgaagcaataaaattctcctcactcagcaactaaggttgatttaaaacatcaaccgaagcaccattaacaatactccaacaacatcattcccttaacaagctttgagattccatgataaaacgctaaacaaaacttggattatgatccactgtcactgagaagaaagaaccacgaggataataataagcttgaaaaactagtttttgtagtagttccaagaacacaattaaaactagctagagccaatcaagaattaaacaaaatataattgaaagcaataaaaggataaaaacttagcttagaataagatgaataaaattgaatctttattgaataatggttatcatgtccaagaaattacaactctatcttaatgaatcgattagaaaatttatctcacagtgaggaaaattatttcaatagtgacactcccattacatctctccacacattgtgattagacaatttctctctaaactttctctgaatttaaagtataagctaatctacaaatgagagagtagaggaagtatttataggtgttaagagacccattgtagagttagagtcaatgcctactattttaagtaacaagtgatgagttaatgacttggaattactactacaaaaaagtatttgcgacagtcctataaatcttttttttagaaaaccgt

SEQ ID NO: 94221 - DNA, 629 bp, Cannabis sativa
  modified_base (509)..(511): a, c, t, g, unknown or other
agtatcactagtatctaatacactattcagtgtcatactaattgctttcactataattaaatattagattttatataattttaaaaaatagttttaaaaaatattattaactaatagtaaggtgacatttataaaaaatagtaagtaccactggtgttcaataataatattcaaaaaaataataattaattagcaaaaagtccttaaatccaatcatcttaataattcaatgagcatttttaacgaccttaaaagttcagaggacatgatttaatacatgtcaaagtttaagaggcaaaaattataattagccttttgtaatatagagaaatgttgaaggatactagtggtacttagtattattattaatctaactaagtatcaattctcatataatttaatgtaataatttttaaaaaatattactagtcaatcacaaggcgacatgtctagaagtattagacaccactagtatccaataataatactcataaatatatatatatatnnntatatatatatatataaattccttcatctatttgtaccatggtttttgtgctacttttaagcaaaaataacatgtttccaaaatttgcttataacacttcatcaaagtgtcacaatgc

SEQ ID NO: 94222 - DNA, 671 bp, Cannabis sativa
tatttttgtaaccaggaatggcatgatttgtatccatcggttcgagttctcaatggtgatttgcttcattcggatcatcgaccggtggtggcttcccttgagaatgttattagacatcagcggaatgagaggaaaagatgctttcggtttgaaactcattggttgaaagatgatgaatgtcatgacattgttcaccgggcttggttggcttctgaagtttcatctcctttggataatcaagattgtattcttgatatttttggtaggtgtgcggatcagttaggggcgtggaataagggtaaatttgggtcgattccccgtcttgtgagagagactcagaaacagttggatgatctccttagtgtctcggccccattagttcgtatggatgaggttaagcgtcttgaagttaagcttaatgatcttttatctcgtgaggagtgttactggaagttgcggtcgcgggcggattggttagctcttggtgataggaatactaaatattttcacaataaagcaacgggtcggaagaagaaaaatgccatagtagagattatgactgaggatggccgtagactgagtacggaagaggatattgtgagtgaaattgaacgatactttggcaccattttttcctcggcttctccttccatgcagcaagtggcggatgg

SEQ ID NO: 94223 - DNA, 1014 bp, Cannabis sativa
gaatttttataaaaggaaactgtggaattgtaagaaatacaaacattttaataaaaaaattatttataggagtcatatttttttttatttaagcgtttatatattacaacatgcataatttgggactcgaactcagaaccttcaacacacactcctatggccacttgagctagcctcgagtggtttagggatcatagatataaatatatataaaactttatttatttctattttaatttttttacatgtaattttgaaaattttaaaaaagttgggggggccatggaaataaaacagggacttaattattagtagttagtaccccacccataatgtttttttttatggtaaggagtaccccacaatgtttagcctagagtgtttttttttagcataaacttcaaatatttaattgaaaatatttatatataatatatattatatatttaaagaacttaaaatttttaaggatgaataaattaatgccttataaaactcaatatcttatcatcaaataattcaaacacaccatgtaaaataagggaattaccacatatactatttttttaattttttttttccaaatttaccgtttgaatttttaaagtgattgcagcgctagttgcaataggggttttcatacgattttttgttgcaatttaagttgcagcactagttgcaataggggtttctatgtagaatttcgtaaaaatgcataaaaaattattttaaagtgtaaaaataaaataatccctctaaaataacccataaaactgttaaccctaaatatatatatataaaaaaaatatatttcgagagcttttctttttattttatttttaaaaaattaactacaaaaaaataaataaataaatagcaacaacaacacaggaaaatcaattaactataataattttttttatatataaatatatatatattatttttttacaaacctgagccatcataggaggaatttcaagtatattttttgcaccaggaatatcataaacc

SEQ ID NO: 94224 - DNA, 709 bp, Cannabis sativa
  modified_base (653)..(654): a, c, t, g, unknown or other
agagatagagaaagagagagagattgtatgaaatgagatctgaaatttggacttttatatttaaatgagaatcttcgatagtttaaaactgtcaggtgtactattcctgactgtttaaaactattgggaataatcgccagggattccctttacaccttgtttttcaattttggtcttgtgaccgttttaaaacgtcaaaaataataaacgactgttaatacttcactattgctgatgattttaaatattcacttaattttattagcgatagtcatcgaaaaaatccgatttaaagaccgatgagaatcgtgttttttgttctagtgaaaaaataatatttattgaaattgaagaatgttacaaaataaatatttttatatatatatataaaggagaggtataaaactgtgacatgatactctaaaatcatctcaaatacctctatctattatctccttatttatttattttttaattttttattaaatttatttaattaattaattaacaaaaatatttaatctataaaacttctccatctatcaccaaagcgtacatgcattataatttatatataatatatattactctcatattctctcacatatattaatactagggtggctactcaatggttatatttttattgtaannatcatggttacatttttttttttttgccaataatagcatgttaacaataggtaaa

SEQ ID NO: 94225 - DNA, 524 bp, Cannabis sativa
gcgtgtgcaaaatatcacaacaggcttgccggcctatgcctggaactagggttcctggccgacctctaaattgggtcttggggtctggtcggcctctaggacctggaaccctggtcggccatggccaaggatccaagcgggcaggcagttcttttccctctttggaccacggttagagtcttatggcgcccttagaggcatatacaactatggcctaatgcgtggtttctattggagactctgtataaggctagataatgagtccattatagttagttgtgtaatttaggacttactgtgtgtcctggtaattgtacctaagattatgcttggtcgttggtcgaccttttaccctttgttttttctggaagatgtcgttgagtgtcctgttgacttgaatatatttgtagctttgtctggttgctcacctccccttatttcttctatacaggtagtggttggtggttaattagggaagtgacagttgtgtaggtctcctactcacctcatactgatggcaagga

SEQ ID NO: 94226 - DNA, 622 bp, Cannabis sativa
gaatcataatcaccacttgggcagaacccgtacacttttctcctttaacatcagtctttcttaactacaggtaggttcttttcagatgacccactactcaaagtaaaataagatttggctcgacataagttcaaatggcacctttttgcatcttgaacactaaggataaggtcaccatttcttattctcaccttgaccgctatcatgaccaccctggaacctttttattttgacccataattggtggttcatttagctttcgcttcctcatctactagtaagttgacttcaaatattccaccacatctagtggtacaacaagaagtgtcggtagtacaacaacagacacaagatgagcctattattctttcaaatgtcggatatgttttcccttattgtctaatcatatcttacataatagaatttgtatgttcccaacatcatgccaataaagaattctctttcttgccgttttccccgagcccagatagctcgctaatcaaattattcaattgcgcataacttatcacacatttagtccacattttctaaccatttaaaactaagacggatatcaatattaataagagtataccatacacatattcttatcaaaattgtc

SEQ ID NO: 94227 - DNA, 741 bp, Cannabis sativa
tatataagaaaataaaataagataggggattttttaattatatacgtaacattataattattaacatatataccattgctaaattaaattataccattttcgttagtgttgcccaatatatcaaacaaaatatctaattttttctttgtcacgtgcatctttagttttgttttcttttttttttttttttcatattttctctgtgtgagtgaccactaacatttgtttttatttccattcaaaaaaaaaaaacatttgtttctattattaatttttttaatattttttttctacaatctttaaaaaaaataacaactacagtattattttaattaaaaaaaataatattattgtgacatattcttcaagttaatcatttaaacatgtgggaaccacactttatacactattaccaactaagatatttgaaattataattaacactttaatttcttttataaattgtttaaaaaataaataaactaagatactaaaattattttttattgtatttatttatcaaaaaaatttaagctttacatttaagatttattagatgttattaaaatataaataaactagtttatttatcaacttatattttaatatgattattttaatatatgaaaagcatatatgttttttttttactgttattagataagttatccgaaattaaaaacaatcttttagtttattttatatttagttaataaaaattatgtaacttttttacctatt

SEQ ID NO: 94228 - DNA, 755 bp, Cannabis sativa
caattcttgtactgtagtattccactgtctgaaacagagaagtccttagtctaatcagctaaaacttcttcacgagatttaactaactcaaggtatttcatttgatcatttttaatcctttctaacaaattagactaaagtgttaaaaatttcttagttttccaaccacaaactcaattctagtcctaaccatctcggctgctagcagaaagggattaacttcgttcgaaaaacttgcatgtgaccttttctactcatggaatcctctacttcattggctttctcgggatgataaagattctcaatattgtaatacttgaaaaactccaaccactgtctttgtctcatgttcaaggatttttaagtaaataaatatgtgagactcttgtggtcagtttagatttcacatttctatccatagaggtaatgtcgccatatcttcactgcaaacaccattgcgacaaattgtaggtcatgtgttgggtaacgttgctcatactcctttgactaatgagaagcataagcaatgaccctgccagcttgcatcagaacacactccagaccctatttggagtcatcacaataaacaacaaaattttctcaatttgatggaaaacctaaaattgaggttgtaattagtcactgcttcaactcttggaaactagcttcacacctatctgcccacacaatctgttgattcttcttggttaactttgttaaaggtgtggagatcttggaaaacccttctacaaaaa

SEQ ID NO: 94229 - DNA, 539 bp, Cannabis sativa
atttctctatggaaaagtctcaaatgtatgaaaatatagaaaaagctataaagaaaaatgtacaaagtcaaaaatctaaaaaaaaaaactatatttaagataattacctagagaaatgtttaaagaaaaatacaaaaatatattctattataatattttttgttttttttttttaaagaaaaatagcaaatttaaggttttgaaagtttctttcaaaattgtgttaaacaaaccaggaataatcttagtgggttgtaatataatatataaaagaataattagtaattttttttctagaatttttaagactattgattttatcccgtaacaagctaatattggaggaagctttgtagacttagacaaaccttttgtaggggagatattgctgttgcaggtgtgtttgggaaatgtagagctgcaaaactctaataacaaaaggttgattatcaaaagaatgtgtcccaaagcatagatttattctttggcaagcattgaataatcacttgtttacgcgagaccatcttcccaaatttaat

SEQ ID NO: 94230 - DNA, 520 bp, Cannabis sativa
aaattttcaatacaattaggatttttaagccatcaattatcactactacgtcaaatcaagtttagccaggaatgaacactaccattacaatttacaaaatctattacaaaagagaaaactaacttggagcctattataaagagttgagatgcaaaaaagttatgattgaaacattgaatcaaagcattatccatagctaaagctacagccattaaataattattttcatataaattttaatttaaatttaaataaaacattaatttaattaatttatttatttatttattatttcatcatttaataaaattatgttttcttataaataaatttaaaattaaattaaatttcatatacttaaaaaatataattcaattatattaatttttgttcttattgtttaaattattaataagttgtatttaaaataatataatgagtaaaaattattattttgatagaatccattttatcatttaacaaatttgtaggaattttaaattgctttttacaattttgc

SEQ ID NO: 94231 - DNA, 527 bp, Cannabis sativa
ccaggcccacccattataacatcaatatcccctattttctcaataaaagacttacccggcccaggacacttaggaacatctttactcggcccaatatcaagacggcccaaccctttttttactttactcagcccaccacccaatacatccaacccagtacaactacctacattatccaacgggtatatgctcttcttcatcacagtcgagggctccaaacaaggtaaagccacaggtttctttccctcataattcaaattcactctaacctctttccctttaacggcaaagattgaggcacgctcacccgaaccacccttgggaacccacttctgattcacagcctgcttgtgtccaggaaaaacccgtccagtcgttttcttccatcgattctggccacccgcacccttgggtaacgcgcttccaaccggaccaccctgccccacagcggtcaccttctgttcacaaacggccggactcgcctgcgccaccactgagcaagtcaccaccggtttagggacactaga

SEQ ID NO: 94232 - DNA, 517 bp, Cannabis sativa
tagtgaaaggtagtattgtgatatacacaatctcaaaggagttcttcaatgggacctctactgttaccgtcatcacccagacgaaaaaagctttaggatttttaggttttcttcttgtagcgaatcccacatatgatgatttcgttgttgagtctataacttttgatgtttctggctttttgatcccatatgtagctgatgttcaggtatgtaagaaggtgcatatacattatttaaagattcttacattatttaaacaagatattaatgatgacaatgatgtaggttatgttgcactactatgaagaaagtacacatagagacgagaaaaatattgtaaggagatctgggccaatttagtaagtatggattgatgctatcacattagtataactagagcactgagtatagcctgatattatggttaatcatactgttgtcaagaatgtttgagatttatacacgttggacgcagattatagaatcaggattcggtgtatgggcgcctagttacaat

SEQ ID NO: 94233 - DNA, 598 bp, Cannabis sativa
gtcatatttacaaataatataatttcaaataaagaagaaaagagaatacaagctatgtatatgttaattttcaattttgttgtcaatctttaattataaagaagtcctatatttgggagtggccgccttagacccagaggccctatggcccctatctataaaagcaagctaatttttattttcttttctgaataaaagacaaagcaagttaaaattattccttgttgtaatagttactttttgcttagaaaaagtgttcaaatgattttttcaacttgacccttttcatgttaaggaaactaaataaaagaagaaggttttggtctgatctataaccaacatgaacctaatgtttacatgagatctactttcgactttcgagaaaattaatgttatttttttttttaaggaaaaattaatgttattagacgactatatatatacacatcttaattacctcattttaccatgtgaggtggtatattaattatatatagatatatataaatcagagtctatatattgtgatgtaagtgcaatatataaaataaaaatatttacaagaaatattatattataatattggagaaataatata

SEQ ID NO: 94234 - DNA, 2034 bp, Cannabis sativa
ctgcagttgtattgggcatacgaggccatcctagagctgggcaacgagtatgcaatgaagaagttgcatcactttctgagaatggtgaactgggagagtaagctaaaaacgacacttgcgaaggacgaagtgatacgattatttactagaaatgtaagttttttacactttatgtttaattcatgttaatttccatatattaatatatttgttttatttttcagttgacagtttactctatgttatgtccccgagcgaatgagattgagtttgtgagtagcatcactggcggtcaggcgcctttatttgttgaattggaggaacttgtgttgggtgacgatgggcaaccaacacaggatgctttgtgaagccaggccgaaaagcttacctcgacattggaagaatgagcggatgcagaccatatatttagagactctacaccacctgcactgtctccaccacgggcaccgtcttcactaccagatgagtctggtgttgctccatctacaacatcacaggatcatcctcttcgcccgtcaacatctattcccaacacctcagatgctagcgaaccagtataccctgccatcttggcaaggttggagactgtggagagggagcgtattactttgagagaaggacagaccgctctgctaagaggacagacagcgattatggatcagttgaagaccataatgagactcctataagatactggaagggcgacaccagatatacagtcacaaccacaaccacaactagatgaagagcctcagtcaccggaaaatgaaatcattctcccaaataattagaccgaatgatgatgatatgtttagtgcacctgagaacatgaatatcaccagcatcgaggatacttaggattctgaggtacaggtgttagagacagctccagaactagtggagaaccggaggaatagaaagcgacctaggtagttccatgactacattgaaatgaagaagtctagggcatcgaagacacttgtgagtgtggacccacttagtgtcattgattgaaagctgctcacgacttttcacagttgggttctcggccaaattgggaacaagtacccgagagagtgtttcttcggtagacacgattcagcttggttcctccaactacatactccgaagacatggcttggacacgatgtaagttttaaagacttttttacgtctttggttttaaaagactttatctaacttttgttatttaatctctgacatatttaattttcatgtttttacaattggatgcggcatttcatatgatgaggaggcgacaacacttttatccggaggtgtacccaaataagtgtgtcatcatgccgtgtattttcccatcaggagttattggtcggtggcaagctgcgggtgatgaccacactaactttcagtgggatgacggcatattggatttgatttgaggggataatgcccaatacttggacagttggaagaataaggagagaatatatatggccttcttcttcgatagtgcaaagcattgggtgacatttgaggcagaccttgatcgttagttgttgggcatatttgactcgagccttggattgatttccccggatgaattgaagagtcacttggcattgtgggaagagttcttcccaactttgatgctgtagtccgacttattcgagagtcgtgaaatgatcgtcatgcctcaactaaccgtctcagagagccaagttagaaattttacttcaaaagtcatcgacaggagcattgtacgacagacagaatcaaggtaacttaattacaattaattttttattatttaacttgaatttaatttgcatacttttatttatttacttttattgtctcatacagtggtgattgtgggatgtatgtgatagagcacatcgagcatagtatgttggatcttacgtttgataatatgaacgatgacaatatgaagaaatttagagagcggtggtgtgtagatttattttaccagaatttagcatgaacaattatgtttttttaattggtatt

SEQ ID NO: 94235 - DNA, 728 bp, Cannabis sativa
tctgtgtatgattccaaactgtttaaggagatcagtaaagggtctaaactcacctccccaatcagtttgtaaacatttaataggcctaatttgaagttatgaactgacacctcaaacttgggatactctatggtgtcagttttttaaattaaatgattttagaaccgacactaaaagtgtgttttgtagtagtgaggcttgcctaattgaagttcagattcagccttgaactgtgtaaaagttttcaaggcctcagacttttgtttgagcatgtatacatgtaaatcttgagtaagcatcaacaaattggatgtaatatttatatccattagttgaagtatgtatagcaggcccccatagatcagcagcaacaagttgcaggggttcggtatagacagtaagggaggctttgggaaatggcaatttatgaattttgcctaaacaacaagcagtacatattgaaaaaggcattttattattgatttggatattacatgactgaagtacagatttgacaaccctttttgaagggtgcccgagcctgttatgccacaactcatagttggaaagtggagattgattacagtttgaacagacagagacatgatgctcatgttgctgggacaaagatgttgtgttgacacttggggagacatctgaaggtggaagttgaacttggaactgggatggattaaagatataaaggccattctggtgtttcccagtaa

SEQ ID NO: 94236 - DNA, 1187 bp, Cannabis sativa
actccccatgcttttggtcgtagtacatacttccaatgcatctggtcgtagtacacactcccatgcatctggtcgtagtacacactcctatgcatctggttgcagtacacactcccatacatctagttgtagtatacactcgcatgcatctggttgtaatacatactcacatgctctaggtcgtagcacctacttcgccatgcagggatcatgagaaacacaaacgagctgcttggagtggtgccaaaaagaatgggaagacaacatataataagtcaactttgtgtaaaccacaaaaaaatgacttatggggaaattgttatacccattttttggactatttaatgaaaaaatcgaattgaatgccacatgtcataaataataaattctcacaataaatacattgtgggacaggtcaaaaaaactcaagactcaacctatgaggtgatctcatctaaataagaatcgcaaggttcatgaagtgaggtattttattatttccataaatattcaacatcttacaacaaagatcttatagctgctcgaaatacacaaaagtgatgaatcacctcgctatataaaacagtgatgaatcacctcgttgtacacaacagtgatgaatcacctcgtaatacacatcaatgatgaatcacctcgttatacacagcagtgatgaatcacctcgttatacacaacagtgatgaatcacatcgtaatatacatcagtgatgaatcacctcgtaatacacagcagtgatgaatcaactcgttatacacatcagtgatgaatcacctcgttatacacatcagcaatgaatcaactcataatacataacagtaatgaatcacctcgttatacacaacagtgatgaatcacctcgttattcacaccaatgatgaatcacctcgtaatacatagcagtaatgaatcacctcgttatgcgcagtagtgatgaatcacctcgttatacacagtagtgatgaatcacctcattatacacagtagtgataaatcacctcataacatacattagtgatgaatcacctcataatatacatgcatcaatgtattgcctcgtattacaaagtagtagtgcacctgctctcaaataacatgatttgaccaagtcaaataccacttcaaagatcacttttttatattttaaatatgaagaagttatttatac

SEQ ID NO: 94237 - DNA, 849 bp, Cannabis sativa
ttataccaacattaatcaggattccattcttgaacatcagagaacacattctcatccatgattcccaaatcaagaacaccagtagccccaactgcagcagcccactttgcaaagttgtgagccataaagttgtagattctgtcaattttcctgatcttgaaatcatctagtagcctgaccgtgtttctgaaccggtttattgcaccttcaatgccaataaattggttcgtgttgcaagtgatcgagcaatttgcaaccacaacttcgttgtcacattggaaagccactttccccttcagatgctcccttgcgtactcagttgcattggccaaaatggtcgcttctgctaacagagggttcgtagcagaaagtctctccgcgaagattgtcacaactctgtcctgctcatctctgaaaacaaccgctccaaaagattggtttggctgaattgacacatcagtgcagcaattccaccatcctgcttcggacgtgcgcagatgacctctcttctcgttattcggtttccatctggataagtgatcattgtatgaccgatgcactgaattgacgatctccgttatagggcggagtctcgtaccatgtattactccatttcgagcctcccagattgctttaaaaatacagagggcccctgtcatgaattcatcaaaagacaaaaggcttggtctatgattattatcctggaaccaagtcatccattctgtccaggagctacgaattaagaaattagttctcattccccacatacttccaaaccatattgcctttgcaaagtagcaatcccaaaacaaatgtaatgttgattcctctccttcctcacaaatggga

SEQ ID NO: 94238 - DNA, 687 bp, Cannabis sativa
  modified_base (418)..(419): a, c, t, g, unknown or other
gaattacaaggctcctaatcacatcaatcaacaacatgcaagtgacacgctaaatcacaatcggggacttaagttttaaaccaaaacctatctattgcaacttagcatggaaataccctaaactagcatggaattaaccaaccaaagctctgaaactaacacgaatcgacaacacgaatttttcagggaacccagcagcaaatctgggtaaccgattttacaagtcctgtaaaattggttaaccagtttacaccagataacccaaaaaaactccaaaacctaaccaaatcgattcaaatccatactaaaccttccaaacctacatattataccccaatagacatattccaagcaataaaatagctaccctagctcagaatcaaaaatcaccattaaagagccaagcttgagttctaannctcaaagcttgctcaaacctaataacagcccacaaaacaagcttaattcaacatatctaaacatatttgaacttcaaaaatacaattcaaacatcaacatcaacaacagtagctcaattcacaaattcatgcaaaatccataacttgaaacttaagaaaactagagagggagtttcttagagacttaccttcacttagattatcttagaactgttggaaatcataggaattgatgaacaaaatcaaaaccctagctggtctagggggt

SEQ ID NO: 94239 - DNA, 696 bp, Cannabis sativa
gctagcaaaaatctgtcttttgcaaggcgtgctcaactcattcattcagttttgttaggtatcaggaacttctggatgagtttgtttatccttcctcaaaaggttactgcacctatttataagagttatcgcgactttctttgtgggatgaaaggaaatagaagtaaactgcatctgtcttcctgggagaaggtctgcttacctaagaatcgaggtggccttggctttcgaaaaggaagaaaatggaacgaggcgttgatagctaaattcttatgggcagtttctagcaaacaagataatctttgggttagatggattcatgccatctatatcaaagacaacaatctctggactatgcctatcaaaaatgacatgagctggtactttaaaaaactgttgagactcagatatagaactaacgagcaaagcctccaacaagcagtaaaaaaaggtaagtttcgggccaaactgttttatacaaacctttgacagttcctagagttgattatgcaaggaatgtttggcatagattgattatgcccaagcatagattcatctactggcaggtttgtaataatcatctcttaactagagataacttgagaaaattgatgaatattgattcgggtctttgtccagtttgtgaaaatgagattgagacacataaccatctgtttgtggactgcctttacacaa

SEQ ID NO: 94240 - DNA, 897 bp, Cannabis sativa
ttttttaaaataatataaaataatctttagtttaattttcctcaaaatttaataataaattaacctaaagatgatattagaccatttatatatctagaaactagctttaaatagttttattaaaaaaaaaaattgagctcaattactattttgtattattttgaaaagataaatgataaaaagtatttagtgcttattattttttaaatatcatattattattaaggcaattaaatatcgagtaacatataatttaatgtaataatttttaataaaaaaatactaattaataataagacgctattttaaaaaaatatatattaaacattgttggtacccgataaaatatttttttataaagttgtgatcaataatttttacaaataactttgaaaaaaacataaaatttaaaataatatttacctatcaatataaatgaatattttgttaattaatcttattaaataaataaaaaaaaatattattgattgagacaggcttactcagcattggggtcagaaaatgatccaatagtggagagggtagcaaagaagctgaacaaaagcccagcccaagtacttgcgaaatgggcccttcaaagaggaacaagtgtaataatcccaaactcagatacaaacacaatcaaagaaaacattcaactctttggctgggaaatccctaaccaagactttcaagctctttctactctatctcatcaggtaattaattcattcattcattcaacattttcattatataattactattattactttcaaaattatatatgtatagaaaaattataaaaattgccattagtttttgtaatttttataaaattttgccataatgttattagcattgatatttaccataatggtatttagaaaaacagct

SEQ ID NO: 94241 - DNA, 730 bp, Cannabis sativa
ctgagcctgtacggctgggctgacttgctcggcattatggtcaatttggattacgtcaacatctttctgagcggggatttgagtacgggctccggggtacacaattgtggtaacattctgatcgtctgctcccctacttctgtttagatcattccttaggtcatgggttgtccctaatctttcgaacacagatgcgcttggctgccttagtggttgattcgcttggttgacgggtggaatggcaccattgatctggttggaaccatcaggtatgactcctcctgaagaattaccagacaaggtctgctcgcctaccgcccacgagtggaactcgtgacaggcaattgggcggctgaccatttgcattctaggaagtattcatcgtttgatcctcatcctctctcccaagggaatgacatttggcgattgccgacctacagtttagtaggctctttgtatcagcacggtagcttgccgactacaaacttcgatctgtacatggtgagcccttaatgcctccatctctctatctctcaattcggtgaacatatgtctttgttcgtcaaacgcaagatttactgtagtgcgtagttcgtcttgatcatgatgaagggtattattatgaccttgtatgagtccgatcgcgtcacggagattttgtaattcagtggcatctccgatagtcatctgggcgttggttctaggagaaacagttgtgttatgaatgccc

SEQ ID NO: 94242 - DNA, 790 bp, Cannabis sativa
aaattcttgtgtctttatttgctttactatatttcattcgtattaaactactcgtcgcttacaaaattagactcactgttgttggctaaaagcgaggtcaacaataataaaaaaactaagacagaataactcaaaaccagttgtaattaaagtagaaccggttctataacataataaataaatacaaaaacacaagataactcaaatagtttaagtaaaatagaattgattctataacagtgttataatgaataaaaacaaataatacagaataactcaaactagttataatcaaaatagaaccggttctataacagtgttataatgaataaaaataaattacacaaaataactcaaacatgtcataactaaaatagaaccggttctataacataatgaataaaaaaaataacacataataactcaaaccagttataattaagacaataaagaggaactcagttcctaaaacactaaaatataaattaaaaaaaaactagttccacaacaaaatgagtaacaacgaataacacataatacctcataaaaccggttctaatttttttttaaaaaaaaacatggggatcaattccaaaaatattgaggcataaatataaacagaattagtttcataacagaataaataaaaacaaataataacacacaatagctcaaaacataatataaagaacttggttatatttatcaactagttaaagttttaaaataaaaaaattggttctgtaaattaaaatttagttattaggcattgtgtattttttattatgtt

SEQ ID NO: 94243 - DNA, 876 bp, Cannabis sativa
aattattaatgacaaataaaatgccacaaaaaaaatcattaataataaactttttcttttctccttttcgtctctcaatcttcccttctagcttttgttattctggtgtatttgtctctcctatacatatgaattctataaatagttttgaaaattaaagttattatgcaagaaattctcattgatctctcctctaagtctcttcaaaactgagcctttgagacaaacatttatcattcatttttttactggtaatttttttatttcatctatttttattcatgtatattttttttagttttgtatgtaaacctcatttttctattgtattttgtatttatatgtatgtataaatatatatatagactcttttcacctaatttggtataatacctttttaaaaatttaattttatttagtggatgattttgtggcattatgttttattgaaaatttaattttatttagtggatgatttacatgtatgaatagcttggattatcttgaaatttattaggtaagaatttaatttttctgctattttcatacgtatgtaataaactttctttgtatatttagccatgaataataagaatacataatatttttttgtttatttggattttactattaatatatatagatggatatatatatataaataatttaaagtggatactttgtttgtggcttttaaaattggtatttatatatataattttatttattatttgtaatttttgagccatttatttcattacatttgtagctgatgttgagataagtttttaattgttagttcttcattttttttaaaacaattttatgacatccaagactaaatttattttctgattaatctattatttattttta

SEQ ID NO: 94244 - DNA, 523 bp, Cannabis sativa
accaacaacctgtagaaattgcaaaggaattgggcatgatactaatgactctcgtaggaaagacagcaaaaaacaagaatgggtggtcaaaatgataaaacaaaaaaccagaggagaaaccagaccctgctcctggagaattccaacctgttaccaaagggtggagggttaaagccaaagatccattaacttgtcctaccaccactaactcctttcaagctttagctactattccaacatgagagaatcaaattaaagtagtaatttaagaggatcttatacaggacaaggaattggagattacaggagggggagaacctctactctccaatagataagctcaaaagttggaatgttcgagggatcgatagccagtaaaaacaaaacacgatcaagcaatttattgctagttagaaagtctgtcttgttggtctcattaagactaggttaaggctccaaaactcaaagttttatatatgaacatgttcttgaggtggtgttttaccttaaatttggcatggca

SEQ ID NO: 94245 - DNA, 523 bp, Cannabis sativa
aagggttgtgtcatgtagacatcttccttcaaatcaccatttaaaaaagcattattaatatccaactgttgaatgcactagcctcttgttaaggctagggataaaacaatccttattgtcactggtttgacaacaggacagaaagtctcaatgaaatcaaagcctagttgctaatagaatcaccttgcaactaatcaagctttgagcttattgatcgtaccatcaggattgagtttaatcttgtaaacccacttacacccaattggggttcttccatctagttggggaacatatgtctaggcgacatttctttttaatgctccaatatcatcagtcattgcatttaaccatttttcttgttgcatagccattttaacacatgttggttcttgaaaagccagataaacctttggtttgtaaattctagatttggctcttattttcattgaatgcttgtttgttataggacaatgaggttgagctaatgattgagtcacatgcattggttgagtggttgtaggga

SEQ ID NO: 94246 - DNA, 705 bp, Cannabis sativa
gagtcacattttatatgtttagaacattatcggggtatcattgttagatattaaaggcgttagaatttttggggtttggtaattgaccaatttacccttgggaggttctagttattttaattagatggaggggcaagaaggtcttttggcaaagacttcttttgtcttatttgggttatattaggctgaatataagttaacaattttaaaaagaaatgatatattgcttaggttagaaggaatagaaagaaattagagaaaggtgttcatccctctcttcattctttctctctgtctttcgattctcttggggagcagctagggttgtgttgtttgttcttgattcaaggataattagtaggaatcctcaagctttgatccaaggtaactcttctttcttaattttcttagcttaagttaggttttatatgtgaatttgggttttatgttgctgtatgaactatgatggtttgatttggtattctggagattatttgatgttgtttaagctaatatgaactgaaattatgggttgaattgaggtttgggcaaagtttgagtttaagagctcaaacctatggtggattgagattttgtgtgaattgttgagttctatggctttaaattggtttattatagtgtatacaggtatactggagagttttgtaaagtttgggcttgttttggaattaggggagcattttt

SEQ ID NO: 94247 - DNA, 773 bp, Cannabis sativa
  modified_base (594)..(595): a, c, t, g, unknown or other
cttttcgaggcaatatggtttctcgttaatatatgaattgatagttagtgtatccttgtcttgcctaagactgcacagtcaatgagttatgaatatactcaattaatttcatatttaatgaattattctattttgcatttaatgatataatcgttattatatctattagttcacattccacgagattgacacgtgtcactttctaaagtacagccgaattttgggtataacaattgcccttaaaaaatcctttttaaaaaaaagtgttttttcaatgattagaaagggtattttggtcttatcccaatttgaaaaattgcatgcttttgaatttggcagtttatggttttgaagtacatcattagcattaatgagccatcgaatctacttctccccaattcctatttgttggatctatgtcctttaatcttacagtaatcaagctcaaagtataaaacaaaaaaggaaccattttccaccattttcgccttttcaaaaaatttcaagcttttctgcgaaaaacccccttcgaattctcacaaccttccatgcccaccttgtcattggcacacttgttggaatatgttttaccannatctagatttactactatgtatgttatttaacatcctatatatgaatttctaaaacaatgtaaataaacacttataaagtttgagaaaccttacattgggtgcagcagaattataatggcttctcccgctcagatctctaatccttatatcctgtctgtagtagagtatcaccaagat

SEQ ID NO: 94248 - DNA, 657 bp, Cannabis sativa
cgatttttgtaattcagttaccaaatcttattagtatacataatttacagtaataagaatttggttgggcagattaattaatgtcccatcatcacaattttgcatttattttggataattaaattattattattattataattagagaaatgttaaatggtctggtaccattttatgtgttaatatcgttattagttcaattaagtatcagatctcatataatttaatataacaacttttacaaaatatcgctagtcaatcaagatgacatgtttaaaggtgctaaacactatttatgcccaataacaatgttcttattatttttattgctattgttggcagttttgggaaaccatgactatcgtgggaatgcattagcacaattaagccctgttctcaagaaaaaagatagaaggtggctttgcttaaggtctttcattgtacaagcaggtacatattttttttgtttatttttttttatgaattcataacaaaaactaacaaagcatgaaaaatctaaaattacaagtagcctcaaattattattattattttgttgtggcagaaattgtggatattttctttgtggacaccaccccatttgtagacaagtatttcactaacccaggagaccaaacatatgactggagaggagtc

SEQ ID NO: 94249 - DNA, 681 bp, Cannabis sativa
agggatcttctccaatgaatgtacgtatcagcttatccatcaagtggaaccgagttgtcgggattcatattttacgatattctgaacttaatgtgtattttatttaaataatgtaatgccatattttgtaatattttaaaggaatcctcgatcttgaaagaataatgttaagaatttttatgtttcaaattagttagcaagattttaattaaatcacaattttacttaaattgttagtttattattataagctaatttataaaaagtacacatgcagcgtccctaagagtcatatcagtatcattcttatataattgaatgtaataacttttatagaatatcaataaggagttctaaatcaatacctttaaatgatgcctagtagcaataccaaaagtgaaaaatattttgattatattttaattttttttagtcattttaataacttaactattcttattattattcaacaaatttcatcatcaatttaatttaaaaacgtgttttacatttataaaaaatcttacatactgaaatgtttgtattgtcattattaaccaaacatttaattaaaatttatgcaaaagaaaacatttatttaaaatttatgcaaaagaaaacatttatttaaaatttattgtgtggacatatgtaatcccctgcagccaactattaaataat

SEQ ID NO: 94250 - DNA, 626 bp, Cannabis sativa
ttgatgaggtacttgcatttagtgtggaggctttgtctttctgatttgagaaagtgaaacaaacaaaaataaatagtaattcgtaaaatataatatagaccgtgactaagcaagaaaatagtaaaataagaaggatgtgaagaggaatcttgttatatataaaatttaatcataatcatagcgtcagtttagtttacatatacatatgtagggatatgattttgtcccgttattatattttcacggattgtaattcgtgatgtacggcagccgtcaaatgagagaattatttgatctgacggctaagattgatctagagataattatggttaaaaagtaaaaacgtactcggacacttatttaatgtaccctgagactcatctaatgtaccacaaaatacatttcatgaaagtacatcacgggacaaaattatatctcatatgtaatatataaacatatattctgtttcaaacaaaaatatttatatatatatataaacatatatttgtatattaaaaggaaaaggaaatttaagaaagggacagtttccttgattttatgagttgagttgcatgagactccaccaaatgttgtgtatgactcgttatgaaaatgaccatattgta

SEQ ID NO: 94251 - DNA, 817 bp, Cannabis sativa
atattatgttgatgtggaaaagagcttatatatatgtgatattgttttagggttttctatataacttaaacgacctgtagcataaagaaaaggggctgtctttttggtttgtatactgggagtcaaaaagggaaagtttgactgggtaaaggtctaatttgaccttggtattttgattaaattctttgctgtgtgtaggtaaattgggaataaaaattcgtacagatgaaaaatatgattttatgtctacaaaattaattgacttgtacatgatttctaatatgatagaattcaaatgtgtaccgatttttgacttgctagaatgtattttttttaatgaaattcacacaaatgctagataaagttagtaaaatcaagtgtaataaatatttttgccatttattaacatttattttatttatagagatatgtttcataatctttggtgctataatgtagagaaattcttattaattacacattttctattatcaaattaaacttgcatgtatttataggtgacatcattttataaattaatatagtaaaaattttaaatatgtgtctaaatcaagtttttaaagaattaaacttggaacataaaggtcaatgataattttaaaataaaacaactattattatattgcttgttgcttaaatttctaaatatgaaaactcattatggcagtagataaaatttgctcagagttactaaaattctggttaattgtaaatgtattgggttgattaatgaagattcttattttgattaaaaaaaaacagaaaaaataatttattaatattcaataaataattt

SEQ ID NO: 94252 - DNA, 1038 bp, Cannabis sativa
  modified_base (707)..(712): a, c, t, g, unknown or other
caactaactggtttgcaagactctaaaattgacttgtatgctcaaccatactaccaccaccattgtactttaaatttacaagtcttctaagtatagaaattttattgctagtcgttctcttcgcaaaaagattttctagcttttccaaacgacatcagctcttgtttcattatagatatgctcatgaaaagttatattcatcaatcgtctaatataggcaatgaattttctatattgaactttccattcttcatcttctaacttagacagcttctcattaccttaagtacgtttgtacaaatttttacaatagagcaaatcttccatcaattgcttccaagcagaataatttgataagttcaatttcattatttcattcgattcatccacttttcaatacacaataattcaacaccaatcaaccttggctctgataccacttgttgggaaaatctattgcaattaatcacaatattttctctctttgtatgtcaaaataggatacttatcaaacaccacaataaataatatcaaatatcagtcaaagcaccacaagcaatataaaatacacaaatcaagcataaaagtgagacaccaagatttttagtggaaatccaatgcgagaaaaccacgggaccgtagtccgctcaaatcatccactatcaccaaagtttaataatgggattacaaagttcttctctagtaannnnnnaggctcacaacaacatcaagattaaacaatcttgaatcactaatacaatcatcatcatcatctcaaaaagatagctacacaaataaaaagtttgtctcaccaagtgggtattgtagaagagcaccttagagaggacaatcgccaaatcggaattggtagatttgaagagcaccttgcaagaattcactgcctaaaatataagctaaaatagatgagaatcaaccacttgatcttcaatacaaagtgacaaaacatctttctctctctagctttctttgtcttctttctctctctttcaacccacgatacaccatcaactttttttt

SEQ ID NO: 94253 - DNA, 866 bp, Cannabis sativa
gggtaatttagtcttttggcaaagaatggaataggtgactgccccattagttgacacctagcaccctcattaatttcagcaagggattagtttagtaattcccttttcttttgaaaacaaatttagaaaatttgtagagaaatcaagtagaactttctctctctctctttttgttttctctttcggctggggcttattcaaggggaggagctgctgatttttagtgttttgagcaaagaaatttgggagattcaagctaaggtaagctctaatggaaccctcctttagtttttaagcttttgcttggtttgaggttttggttttgtaatttagggggctgttaggtttgagaatgcttagggtttgaattgtatgtttaatttgagttgattttaagctttggatttcagtcttgagttgtagtgtgggaattaagtgaacttgagttttgaaactcaagtttaggtctttaatggcataatttgacttaggttatttctttgttttgttggttggaaaatgttgtaaatgcattgcgcacgtgttctggagagtttggttaagtttggttaggttttgagttcaagggggagatttttcgggttcccagcacagaaccgatcgactggttctgggggacgtgtaccaaccggttgaccggttagtgtcccagttttggacttccggttgggaccggtctgccggttggggggattttcggaaccctagtttttcccaattttgtgatatttagggtatggccatgttgtttattgatacggaaacttttagtttcaaatttaagtccccgaaaagtgatttagcgagtcactcatctgtgttacaattaatgtgattagggcatc

SEQ ID NO: 94254 - DNA, 995 bp, Cannabis sativa
  modified_base (834)..(846): a, c, t, g, unknown or other
aaagactgcttggccggtcatgatgtcttagaaaaggccctgaggccgaataagatacataaaaataaaaagataaaaggagaagtgtttaaacacgtggagtccaaggcttttggttcggttcttctgggccaattggagttggaggatctgttgtttgagcaagaggtacatcagtagtctgaccggaggttgaagcagccgcctcagttttgccataggccacttgggatgcgcagaactcaagccacatgccttagcatcacccaagtagtcaaagttggcctgaggattagccttccaaaagtcaaagaagagctcaagaccggctatctccaaggcattgaccttctctttcaaccttgccacctcggccgaaagctcctccttcttggcttccttctcctccttcatccgatgaagaattgctcgaagagaagtcctctcatcttgaagacggttaacttcggcagataaggtctcgatggtctcctcaaaacggtcagctacctcgagatccttagtcaactgagttatcatcttctaggcaaaaaacaacttcttgttggcttcacccaactccaatcgaatagctccgacttccgccctggcgtttacagcctcctagaggccaatttgcagcgtcctgggcgaggccccgtgtccgagccttcagcgccttcagacaagaaatcgtctgaagatgcgggcgcgcattggcttgtccgaggggctgtctcgtgcgattgagcacccattcaacccgaaatttcaaatcttaataactttctcaatttttatcggaatcgagttccgtagaaaataaaattgctnnnnnnnnnnnnnggatccaaataaaatattttcagaaagaaaaaaaactattttcatggaaaaatttcgtaaaacacgtacattcatcatataatcccataaaccaacatgaaaccatccaaatcaacacaaaacaacgttttaattcatatttcatgaaa

SEQ ID NO: 94255 - DNA, 7840 bp, Cannabis sativa
  modified_base (2435)..(2444): a, c, t, g, unknown or other
taagattttgattctaagtatggactaatatgagatcttgaataggtgcatggttatttttttaaaaaaataatgtaaaacaattttaactattataatatataatttaatgaaagaaataatgttatactaaaataattaatgtttaatattttcattttaaaataaagcgttcatataataaataacgatagatcttacgattattacaaaatatcttcttagaaatggacgataacgtcacacgaccaaacaattaatgtttaatataagtcttaaaagaaatataacaataaattgaagaaaaaaaaaaagataaataaagatggttagaacattttaagaaaaatatgcaaaaatatcaaatgggaattaagtaggagagatgaaattaaggggttcctctctccttgaaagacttctttttcttgaaaatttaatgtttgagagactgctttttgagagcttgatttgattttgagtaagcaccaccttcacttttctctctagctatagcaccttaagaacttgatgaaaattggcatccaaagaaagtacctatatctgatgcgatcataataatgatcatgaaagaagataaagaagaaggacctaaatttaaatttaatctacaaatgaacaatagtaacaattacaaaaacaacaacagcaaggctaagaaacaaatctaaatgctttgcaaagatgaatgtactataatcgcagcatatgaagggatgtatagtcattccactttttatgataatattttgtaaaaaatatatatacacttttcacaactttgtttatctaaactgaaactacagaatgaagtactaatggcattaaagaatgaggaatcatctctctaaaaaaatttatggcctaagtattaataaataataatctaatttatttttttttttttccttctcatatataccccatcccacttaaaacaaatctatgaagtattaatgtaatcacattttttttttcaaatatatataatgaaatagtaattatattactgacatcaacaaacttacggaaaattagacttttaacaaacttaccattagaagttaggtttacatgatattgttttactactttatgtatttttttttttattctttttagaggtttaccatttctttttcggagggaaattaggctaacatggtaaggttttacatttttatttattttttttaattctttttagggggttaacatgagaattaaaatgtaaggttaacttaatataaaagaaaaaatgatcgttaaactaaaaattatcgataaataaacactttaaatatataaaaatatatgtttccatactcccatggtgaaatgatgaataaataatgatactatttcacacaatctagtgacaaagatatattccatgcagagagagaaaagaagtggcatggaaatatatggagcgtagaagtgctcatgcaaaattgtcaccatgttcaaatgtttgaactcaataagtactcaccaatgttttaccatgcaagaaaacagcatcattagtcaaataaacttgaaccctcaaagatatagcccagctcgatcaaaggggcaaggtatgatactctcaaaaggatataaaaatctttattgatatatatatatagcagaagtaccattgttgtaccaagttttcaagttatttggttaactgcacaagaggtttttggctcttttcacaactcaatacagttagcctcatacgatcgtacccctctaactagagactcctattaatagacagccaataagaaaactacaacttgctgattagggcatttaattaacaaaaagcattagatttttctcatcctttcttgatcctagagtatgttaagcttataggccgtctaacactaccgaacatcaagattgagaagaaattggagggcttcttctttcattctcacaaacagaacgtcatgtggaagacttcatgcatctttttaagtagctttgatggatgggaactagaaagccgagaagttggcggtgtttcctcctcctccttttccttctttttccgcctcaactgaaagaattgctgcatagcatctgcacactcagatgccagtataccccgtcgaatattcatatttgggtgaaatgggtgaacaggaggagttggcttatctgatgctcccaagttgttttctccatcaccaccggggaaaagcctgcaaaatgattgttgttttagatttcatgaataaaatctgggggatttcggaatttctttattatttaggtaacccaggtatgacttgtacaacaggcgcctatggcaggcgtaataccaggtcagagttacacagccaaatcaccctaactcaatgaaagatatattttccattctctctgcagtgacattattattattattattnnnnnnnnnnttattattattattattttgcaataactaacatttgtcctctaactaagaagtgaaagaaagaataaccaaatgaaaactggcataaaatgtgtagcacgttgataattatttctgattacaataagttttcctggaccaaccaacatagttatagttatatactacataaatgagaaagtatagtctaattagcatgtcaccaacgtgagacattgagaatgagatgattaatatcatagcaaaaattaagtcctcaaccggaagagagacaaggagacgaggactgacacattcaaccacaaggcaactagatcaggcactatttcatttacaatgtgcacatgctatgaaacgatagagttgtgattgctaacacaaacttggctcattcaaatcttaaatacaagaaacaatgtaattagatttgaacgactatattgaatactcagatttctttaattacttactttatccagctgccatcagcaccaagaagcttatttggagctccccatacaagagtgttaattctagcttgaagtattgctccagcgcacatgggacatggttctagtgttacgtatagggtagtgccctacatatagaaaaacagcactggacatgtaaacaagaagccatgataaagctatatagcctgtaactgacttgcacaataaaatttaaaatgtaacccagaagaagcatagcaatagcagtttggatcatgcaaatcctttttgaggacgaattcaagtaacagatatattttctcctttcaacttgcagatgaaatgatcttgaaacaaaaaagaaaagatgcaattgaaatgaaaagttccttgaacaaacagtaaaatcttgatgctcttatgaaagcatgaatgccaacattatgttaaagtgaaaggaaaccattttatgcttatgtgctgggtttcaatgcacggaagggtcaaacaaagagtacccaaatggtccagtaatttgctcccacaaacttggaggtttgaattcctactggagggaacatagtaattgtatagtttcctactcagatattgtagggttagggaaggagatagctatgtgccaagactgattccccatgatcatcctatattaggacagctgtaaatgatgaggttttgatcttgagtgcaatttaaatagtgcagggcaccatgtaatgccactcccttcatcttcaatgaaaaatatgcgataaatattctattaataaattcaaatcaatatagatttaatcagggaaattaccgcaagcctccatgatcgaagttggtttgacgcctctcgtatgcaaatcatttcagcatgggcagtggagtcccttaactcttccactctgaaatacatattttcatgtaaacattgataaggaataaagtgtaaccataaaacatatataaaatctcctaaaacttacaggttgtgaccacgagcaatgatcttcccatcttgcaccagtacagcaccaacaggcacctcccatgtatcagcagccttcttagcttctaaaagcgcttctctcataaacgtttcatcaatttttcgttgatcactttcaagtataaatgcttcttcccattcgtcaaatctatcctttggtacttgtttattccgctgaagctttcttcttttcagctctccaccacttccctcaactcctgatagttcagccgacttaactaactcttgttgctccacctgctcccccaaactgcttttggaactttcacctctagcagtagcttgtgaggaagattccactatttccatctcaggggaaacttgaaaactcttatcatcttcattccaacctagatttccatctacagataaagaaattccttttaatgttgacccccttttaatcgttttcggtgaagatgatgatggtgctacttcattaattcttatctgatctgtcaatcccaacatgtccgattcattttcttgacctggactggacaatctagttacttgcagccgatcagttgtgatttctggttgcaagcctttgtccctttcatgcttatctttactctgttcaggttcatgggtagaaaagtatgattcactaccagcagattcgtttgatgaagtctttcgacgagaccttgtagcagaactaggggtttcaggacgtgaaccccatctcagtaagactatatctcctataatattccacaaggacctgccacttctttttacatcggcgttttcagcagttgcacttgtctctccatcctcctttgggttcttgataaaagatgggtcggtaacatcccacatctcatctgatgggcccttggttcctgaactaccagattcttgctctttcatttggaagtcttgagagctataatgagttgagctcttttgacttttattatcatcttcagaggcaaatcttgtttcagaatcattcctcacattctgagttccagaaaccgaaacttcttgccttacctgctcaatgaactctccaacaaagtgagtggaggattgctgtaagcgatcagctgaacccagagaatcttcggggttggcgtgaagtagaggctccccatgactctcggtccttttgtttcttttatatgattcatggtgtaaagctaaaggttgttttctggaatcagcatgcaacaaactgggaccactttctgaagttatgctggaaaacttttgcctttgaacttcactggtcaggtcatcgtggtgcgagcttctagataacaactgagatgggggaggcattaacaatgtcagtgagcttctacgaaccccctcttctgcatcatcctttcgcattctagtcagagtatccaaatcaaacaattcttgagacgtagaagcctctgccaactccaatcttgttttggcgtgctggagcttttcattagtttggttgttcccttctcttgttttaccaaccaatgttattgtattactttcttgatgtgccttcctttcagaaattctatgagaatcaatgactctctctgttttactggcacgtgccatatctacgtcatttgcatcataagaccctctacctgattgagcttgttgagtacatttttgacttggacaccgctccatagatcctggatgcgaattgtaaaccaagtttatgttttccacctgatttgaaatactagattcagactgcttgattgaagttttctcaatattactattataaacttctgatatatcagaggctagttgggattttcctcttccattagcttgttgacttgtttgacgatacggttgctcccttgctcgaagtgaacttaaaacatttgttctattcttttcaacacctatgcaaatttcagaacggctctgctggacagaggtcacttcagaattataatcttgaacttctgaacttttaccaaattgctgagttttcctcaaatcatctttttcagctgattggacaactgttttttgccgctcatcttttgcttctcctacaaaattcaaatctatatctacatttccctccatgctacttggtctcctccgagactgtgaagttgttttgacatcatctctgcagatttctgaaatttctttctgtgataatttccttctagatgtagacacttcagctgtttggttcccaccttgagcataatgtcttcgtgaatccctgcccaaattcactgccaaagttgaaatctcctcatcattgaattgcttatatgaactggaggcattttcatgaagaccttcatagtttctcgatcttctattatgcctttctgaggattccccgctatgttgtgtgtcttgacccaatctatcactaggcttctccaatttcttcctccaatcccagtcaacaccacctgatattgacaaattcttctgttttgatgtttctccatggacatctatatcatctacacgcctcctatatctctcttccacctggccattgaatcttccttcacctttcacttccaagtcctcattgccagataaagaatcctctgctaagagagtatgcttatcatgaacttcagtctcatcatcaaaatcccctgaagatgaaaacgaataataagatgaacaactagaagcttcttttcttaacctactagtgttgcctctcaaactagctccattttcattcttcctcctcaactcttcttcccgcaactcagttgtgactgattcaagaccatgattcttattaccttccaatgatctctgcccaccatttttcttcttctcgcaactacaaatgctaccatcatttcctttctttttcagttgtaacctgtcagataatcttaaattactctctctaccactaaaacctttacccttagcttcaactgtcttataggacctccaatttctcctcctaccaccaacataatcctcatcaacttcctcacacagcaagctgagcaatgcctcggcctcatcgagacagctcaaatcataagcctcactatctccattctgcaccatgcaacaacatcttcccctatttctcctactggtgtaattataaacactcctcgccttgacagagcaagaactgacataacaccccctgtcaagattataaggaggataatagcaacaatatcgttgtccaccacccaagaccaacttcctataagctgatcgttggagtagcgaagattgccgcagcccatataaacagcttaaatttatgggaactttctgcgtcgaaaatgcacagcatgaacaacattgggaacatgatgatgctgatgaaacattatgaattgggtttctatcaattctttcattaagtaagttggagtagtcattgaaggaaaacgaaagagaccctttagttctaagaccatatacagttgagctgatataactgtggtgcataattatttgtctgtaacgagattaactgagaaaatcagtgaccctttagtttgaagggagacgaaagctcaaaatcatcaatcccatggcagccttcaagaatcaaatcctccaaatgttgcagttgcaggatatgtggaaggcattttccagtaatctgcagtacaaaaccgtaggtagatattactatatgagcattgaaaagaatactggacataaatatatataaatacaatcaagtatagaacagaatatataatctcataggatgtcaattctctgaatcatcaacatcaagtatagaacagaatatataatcttatacgatgtcaattctctgaatcaataatctctcttcctataaggcctcaggtaatgctaaatcattttgtactggggtatgttttcatcgtataattatatttttggtagaccacattcaatatataacgactaaactacgcaaataatttcgccctt

SEQ ID NO: 94256 - DNA, 505 bp, Cannabis sativa
  modified_base (310)..(310): a, c, t, g, unknown or other
tttgataaatatcaaaatttagagatactatttaatacatgaacaattgtcacgctaataaaattgaacaaaattggacaaaaattctttgttccaacaatctaaatagtttggtggtaatttttaacagcttaaaaagttccaaaagtatgatttaatacatatcaaaatttggagataaaaattctaattagcctattgtaaaatatcattaattatttataaggcaccacctcttcctactactattgcccaacaacaatacctttgtggttcgtttagtacattttttttttttttatttaagcgnttatatattacaacatgttttacccgggactcgaacccaggacctccaacatgtttagtacataatattatattgtatattatattaaattaaattatattacatcatatttttatatagtattatatattttaatataaataaaattccatgaagtatttacaaaaatattatttatatcatacaacttcatat

SEQ ID NO: 94257 - DNA, 889 bp, Cannabis sativa
acagtagtagaatataaaactcgaaacaaaagatgtgcaacactatttggaacgattttttagtattatactttgtagaatataaaatttcattaaaaatttaatatttaattaatgtacatccaagtgaaatgcgggatctggctttcaaacttgtatagattggattgagggttagttagatacaattatcttatataataataaaataataataatcaaatgaaaatttatgagtaaatcgtgtaatgatagtcctatatataagttatctgcttaactattttggtaataaaatttaattagttagaatagttatgttttttcctttcttttccttttttttttttttggtcttgtgtttctttctctgttttttttcatgactttgaataaataaaaaagaaaaaattaccccatatattattcttgtaatagcaacaaataaagtgaagaattaaagggaaaaaagatactagtcaaatcttgaaataatctttatgttatattgaaaaactttcttatgaagctgaaataaataattttttataacatgtgaaacattttttgttttttttttgaggaaaacatgtgaaacattttataattaattgatttggaaatgtgagaaaataattcattagttaattaaaagtggtaattatttagaatttttaatggattcttttgaactattttcatgatcaatattcgtattttctttttccttcctcgattatgcttatgtcatatgcagggtcgaccctgaaatttagtggactataaaataaaattattttgggcccttatttagaaaaaaatgtggtatttttcaaaatcagtaaaaaattgtataatttttaaaggaaattttttttgggcccctggg

SEQ ID NO: 94258 - DNA, 607 bp, Cannabis sativa
  modified_base (154)..(164): a, c, t, g, unknown or other
ggcgaaaaaacttttgaatatagcaaacttttgtaaatgtattttataacgggatcctggaattttacaaatatagtactttatgttttgaattaaataagcaaattttaattaatcacgtttttcgttaatctcattgattagcaacgagctnnnnnnnnnnntaaaaatcacgctaacatgcctagatagttagggtgttacaacaagcttcttatcagccttcttcctcatttcccaatctgttgcgctttgagcctgggcaatcatgtcttcctactcctttctcctccgatatgccttatactttgactcagcctcctggattatctcgagctggagcttgtttttatcttctttctcttgagcatttgaatagttaatcttggacatattggtgtccctgatcgactgttgaccttaaagaagtttggccctttgttaattgcttgtagtcaacatatttcccacgttaagctcttctttgctgagggttgcaaaaactacatcatggttgaggaaaatttatgagggggtcatccatagcaatggaggaatttgggaccacttagtcaataggtccaaatgctcaaaagctctaaaacca

SEQ ID NO: 94259 - DNA, 7921 bp, Cannabis sativa
gcctgtttatatgaagatagaaccttttgtaacttcttatttgtaggattataaggttgcacaagctaaagttatccctaataccaatagtacccttcaagataattactcaaatctaatggattctagatcattgttgcctccaccagggaagtacaaattaagtgtagatgttgcagtcaagagccaaattaataggcatggttatagggctgtaattcaagattcccaagatagaatcatagcaggactctactcttcaacaatttcaggtcttccaccaatctttgcaaaaacagaagctcttcttagagctttaaattggtgtcagacagttcattttcccatcgacatagtggtttcagattgtcaaactttagtctcaagaattctaagaaattagaaggaccaatcaaccttgtctaatgttgtgtggaaaatcatctccattttgtcctactttcctagtgcaaccatccgattcactctgagaagcaccaactgatagagtgtatttgaaacaatagcattttaaattattcttagatctttgtaacttgtactttattattcatctttagttacaaatcttgttgtcttaaaaaaaaaattgccatgtgtttccaaaatatcttcatcataggtaaagtttatctagaagaagactactttgatgggaatgttcataaaatttgttaaaagagaattactcttctttgagattattggtaaaccatatcaattaattaaaaactaacctagtaactttgtactgagattaatataaacatttatcaagagtttcaatttccagatattataggacaaacacaactcttacccacctttaagaatgcttccaggaaacaagaggtcttgatcttcaacttaaaataaacaaataaaaatccactgctgaagtaaacaaacgagatagttacactttttaaaaataattattttttcacaggattcgaaatttttagaattatacacgaggtcttagccagagtcatggtagatcttttttccttttctttaatattggaaaaaggaaacagaataatacagtccctgaaggcgcgaacatattttgagtaacatgttttggcggcatatcttacaatggaatattaaatccatgagcactgttacagaaagttgtatatacagaaattcaaatggaatcgatttaagcatcaactgagacacttacggcattcaattctacgtgctgtttgccgtcattctgagggtgcagaacaatagttgcacgggcctcagctcgagaagagaattgattgttgcctccattctgagaaactgttatagagctcactaaaggctttttagtagccacatcatcttgaccatctgtgtcctctgagatgatctcccactcttctttcagcgatgtcacttgcaagcccttttctttgtgactttccacttcgaaagcagttggtagaatcacataatcatttagagggttgtagaaaggatcgtgatctgccttcagccagtgctttaaaatccgaaatacgtgatggtcacagaggattcctcgatgctcgccaggaatgccaattctagcttctgcattaagcccatcagcctgggaaaagaaaaaaagctcccttcagaataccgaaacatacatttccccattcgctgagtgtagttttacccaagcacacatacctagctgctaagttaagtcacatggagttttaactataaaaaaaaatggagtaaataacataatatttacaaataataccttttagcactctatcacaagtatattaaatgtatcaaaaaaggagagatttgtgtatgtgtatattctgtctcatattgctcttgtgagtgtgattcttggaatttatattacctactaaaccttaaactcataacagagttttattaattgggtaaatgctgttaaatctatcaaaaaaaaaaaaaaaaaactatcacaagtaaatttggccaaagaaactataatattatttcctacaaagcaaggccaatagccaatatagccaaattgcttaaaagttgcaatgtcaagtccaaatagactatgaagagacaatttttgaacgtagtaaagatgaaatgtctagtttgtaaagaagtaatctaaacatttctaatcaaaattaataatggtaaaaataattagcaaaccttcgccgattccactggtaccgtcccatcaccatcaacgcaaatgtacgttggctgatgcattcaaacataagaaagcaattatgattcatccaaagcaaataagtttatatcataatacatattttattataaagaaattttaaataatttgatgagggtgacctcaagaggtgctttccgtacaacaatatataaatgataatgcactaatctattagcccaagaaagtacaaataaagtcagcatgtgagagatagttacctggaaatatcttagttcttgaagatcttttacaggtgtttgcccattaccatagctgcattgtaaagttcagaaatgagatacagcaaactgtgtaataacatcttctaaaaagatacagaagtgctatgaagatctaggtaaaataaaacacctacaaagatatagaagttctatgaagctatatcatcaaataaatcaagcattaaaagaactttacaatagcagaagtaatcatgcaattcaacagaatttacagagtatattaccacacactgtgaggtgtatccagactggtcccatatatgttgaagaatttgacttgagatggaactttggcacgagaaaggatctttcgtgtttcattagcccatttcaagatctccaagttgaatggcaagggaataatttcaccttcgtgattgacctacaattattaaatgcacgtttttatgaaattattagcataagttatttgcaaacaacatccaaaaaaatctaggccaatgttatgtctgaccctacatactaaaacacctatttatcaatcaatactggagagcttggtctaaactgtatacagaaagaaactagaagaatcaatactggagagcttggtctaaactgtatacagaaagaaactagaaggatgaatgataacagaaattacaacaagaaaacttttcttccaatgtcttgatgtacacacttaaaaagaaatattataagccttacacttttcaaacccaatgtcgccaaaagaatgtagacaccaaagttcaaaaactacagttaaaatgaaactttgtaataaaaaaattgataactcaccgtgttacttgtaagagctttctcaaaaatttctacactctctatcggggaataagactccaagactacatgagagttcccatcaacaagcttctctcgccagacttctaacaaaggaatgtgttcccaatcaaaatcaagacacgccatcaattcgtaaacggatggacattcaatcaactgaaacattgtaacatactaataaatgatcatgaagagatctcagtgatcaaaattacattagaggtaaacaaagaggcaaacagtcattaacttcattaatttatgcagtatatatttatatatatcacaactaaagtgctgtgaaagtacaggaaaagagggaaatgtactaattaaaaaaaaaaagtcttgtcactgcccacatcctccacaattttagcttaagataaaaacagaagaaaaaaataaaatattcatattaatttgcaaagtatatatcatatccttgcaataatttcttgtgtgactcaagggtttccagtcatatatacatcattagacaaaaattgaaaataaatcatagtaacttaagtgaagaaagccactttcttttattctctttattctttagaaaaaattatgcaagtcatattttaatctgaacaatgaaaattttatttcaaccaaaagacgttttaaaattaatgaactggaattcagaaatatacttcgcttgagaaatcgctttttacttttctcttgcaaactctcaagtggtagatacattttacttactaaaccaagttatgcatgcaacaacaactgacgatattaagttattataaccaaagattgaaaaatctttagaagcgacaagtaggaaattacaaatgacaaattacaagtagaaggctggaaataacaattaaatattcactcataaaactgcaaaatgcagtagattcctaccagctggtgcatgctccattttgatataaaaaaattctgttcccatccttcaacaaatgacattccattgagaaaggtagaggcaacatacccaggtgcacctgtttcacaatatagaaaatagaataatggagctgccttctgattaccaggcctaatcttatgtaatttatttgtcactgcctaactgacagttttatgtgctgtccctcacaatatgataattaggaaaaaaaaaagtgtaagggttcgtctcactggaaatgtaggacagcattgttctgctagtaattaccttggaatggtgcagctatcgcaatccaattctttacatacttttcaaaaacctgcacaatgagcataaagtgtatgatttagtactttcccaccttcagtaatggaaatgtacaaaactaaagtctaattcaaaaaaacttgaaatggtaaaccattagtggaagaaaaagaaaatttaagaaacggagaaggacaattacatcagcatgcaggctcatgaaacatttcacaagaagaccccccattgaatggcttatgacattaatcttttttcctccagaagcattatatattgactctagttttgcgctgaaacgatccaatgtctcctgcaatctacgcaagacagataaaatgtatcagggaacgtaaattcatccaacagctaacatacagcagatatgagttcgccaagaagacattcatacaaagtgctaaaagctgtgctgttaaaaggccattagttattcacttcacctaacttctaaaccatctaataaccaaatgcatatttaaggtctaaaacaagagagaaacaggttaaaattttatttttccttttgatgggagtatcaatctagagaacaagacacaaagactcctccatagtccatactgttgcctgccatgatcctgaagtattttatttccataattttggaatcacaaatgttttcaatgcagtaaactcactacaaaaaacacagaccaaaacctcattacaaattacaaataaccagcccttaaaacagcaaaatatgtctttctttttatttttttaatatacgaagatataccttgctccttttaaaaggattgctgtgatgctgtttttgttagggggagatcaaaggacctttatgttatttgtattacacttcatagtttcatagttaaataaaggatacctattgctttggcgaaaatcataaccgaatccaaaaagtgttttcccttcttggaaaccccagtttatcatttcaacaatcatatcatggaaataatagacgcactcacgtccaataatctgcaaaaaaaaaaagtagatgaaaattgatgagcaactcatcttactatttatctacaaattgctagacaaaagacaagataatccattatctctattgtatttacaagagttttgtaaattaatttaacaaataatcatttgttgttctactgaaggggcatttttgtatcctttctgattgattggcatttcaatatcctttgtcctgaaagagttaagtgcattttcacttcataaataagtccattcccagaaaaatagaacattaaatttagtacttctttttaattttattttcccttttttacagtttcatagtttggggattgccgacagtcaatcatttatttgtcatcatatagcacagctttctgaaacttccattttatcaaaaactttgttttcatcagaaaaaacaaagtacaaatatacatacagtaggctttactacaaaagagagatccaataacttgatttaaggctttatcctatcctatatctagcatagccttctacgctaatataatataattatgaattttctatgcctctataaccaaaggaaccaaaccacaaacaacaaaattattttcattctatatactttatcacgatgcaatttaatatttcagaggaacattttagcatcttcaatttataacagaagacttaatattgctcaaaacaagttgatttccatatataattttgaatatagaaacattctcactgcttaaaatctttcaagcaattcaatagtatcactagcatgttcatatgaacgtacgacatgaaccctaatatcgagatcgtaaatttttccaaaacaacatgtccattatatgacccatttggaaactcatattttaaagtagaacgtctcattaaacctgcaatcatatctgaaagcaggtcttccccggctcaacatatagatgtcattgagtaattacagtagattaagggtgtttctacatggtgtaacatcatttctgggctttaacagctagttgttcttattctccaaatatgtttaatcaacatcaaagtattatttttgagggggacataaaaactaaagagaggtcagcagtccaattaaaataccataaacaaaaacaaaaaaaaaaaaaaaatacataacttaccatgtcagggtccaaaacatcgattgcatagagaccatgtctgtcttcaggaaccactaaacttgttttctgatctaaagacacagttctgcctgttccaatgtgttacaatgaaaaaaaaaaagtaaatacaaatttttgttatctaaattttcaaggtcataattggaatttatcagtagatcatcgatattggaataacaaaatcaatataaagcagtttttaaatttgtgctaaaacacaaaattttgcaaaattcttctcaatgtatataaggaaaatgcaccacatcaatagtcctttatgctaccaatacatgactctagttacacagtaccaattcttagaagttttgtctgtcttgtattcaatcttcaaaacttaaatgcaaaacataaacatgcccactagtttcttttcttcgataaactcacttcactttcggtcaaatttgaagttactagagtcaagagatataaacaaatttacccgtagtaggatcgaagcgagaccaaagcttagtccggcacttataatcagcagcgagaatcctaacccaaacccgctcctctttaccattttcatcatcaacagccttcagtatcgaacccgcaataccaggcaccaaaaggaccgggtcaagggtcgggtcaacgtaaggctggggcttcttgatcagcttcaaccacatctccacagattccagaatctcctccaaaagcgacgccatattaacaccaccaaaaccaaaaccctggattgtggttaaagctgcaaccggggaagaaaactccaaaatcagatgtttgattgccaagaattggggctggaattgacaggagtgaggaattgcgtggagaaaagaatgataattatgaagatgatgatgatgacgtggacgataagagacagagaaggcgtaaaaggtagcagagtacaattaatgaaaaaaaaactagaaaataactttacgagtggtacacctattctataattaagaagttttgtcacatttttacatattttccacagtaaaatttaatatataaattaatatttacttaataaattattaaaaaatataaacatcttgtctcaagtgatttatttttcagtatttatttttatactagatagatgttaccaattaattttattttagtttttaattttttttaatatcataatttaaaattaataatattcaatgtagtgataatcatt

SEQ ID NO: 94260 - DNA, 673 bp, Cannabis sativa
atagaggataggcttgtgtattgttagcataaatttttactaagttatgaaggttgggcttgtatattgaaagtattgttaaaatatttgtaatatagacacttaatttatgtaatattattcatgtaattattttaatttgaatttatcttttagtaattctaactttatattattattaagttaataatgtatatgtttttacatggatatatgatattaacttatcttttatatcttttatatatggacaaaacattattagtttatttatgattttttttaataagtggaaagttttatcctggaaaatattttgtgtacacataagtgtcaatttataattgacgcaaaaaccacttgttgcgtcggtatatcttgttgtgtcacttcaaaactgacgcaaaatgttttaatttttttttaatgtgttgcgtccgttataaaatgacgaaaatagttttttgtgtcattttataaccgacgcaaataaattacaatttgcgtctacggcttatacgtcagttttttaaaccgacgcaaaatccttattagtcacttgaaaactgacgaaaatacttatttttgtagtagtgtatgaaaaattattgggttacttttttttaattttctattcaaaaataagagttttttttttgttgaggttaacaga

SEQ ID NO: 94261 - DNA, 508 bp, Cannabis sativa
actagaatcaacaaaagggaaaatagtctcatgaaaaacaacatccctagagtagaaagttctattggtatttagatccaaaagtttataagctttcataccaataggataacccaaaaagatgcaaggaacaaccctaggtgagaacttagacctagaagtgagaagtgttgaagcataagcaaggcaaccaaaagctctcaaatgatcatatgttggttttttggatttaaggacttcaaaaggggttttaaacttgagattgggtgtaggggttcgattaattaggtaggcagtagtccctacacagtcatcccaataaggaagaggtatataggattggaaaagcaaggccctagcagcattcaataagtgttgatgtttcctctcctgaattttgttggggcctttgaacacaatagtcatagtgaactatgcctaaggaactaaacaactcagggaattgaagttccttagcattatcagacctaatccctttaatttgaac

SEQ ID NO: 94262 - DNA, 507 bp, Cannabis sativa
agtcgcatctctgtttgttcttctagttgcactctttatcggatggagactgcttaaaagaagaaaaataggtaaaatcttatatcattctatatgtataaatataatgcaaccatgtattattgaacttaattcttgaacttacatataaatataaaaataattggaacagacaagtacaaagcaatgaacaacattgggtcagaattggagcgcaaaaaacatcaatttacttactctgagatcacaagtattaccaacaactttgagaaagtcattggaaaaggaggattcggacctgtttattacggctacttaaatgacaatcaagtggctatcaagatgctctctgatgtatcagaacaaggctacaaggagtttcgatcagaggtatagttaaaacaagaattcaaaacatacacaactacttaattggtttgaatttggtactttaatttagttaactccaatgtgtcaatctactgaattaagaggaaccattacaca

SEQ ID NO: 94263 - DNA, 1016 bp, Cannabis sativa
attatagtatcttgttatttaaaacacattcgattaactttcaagattatttttgaaattaatgacttgtcatatagttggttatgatatcgataagatactaattagttacttttaaaactatatgtttatttttaaattatattatgttgtttaaaatactttcacattattatcatagtataaatatatatacttttacgttactttattacaataaataaaataaattacatagtttactagtaaatgttttaaatatctaaattaagcatcgttattttaaagttatattataatatcttaatattattaaagatacattttagataatcttaatttattgtaaaaattaattaattatcatagtataacataatttaattaactaaattttaaaataaatgttaattaagagtaaaaataaaataaagaaaggtaactaattagtatttgattagtattatgagtaacctaatggtttctttgattctcaaaatagcagaaaaatatatgcttcccatatctttaaatgttcacattgaagagtaaatcacaatactatttttattaagcttaaacgagtaacgatgtagctaaaaattctttttaaagttaaagatgtgagagagaaacaggaaagagaaaatgatttaagagagggaaagatatctagcaagtaaatgaaatgttaattcttaaaaaaaaaaataaacttaaaataaataaaaataaataaattttttattttaataagataaaatcttataaaattaaatatttatttgaaaaataaaaaagtgagtgtgtgagacatagtaattgatatatatattgagataatgtacattaaaaaaaaaaaagtactgggcatgtggattcaaaaacgtaacatgtgagcaaaaaaaaaataaaactaaaaaacggtatgaaaagaacggtaatcttgataattttaaaaatcacattatttatgtaaataaaatatattgtaaggctctaaatgtaaattttcc

SEQ ID NO: 94264 - DNA, 1905 bp, Cannabis sativa
ttatattattttataacaatttgcatattttatcacttaaataaaattgaatatatatgactaagcatacgtgcaatgcaatacacgtaactttcgcctattatagataatagatgatatacaaatttggaaatttctataataaaaatttatctgtttttactgtataaattaaataaaattgcaaaattttaattcgttaaaacaaaacaaaacaacaaaattataggttaggtatgattttaataatgactaaaatgataactacattagtaaaaagaaaatactaaggagacaataaactcaaatagataaatggaagaaaagagcaaagattttttctaaaacttgagataaggaatggatgtaggccaaagaggatgcacaagagtgtaggtgtataaggcttttgcaagacgatcttctttaaattccccaatttttttcatcctctttttcttaatattataacgataaatataacgtttgcgatgcaataaaaatattatattaccatcttgtggatgaaaagcaatcacatacattcttccacctttccattcctttttctcaaaatagtgcaccaaaatccaaaccccatcatccttgtggccacaatgattctcattatctaattcccaaattttcaaaacaaagccatctattttagttataacaaggtgcgaaagacgcaatttggcctgtaccaatccaatctgcacgagtgcacgagaagagctccttcttccaacaaggatgtcagaggggaagttaataaatctgcgatgatttacatctttgaatggatctaaaacaacaatcctaactagattgcctctattgctatcctgatctacccaatgcaagactccattatttgtaagaataggaacaatgaaaggatgtatgtgcgtattataactgttagtaaaatacgttatttgggaccaatttcctgtctctgaggaaaaaacagatactctatttttaagtatactatctacatttagatcttcaatcacattccacgttatgatgaccttgaacctgatttgatggaatatttgattatattgattatcctcattatcacacaaaaccaatcccccataagtaaagtagtagttgtcgtacaaaggatcatgaagacctggaagctcaatccattgcctggtgaatggattgcatataactataaatttattcctatcacatccaagcagtaacaaatcttgatgtgaagccaatatttctatatccccccatggtataaaatttaaataaccctccgacaacaaaggcctttttcggtcatgaccataaaaaagttcacagaaaggttctggaaatactgatctgttggttactctaaatataaatgtaaaagataatgattgggacaaagagtgatgtcttactatttgttgttgacgataataattagaattaatgattgagaaccaacgcttgcaaacaatgctacatcgaaattgagtggcacaatcttggagtctaataaatatttccaccataatatcatcgttaaatattgtatttaacaaacaaatcttatcattcctctgttttcgtttctttctcagcttataatattttctcatctttctctttttgcaactcagttccattgaattgttaaacactgaaaaaatagatgaattatttgttagttggaaccttgacaaaataaaatcaaacccatacaattcaaagtaaagatgagatatttattgattttttttttcttaaaaaaatgattaaattttcacaagatattataacttttaaatattagaaacagcttccaaagttttttatgaatgaaaagatattataattaataaaatatacaacactgaaagtaatatacaacacgctatagccaca

SEQ ID NO: 94265 - DNA, 862 bp, Cannabis sativa
aagaatgccagagccacttatcagcaaatagtgcacaagatgttcaagaatgtctgggaagaacatggaagctttcgtcgacgacatgttggtaaaatcaaagacgtctgaaagccattaccaagatctagaaaaggcctttgccattatctgggagtataaaatgaaattaagcccaaagaagtgtaccttcggagtttcttcagggaaatttctaggttttatagttagctctcgagggattaaggcaaatttgaaaaaaatcaaagcctttgtagatattccttcacccaggaaacacaaagatgttcagaaattgacaggaagaataacaacacttagtagattcgtctccaattctacagataagtgcataccattcttcaatgtatttcgaggaaataactagtttgagtggatagcaaaatgtgagacaaccttccagcaactaaaagaatatttagtgaaggcccctatacagtccaaaccagttgaaggagaactgttgtttttgaacctcacagtgtctgatcatgccctaagtgccgcactagtgtgagaagaagaaaaggtacaacttccagtatattacgtgagcaagagactgctgggcgcgaagtccaagtatcctatgcttgaaaagctttcccactgcttgctaattgcttcccaaaagttaagaccatactttcaggtccaggccataagggtactaaccaacaaccctcttcgtcaagtgttacaaaaaccggagtcatcagggagactcctgaaatgggcaatagaattaagtcagtttgacatacaataccatatcgagtcatcaattttgagccattagtgatagagtacatacccactc

SEQ ID NO: 94266 - DNA, 684 bp, Cannabis sativa
attaaaaaatttattaattttttaatttgaattattattttcttaaaagttaatttgaattatttttatataggtatttattttcaaaaaataattttactaatgaaatttgctattaacttttttatactattagttgactgactataacaaaattaattacttaaatacttttgctacttatttatttacatacatagatatactataattatctgttaagttactttgcttgaatattttataaaattatgtattaatatttttatttgaaatatttttatattattttttttatcaagaaagatgttttctattaattaaaccgagacaattacatccacaaatgatttcctttcaaaagacaaacttacaacacttttacatttataagaataattttatctatgctagacaacttcttttcctctacaaaattaagtctacttttgagactctctttaatgtcattatctatacaattcggattcatacattttttttttcatttatacacaaatttcaatttagtgtaaatgtcattaaacttgttaatacattcttatgaacataatataatttttgtatgacactttttaatatatattcttttttcatttttaaaattatatatattttttttgaaatatatctattttttttcaatagcaaaaaaaaaaaaaa

SEQ ID NO: 94267 - DNA, 586 bp, Cannabis sativa
accatttacttctatggagtccttggatacatctgccttaaggatgcaaacaactacctttgaaaaattcaaaggactctggaagacgcttacagagagaacttggaaccctgctattcaggtgtgttgtttctagcattgtgcaagcttagaagatgagaattcaatagattatttaattcaacttttaaagttttagtattttcatgtgttatctataacttaacactatttaatcaaagagaaattaggttgagattgtatattgattcacaaattatcttcaatatgcagttttctatcatctaaaacaaagatatatatatctatatatatatatttatatgaagaaaagctgcataaacaggacaagggttcaccccctgaagctctttctgcatttttcagcatttgtgttaggtgcagtctcttagagtgttgctacctttcttacatgtcctgcaatcaggtgcattagtgttctctcaaagggctcgtttaaaacgtcctattagatcgtattgtattgtattgtattatattgaattggattatatattatatttttatataatactatgttaaa

SEQ ID NO: 94268 - DNA, 932 bp, Cannabis sativa
atgttcttggaagaggggtaaaatggtaattttaccctagtttgtttttttgtggttttctagtaggtgtgggatgattgatagcatgggttttattatatattttagatagatattttattaaaaaaaaaaagagtgaataagacttggaaaataacatgcgttttctttctccctctacccttcgaaagcttaggagcagcaacaatcgaacatttgttccatcaatttcagtcagtctgtagaaagtttgatcaagaattgaagttctctaagttgaggggacccaggatcgtcaagctttgtttccactcaggtcggcccgcacgcatgatttctggattgaggtaagcaaaatgttaagcactgtttatggttaatgatatgattgtatagtctcgattatgatcgagatcccaatatgtgtttgttgtgacttgatttggatcgatgtagttgaggaacaattattatcgtttgtgactcgattatgattgaggtaatgatatggaatgattattatcatttgtgactcgattataatcgagtaaaagatacggtcattatcgttatgagtaattactcaatgaaactatagatagatttcttacttatcgttcgctttatcgggcaacgatagtgacatacatagctcatagataacgagtagtaagagttctttatgaagcattcagattatgtgattacggtaatgtgtgaattagagtgctttatgaagcactgaaattgagtgtttataattatgttttattatagtgctttatgaagcaccgagattatgtggctatgtattgaacgaatgtatgtttagtaaaagaaaaaattattgattatgaattgctataaatattcttaattatgtaataaatgtgcttgcatagacgttgagttatatatgcatgctgaatatg

SEQ ID NO: 94269 - DNA, 500 bp, Cannabis sativa
tgtattgatgttaggaagggttcttgaattttagaggaatgggaagggctttgatcctttcagagagtggtgagcatctttctttgtcgagcttaaattcagacaacttaggtgccatgttccccatcactaaagcagctaaggtgtcgaactctgtctgattgaccccgtgaatggtggtctgcgtccgagatggagctttcattaactagataggtttttctctagaagtttccacatccatcgttcttcttttgttcaagaggtcacgcaggtctctttgtcttccacgtcgatcatgtacttcggtccacctaggtcttatagttttctcctaaccacgaggtcatgaaggcaactctgatgaggcctccagaatgaactcaaaatcgtctcgagatgacttgctatgagagtgttcatttggagcattatagaggctacttccctcgaagtagtcttcgacaggatcacatgtgcaaagacaattgaatttgtca

SEQ ID NO: 94270 - DNA, 901 bp, Cannabis sativa
  modified_base (347)..(350): a, c, t, g, unknown or other
tcatacaaatctaaattaattgcattcaacataaatttgtcaaataaatacaaattaatacaattaatgtataataattaattaaattcaaattcattaatatgtaattattggcaaaatttttcaaaattaatttagacaataaattgcctaaatttggtaatatataattaaatacacaattatacaaattaacataattattacatgcctaaataaatcatgtaataaattaccaaattaaacaaatttctactttcaatttatactaaatatatgtattaaacaaaaatagaaaattgactaaatgcaatttatcgactaaattaacacaaaataggaaaatnnnnaatattccaaataaataaaaatttataaataaattcaaaatttttccttttttttttttaaattgcactgcctaaacgacatgtcgttttttgcaaacagcaaaatgacacgtcgttttttcaattccgaagggctgaccatacgtgaaaatgacatgtcgttttccccaagaggaaaaaatgacacgtcgttttactcaatgaaggactgcctcacaagacaaaaaacgacatgtcatttgcaactaacggcagctgcaacatcatggtcgtcttcttcagccaaactgggttgttttgacccatttttcagccacgcgggtccaacggacccgacccaaacccaattggaaaagacaatttcaacgacccaaaaggcccaaatcaatttaaatgaatctaaatgcaaaaataagacattcatatagatttcatgcatcgaaaatacgtaaaacaaagactttaaaatcaacaaaaaatttcgggtccgaaaaatattttcaagaaaattttgagatttctttatttttcaaaatgggttttcatgctta

SEQ ID NO: 94271 - DNA, 1265 bp, Cannabis sativa
  modified_base (48)..(60): a, c, t, g, unknown or other
  modified_base (1218)..(1219): a, c, t, g, unknown or other
cgctcttccgatctttcatattaggatgttaatcaaacatacttggtnnnnnnnnnnnnncctggtaaaataattccaacatgtgttgtttcttgttggctccttgtgtgactctgctcgttattgagcttctccttctatgggagtgtttgttcttcttcttttggtgttctagtacttgtcgtccttggcgttgtgttaggactatgaagtggtgcctattcttgtatagacctataccatgaaaattatagcttagaactgtcatgagctaggtaatgtcgcgacagttcgtcaattatttgatttaaattgttaattttagcctaaggtgttagtgttctcaaaaattgatgcacgatttttactgcaagggtacaatattattatgcaaagttttttttatctgtgtttttgaataggtgacaagtggcataaaaggacagagagtcttataatctcactaattaaaatccttcaataaaattcagtcacggagaagcttcactaattcgagaacatgtctaaaccaagagatatgcggaggtctacctcgccttactttagcttctaggatacggaagacaaattaccactctggaacccaaagtggcccaaactcaaagtttgcccaaacaatactcggacaggtactcgaagggcctatcgtagatgttgaccgcccaaaagagttgcagacgtctaccttagatacaaacccatatcgccaaatgatggttatgctttttctaacacatgatcagatcttgtcccctgtgccaggatatggtagtgcgcgtagctcacacacctttttgcccgatggttatttcaagcaattacttgttaaggttaaaccttttggcacatgcgtccattacgtacaatggtcccctattttctagcttcttcaatgcacgagcacaaatcctttcatggggcccaacagtgagctctttcttgcatgtattttaccccattaagtgggatttttgcagaaaccctaggcagttcatgggcatgtccatacccgcccttagcctataaatatcattctatttccatacgaagggggatcaaaacctagatagttgaagctttgttgatagtattctaagctttcctcttcttcaagagaaacaaagaatacaaagtttgggtttcttgctaaaacactgtaaaaatcaaatacgccctttgaggctaatagactgactnntggactaaggttaattaacacatgaaccacgtaaaaatctccatct

SEQ ID NO: 94272 - DNA, 660 bp, Cannabis sativa
  modified_base (491)..(506): a, c, t, g, unknown or other
catatggaattttgggcaagtggattgatgattgtaattggcatacataaagtggttcaattgttagttaattggattctatggtttcatgagctgaatgaaaaataagttgaagtttttcaagggtgtcattgaactgaaattctggattgtaagcataagtgaagattttcataatcatgttattgaagctacttgaaaattactcatgtttgggatattgacttgtttattgtttatttagtgttttactcgagggcgaataaaagcttagtttgggggaatttgataggttatttttattattaattttagattaagtttagtatattttaatttagttttactcgtgtttggagcatttttacgcttgttgtcttttatttttctagatttaaaaaagatgacgatttgaaaaatattaacagaaaaaagataaaagatcgcataaaaatatcaatgtggaaaaaaaatcagaatcctgcccagannnnnnnnnnnnnnnngaaaacgggggtattggagcacacaggccgcgtcccagcaaagtgagcgtcgtaactagcccatttaaagaccaccaccaccatccacacgggtcgtgacctgcccatttaaagaccaccaccacaatctacacggagatcggaagagcgtcgt

SEQ ID NO: 94273 - DNA, 746 bp, Cannabis sativa
attctttttttaaaattatatattaattgtatactaaatattttaaaatttacgtaaatatgtgtggtagatttaattagatcggttacttttacataccaatgaacatccaatctgtacaaatacaaattttagattttcaatccaattcaatctgcacaaggacgaatattcacactttacatatttaattagattgggtattttatgagcacccttaaagagcattatatgttattggacatcgtgtaccactattagtgtaaatgaattcgagtcccacatatttataattagtttgaattatacaaagctcgctacttattcatactaatgacaatatgtaaggtagtgtttagcttggtgtaatgtaatggaataagaatgctaataaaaattgattacaatatttgatttatagttggaatgtgttcgggtatcaacccaagtcccacattggaagaatagacaagagttgtcttggatataagtgttccaccttctccattagtatgaggctttttgggaaggtgcccaaaaacaaaaacgtgaggcttaggcggacaatatcatactaatatgggagtcaagtataaggtgcccaacataatgaacattgtaatcagaagagaatgtaatgaaataaaatttgtattgaccaaaataaccctataggttttattttaaaattatgaaatatttttttttttaaaaaaaagagagtaatatagacttttgacattttt

SEQ ID NO: 94274 - DNA, 762 bp, Cannabis sativa
tccaagattattcgattaaactcatcaagatgcttcctcagatcttttgtttcatccattctcatcgtgtacagttttttctttaggtagagcttattggccaatgactttttcttataaatcgatgccaaccattcccataaccccactacagtgtcttcatttgacacttccctgagaacttcatctcccagacacaatagaatggcactctgtgccttgttctgaatttccttggttttcttcttgtcatctccaagagcagtaagctcctcttgatcaatggcttctgagattccttgatggactaggaatgccttcattttaatcctccacagaccaaaatcttttgtgccattgaacttatcaacttcaaatcgggttgaagccattgcagatcagttcttgattcagctctttggtgatgccccttgactgagctatgataccatttggtgtgatcagtacatgatcactcacctcgcaaacaatacaaaccaaagagattaatcaagaataatgtaaacaaatgaaagttgtatagtgcagcaatgattaaatggctataaaccagttataaacagtagcaagaaccagaaaagaactaaagttaatgaacaattaagaacaatagtaataggagaaaagatcaaacacaatcaagtttacgaggttcaaacaagtaatgatgaatcacttgcctactcctcggccagaacagccccaatggcttcagtctttattgatgctagaagagaggat

SEQ ID NO: 94275 - DNA, 509 bp, Cannabis sativa
tggtagggctccacgacacgatctcgtcggtcgccgagtcgtccaccatgtcataagtcttgctcaagaacggtggtggtgcgttcgcatttggaataggggccggggccggggccggagcaggaacagccggctgagaacctccgccagccgacgagggcgcctcgccaccaccagtagctccatccatttgacccaaaatcggaaaattgaaactgaaaatagtaaataaatataaagattaggaatatttgttggctagggttagtaaagtggtgaaatggaagaagccattggagaggggaaacagggagagctaaaaccctaaaatcgcaggggcctattcaatttgaaatcaaggagaaggtgtttccaagtgaaattggagggagacagtttgtacggatggagtgagtgagattagaagacggtgtataaagggctgggaacggacactaaccggtgaggtgaccctatttctttcggggatatgaccatgttcctctccc

SEQ ID NO: 94276 - DNA, 635 bp, Cannabis sativa
attcgactttcatgagcaagaagaagagattgaacttcttcgaacgtgagatcatcactgcgcgcggtgatgccagagactacggagtcgtattcagggcccagaccgtttaggagttgtaggatcaaatcttgatcttgaataggcgaaccagctatagccaaagaatctgcaatggactgaactttgtcactgaagtccgagatagattgtccacccttgcgaagcgtagaaaattggcttttaagttgaaggagacgagccttcgattgacttgagaacctctgttctaaggcacgccaaacagagtgtgatgaagtgaagttagcaactgaagccaacacagcatctgtcatggaagcccgtaaccaagatagaagtaattgatcttgacgtttccattgacgaagcattggatttggttcaccagaaaccagctgagcaggtggaggaattcctgcaagaagtatttcatcaagatcgtgtccgatcacagtggggagaacctgtgatttccaagacaaaaagttagtgcggtcaagtttaacagtgagagttgatgtgagagaatgagaaaacggattgttcatcggagtaggacgatcgacggcagcctgagtaaggaccgtgtttgt

SEQ ID NO: 94277 - DNA, 534 bp, Cannabis sativa
catggcctagggcttgggtcgtgacaaatagtttcaaactattatggtataagatatgtatatatagtgactacttaattcagtttagtatatttttagaagtgaatatataatttactataatattatagtaaaatttgtgagtgatccaataaattcaatatggttacattcctcaacgttataaagaatgacaatatgattatttgaaaagcttcctgaaaaagtcttaaatacaattgctatttgaaatagtcaaatatatttgtgtgtgcctagatgtataattttttatgaaagtgacaagaaatgacttattatatgtactggttgtacatttatatatataatatatcaatcatgataactagacttttaagtagtctattaattagttagaccagttgttagaaagacatcttgagaaaaaataaatgctatattatgattatatctaattgaccattacaacaacatgatgaattttttttgtgacttttgaatatacagattattggattgataatgagaaaa

SEQ ID NO: 94278 - DNA, 3177 bp, Cannabis sativa
gaaaggtattgactttgaagaaattttttctcctattgtgaaaatgtcctctattagagttgttcttggtttagctgctcgcttgaatttagaagtagaacagcttgatgtgaaaactacattcttcatggtgacttggaagaagaaatttacatggagcagccagagggtttcaaagtcaagggaaaagagaatcttgtgtgcaagcttagaaaaagttcatatggactcaaacaggcacctagacagtggtacaaaaaatttgattacttcattttgagccatggagacttctgattattgggtgcttacaaacaagtcgagtctacctacacctaacttctcataatattcaaagaaaaattatgtgaaaaattaataaagttaaaatttgatacagtttttattatttaataaaatacaaaatttatttcatatataattttaaaaaatttaaatatttgccgcgtaaattatttactagttagaatataatttgattaatctcaaatatattcttgatagatgttctaatatatataaataaatatttgtgtttatattttttttccagaaagatatgttatatatattttctaatatcaagtatataaaatagtaataaaaaatttactgactaaagttgaatcaacttgcaagttgcaagtatgtatattactatcaagttagaaaaatagtttaaaatgacttgtttttgatttaattgtcaaaaataatttcgtcaaattttaataacgtttttatttatttgaatatatttcaatacacttatttatatatttctttccttttttttttcttttcttacgctactctctttctctccttctctttttcttatttttttctcttatctcaaattttaaaaataatttttgataacgtcattacttggatgagcctaaaaaaatactattacaatttacttttcaatgtgaacatttcaagatgtggaaaatatattttttgtttgctatttctaaaaaaaaaaactatttagttactaatatagtgattagttactgttttatatatatatttttaaaatttcaattaacattcattttataatttcgttaactgaattatattatattatacgaccactaattagctttcaaaataataaagatgtaaattaaataatcagtatattaaaatagtagcttgttatattatatgtcaattcattagtttcaaaaatattttttaaggttacttaaatgtattttaaattataatctatcataatataacttaaaaataactaattagttactaagatgtatataaataaatttttagagagtaagcaaaatgtatctcaaattatataatatcaaaataaatttttttatttaaaggtaactaattaatttcttattaacattattagtaaccaaaaagttacttttaaaattcaataaaataaaaaaaaatagaaaatgtcaaaaacgtcagaaaacatcaaatttagttgaaagtagtaacgttattatgctcttcactacagataccccttgtatctggtttgcaattaaggacattcttacttcttaccatagagcctagggtcagtgtgccaatttctccaagtcatgtatccttttcactcccaacattaatcagaatgatcaaaatatttttttttcattacttaaacttggataataaaccttttgttgataagtacctcagggtccctcaatgttttggtagatctaagcaatcctctttccactatctcctccaacacgcttctactaagctaaatgtctagaacagtaagcttttctctaaggctggcaaagaggtcctaatcaaggcagttattcaggctataccttcttatgcgatgtctagtttttcgtcttgctgttttgacttgcaaatgctttgataaattagtagctaaatttttgtagggctttcagggtaattgtaataaaattcattggaagaattggatgcatctcagtcattccaagttttttaggggtttgggttttaggtctctaatgtaccataaccaggctatgcttgccaagcaagcttggaaaattttccttaatctttcctcagtccaggccctgctcctctaagctaaatacttcaagcataatagttttctccaagcatccaaaggccattgttcatctttcacctggaacaaccttctgtggggtagagatctcttaaagcatggactcatctggaaagtggggaatgttaaaacaatatattctctttagcctaactggatacctaatcttaagtacttgacttataataacaacacttcgccatctgaccctatagtctattttttcatttcagactctggggattgggacctttcaaagctttaattttttcttccctcctgaaactgtaaaagctatcctcaaagtgcccattaatccttccaaggaagactccctcatttggggctatcatccatctggttgcttcactgtcaaatcggcctatcatcttaccacttcccttgccaaatctgtttcttcttccccttcttcttctaacattgcttatttccgaaaatggtggaagtcagtttggaatcttagtattcgtcctaagttcaaacatttcatttagaaagtctttcatcatgttttacctacttcctacaattttcataattgaaaggttcttgataaccaattggatacggtaacccatgcccttctgtgtgttctagagttgttcctttttggcagagctttctctattttttacaatgcacattttccctgtgatattaaagattttattttaacaaggttcgatactttcagcaaagatgacctatctatcctctttggcgttctgcgggttatatggaatgatcgaaatattatttttaactccaaagtccttcctgttgcagaaacagagactcgaccagccacccatattcaagagtacatcttagctcaagaaaaaggctccctctctcaggcttacactttgccttctattgctagatctactccagccttagtagcttcttgctgtctccctcccctaggtttttacagcctccactctgatgttgccctttgtgataacaacatacgcacacagtggtataaaatggcaaaggtaaattaatagtggctgggttgttctcct

SEQ ID NO: 94279 - DNA, 506 bp, Cannabis sativa
tggtaaaataacttccaacaagcctatggaaagcttgagtgggattatttccgggctatgatggtaaggatgggctatgatggtcgctagattaatttagttatgcaatgtgtatgttctgtttcctatactatttcacatggtgggaaggagttggggcccattgttggtcaaagaggatttcaccaaggggatcctttatcaccatatctgtttattctttgtgctgaaggtttctctagtttgttgcggagttatgaataaagtggcttactcacgcggtgtaaaattgctcgaggtgcgtcggtaatctctcatatgctctttgctgatgacaactacatttactgtaaggaaactgaggaagaagcgtaaaatgtgaaggagttgctacatacttatgaggtggcttcggagcaaagaatcaatttctctaagtcttctttttttagcaataatactggtattgatgtgcgggattccatttgtgctatgttggaaattta

SEQ ID NO: 94280 - DNA, 675 bp, Cannabis sativa
attaaaactaaatctaaaataagtgtgtatactaattaagcatatataacttaaatttaaataatatatatatataatatgtagatataaatgatacacattatcaataattaatggtgtgtgtattacagaaataaatatataaaaggttgtagtcttgtcattgactattttagcgtagtattatcaattaaataaagttatgttacgtctccaattttatagtttttcttagagatataaaattattaacaatctacatcatttatatccacaaacacacactatatacgtacaatttatgcttaatttatatgcatacataatttgaatttagttttaatctaggagctaatattgatttttaaaagatagcatttcaattgctcaagatttgtcttttattaagactatcttcaatcaagatcaacaaaatcagtaatccaagggaactagaaaagcaggcacagtagtggattacgtaaaaagagaagacaaatacagtagacaccctttcataatagttacaaagaaagcgattgctaaatgtatgaagatgtttttttccgttctaacttgaacccaagaacactttgttgtgcctctttgtcatatcctacaactaatgcttaaaggaatccaagttaaagtttttattcacttctgggaaatctt

SEQ ID NO: 94281 - DNA, 721 bp, Cannabis sativa
atgtgagaataaaaataaaaataaatttttatagaataaatataaaaatatgtgagataaaaaaattataaatttacaagaataaaaataaaaatatatgatggcaaaaattaaaagaaatattttatagagacaaaaatgaaaatattttaaaaaagttatgcaaaaaaataatttcttaaaagttgagtggggtcatgtgctacatgaccccattcccctccgcctctgtgtatcatacaccttattcacttgaaatctatgaatgttacatactttcataaactctacctgaaagaaaaccttaaatctcatgagtttccgccaatacgagctcacatcaaattaagaccaaacatcttgatctttcaaatatatacaactaggaaacaaaagccgttacatatattttgaattattaaagattaattaattatatagatttacaaaattactatacatatatcatattttttggtgtaataaaatatctatatatatatatatagatagatgagaatactaatagtttaaaagaatactaatagattataaaaaattaataatggggaggttatgttacattattttgggaggttacattatttttttcttattatatatatagatgccacatcaatgctcttatgctttcctttatttagaaaacataacaaaatagagaaaatagagaaatggaaggaaaagatgccacatcaat

SEQ ID NO: 94282 - DNA, 846 bp, Cannabis sativa
tgtagtttagtgatcagaacatttatacacccctcatctgctcaacatgaaaattaaaatcattttttgaatcttctaaagttgtgtttggaaattagattttggtgaaaaaaagtcaggaaaatgaaaaataaaaataaaaaacaatttttcatgtttggtatgaaaataattgtatggaaaaccagttgattgaacaaaaaatttcatatcaaatataaaaaattatattatttttttttcatgtatttttcactttttcatgtttgatatgaaaagaattgtatggaaaaacagtcgattgaacaaaaaatttaatatcaaatatgaaaaattattttacttattttatgtatttttcacttttttctttcctaaattttcattacccaacaaatttcaatctctaaacatagcctaaatggcagataaagctggcaggttcaggtggaaaggaggacccaatcacattaaaggtcgtgagcattccatgatagaaagatgcaaaaggatagatcattttactctaaatatatgtggacccaacaatttttgccagcaggagcaaatctttaaaaattcattctatacctttagcacattggaaagagttttccctgtcatttctcaagatctaagattcgaacatttcacaattcaattttgtttaaagaaaaaatgaaatatccaaataaatatgcaaaaaaatattccaacccttgactttttgaaggaaagactaattttataactacaccaaatttttttatatatatgacaaggcatctaagatacaatacgcccttaaatcgatacaattaagcatttaaatctttatttttttta

SEQ ID NO: 94283 - DNA, 1741 bp, Cannabis sativa
aaaattatttttcagatgctaaaacagatagaggtgcatcaatatatccattttaaggggtgcattgtagaattttcctatacttttaattcgcgttattgaaataaataataaatatattattgtgaataaatttttgatatatattcctaaaataataccgtttgaaattgaaataattgatgatgtaaatcttggtgaatatagagaaagatgatctcgaagtaggtataacatgacaataaatatgtaatatatactaggtgaaaaatgaaaaagtcccatttattagaattaaccttttttttttataaaattattttgggttcagaagaaagaatccaatctcaataataatataataattagagaagagaactaaattgcttttgttttgttctttggtacagtaaaagacatgaaacacagtcatgggaacatgaatcatgccctgtgtgtaaaaaaggtgcaagaaagtcataacatagctgaaaaagcaaatagtggattttttttacatagtaaagaatttttttatttatttatttttttactttgaggttcatatttttgtcacatattcattgtaaatattataaagtaccgcgtgactaattcaaattaaaatgagctttataggaagtctaaaacactatcaaaatagtttaccctatttttaaaaaaaaaacactattaatatagtgtgtttctatacctatgaatgtgataagatacgatcatatcaatttttcattaggtgttcagtttcaaaacaaacagtattgatgatgatgtgatattttgtaacatatttcattggattcctatttattattattaatgtaacctagaaaaacagatggggcgctcatttttaattaatactccatttaagacttaacctttttcttttatttttatttttctcaaatatattggtaggatttataggtgtctaagtaataataataatgattatgtttatcatgatatccgtaattcctctaggtaattgtctttgtgggattctaatataaattagtaacttacaataaaattactagaaatggtctttggcatatgtagtattggtactattcttctactaacaaaaagaactaccatattgaatctctctaccataagattgggagaaatgaatttacccatgataatatatatattttttatggaacaatagtttaatcatttaatataaatttagaagagcttgtaaccttttttgtttcacattatcctttgctacaaaaatagtatttttaatagataaaaatataattaatgatataagaaaaaattaaaagagaactgttttagtacatctcctatctatttaaggatttaaaaaattatatactttagtataccaaaattaaatttacaaatataagaaaaataatcacttaaaaaataaaaagcaaagaaataataataataataataataataaataaataaaccttgcactaaagtcaatttatctatttatttaggttttttatgatttaagaatggaaaaacagtagtgatatgatatagttaaaattgaaatatatatgtttggaaaaaaattgaaaagggaaaaggacataagtagaaagagaggacaaggaggagcagagttaggctggcattatttggggggcaaaagctatgattgagataattgggctcccctgacacctaagtcatcattgaacttacacaccactctctctct

SEQ ID NO: 94284 - DNA, 615 bp, Cannabis sativa
aatcactaagggttggtcaacaacacaaggatatgcataacaggatagctctagaaacttcatgtaaaactcattgacagtcatatccctttgtcttaaaccatcaaatactccaatcaaagctctcctgtgagatggacgaaaatattgttccctgaaaactctctcaaaatctcgccaagtcatcacatcagtttccattgtcctagacaaggtctcccaccaatctactgcaccaccctctaacttggacacaacaaaagtaacttggtattccccaggtgttcctattgttttgaaatttttgtttatctgcctcaaccacctttcagctaccatgagatcttgtccaccctcaaactcaggcacttggatccgatgaaagatctaaaaatgatgactctatcgagtggcaggatccatctgttgagcgggaactgctcctaaggcttcgagaagggcgttcaaagggaattcagcttgtagaggttggacattagcttgaggggtgtcttctccaagcgttctccctatcttccttccttttggaggcattttcttaggtctgagaaccaaaagctaatcagttaatgaggtttggatgctaataatata

SEQ ID NO: 94285 - DNA, 1206 bp, Cannabis sativa
tttaattttacggcctaaaattttaattacaaaaatattcttataaagttttaaaattataaaaatatactttgctcaagaaaaaataaaaaacaaacaaataaaaaacaacaagaaacctcatgacaactataataaactataaaataacaaaaaacaaccagaaaaacaataacctcatgacaactataaataaactataatacaacccaaaaaaagatttattatttttactgaagagctatttttgtaaataaaaaaaaattcaaagagtaaaaataaaaaaaaaattccgtgttaatatatttttgtaattttttttaaaaatttttattaatctattatgtaattttttttttaaaatattatcgatctgtggggagaatttcaatgagattctatctatgaatgaaaaaaagggtgggacggactgcgatgtaatggggatgagtgagttttaaaatgctctcgacgagtgtatgctagatgacctagggtacgaagggccgattttcacttgggtgaatagaagacaaggtagttcacatgtccaagaacggttagatcgctttgtatgtaatcaagcttggtctgattggtttccttctatccatgtgctaggtgatttctctgctaatgtggcggagctgcttgccattcgtctcggcttggttcttgctcatcaatttagtttcaatatctccattattaatattgattatactgtggcaattagttggattaataagctttacattaattttagttttcaatattttattagatatgtattctttattagttgctgttggtggtggtttttgcagtgtcatttcgcgatcagcgaatggtgttgctcatacactgacaatctatgttactagtttatgagattgtgtttggacaaatacttgtccttgatttttaagtttttcggtaataacaaatttttcttaataaattcttcatttaattcaaaaaaaaaaaatatctatctatacttcatgctcagttttctgtaaaatgccaaatagatgtatacatagtagtttaagttgatccacttcatttatttgattttttatataaaaaaattgtttaattatttaaaaattaaatcaaaataatttaaaatgattatgcattgaaaaaaataaaataaatgagtatgaacactcaacaaaatcccagaaaaatgagtatgaa

SEQ ID NO: 94286 - DNA, 785 bp, Cannabis sativa
cagaagtagagtacgcaagttctttgagagagagatttgattgagagagctagagagagaggtacaaagaaaatagaggattggggctcttggttttgtaaaggagaaacttctgtacatgaagaagcttctcaagaaagagtgttagagaaaaaatatcttgagagaatttaaatagagaaactctcttaactgtattgtacatgtgttcttcttggagcaacgccatagattacatcgatataacgaacttgaaccagtataattcttagtgttgactttacggttttcttgcattgtttgtttttgattttatcgtctccgttatattcttttattcttctaatttttgtttgtttggttaattttgtcaattattaactatttgttgattcattttaagttagtttgattgcacaaaaatttaaatttcccacatatatatatttatatatatatagaggccatgtttggaacttaggataatttgggattgaacaaaataatcctaagctatgtttggtagtgttttgagttaggatgggattggataattatcctttcacattttgcccacgagcttgggactattttaacccgttaaaagaatgggttaatttagtggaaggcgtttttttaatatataatatttattttatttaaaaattaattttaaaattttgaaaataatattatatttactttaaaaaaaatcaaaaaaaaaaattatttacgtatttttttttttgaatgtattcttgtttttattacatattatttaattt

SEQ ID NO: 94287 - DNA, 709 bp, Cannabis sativa
ttttttttttttatgattataagtgttaagtgtaaaaatttacccatagcaactcttctcatgttctaagagttcaacttattagagttttataataagatagtctctcagatattatcaagataattgtatttcaatatgtaaattcatttttgagaaattatacattttttgagaaattatacattttttgctttagtatttaatttttgtaaaacacctaggtagtactctaaatttatttttgttaaattatacatttcaatatctatagtcattatttagtgaatttttttaatataaattcattttaaataatcgattaagattcaaaaatgtacaccaatgcaacttgagatgcacttaaaaattttcctctgatattgaaacaaagaacgaaaaaagtctaaatttttacctaaaatgcatacagaaaaagcttcaataacgaaagtgtgatctaaagcaatgccagccttcgcatagctcgttcaaaacactaaaatgcgtctgcttcatcatcaagaaatattaccattggcgagcaaatatcgttcattcctgcacaaacaaacagaaaccaatcatataactgtcattagtttttgacaaaaaaaaaataatcatggcaaaacacaccttgaccatacacattgagagtaatcatttttttttcctagactcgaacaaaaacaaaaatttctagaga

SEQ ID NO: 94288 - DNA, 915 bp, Cannabis sativa
tacttgttagtaaatctagatactagtaaaatatttccaacaaaatcttcatggcaaggcttgtcctcctttggattgaggaagatttgtcctagttctagaggagcttagttggacaatttatctatagaccctccccaatctgtcaattagtcacccttagaggggatttgtgaagaaattcatacctcttctcgaagttctctcattgagccaccttataaggttgctagcttctcaattacgtcggtctagttccgcctggtgagatcagaggatgtactcttagtcatccatcttagaaatttgcatctctgttgtgcaaatgcaacataactaacaacgcttgattcttcagttttgttgacttggcaaacgacctctctaagtctagctaactcaagatgttctcccaagtctacatgaggctcgccaattcttgccctcgtctctacaacacaatactggggccaaatttagttgtggtgctcgggggccactctgtattggccattccttcagtgcaaggtaccaatggagggtcttccctatgttgcagaggtcagccattgaggccaactagaatgttgatgtcaacttgaccagttgtggtggccaggtttgtggtgcctacagagatggcacgtgtggctacattcgtcgggttaatggagattccagtcttggctaaaacttgaacattaagatcaggcgacataggatcttgaggaagacctaatgaggctgaagttgtagctagttctcttgtgttaaccatggcgtttgatcatattacttgatttcgactcgctctcaatgaaagcaccaaactattgacctcgaaatttggccaaccgatagcggaatcatatttaatgatgattcttgccacgtgttacacaataataataataa

SEQ ID NO: 94289 - DNA, 1139 bp, Cannabis sativa
cccagcccttagttttgatccaactgagagcttccttgacacctatggcctccacaacttcaggaagaaacgatcctcggttgcaaacagctagagcatccaataaaaaacctgaggaatttcttgcaacaatgccatagccataagaaccttccccttcaaagagagcggcatcaacattaatcttgattgtatgtaattcgggtttagtccattgctcaaccttagagacattggtttcaagaaccgatgacaataagttttgtttatcttgagctttacgccattgatcaagaatagataatgctgatgaagagacacgttggggagaagagacttttttattccaaactaagctgttgcgagcttgccaaattgcccagcataacatagcaattcggcatctggtttccacatcagacgcttgaaaaacattgcagagccatgtacctgctgtagtgttggaaacaatagctaccgtgggatgtgcatactgccagcaggaactagcaaaagagcagctgatgatagcgtgagaggccgattctgggtgacatttgcatactgggcagttggaagagatgtcaacatgcttggtaatgagttgtaggcaagtggggagagtattcgagaccaatcgccacatgaaattcttgactttcggagggatttttaattgccaaagggagcgccaaaaaccagaattatcagcgccaacatgctggttttttgttttctgcatcagaaaataagcacttttcaccgagaaagtgccgttgctttcttcactccaagaccagcaatcgtctccagctgaagcactaaggggcagcccaaaaataagagatgcatctcgcatattaaagatgtcagtaacaaggtcactgtcccaagagattgcatccatttcgaaaagggaattgaccattctattcagcaaactcgggtgggtagttgtgacatatgggttggacttgtgaggaagccaaggatgggaaagaatactggttgtggttcctgtacctatcgtgcgtctagcaccaagcttaacaatatcttttgcttgccaaatgcttctccaaatgaagctgggattgtttccaagatcagcaccaagaaaatcagagcgaggaaagtac

SEQ ID NO: 94290 - DNA, 1407 bp, Cannabis sativa
  modified_base (709)..(725): a, c, t, g, unknown or other
aactaacttaactgtcaaaacagttaagttagttagacagataccaactgtcaaaactaacaataaacatagattcaagaggtcaaacctcaacaatctgagcaactaattttgaatgattcaatgaagaattaaaagaaacaaaaaaagatgaaaacaacaaaagaaaaatagaaaaaaaatcaagattaaaacaaatgttagagtatctatttcgctctaatataattctaattttatttattaatgtgcttaatttattttaatatttttaaaaacttatagcaatattgtatctctgtctctgagtgtaggttattaatacttatatctctatacaatcattaaacctcacttttattaaagtttcactttagaaataaccataaaaattccatctcttaatttcataaattacaattatctcgaatacctaagtgtatactaatcacttgacctcacacaacctaaattgatttatccaatgcaggattgttaaaaaatgtttctctcaattaatcaattttatgtggtaaatattattttagaccttgtgttttgcaaaatttacagattggattctctatcttgttaaatgacacaattgaccgtgcattttccaaaatgataaaaatatgaccctgagtttaattttggcaactttttttattaatataaccaacttgaagacaatttctaacacgaacannnnnnnnnnnnnnnnncagttttgtcataacacatttaaaacagattattattaaattttattttgacaaaaaattacttcagtgtcctatttgtactattttgaaaaagacagggtccgtttaatcatttaacaaaacaaatagtccaattagtaacttttgcaaaacacaatgtctaaaatggtatttacccaattttaaaatctatatataatagccctaaatataatctcataaagcaaaataatacccaaatccactagtggatggagaatatgtaaactggaggggcaaaatgtaaaacaattaatatttagggagacaaattggtaaacttgtatataattttctttttacataattaatatatatatatatataaatctataaaaacaaaacatttagggagggctgtataaaatcataagaataatattggattaaactaaattttagattaattatagaatcaaaatcataattagagtttcatctacaatataacaactaagaaaattagtcatgtagagcagaaaatatatgggtcatgcactcgtgctttttgacacaacacgagtttaggaggcacgagtacaacttaatatgaaaaaatataggctcaacatgacacgtcacgttgctgcaaattggcacgatgttatacaaaaaaataggcattaacacgacatgagaaatc

SEQ ID NO: 94291 - DNA, 747 bp, Cannabis sativa
ttccattcctattcctattcccatcctcattcctattcctattcccatcctcattcttattcctatattttcattcctcccaaccaaacgccttagtgtcaggaggattatatataagacgacagtaggtttcgagaagaggaagttttagctttaggtttaagaaattttacagctggagtatctctaattgagtatcaaaaacaaaaagattatattttaacatacttaagaaaaattactattataatagtgttctaaaaagtttactaaatttgacacatatttagcacaagatataacattgtgacaaatttaacccacaatttactacaatgtattgattaacttttactcaactttacattttttattaccatattactattatttaaataataaaaaataaataaaaaaaaattgtatattttcaatcaaatattaaatgaccatcaatataattaattttttttttattattttacatcttgtctattggagtacaattataaatagtaggccaaatatatagtacaaacttatttgttttatcaaatttaacacaaattttagatatctattgaaaacaattttccactaaaaaacaacaaaattgaagagtattattacatatttttattttgtaaaatataaatataaattattatttaacaaaatgtatggaccgctcaataactcttagtgcatttttagtggagataaaaataagtgatgcaaatgtaaaat

SEQ ID NO: 94292 - DNA, 848 bp, Cannabis sativa
tttatgctttaataaaatattaaagtgactcataaatttctcataaattattttatttttaaaaataaattattttattttaatagaaataaaaagttacccatgaatttctcataaaatatataagatgatataatttggaatgcaaaaaagattaggctgaatttataataattaaagtcaggatatgaaaatactctaaaacagattaatatatcatttagtttgcttccataatggtcggggcagttcttccccaatgatgccaattgtttttctcttatatatagaatattgaccttcatcccctttaacatataattgatatacattgctacttttattataaattagtatttttcacaccacaagaaaatattgctttaaagacgaaataagagaggatatacaagctaataatgaattaattacctttcatggaggcaacagcgttctttactcttctttcacaaccatcacaatccattttgactttaatctcaactgtctgggattggaaaccgaaaaatgtgtaaatgttcaaaattagttaattttatgattgaacatgagttctgcatatatactgaaacataattagttaatattaatcattctagtcctgataatactatttagtttctgttccatttatagtatacacagaatcaaaagcaggtttcttattagttttaacattaaaataataagtaaatcaggtatgttcttgcaaataatcgtacctgcattggtttgcgcttgcttctagtagtgctgctggtgacaatgcaaaagtttgagaggtaatccagagctcccattgatcttctttgttatagctacgatat

SEQ ID NO: 94293 - DNA, 678 bp, Cannabis sativa
atggataattgtaaaataatgtgttggaatgtgagggggttgaacagtagtaataagcaggatgttgttgtggatacttgcagaataaaaaatgtaggtgtagcttgtttgctggagactaaaatgaagaataataaagttgagggtatggtccaagctacgtttcatggttggaatcattactctagtaatgttacagaggggaggctattgctcttgtggaggaaagtgtttgttcaggttattgttattgctgaaacggatcaatatatccattgttatgttaaaatggcaagaattccaaatgatttttgtgaacttttgtctatggttcaaattccttggaggaaaggaaatgtctttggaatgatctcactttattgaagtttcatgttaagccttggcttttacttggggactttagtgctatctttcattactctgataggagtgggggaaaacaggtgactagaaaagagcttgaagactcataactggctagctttggctagctcgggttctcattttacttggacaaataaccaagatgggcaagatagaatttattccagaattgatcacgtgttcaaaaatgaggattggattgatagatttcctaactcaggagcaagttatcaatgggaaacgacctcggaccattgctcttgtgttgtgaca

SEQ ID NO: 94294 - DNA, 905 bp, Cannabis sativa
  modified_base (776)..(779): a, c, t, g, unknown or other
  modified_base (842)..(866): a, c, t, g, unknown or other
aaaaaataattaaattataattaatcaaaataaaataaataataaagatttatattttaataattaattatgaactttttgtttcttaaaaataaaatcgtttaatatttatttatttaaattccatttctattgtttattttatgttcttataaacattttatattattaaatattttaaaccactttataatacacataaaacattattaatatcattttaaacataaatcataataatatataataaataataacaacattattattcaactaaaaattaataataaacatttaaacaaattgttgtgttgcaaaaatctaattatggtaatttgactcattaataaatctaatataattaaattaacaatttgtatgattttatgtaaatatgttttcaaatatgtacatttttaaaatttatttatttttttgtgcacatttttttgtaataaaattgtttttattgtacactaattaatgaaaaaagccctataattaatatatatatattatattttttaatatttttttattatataaattatttcttaatatatataaatgtaattggggtgaattggttattgttgcccctaattttgcccaatatacgtggaccaatcagacagggacacgtggatcaagcaattcacaatatttgctaggtctttacgccataagataacgtccaggacgtaggtcccggagaaggcacagggaactcaatatgctcctggaagctcatataacgctaaggcatctccgcgagnnnncaggtttctcctgagcaatcaagttgcattaaataccgctgggaggaagcgtgttgggactgnnnnnnnnnnnnnnnnnnnnnnnnncaacctccaaccagcagcggcacagtaatgatcatttaa

SEQ ID NO: 94295 - DNA, 520 bp, Cannabis sativa
cagagcttaaggggtaaaacaaaagacctttaatggttttttaattgtaatgggaataaatttttggtgttaaatcattggttgatcaatatatttcttattcatccaaaaaaaaattactaatttaaatttaaattagtatctttatttgaatttaaatttgtaattttgtatcatatttaaatttgaatgatgatatatttttcaaaatttacatttaaattctatcatattttttaaatttaatttttttaaaaataactgtataagttttaactgaaaaataataaaaagttgttaaacctatatcatgtgtacgtccatttcaaaaaaatatacatatcatcataatttcaaagtctccaatgccatatcaatcgataatattaaacttcttgtcttaaatatattattattattattattattaatgaaattaagaaaaaaaaaactaaagaaaacaatatatataaaaataaaaaacataaaattcttgtattaacatcataataataataat

SEQ ID NO: 94296 - DNA, 719 bp, Cannabis sativa
taattgctatagatcaatcaagtatgtatatctaactattatatcatagtattctatattgtatacaattttgcatcttgagattatttgatttttaaacatgtggtatcaaagattgtcaattgtatatgatctaagacctataatttgtgtaacaattaatatgtatatgttacttttcatcaattacatgttaatttcgttattattttatgctgtattttttcgtttttcaatcttaaatgtttagggattatattcatcatgaaattttctttttattgatatctcatatgactaaaattgttgagtaaattgagaggattttatgattaaaattttaggatttatatgttttaattatgaaatcaaattatttttttttattatatattgattattgactgaaattgattgtgcaaatctcattaccaatttatttacagtatttttacacaactaatttttcgaattgcatgagatatacacaaaaaatcataataaattttagaaaatttttccttactcttacactcgttagtattctcttaaaatctcactcttcacatctcaaaaaatcgtgaaatttcataaagaggaaactaagattgttgcccatcacttttctatttgacacatgaagaggaaatgtaattttcaaccactaataatctcttttatcaatataatgaaaatctcacttctttgatagtggtact

SEQ ID NO: 94297 - DNA, 2526 bp, Cannabis sativa
  modified_base (208)..(210): a, c, t, g, unknown or other
  modified_base (2488)..(2495): a, c, t, g, unknown or other
cgtccacccttcacgctagctcttagggatagagcttaaaggatcactcagctgctgggtgctgctcgaaatatcaccttgttgacctcagaggacaactttgtggagtacgggctctacccaaaggacatcatttcccagcctgtttaggagaagaagaggaaatccagtgctggttgggctgagggagctcatcaggagaatgaannnattcaactcaagcgtgaagctaagttgaagggaggtgcgggagccaatgtgagaaaaggcgcgaaccttttaccggtgcatctatgtgccagcaaaaatgtatcaaagcaggttccaagcagattagggtatctgtttatcccggcgtttaagttgtgccgacactattttttgccggtaaaataaggttttaccagcatttcacctgtgtgccggtaaaaactcttttacctacgaagattcgcttacatcttttgctggcacaattaagcaccggcaaagcattgccggtgcatttttgcattggcaaaagtacgttttcttgtagtttatttggatttaataaaatttaaataataaacatataatcacgtaaaacaaaatgtgtgaactaagtaattgattacgtcataaatgatgttctatttttttttattgaataataaatgagataatgtagaaaaaaattttatttagggcataaaacccaacaacaggctttgttaatttttctttcaaaccatctcattacaagtccccccaaatagcccaacactgtgttaacaccaagcattttttcttagagtccagtcacttaaaaacctctactacccattcaaaaaaaggttatccaaccactgtcaaagtgacaatccccacacaattctagtatgttgaacaccttgacaagtaacaaaattgtgtaacacattctcctctcacacactatagatcgggcaaaaagctaacaattcaactcttttttatagtaaccgaaccatagtaggaagacacatcgtgctagctcaccaaaccttgttattcactttaggggagacttttagcttctaaaaacatttctaaacattagaatacttatcttcaatccatctcccatgaatttttttataggaggttctatgcacccttgactgaatataaccttgagacctctttatcccgcacataatgggtggtatgtccctttaataagatgatgtagcatattaaggacaatttatttgttcctattcttaaacatatcatcaattaactactcatcccacccatcaccatccataagtaataaattattcatagtatagcatttacaaggccatgatgactacaaataacatacaagttatcactatccaataaccaaggctcctccaagactttataatatgactcacattccttacacactaacgaaccctatttcttactaactcatcgacctcccaaatacttcttcaaataaaacactggttgttacaaagagaggcagagagaaacgtaccttgttgcaagtatcttgctttgaaaactcttgaaactaatgaggtcaaacgagtgagcagcagccagccttgctttccaagatgagcaagattaaagtctcttaagtgctagaaacgcatacccctgtactcttatgattacataacttatcccattacatccaaagtattcccttaccactcgagttagaagacttccaccaaaatctcgtcatttgcttctccatgtctcgacatatctctaacagtaagagaaagacactcattgcataacttggcaagaattgggccacaactttaacaagtctctctttccccgctcttgataataacttatcttccaaaccttgcattttcttcctaactcaatccttaagatagccaagtatcagtgatttgttttgtcctaaagtgcttggtaaacccaaatacatgctcccctcctccaccattcccatttgaagtacttaaaaaagatgcaacttaagttaagtctcacaattataactaatttttttttgaagatttccacaaattcactttctggcttgaagcagttttgaacttcagtaacaaatcatgaattttcaatgcttcatagtcagttgcctaacagtacatgtagctgtaatcaacaaatagaatataagaaattattggtgctctatttaccactttgcatccatggatccaactcttactttcatattttctaatcagagtcgacagattttcaacacacaaaataaaaagataaggagatataggttctccttgtcaaatgccccgagtcggggtgataggtcccctctctcttcgatcatgaacaatagtataccgagctgaattaacacatttcaacaacaaatgcacccattttcatgaaaacccatttttagaagaataccctccaaaagtcgcactctatcctatcattagcattgctcacgtctaatgtaaagcccgcttagttnnnnnnnnaattagcagttaatcatgattatttatgaaa

SEQ ID NO: 94298 - DNA, 614 bp, Cannabis sativa
attatccaaagtggtaggaagctgttcaagtattttaggatgttttctaatcacccttctttcaagcaggctatagaagatgcatggaaggttaatatccatgggactagtatgtatcaagtagtgacatagatgaaggctttaaagcatggtttcaaaggaattaacctgtaggggttctcatatattcagaccttggacttgaaggctaaatctaacctggaggaatgtcaggaagctgtgcaaaagaatcctagtgatctggtttcggagtagaaggagtaggatgcccgagtgaattttcaagagattcataaaatatatgactctttcctgtagaaaaaatccaaagtaaattgtattaaagatggggatgggaataaggccttctatctttctagtttaagagataggagagcacaaaatagtattatttgttgttaatactagagttgatagagttgacaaaccagaggaggtaacagaggccttcatggaatattacaattagctacttggatcaaaattgcaacaatggaaaaaaattcaagctggctatcattgcagaaagacctgttttgtccaaggagcaagcttaagtattgctagctgaa

SEQ ID NO: 94299 - DNA, 1010 bp, Cannabis sativa
aatcactgaaatagtaaaattgaatgaaattagacaaaagtctttaataaaacttttaagatcgttaaaaatatccatgaactattgagattgttgaatttaagaatttttgtctaatttaataaaaaaaatctaacatagatgaaaattcaaggtacttagtacatatcaaagtttaaggggcatgatttagtagatattaaaatttaaaaaacataatttaatacataaacaatcacagaaacaataaaattaaataaaattaaataaaaatctttaacaaacttactaaaacaaaataagtcacattattctatgatttatatgtttgtcggttcaatttgtatttttactatgataaaataactttggccgaaagatattaaaaaagggaaatttgttttaatgacataaccatgtactaataataaattatgattgtcaattttagtgtccgtccctttcaaataaaaaattagtgtccgttacatgtggcttatatgaaatggaggttcagtcaaagattgttttgaggtaatttaatcaatatttgtagtaagagagtgttcaatatatgtgtaattattaaaaagagcatctatctagatattattttcctttgcttgtttttttagtacaaaaacaaaatgaatgatgattactataaattaaaattaaccattaaaaaatggaggaggctctacacaaggtccacaacatggctccaactccaagcctccatagctgccccccactaataatatgaatgaattgtatgtaattaattacaatagaaataataaaattagcgattgtgatatatggtttacatagatattttttctctctacttttaatacttaattattatttattttattcttttttttattattcaatttatttaacatgtaattatcagcttccttttgttcataataataataattataatatgtttattgttcaaagtaaattaataattataaatcatcagcttccactacctt

SEQ ID NO: 94300 - DNA, 1208 bp, Cannabis sativa
  modified_base (920)..(930): a, c, t, g, unknown or other
ggctagctccatggtggagacaatttgtattgattcggcaagtagctaaacttttactagccataaagtgttcaaaatgagctaggaagtgatgtctcaccttgtcaaaatcatcttcaataaagttgccttgagaaaaggttgttattctattctcgagctttcttttcattatagccgcatggaagtaactacagttttcatcacaatacttgacctaagtaatcttactttgctgtgtgacaaagctagaataatttttctacatatgttgaagatgctgcaattgttgggaagctgcatgttggaggctgatatcagtgggatgtttggccgcatcctcttgaattctgctataaaccactccaaaccatccaaaccactcctagccataggactttcccaagcatttaacacccttttgcttgtagttaagataatcagcccagtagttgcaaaatctgatgggtttgaaacccatatttctctgctcctggttttggattatgcaaaaagtatgatccgaaacattgtcccatttgaaaaaagcatccgttttggtgaaaatatccagccacaatttgttaacgaacacccgatcaagcctagagaaaataaggtccccaacctcatgcttcttagtccaagtgtaaaacgatccagtacacctgaattcctcaacttgacccatggtgagccaattttgagcatcttcaaagccctttgattggatttgtctacccccatttctatcttcgtaagtgaacatagcattaaagtcacccaatataaccgaaggtaagttcgggtgaccaatactacatagcttcgcccacaaactcttcctatcctctttagaattacttccgtacacagccgtgacaagaaaagtttccttgtgcccacaaactttgattttnnnnnnnnnnngttgagtatcttcatgaataatttccacttgaacaaattttgattgccaaagaattaaaattcttcccgagatgggatggctagaataaaactcccaattaggaaagttattttccaccatctccttaactttgtcatgtttcaccttcgtttcaaacaaagctccaaatcccactttattcaacctacaaacatcgagaatcgccttttgcttttctctcttattcatgccccactttacaattttgacattttatcattttcccatctcattttct

SEQ ID NO: 94301 - DNA, 1026 bp, Cannabis sativa
  modified_base (894)..(894): a, c, t, g, unknown or other
actgtaaaattggttatttttcttcagcaggtggtagttcaaatcccttcccgagttgtgggggaaatcggggatggttggttgttctagatgagctaaacttagaggactttgaggtaatgttggggattggattgacttataaagtatagtccaaatattgattgtgaacgaaaggtggcaactcttgaatcaaaaagtgaggacccatttgtgttcttaggcaaggttaaaaggtcccaaaatcaattaatcccagtgtttaaggctgaaggtttattatggatggaggtgccaacctttcaattagtgtggccaatattacaaaaggaacatcaatgagactgggacacaatcttgtggatcaaggtttctagatgcttttagaggagccactagggttttgattaagtaggaaattgattctgaattgaagtgataatcggagtaaaacctgtatctaaagttctgaattggatggtaactgtagaattgaaaggagtgaagattcatttgtaggaaaggctgggcttgaaattactagtgttagtatttcattctagtgtacaccagttttatttgtgaagaataagtatcctttgataaggacagatgttatgttgaataattttagggaaggatcatcttctctaggattggtcttcgatctggttattaccagttgaagactcgaaaggaggatgttcctaaaacagttttcgtaccgatgactttgtaattgtcttcattaagggtattgtgatttcttctgatccaagggagccatatgagagattcctttggatgattttgtaatgtctctagaagcataagttttatgctaaatataagaaatgcgagttttgctgatcccaaatttgcaatgaagtttanagattttctggaattaacaggatgctatagaatatttgttgggggttgtcaacgcccttagtgaaattaaatcgaaagaactgaaacagagattaaccattttaccattgttaacattgttagtcagtgagg

SEQ ID NO: 94302 - DNA, 562 bp, Cannabis sativa
gcatgcattacctacataataggctgcttaggttttagatgaaattagccttcattccttcttaattgatgtgattcttcataatgaagccatcactagctcctttgattatcgtgtaatcgccctaagttgggtttatgacatctgacacgtcctcttatgggtactcccaaacgttttctccatgccgcattgaatgcaaagtgactgttcaacttcagccttactggcccggagaagcccatccgcgctttagctcccggaggagaagataggcctacttgcacatgtttgggagctagccctttgaattgcacttattctttcttgagatggtttggttaagtcttcaactcgtctccgggtgacgtgcccatatatgccacatgttgcatataacatctgccacatatattgggaataaatttggttgacctttaccccctaagtcttatttagtcgtaggtaaatgagacttgtaagctttctccggtatcaatgaatgcaatgacacatgcctcgggcgtgtaggcaatatttatgatcatcatcattggccttt

SEQ ID NO: 94303 - DNA, 980 bp, Cannabis sativa
tgtttactatgtcagtaaaaggctattgcaagttacgaccttacttccaggcacacccaattaaagtgttaattgatcaacccttgagacaagttttatctaaatcagacggttctggaagattgataaaatggtcaattgagctggggcagtttgacataacttatcaccctcggacatccatcaagggccaagctttggcaaatttttaaatagaaggaataactccaaaagaaaacccggttgttcagcaagacgcagacacttggaagttatttgtggatggtgcatccaacgaacagggctcaggtttatgagtgatgttaattttgccagaaggatttaagtttcattatgctttgagatttcatttgatgcatcaaacaatgaggctgagtatgaggccttgatcactggtttgaggatagttgaggcattgaaggtcaggaatctcatgtgtcatagtgattcacaactgattgtaaatcaggttctcgaggagtaccaggctaagggcctgaaaattgctaagtatctagcgcaggtttgaaagaacttgggaagattcgattattttaaaatcgagcgaatgccaagaaaacaaaactctaatgtcgatgccttagcaaaactggcttcgcagagcgatttggatgaactaaactttgttctggtggagatgctaaacgagctgagtatatgtgaaaaggaagacatcgagatgatagatagctcacatacatggatgactcctatagtgaactatctactcgatgggcaacttccaactgaaaaaaatgagacgtgaaaactcttgtattcagtgccttgctacacgatagttgaaggaaaactatacagaaaaggttattcaatgcctctatttcagtgtgttcttcctacagaagcaaacaagatcattagagaaattcatgaaagcttttgtggggatcatgcaggttggcaaagtctatcaaaaa

SEQ ID NO: 94304 - DNA, 1132 bp, Cannabis sativa
tgtggactgtataaatgtttaatgggccggcccaaagtatttttgtaattttttttcttttttgtatttttctgtttttttccttaaataaaatcacttgaatagtatttataatatgtgctgagtggtttttaccaccgctcaacctttttggagattcgaatttttgagtgtttgtctacactttggttacacttcctttgacactcttcaacaattggaggttaaagttctcttactatggtggtcgactattttttacgtgagtgaacctcattttctcagagacaatgagaatttcttgacatcttggagattatagtgaatggtttaagaactaacatagctagagcttatcgttcccacagacggtgctaaattattaatggtactcaccaacgaaatattaagagccaaaagtgatattcaaagatcttaatatatgaacattcgaagaaaaaatttagactcttaaactttcctccaaaaaaattattgtttcattaatattttttccaaaagaagtccctttacaatgacctcaaaagccctatctatagtgagttctctacaattttgaacttcatcagattcttaagtcatagaatgttaggtcactttcacactaggtaacctagtacttcaggtatagcctgttgccttagatatttttagttacaccaaaacagggccgactctgagttgaaatgggctataggaaaaaaaatattttgggcccttactataaaaataaatagtatctttaaaaattattaaaaaatatgtatattttttaaaaggtaattttttaatttgggtccttaaaatgagtgggccctaggcgcgggcctagcccgcctatgcccagggccggccctgcaccaaaagtccctcttttacttgtacctcagatgaattaaaaatttgtctccattatccatactcattgtgtattcactatcttgttagtaatttctttgcttaaacgaccctagcctcgatatttcctccttatttctatttgtatgtagaggtttcgggagctgggcgctacaagttgaggctaggggagagttgggccctacatgttgaggctaggggagagctgggcgctgcactatgaggctggggg

SEQ ID NO: 94305 - DNA, 542 bp, Cannabis sativa
caattcgcttggagccatggagatatgatagggattgaccctagtattacctaccatcatttaaatgtcgatccaaactacccagcgaaaaggcagaaaaggagactgttggattctgagagacaaggggcactaaaataggaactggataagttattagtcaatgactttatacgtgaggtgttttatccctcatggataacaaatcctgttctcatcccaaaacctaacggaacatagaaaacttgtattgacttttctgatctgaataaggcgtgcccaaaagactattttccactacccaggattgactagttagtggatgcaactgtcgggcacgagctaatgtcatttatggatgcatattctggatataactagataaaaatacatgtcctagttcaggaacatacgagctttgtaaccaacatgggactctactgtcacaagctcatgccgtttgggctgaagaacgctggggtaacatatcaacgattggtgaacgagatgttcgcaagtcagatcagacagaacatggaggt

SEQ ID NO: 94306 - DNA, 895 bp, Cannabis sativa
cataaaccaagaatttcagttatataggtacactttatatagaatagatatatctataaaggaaaagtatgacacggtgacatgacactctcaaatcacttcaaatacttttatctaatctctccttaattttctcatttttttaattttttatttgattaaaaaatatataattattcatatatgccaaaataatctttttccaattatttatacacattaaaaaaaaatatagactataaattatataaaaactaacatataattaaaaacgtatgaaatataatttatatatgtttttttaattttttattaatgttttattaagtttataaaaaatatctattaaaaaatatatttatataaaattaaaaataaaaatcgaaacatatataatatactaggtagatgttacgtgtcaaagccacgtattgttagttttatttgaagttttagattattttttatatttttctatttttattgcttaggactttttttataaaatcaatatttataataactgtaggataatttgaatgaggtatggtgtactaatattgatagccggtaatcacacatatgtaacaatctttttttaaatgatagaactgatcacatatatatttgcactaaaaaaaaataggcttcaataaagataaatatgattgatacgtgcagtcatgtattgattttcaatggaataaaaattagaaaataaacaatacattaaagagtgcatatcaaattatcgctcacaacaatcaataaacaatatctattttaagaaaaaaaatgctaaaactatatatgaagaaattattattgcgatagcaaaacctaacacatgtttgattaagtgctgagcaaaaaatctcacatcaccctgcaataa

SEQ ID NO: 94307 - DNA, 1703 bp, Cannabis sativa
  modified_base (877)..(886): a, c, t, g, unknown or other
tacaaaacaccaaaaaaaaaaaaagataaatgagggaaggatttaacttataaaaaactaaatttaaaaactaaaattttaatataacaattaaaataagaaaaaagacttatctgtgatatttactgattctccaataatctttaaagtctctaaatatatatatctatacacttaaaaaataaataacacaataattataacacaacaaaaatacactgacaaactgagaacttgtgagaatactatatcaatctcttttaagtacgaaataaaataaaataaaatatggtgaaaaagatagttttgaaaaaatacaaatttattaagaagagatactataagaaaaataaaaccgtccaaaatataattcattaaatggatatgatttctaaattaacaatatgagtaaatcaaaatgagtaaaaaattaatacaatatttcttatactattgaaataatagaattttaaaaactaatcataacaaaagtaatgtatataaatattaatatattttttatttttaaaaaaatatttaatttaagaagctttacgaaaattgaataataattatatagttaaataactatattatatcatatatatgagtgcactcttaataggtattattcatgaatgagtaatattagaaattttttagtttttatgattattttttctatttaattaaaaaatttctcatttttacattatatgggctggagttgttccattagctgaaaaaataataaaaaaaaagtttttcggcaaaaaaaatgataaaaaaaagttgagtttaacttaaatattttccatataaatatatttttgatagtgtaaaaaaaaagtatttttttgatattttctttaattannnnnnnnnnttaagcatagaaattcaaatttctattttattattcgctattggaccaaaatctaatggtttaatatttttaaaattaatatttataggtaaatttgtttagtaatacccattaaaaagtgttatatatatatttactagattagattgaagttaagcatagaaaacttggttatattttagttttcttttttaaatattataatttataattaatataatatataatattattgatattttttttttttgaaaagcttgataattttagtgaactttttaaaattttaaggtaaacaaacaatttcattttaaaaaaaaaatatataatataaaataaaaagaaaaacagtgtgtaaagtttcaaaaataaattcttaatttttattaataatttaagataattataagaggtgtttctaatcttgtattgctttagtgactaatattattagtataatgaaataataatcaataaataatagtaaatattccagtaattaattcatttcattttcatgaaatccgctaagtacataagctcaagaatagtcctgttatataaaaatattgtgcaaatttgagaaataattattttcaccagtctctctcggcaccgacaagtcgaactttgttcttctcttccagtctaaccgccacttaccgttagataacatgtcctcttcgagagtacaagacaaattttcaaaatgcactctaagagacaatactaatatcccaattgaaccgaagttctattttctcatcccatattaaataatagctatacaactcaactcaatcaatggattaaatcc

SEQ ID NO: 94308 - DNA, 536 bp, Cannabis sativa
gagagagagagagagagtgggggacgaaaatggagcaaatagttcagctttataattattattttttatacataaatatatttatttatttcttattatatatataatttttcttttttgactcggccaaagcgagtccttacgcacttagagtaatataaatgtgtatttatttaattttaatttatgcttattatatataatttatatttcatttaattattttaataataaaataatatatatatatgaaaaaaattaaattatatttttaataaaaaattttaacaaaattttgttaaaatacaaaatttttaagttgaaaaaaaaaatcatagaaaatccctacgtcggttatttaataataatcgtcgctatagcagcctatggtgtcggttattctataataaccgacgatataggagcactatggcatcagttattttttgaataactgacgacatagggtccctatgctgtcgattaatacttctaccttacagcgttgcttagaccagccattacaaaaaatctta

SEQ ID NO: 94309 - DNA, 834 bp, Cannabis sativa
tatcttaaacaataaaattacatactttaacattatattggagctataattttaaaaataacaaatcgaaaaagtaaccaaaattcagtgaatacgtaaattttatttaatttaaaatttagttgttttatctctaaataaaatatgaaagaaactaaaatgtagcatttttattacagcaatctagcttcatcggtgaagataatgctactgttgattcttaaataaatttttgaaagtaatttaaatgttattaagaaaaaaataatctaaaaaatatcttaagctgcaagttacctaaaaaatttataatatagttaattatataatttttaacttcatgatatcaattagtttattaattataaattagttacttctttatcaattaatttcattaattataattttatgatatcaattaattactttttcattaataaattataaaagaaattaaaagattacttttgattatgattactttttttttgtaacaaccaaaaaatatatacttctaacatattaaaatgatgattttaaaaaataagtcacagtaataatattttcaaactgaaatgatcaacgctgtgattaggaaatttttttgaaataatagagaatagagagaaaaagataaaaataataattaaaaaaaaatgaaaacttttcctcaaaaaaaaaaatgaaaactaaaaaaattcatagcaggagaaaagtggtcatgataggagtttcaataaaaaaaaataaaaaaaaaaataaactaaaaactgaaagataattattttcaacttttcggtagataaggtcattaggtatgtattgtgtgca

SEQ ID NO: 94310 - DNA, 1405 bp, Cannabis sativa
tatatatatatatgaaattttaaccttgaatctacaaacctaaaattataagatgataccttagtttccaaagaaaactagcagagcactaaaacttgaatgtgaaaatagtggtagtggtgatgccgatatgatgacagatatatgtatctatatatatttatgagaggatgattgtgatagttataagaggaagttgatggtggaaggtgctaacaatgttaagagggtgatggtggcatcgtgatcatggagcttttatggagcaagagatgggatggagagtaatgagtttgatctagagatatattgcaaagaggaacagagggtaagagctttcattagcttgtgtatgagtgagaaaaatgaagcattaaagctctatatatataggcttacaaagtaaccacctaaagctatcttcccctatcacactccttcttaatagccgtatatatcctactagtatgattcaaattttaaataacataacaactcttctaactataccgctcatgatcccacttaatagcatatgtgtcgaatacttaaggaataaaatatttttttttatcttcaaagttacatatatgtaggcttgaaggaaatggttttcaaagactaacaaaaatgagagctaatctctcaatggaagctacgttatcaaccttctccaaaattcttaatttcccacacacacatctccacctaaattgaaaaagtctattatattccatgcattgctcaaactaactatcagcccacgtctagatctctaattcaaatcatgaacacttaaatcatgcacccacaaaaatgactaactatactaatattaataatgaaaaaaatagttatattaatcccttacaatatatatgtaaataactaggcccgggatgaacttgtatattctaataataacgtagtacataataccaacataatttttcttaaattcctagccaaaaatataaggcccaacaaagtaagaatactttctactttaattaaataaaaataccactttttattctttaaaagatagttacatattttatgcaatcactatttccacatcgagatatctagactattataatagaaaacaataactaaatattttgatcattacaaaatgatcttattttaaccattctaattgtcaataggtcaaataaataatttgtaacaggtgaattttttaatcttctttcatctgtttacaaacctagtaacatgataggatatatccaaatcattgtgtttacttgagcctatatgtttgcttttaggcctagatgcatatagggagcccatgtaatttcaataatcaaaatggactaggttgctaaaataaacttgtcactttgatagtttttatttaggcccaattagtactggg

SEQ ID NO: 94311 - DNA, 761 bp, Cannabis sativa
cagatctgaactcaaatgcagactcggaccatggaccccaaactcggacccaaacccgagactctaaagcccgaaccccaaacccaaacctggactcggaccccaaaactagactttggaccctgaaatcggactgcgacccaaactccagactagaacagcaacccaatataggacttagaccaagacatgaaccgggacccaaatcccagacatcgggtttgtgtctgagttttaggtctaggtctgggacatgttctaggttcagggtctatatccaggttcgagtctaggtcgtggttggggttggggtcaaatttattgtaaagaatttataattttacacaacctattagtacaagtaaatatcaaacttagtattgtataaaataatactaatataatacaatccaacacaatactatactatactatataatacaatatatcatgatgtaccaaatgagccctaagagagtgatatttatactcccattaaaattatatgtatacctcagtatttttaaaattaacttagattaattttaaagaattactcttatttttctccacattattttgtactaaattcaattattattttaatttaattttcatgttttttttaaaaatatttagaattatttttatttatttaataagatttatataattttattttaaatttttttccttaatatttaaaatatattaatttattttatatgtatattaagaaaataagaaaaaagaaaaaaaaa

SEQ ID NO: 94312 - DNA, 568 bp, Cannabis sativa
agtaagattaactataaaatataccacatacattcttaacaaatatatgatttaaactcatttgggttgaaaaaaaacacaaacttactgttcctgccgctgttttggatgataaaaatgtgttttcctttgaacgggataggccaaaatcacacacctgaaaaattatatatattgttattatttcctttaaacaagtaagcaaaaaaaaaaaaaagggaagcatataaatagacatctcaaagcatgattattgactagttaataattagagcaaaatcaaatggcattaacttcacactgtagttaagcgagaaaaaaaaacttcacactgaggatattaaatacaattacagaagtaattccctaaccaatctaatgattgtacccaaaattttaccaagacagtcgtattagaatacatgcttaagttgtcttggtaatttaagctgctgtttttttttttttgaaggaaaatggtaactttattaataagaagattcaaccactacaatagaaagaaaatcaggaggaacatcatcctcactaaaaatacgatctggataca

SEQ ID NO: 94313 - DNA, 2680 bp, Cannabis sativa
gaaactgtctagatgggtgacacatgtcctggttgttgaagttgatctaacgtgaattgattgagagtctcttcatgttttgtgcattaaatacctcttgaaagttgtacctagagtcacgcactgacaattgaggggtacaacatgtgtgaaatctgtccttcacagtgagtactttaatgtacattttggggggacaacccaaattttaaattttggctaaattaatttcctctttcaggtgcctataaaaggggcttaatccttcatgggaacttttttagccattttcattctcagcgaatcatagcaaaaattttctttttacttttctcttaaatcttcaaaaaagttgttggagaatccattgacgtttccttccgagtgcatcaaaaaaactctgaacattgagtaagttacttttccttttattttatacaattgtcacttaatgtacacattattttagatttcttgctgcaaatttatctgttcttgaactgtttttgactgatcatagaatagatgaaattagtgcttgtaactttagctaacactcgattataactgctaagtctctaattgtgtattaattttgacctgaaatcgtttatttccacccattcatgggattctaaagatttccaggtacctctcaaagttttgaacttttgggtttggaaattctatttttgaatgaaatcccttccttttgtctttaatctggcctggtcagcatataaaacctatttttcatcttccgatccatccaactctcactttcttatctaccatgttttgtagatgaaccctggtgatttttgaggaggcaaacaccatatcgaccaggacttactccaactcttgtacgaagatcattctcgactccgtgcaagttcatcttcatccagtgatagtctttcaaattttatctttcaagactgggaagtaagtagtaagacacactgtctctaaagcccgaggtgcaacatctccaataccctgaccagatacgtggagaagggtacaggcaattcatctgtgagttaaagaaagggtggaggcgttatcttcctgcttcttggacgtacaagatccaacctagggttattgatactctgcccgaagcccgcccaactctgtctactaagggatctgttgttgttgttgagttcgttgtaactgttgctaggcatactactaaatttaaatctctgcccaagcataaaatgatggtgctaacaaagcagacaatgaggaaagcttcagaaactgatccacacaaatctaattaagtagtactcaatatcaattccctatggatcgacctcacctgtgtaagtatttaaccgcaatagattatgtacacttgtgtagactataattttaagcaacaccaaccactcttggagctatttactaaacacctatactcaaacaagttaaacaataataatcttgtttagtaataactcatttatcacaattagcaatttagcttaacccttgctccttccggtttggagaactgcttgactgaggctctaaaaatcttgcgactggtaagcctttttgtgaagagagagagcaactctaccacggacaagttcttaagaaataacctcttcatatttctttccaatgacgagtaggaataggaaaataaaaaattctccctttccataatgtttaaacgttttactgctttctaggcttgtcctgttaaattatgtcatataatataatatttaaattaaattatttatgttacaaataactaagtgttgtaaattcttgagaaatgatgatcataaattgtgtaactctcatctccatattattactcttaaattagtaaaatatgttactaattgtttatgaatgtaaatgaataatagctattgaaaacttgatttattcatttataaggtgtataaatggtttaaaattaaatgagagtggtttggaacactttgaagaaaaattgaccaaatctaaagaaaaaaaatatggtaaaaattcctccaaatcacccaattaatactataaatatccaatttatgattggtcacgtccagagactttatggtaattattcatgttcatgtgagggtcaaaattctataaatagaagtcatattgttcacttgttatacatgtggttgaaatcacttatgtcgtggttagaacattgtaagaatatgttcaacattagacactgagcatatgaggctaaattaatcctaaagagcatttctaaaatttttataagtgtctatgaaagggagaaaatgacttttagacaaagatcattgaccttgtgtaagtctttgagagatatttttctcttctttatattcatatagtaagtattatgcattattattgcaaagagttgtaatcttttcttcttcttctcatatattccctcaaagtgtaatgaaaaaatttctattatgtcatgacaaaaatatgtacatttaaatgatgatatgaaatattttgtacgtgaaaaaacaacttcaacaaagaaagtaatttagtccatgtttgacatcataattaaaaaactgttttttgtttttaaaaacaaaaaattgttttcaaaaaataattaggcttgtttggccttgtttttttaaaaaagtttttataaaacaaagttacaaaaaacaagaat

SEQ ID NO: 94314 - DNA, 579 bp, Cannabis sativa
agttggggtacctgtggaaaagaaaccaataggtcgtccaaggaaaagcaacgctggaagaagacgggagaatcgtttcccgtctggtgataaaaaagaaactgtacctcgaaactacagcctttgtggcagttcaggccacaacagagcaacatgcaaagcccgcatttgaggcgtagtctacttattagttttaataacacgtgctgtatttgttattcaaaactgctttaaaataaggttgaggttgataattttttgttgtgaatcaaagacaatattgtgagcaattatgtaactctgtattttaaattatctaaattagactaaatacgaaaagaaatatttttaagtatacaaaatatataactgtatttttaattacaaaaaatatacaatgtacacgttaattacacatatattcaaccgacattctggtaaaacaaatcaacgcaccaccgttcacgaaacatcttcatccagccctgcatgacatcagctaatccacgtcgcatcatgagatgctccacatactcaatgcaataaacgccacaatcaccactaaatgcaacataaaat

SEQ ID NO: 94315 - DNA, 926 bp, Cannabis sativa
aagattgcacaataattgaaaaagcactgtagcgtgccttagcattcaagcgttacaaatttaatcatactcatagcatttattacattaccaatccctattataaggttaaggcgcttgattgctatgagtataataaaattaaaaacttaaaataattaaatatcattttgttatactatatcacacagttttttttctaatatatatatatatatatatactaaataattacaaatttaagttatataaatactcataacacaaaagttcacaataaaaataaaattaataatacatcataaccagtaaactaattattaacctaaaactattctacctatatatgattattaacgataatattttatattaccatacatatagctcattaacaatatttttaatttatccaaacttaccataaaaaatattattaacgtatatgttaaaaattaagttataatatatacatatatagctcatagactatattttcagtggatagttagctaattatagtttttataattaattataaattaaaaattatataatgtagaataaaatcaagaaaagaaaaagagataataaataaatactttaaggatatttaaagatattttctgctatttttataatagatatttagattaattaatttaattaaaaaattataataaaagaaagtgaaaaaaaagtgaggaatagtttagaaaaaaatatgcagctagttatgaaaactaaaaaacataccgtgcttcgcgtgcagttgtttataaaattttaaattatatataaaaaatttattattgtatttgataagaattgtgtaatatattttatgaaattataatttaataatttgtataaaaatattttgttaataaataaataattattctactaaattaattcttattttt

SEQ ID NO: 94316 - DNA, 527 bp, Cannabis sativa
gtatcattgtgcgtagacaaagcaacgcaagaggtattagggccagatgaaggagctcatacccgatacggttacgatgactaactcagacaaggtcgttaaatgcaacaactctatccagctagagactctggcactggtgccgacaagagggatggatctgtgttttgagaactactttccctgcctttccaacagttggtaaagttgctcagaaacagatcctgtgatggcaactgctgagaggagaccatcagtactattgggagctgctaggttaccaatgaggcctgcttatggtacttttcgtagaggcgtgaaacttttggcaaagtttgccccatgtccttctcgctgcttggtgtaactacaaccccgaagttatattagagggaatcaacttgggaaattataaaccaactagggagccctttgtggtgatattttgcacacataagtgcatgtatcgtgacaagtagtaaactcaccaagagtgaggttgatcccacaaggattgtagttaagta

SEQ ID NO: 94317 - DNA, 617 bp, Cannabis sativa
ttagtctatcatatccatcatgtgtgactatatataatagtcgtacaaagaataggaatcaaagatgtcttaaaaaaattagacagtaaactagcaatatcctccaacaaagatcctaactcattacgaaaagataatctttttgagaaagtagaaatcaaaacaaaatagtactcaaaagtactaataggcaacccaagtacaagagacacactccaatacaattattaaagctacaccttttgcttggaatactccagacttttcaatcaaatgctaccataaaagctagcttgagcaacagtaatcttcttataaagtaaataaaaattaatttagcatactatatgtttactgagattttttaaaatctgattataaaagaaataaacttaaaaaaggaatgaattaaagaagaaaaaatcaagattttttcgtggtttaagtgttaatgaactctagtcaacgagtcaataatatttagttagaaaagtttcaatatatttttatctaagtgtttttgccttagatgaagaaccctaattcttagttcttgatcggagaaatcaattttcaacatattgcatgaagagattatgttccatttataggctaca

SEQ ID NO: 94318 - DNA, 610 bp, Cannabis sativa
tttaaaatttttaatttttatcattttctcttttaaaataagttatatatttatagatgtgttagttttaatatatagattttataattatatgatatatctaataagaatttatacggtttagttagtgagtgatattaataatttatctcctaataagttataaaaaataaaatgttacttagtgatattttgatttttgttcttttaatatgtttattaaataatattaactaaaaaatatgaaatagatagagttggaacacttattatcttaatttcataaaactttcagatttttaattttttgctattttttttttatgttctttctgcgtgttgcagaatattttttttatatatatatatatgtatatatttttcttttagcttttttattatcatcttttcttaaatttttttataatataatatatatatattataatataatataatactatatattatattatattttagatatagatagttttttttttttttttacttttttttagtttagatatctacataaataatatatttttttttttttgaattttggttttaatgaaatacctgaatatttaagatatttaatttactt

SEQ ID NO: 94319 - DNA, 710 bp, Cannabis sativa
catgatctccagcataatcagcattgcagtagccaacgatcttaacctcatcacttttcttataaaagagagtacctttcatgtacctcagtattcgtcgtactactcaaactccataggagatgtctggtcttgctaatgtaaggtggattaaactaccttgtcgatacattgctctatcttgcaagtcttgcccaacatgagcacaaaacttagcattagcttccataggtgttgatatgggcttgcactcgagcattccaaatctttgtagcaaatctatagcatactttcgctgacagagaaataaaccttcctcagttcgattaacttctaatccaagaaagtgttttaattctccaagctcattcatttggaagcgaactaacaaattctcctttgtttgacgaatctgcttcatcatggccaataatgatgaggtcatcgacatatactagaacaactacaatcttttcttcccttactttgaaaaataagcttgaatctggatgtaccatgacgtaaccactctccactaagaactcagcaatcttgatgtactatgctcttagagcctgcttcaaatcatagaacgcttttttcagtttacaaatataatttggataagctctatcctcaaatcttcttgattgcaccatgtaaatctcttgatctagttctccatatagaaagacgttcttcacattcat

SEQ ID NO: 94320 - DNA, 733 bp, Cannabis sativa
acgtgactcggtcgctcccgaaagtgaacgaacaactgactgaggtagacagtaagctgtccttggagctgatctttggaggaattttgaaggaaatttctcgagtaagttccctctatcacttttctttccatcttcttttgatagttcagattttaatgcattctccgtacaaactggtgtgaagatggcttacgcatactctcgagccaagtcgggcgctgttaagaatctttccacttctaacacaatgctaagggaagcagacttggccaagaaagatgcagaagacgctgaagatgcatggacccagctcaaggtcgtgaggaccgattttttaggggcaaataagaaactcctcactgctgagactatggttgctgagctaaccagggagctgcaggacatgccatcgaccgtgcaactcgagacagataatgtttctttgtctcaagaaattattagtctccaagatgagagagagggtctccggactcttcttcgtaggttggaggatgaggtcaaggacaagaagactagggaggaggaactcgaagcgaaggttaagagccaaaaatccgaggtggagtagctaggaagaaaatggatgccttagagacagcaagtctcgagattttatatgacatttggaaggccaatcccaaagcaaattttgaatactttggcgcttccacaggcatttttcacaactactgcatggctcaggcatcca

SEQ ID NO: 94321 - DNA, 794 bp, Cannabis sativa
  modified_base (36)..(52): a, c, t, g, unknown or other
aaaataaaaaaataaaaataaactaattataataannnnnnnnnnnnnnnnntctcttatttttttaaaaaaataatttatattttattttagtaaacatcagcttaaattttttattatatatttaagtttttaactgttaattacattggataaaatataataaaaaaattaaaaatatatataaaaaaataaaatattatatataataagttccttacatatttgtgaatatagtgaactagattataatattatcactatcattataatagatattaacaactcacagtactttaaaaattataatttactaaacattcagctcactttttttccacaattttgctgtatgtactttttctcacagcacatctacatatgtttttttttagggtataaatgtgccaaattgacccttaaaataatcatattagctgcccaaaaaggggcttcgagcgtctatttactccaatatattaataagaaataatgatcaggaaattaaaacataaataaaaaatcaagtgacactcactcagagacacagcacaaaaacagtgaagcagaagcagcaaatggggtcggactcaacgtatggtcacgtccaaccagtgacgaaaaatcacgttagacaactcacccaacattcgaagctacgtggcagaacatggaccagtcatctcatagcccctgccataagaggttaacaagataattattttattatcttttcttaaaaacataaaatcccatattaataactaaacagaattatttcagataaaaaaaaa

SEQ ID NO: 94322 - DNA, 511 bp, Cannabis sativa
agaggtcgttgcgccaaagaaaattacccatttaaaccctatacgtgatcaccaagttcccgaacaaattactcaaatgttgggaaggtaataattcaatgactatttatgtaacattataattaactaatgaattgaaatgctaatataattttttaaacagagcatacgaatatgtaggggcatcaaatgtgtttcttggccactagcacattgtccaagacaatctaaaaactaagaatgtgatttttatgttttgaaatacatagctgacatcgttgcacgtgcaaaccccaaccgttaaccgtttgaagataagcagtaatataacaccaaataagagttttaggcgcgacactatcgacactatcaggaacaacaaaatttcgttcttgatagtaatagtatcaggcgcgattcatcaaagttgttcctgataaaatttattttattttaaaaataattaaatgattattaatcttcgttcctattttttttttattattatttt

SEQ ID NO: 94323 - DNA, 893 bp, Cannabis sativa
actatataaactgataattaataagccgccacgtctcattatttggtcattgttgttgttgttgttgttgttgttgttgtttagaattagaaatcagtatatagcagtagctaaacaattcagttctgtcaacctagaatgagtttatgatatgtgacattgtttacgagccaaattgtagaatatgatcaatataccacacacgaacatatataccgacaataactaaaaagtaccctttatggtgtgattaggagttaagtagcttcttctgcatattatcttttagaattaactataaactagtttagtagtatttcaagtgtatgagccaaccttataaagtcttgtctttgtttttttttttttttggttgggtgtctgtgtgtgatagatcttgtgaaagtttaagggtatataaagatgccttttattgcacaaattagaaattataaaagtgtgtaagtaaaatatatacgcgttggtgttggtacagaaatacagccaaggaagcaaagggtacgaggataggcatgaaagtggtacagaagaaagagcaccttcaacagcagaggtaatagaaaagatggctgaggagaggctccgaaaggctgaccattcagtgtttgatgataagacatttgatggagctgaagaggccactttgggtgaacctaagcctgactctgtcaacaaagacagggaccaacagcctggtgccgtaagagatgatgatctggtgtcttctcaaggatgactagaacttttcccttttacttgaatcaatacaggtagccatactatttcacctgagaagacaaggtgatgagtggttaaataattaacgttgaataagaagtgtttcccaagttccaatttccatttgatgtatt

SEQ ID NO: 94324 - DNA, 512 bp, Cannabis sativa
gagttggttcaaagggaagttgcttaagatgcctttttgtcaaagataaaagctaatttggagcaaggtaaaactattgctggtttttcagtggtgcacgaccgattgctgtacaatggcatgttggtgttgtcctctacttcatcaatgattcctcacttcttacaggagtatcattgctctccggttgggggtcattcgggggagctacggacatatcagcgactcaaaggagatgtttattgggttggaatgaaggccaaagtattggcatttgtgcgagcttgcgacacttgccaacgaaataagtatttggaaatgtctcccggaggtttgctacagcccttgtctttaccagcccaagtgtgggaagatcttatcatggatttcatcgaaggcttgccaaaatcatcccttcacggccactttattggcctcaagcatcccttcatggccaaaactgtggcagaaacattcatcaatcacgtggtcaagttacatggggtgccatc

SEQ ID NO: 94325 - DNA, 586 bp, Cannabis sativa
ataaaatttataataactattactagaaaagtcgtcagagtagatatcagtcctgaaaaggtcaccgaaaaagtcatcagtgccaaaaaaatcattagaaaagtcatttgtaccgaaatagttgctaaaaaaatcaccaaaaaattcatcgatgccaaaaaaatcaccggaattgtcatcggtgccagaaaagtcactgaagttgtcattatcgtcagaaaagtcaccgaaattagatgtctcgggtataatttaaaatagaactaacacagaataactcaaaccgattataattaaaatagaactggttttataacataatgaattacacaaaataatccaaaccggttatcattaaatagaaccggttctataacagtgatataatgaaaaataaataaataacacaaaataactcaaacagattataattaaaatagaacaggttctataacataatgaataaaaacaaagaacacagaataactcaaacgattataattaaaattattttgccttaccattttgtgaatcttgtgttgtaggaaaataacataagttgaagtttactccagcaaggcacaca

SEQ ID NO: 94326 - DNA, 906 bp, Cannabis sativa
gttctcaaccgaagcaaaaaacagtttgcgtcggttttaaaatgaagcaaataacttcaatatttatgtctgccgttattacgtcggttcagacaactgacacaaaatgtttatgtgttactttacaactgaagtaaaaagttatttttgtagtagtgaaaagactctaaatgcattaatagtctttaaaatagcctaatatcaataaaataatttaaagaatcaatttaagaatataaatacataaattagttatagttataagataaaatatcaacttattagactcatttagacaatttattcaccaattttgcttgcccatttccttatggttgcatcattgaggaaaaacttgtaatgatcttatttatttcactgaagttgtttaatagatcattgtcaaactacgttccattattcgagacaatcttcataggaaagctaaatctagaaataatatctttcgccacaaagtctaagaactttttcgaggtgattgtatttaatagttcaactttagtccatttaatgaagagcctatgtaagaaccttgtgtttcatgaccgaactaaacctaattaaatctagtaccatttcattatagggacaaagacgcaagaaaaatttcatattttaaaagttcctactgaagaaaacctagttgacataagtactaaaattgtatctctaactaagtttaaacatcatgtttggacttactagggattagtaatgtaagaatcctatgtaagaactttgtgtttcatgattgaactaaacatagacccagaaccctggtcgcaaagcctcactatcgtcttctctcatggcctctctcattttttacatttctttcttctagcttaccagttttttggaatattttgtgatatttaacgatgt

SEQ ID NO: 94327 - DNA, 566 bp, Cannabis sativa
tctctctctctctctctctcggtgacgcacccacacacgtaaaccacccacccacggcagaccacccacgaccaaccacgcagtcgactggccaacgtgacccacgactgaccgccccctcaacccacatcacccacgccgaccgcccaaaacttgaaatgtctaagataatttttttttatttttttcctttaatttttggtgcttaaattcatgaaatagaataatatgttgtaattttgtgtgacatctgttagttagggttagatttagcaagattaggaagagatctgtcgaaaatgagattttttagattgggcccgatggggcccgatgcccatccgatggtcgggttcgataggggcttggttggaggttgaaggtgaccacccgatggggccgatggcctgatataggtccgatttagggtctaatgggcccgattccttgggcccaatgggtccgatttacaattaggggaagatgatgggaagagaggagttgatgtaattgggggagggtattttggggaaacaataaagttgtcatatattagaaatattggt

SEQ ID NO: 94328 - DNA, 1462 bp, Cannabis sativa
atatcatataatatgttattttatattattcttattttataaactatatgtaaatatgtattaattattgtttttttcctttaaatattaattattttgcatgcataaggagattaatcttgtataattgtattggtgttgagaagaaaataaactattctatacatttgtagagtaatttgcggtataaatacttaattttaattcttgattatagataaatatttaaatttaatttttaaggataataatacctaagttatattttaggacctgtcaaattattatttccatgttatttttttattgatatatttaaagttatttttatataaaaaaataaaaatttaatgatctagactaatcatgaactgtcacatagtcattgacttcacatttaatgaccagatatacctacagaagtttctgaaaaataacttaacttaagtattattactacaaataaaataattaaacttaattaaatatttatctacaaactaaaagttaaatttaaatatttttatcgcaaattattattattattatttttttgtgtatgtattaatcacttggccaagatgagagtttgataaaatagtatataattaatttttatagtagtatatatcttgtaaaatgaaaatattttgataattacctatcaaatatatatcaaaaaaactagttattttgatactcttattagtgcaatcgagttctacatattttaatttaatatgtaattaatatatgtatatgcagagattgtatagttatggtgcaaggaaggttgccctaattggattgggacccattggttgcatcccatatgcaatgaaatcatttggggcaaaaaatggatcaatttgtgttgatgaagtgaatgaagctattcaattattcaaccaaaagcttatatcacttgttgacaatttcaacaacaaattcaatgattcagcaaagttcatttatgtcaactcttttggaataggctctggggatcccactgctgctggtatatatacccacctaactacacattatttattttattttaaatttaactattataattgatttatatatatagaaggagccaactttctcccgtttattagtagtgcctaataccatctaaaaatagcactttataattagttagcgatatttcgtaaaaattacatacaataatataagactcgatatttaatttactaatatatgacatgttagaaggtgctaacagacccaactccaaacatgaggcaagctaagtttgtacctagggcctaaggacccaatcttttaaaagtacatatttttttactaattttgaaaaatattatcttttttttttttgtttttctaaataggagtctaaaaatattttatttctttcatctactaaatttcaaggctttactaggcaccattgattccttttgaacatttctaccga

SEQ ID NO: 94329 - DNA, 18726 bp, Cannabis sativa
  modified_base (18605)..(18607): a, c, t, g, unknown or other
atggtcattagtgtgacactcacatgataatgatacatcatctattaaagagttgcataagtgtatctctaatggcgatgcatcaaatagattatgtgtgtagtttattttgcaaaaaacttgctctaacagtattttaaaagttgtgccaaaattgatacattttaaaaattatactcaatttaacacataatatagcacaatccaaaatttatattgttataaatacactattttttatttatttttatatattttattaatatatatatagctattgaccattacgttatattataaactatttacattcttttagataataaaataataatagaattagtgataaatatttttttctttttgtattttaatagatgtattaattgaacataaaaatttgcatgaataaaattttataattgtgtattgaagtacaatattaaaaattaatacaaatatatcacaaagtaaatatttgtatataatataacataattgttatatttcccattgaagacgacgtgagcattttgttaactatatgctataaaatctaaaataattcatttatatttaacaatgagaattcttaaaagaaaagaaaaggtaaaagacacaatttaatagtggtcctaaaaaatcttcaatacaaacttatctcttcttcttgaaagaaaagacaaaaagtaaaaaattaaaattattttttttaatgtgaaattatgaaaataaattataatttataattcttagtaaattatgtatgtaataaattataagactaaatttcctaaagaaaaaagtatttatttgtgcacactattattcctacaaatatatatatatatataaccatattgagaaaaaaaaaacaatcatgttttatatatattgaataaattaaaatttaattttattaatgaattaaactaaattatttaacatatataatagataatttaattaaaaaaaaaaattaccacatgtattgtataaatcaacctcagcataataaactaaagctgaaaagtgaggatattttggtaatttaatatgtggaaactcaaaaaagattgtcatttttataaaggtcgtagattatccacattgagtgcctaatgtagagtgtcacattgggcaccttaagattcctttcctagtaggaatttctagttagaattatttgcctcaaaaatacctaactataacttccggttacatttaaatacataatttaaatttttggttagaatttttgtatgtacctcacccgttgagggcccccagtttggtacagctgtgttatggaaaaaataaatgtcgttgtgctgtgagaaaaagtaactgcagcagaactttagaaaaaaaaattagttgagtgtttgataaattataaattttaaagtgttgtgagttgttaagattttattataatgataatgttataatctagttcattataatcacaaatatatataaaaacatatggtatataaacttttattttttatatattatatattaattattttttttaaaagtataaatttatttgcattagataaaaataattataatattttaaaattatattttcatcatataaattatttttaaatgggaaatttgaatttttatgcatacattaaggggtaattttttccctaaacctaaaatagagggcattggtaaaatgggacaacatttacttaattctcacattactcccatttgaaatctgccttctctctctctttcgcctctctttctctctcgctcggtgccacacccacacaggcggaccacccacgcagccgaccggcctacgtgacccacggccgaccgtccccctcaacccacatcacccacactgaccgcccaaaacctaaaatgtctaagataattattatttttttcaattttttcctttaatttttggcgcttaaattcataaaatagaataatatgttgcaattttgtgtgaatatgttagttaggtttagattaggaagattaggaagagatctgtcgaaaatgaaattttttagattaggcctgatggtgcatgatgcccatccgatgggggcttggctggaggttgaagatgactaaccgattggcccgatagcccgatagctcgatataggtccaattttagggtccgatgggcccgattccttaggctcgatgggtccgatgttttgggcctaatgggtccgatttacatttagaggaagatgatagaaagagaggagttgatgtaactgggggagagtattttggagaaaacaataaagttgtcatatgttagaagtattgggataagtttaggaaaaaaaatttaaaataatgtaagcataaaaattcaaatttcctcctttttaaattctcattttgaattaacacagttatttaggcaattagcattcctcaccgctattgttattattgttcatgcatgactctcatgaaattagtatattattaattaatgtgaagtatatattggacttgctgcatgcaaaataatattttattaatcgatttgatattgataagataataatgttttataatttcaaaaaagatatttattggggttagctaacggataatgtaaacaaattattgtgttttcttttttcctttttatttttcctcaatccaatactaattaatatatgctgacaaatcatacattataatattaatattttgtattgttattcacgtttctggtttagtaacttgcgcatgtttcagcaaaattaatcaaagcaagctcatttttaggcccaacaaattaacctatcaaccccacaacaactacaagaaataagactttggcttgggtataccattggcaaaagaggttgacaaatcaacgttgttactagagcttttaccggcgtaaaataaaagtgtcgacaaaaataactattatcagcgcattaagatgcaaataaaagtgcaacgccggtaaaaggtctagagccgaatgtaagcctagcttacagaaaggcaaggccagaccacttcagtccacaaaatgatgtttggcgtagatggtgaaagctccatcaagacatttctagatgctctcatggggtaatccaaatacagacaattgaagagactttcaaaaattatcttacgtgacgacctagactcggggtcccaccatgtcagggatttatttaaacaaaaccatcaaacacataatccacatatctacctattttaaacaaaatcaatacaaatttattctcaaaccattataacttttttataactccaatttgtttaagaattgagacgtctttttctatattttgagaatattattataattaatggagatttagtaccctcctgaggttactgaaatgtattttgttttatagagtcaaaataaataaataggaattaatacaggtgtgttgtgttattctcaatctcaatcacagtatctcatgagttgagtgcacatcgtgattacaaaattatattcattcaaattgaatctaatagtctactctaatgctagagtgttgaggctgacttgaaagactctagtgtgaattcttcaacaagtttttttggatttttctggattggatgttcaattaaataatacgaaaagatagtgagaaaactctgataggcaacaagaggtaaaatttctaaactaatagttaggtttgtactatgtataattgtgttgagatctggggtttgtggttcgtatcagaccaaagaggcgtgtcctcacctcctcatgtcgtctcggcccaaaggggcctcacgcctccatcatctcggcccaaagtgctaccaatctaaaacaaataagtcaaactaaaaatttctgttattttcattttaacttctatttgggacctttcagccaatgtgtgtcagttttcaaggttggcgtctgtgacctgtttcaatatatacaaattttccacatgtacatccacaaatttcttgatatttgtttttgtgggattttttcaaatgtcatattcggtcttgtggtgtcttacacgttgtttgttatatatacctacactttccaaacccaaacgtgaggagagtgtatcaaagttactctcacattattaataagtagaaataaattatcatatataagatgaatgacctactcttctcattgaaaattagtttttaccaattaattttgaaataaaattctattcattttaacttctctcattccaaattctaataggagaaagagtcaatcactatgtcttacaattttgggaaaacttatgtgtttggtagatagtcgcctatattaaataaaattttctattttgtattttatattacatgcgcttgtatttttatttcgataccaagaaaaactaaagtattttttatgactaacgaacacatataattggttttgtagttaattaatcaataataggctccactcaacatgcataaaaagtgttaatgtacaattgcatctgcatgcatgtcttttacatttcatattaattggttagaacatgcactaagtgtacatacgaactagcttattacaactatatataaaggaaccaatgtttgattattaacaataccaaacaaacaatacatacactatacagacaattagtataatacattatatataggataatatggagagtaagattaagattagcaacttggtggtggtcgtcgtggcggccatggtggttctaatgcttgttccgtccgcctttgcaagatgcaaaaacaataataacaacaatattaaacttctcacctcatcttctgatcaggaactcgtcaatgagaatactgaggttgaggttgaagttgaaactgatgttgctacattaatgatgaagaagatcgctaaatcttctcctattgatcaagttgtgtcaaggatgttggcccgccaagaagctgaggggctccgtcgtaatgatgggtgtagcggttcctcttgcaatgttctcaacgacccttgttgcggcggatgccattgtgctcctgttggaattttagttggggtttgcgtcggttcatgttgttaattaattaattataatatatataattaattaataaaattaattgtagtgcttagtacctacaattactatataactaaaatagtaggatacttactatatgttaagtataatcttataaataataaatatatgaatgtagtgatcatttttttgatcctttctatgtttatttttctgtttttatatagcaaagctattataaaatataaataaatatgcattatatataactatttaattatttcacactaagctaattttcaaattaacactgccgaatgaaggaaggaccaaataattaatcaaatgtattatgatatgattcaaaaataactatgtaataaaatcatcaatgattttcttaattcaactaaaatatcaatatatcacattaaaaataagatacattttaatttgggaattttaatttgagttagaagattatcgacaatggaatgtgattcaatagtggagaagatggttttgaagaattagaatttgggggatttagaatatctcttttattggtcgaacatctctaataaattcagtgcttattgctgttgggttcttctaaagcagtgttgaagattaatgtcatttgtagtgctttttatggaaagaaaacttatgcaaataatcctcgttatgtctcttggtttcagctttataaattgaagataggaaggcttgagttttcgaaacactctgttatgggatgaagctgctcttggaaaatacatttgggttattgggacaaaacaagacaatttatgaatgaaatatgttcatagtggtgagactatcaagcaaccatagaaaggagttgatattgaagacaaattgtaaagattaaagaaacttatatacatcctcctcacttgcatcctcctttgataagtaatatagtatccactaaatctacaactatttttttgatgataaaaataaaatttactagcatagagaagtctaaaatagatacaatataccgaagcatagctttattttttgggttttcaaatcaagaatcgaccattgaagtttaaaatatgtcgaaatggatcttacttgttatgtggggttgctctagaaactattgaacacatattttttggatgtgtttttaacagtgtcttaaagaaatcaaaaggtggttgggttggtaaggggctgcttgctccttaaaggcactaatcaggtagattttcgatctaagtgctctcaagttaaaaaaaaaaattattataacatgcttggtttatcaaattttgattaatcgaaattattttttttagaatgacaagatgcaaacagttggaagtagtgttaagcaagtaaaaataaatgtaaaacatagaattacaggtctaaatattatcataaaaataatagaagaaagagagcaatttcagtcattgtaattttttttattaaaacgtttatatattacatcatgcataacctgaaactcaaactcaggacctccaacacacacgactctcctatggccacttgagctagccttaaatagttaaattcagtcattgtaattaatttcttttttcaaatctcttgttaagatgctatttaagttgtaaataatttatttttttgagctatataattttttgatttataaaaataaattaataataataataatattataatcagttttgatacaaaatgtttttacaagcaacaataataattgttccataaataaaattaagaaaaaaaactatattcaacatgtgaataaaatggtttataagaaaaagaggatgtgacataatgtgctttcagtaactaccgaaatagagcacttaaaataactcgatttgaaatcacagaattgttcataaacgacaacaaaagtgaaaaacgacaccaaaagtgaaaaacgacaataaacgaaaaaaacgacaacaaacgtcaaaacgacaacaaaagtgaaaaacgacaataaacggcaacaaaagtcaaaaaacgacaataaacgtcgaaaacgacaacaaaaataaaaaacgacaatagtggtaaaacggcaacaaaagtgaaaacgacaataaaggtaaaaaaacgacaacaaaactgaaaacgacaataatgataaaaacgacaaaaaaaaatgagaaacgacaaaacgacagcaaaagttaaaacgcaataaacgacaacaaaagtaaaaacgacaataaacgacaacaaaagtgaaaaacgacagcaaaagtaaaaaacgacagaaaaaataaaaaacgacagaaaaagtaaaaaacgacaacaaaagtgaaaaacgacagaaaaagtaaaaaacgacaacaaaagtgaaaaacgacagcaaaagtgaaaacgacaataaacgacagcaaaagttttaaacgcaataaacgacaacaaaaataaaaaacgacaataaacgaccacaaaagtgaaaaacgacagcaaaagtaaaaacgacataaagtaaaaaaacgacaacaaaagtaaaaaacgacaacaaaagtgaaaacgacagctaaagtgaaaacgacaaaaaaaaaagtaaaaaaacgacaactaaaggaacaaacaacaaagaaagtgacaaacgacaactaaagtaagaaaacgacaacaaaaatgaaataaaataaagaaaagagcataagatttgattccacgtgtcaccaaaacaacgcacttcaaaatataaataaaaaattgattaaagcaaatcttgtccgagaaaactcgatttcaaaatctcagaaaaaaatcgagttagaaaattcaggagaaactccgaccatggaatcggagacgaccaccaccaatccattgaattcttccaccaccaactggtctatttcccgcggttctctcctaaagtcaatcacttttgactcatctctttctccaatcgacggcgatggagatggcgattgcgaagacctcagttcaagttcgaatgaccctcttgttctgaaaccttcggtgtcagattcagggccatgtgagatcacaagtaagtgagaatcactcttcttgaagtaaaaatactttcttttactgaatattgagtgaaggagtctttttttttgggatttcgagttgtttgttagtatggtgtttatagtggatttattcaatcagtttttctaattgctttgctgattttggatgtttttgttgatgtaattgttcttcttgaacttgttgtgattggttctttgagtgaatgtgaataaacccttttgttttgtttttggataagataatctcagaaatgacaattttgggattactttctaagtaggcatacattttgataacctaaattcatactaagcgaccctttttattagagcttagagaattgatatccttattttattggaagttcagtttgttttgcacaaaagcatgaggtccagcagatttatgttaggagcactgctcgagtgtatgagatatattatgagtcaaacccacaaaacggcaaagaatatctttgcactgttcggtgtggcattgctgctagagatgaacaagtgcttcaagcaattgataaggaggatgtggcttctgcgtcttcgaagggagcttgtgatggtgaatcgaaagaaaacataagaaacgatggtagtcgaagcagtgaagatgaatgggtagatgttaaagtcccagataattctaggccaatgatcacacaggtaagaaatggaaaagctgcttatctaaaacatgagagatcgttagtttttatcttttgtttatgtattattcatggctaattggaggaaaatgtcaggattattatgaggctacagcacagatcaacgatgcagatccgtgtatatctattactattcgtctactctcagttcagaataaggattctgtttatgttgatgaggtatatgtgtttgctgatcctgttgaatcggatgactcggaaaaggaagtggataagaaggaaaactctactgggaattctcttatgacaatgctgttacctacacttatgcaaatgtctaaaacaaagggttccaccagaatggaagataaacagacttctgaggtccagaaaaaacagaattgcgttgaaagtggatcggaagcagctcagtttatcagtgctgcgactacaattcagagggaaggaaattccagcgttgctgatcgtcaaagagttgagtttcgggacataaatagggctagtgtaagtactgcacagttacagactcctgtgcaagtttctcacagtgaaagcaatgatcatgttggaagagcattagaccaactttcttctcggatgggaagaatggagaatttattcttaaggtttgaagagagcttgttaaagccaatacatagtattgaggcaaggctccacaaggtcgagcagcatcttgaagtactcgccaataaacagaaggattctgaactgccgacttgctcgagattttgtgctccaaatttttctttggtccagtctgattccaattccaattccttgatcaatagtgaaattggttatgctcgttgtgaggaagcagaatcgaatattaagagtgttcattctgaattgcaaaccaattcagttaatgatttttctgattctgttaatgctactcagttgcttccaagtcttgtagttactgctcccgaattttcaactgacgaagacgaagaagaaaattgtgtatcggaaacaatcaatgattcttctgttgataaaccaagggaaagaatgacagttgatgatgctttagcttctgcacttgctcgattagtatcttccgtttcaatccagacagaagaccattctccaactctttccgtcaaagctcctgagtttccaagtgaagaagatatcgaagaatttcgtttaggaactggtgagacggcaaccataaatgtggttgataataacaaccaatctgagaaaacggttgaagaagttgatgaacaagaccagcatattgaaagagtagagaaagatgaagctggttcggaaacaagcaatggtctggtctgtgataatgatgatattcaagatcactccctccaaattcagacagatgctattgactctgatacaaaacaggaagatgctacctctgattcagttactgctgttgaaataatgaaagagggagaagttggtactgattcgaacaacggactggtccatgataagattgatgacattccagatcattccatccaaaatccaacggatgcaactggctctgaaacaaaagaggaagaggggtccgaaaaagatgttttgaccgatatcgttgagctcccactcccacatactgcttctgtggtggatttcgaaacttcagtcctggatgtgaagtttctttcgctgaatagttgtgacagaaactgtcccctcgaaacccttttgtgcgacttgccaaattccaaatctgaagaatattttgtggaggaaagtgatgatatggatccaaatgatcatcagcacagtgacttaatttcggtggaggaagatgagccaccacttgggcctgccactaacagccaaatacatgttgactttgactactgtagtttaccagaacctttgaggagcagtgatggtgatgaatccccactaacttttagtatctcctgcagtcatgaaaactcaccatacagtctcatttgatcagagctgattaaggaagggccattttcttcttattggtttgtaaatttgtatatataaatctgactttgcatgttcttttaagttcctcaactctttaaggcagtttaaaattttttaactgacctgccaaaaaaatgttgagactataatatgcttgaaccctttttggtgttgtgttttgagtatcagttgacttgtttaatgctaaaacatcactgtttttgtagagttgatagcttttttggggtcatgtgaactggataatgccattattttgtgggtttcataccatgcacatgaaaaagtttagattattttgggtcatgtgaactggataatgccattattttgcttttgtttattaaccatttattttctgccatgataaaattaagtgataaggcaaaaattggaaattagtgtccacaaacaaatgagtgctaaaagacactattggcctcacatgttatataattaagaataaaatctcatataatttaatttaataactttaataaaatatcgttaacccggactaaggtgggaaatcccgtgcttaggactcacccaaacccaggacccaaataagtggacaaataaaaaacttcacttggtacaacaaatatgaaatagtcaactaaactaaacaatgtaaaagtttttaccaaagccctcaatccaagagaaaccttgttttcatcggttcccaaactgtgaataattaactgataaatcctccccaagtgtttctattttagtttcttttttctgcaacttgcataagcttcttcctaaagtaatgtcttcatttgtcaaacatatataaatatagctaatctgactctagtttagtaattagtgaattaggaaaagaaacaaagttttgttctgtgaatttaattttgtattgggagttgtattacggcaactccattccttgccactatgtgtgccttgtcttgtggatctcattcattcctcttcaagttttcaagagaagacaaaaattaaagtaacaaaaaccaagaaaaactgttaaacaaaaaaccaacttgcttatcttatcttattatcaatgttcaatacaatttgttactacgaaatttcttcgttttcctaattctcttttcttaggactctggacaattgaaatcgcgtaatgacatacctgttagcttagcttaaagttttctatttaattagttggagactttcgaggtagatggaaaccttgagttttgagcttgtcacaatcgcttctcgcctatgaggactttccagcttgcgaaaggaccctcgcttgtgtcgtgcaatgcaggcacccaacctagggcactagcaatttcttgaagttcggttattatagatatcgagtcacgtatataagcccgaccaccaggtctcatcatccgatcgatctcgaacattatgcttgtcatgttgcatctgtactcaaccaaatatttcaataagttgcagagaaaatagggtttatttgctcaacatcatagggctaagtataaattagtatacctttttttctcaagagagaagagaccagccgcatgtattaagtcgtatgtccttggataagtgtcgaaaggctcgcacctaccaaagcaaaaaagagttcaaatttaaagccattacaaacgtatagtctagaaaaacttgcaggagggtgcattaatgccataccaatcatgcatagctccgatgagtccacgatcatatataacaggtaaggtattgaacccgctaacagggacaacattcataacccagccatcatattggtgctcgatgagagctgctgcaaacctgccatgaaaatggagttagaaatggcactgaagttaaaccgaactaattaatgataacaagatttgtataccctccaaatccagctctcatgtctaaaatatttctaaagttcaatttcttccagtgataagcattaagatagccctttatattctctgcccagtacttcgattctgctttaagaagttcttttctagatatgtagccatccatagttatgctctggagtctttctggtggagttagaagacgttcaggccatgtagtaaggttagctccataaccattatccggcaatcgggtaatacatggcttcaaaccaacatacctaccgaaaaaataaacaaataataatagtgagcggctgatcattaatttctgatcacgaaaaatgtggaactatgcaaccatggtggttgcagttgaaaatgagttcttatgaagttatcggcatgaaatgaaataagacataccaaacactatctggatcatcagtagtatcacatagctgcggctgcacttcgggttcgcgattagaataacagctgttgtttaaaggcttctgccatatagcaatatacccttccttcttcaaaagtttccaacatatacgactggtgaggtcttccatttctgttaaatatgaacccgaaaatgaatcaaaccaaaataaagaaccgatctggaaaaaaaaaagggaataaaacagttaactcgatgaacaaacctttccattgttcttgcaggttttcttcgtgtttataaacaggctgtgctgcccaaacaaagtatcctccggcccttagcaacctgttgacctcgagaagcaaaattccatctattgtacatcacaagaatcagaaggaaaaatcttatcaaatgtgaaatgaaatcagcaaaaaggaattgtctacaaaaatctttagggagacaacaatatttttttttccaacatgaaaagatgcaaaaagaaacgagtaccatcacgagtccaattaactctgcatcttgagcaatgaatcaagtcaaatgcctggcttggatacaacaaccgccttgtggcaaatgcagccaccatagcaggcacacctcgctccaatgcaaactgaatctggttctcatgaacatctttcggtgctattgacaaagtggtcacattacgttgcatcaaaaaggctccaaaacttgccactccacaaccaatgtctaaagcaactcgggtgtttcgcccaaatgcaatttcaggaaccatctattctcaaaagtaatcaaaagactgatgaatgtcattacaagaaaaaccatcagagtaaaaacaaatttaatgtaacaaagaatagtgaaagttcccaacctcaataatctggtccaagtatttatcagcaccatgaataaactgtgtcccacctccaggaaaaacaaatttatctttctttacagttatccaattctgaccacctttatctgcaaccagacgtgtatgaggaacattactgaaccatacctgcaaaattcaatcttaatcatatcaagctttgccaaactaagaacatggaaatgttaattagcaaaataaccacattgtaaatttatggtcttatggtcgttttatggttgcatagtataatttttggtcgctcgtgctaccaaacatgattattttgctaataaatttttttcataacgactattttttcaaagaaaagcatgaaagaaccttaagaccaagaacacaagtacaattccaaaagaaagtgtgacaatgcagatgcttcgggtttcaatttacctcgtctctactttgcggccatggaatccgattctggtagcctttaggcctcggcaccacgcaatccaaagctttatcttggccagggcaatgcctttcgaatttctcccctctttcagttgaattcaacttcttgatctcctccacattatccaaacaaggaatatagtccaccatactctgatcacagaccttgaacttctcaaccctaactttctccttaactccatcatctattctctcatctccaccactagaattcctcatatcctcaatcaaattcggatcaaactctccaacctcaaactcctccgacattgccccattctcatcaactatccctgtccttctcgcaaccggcggaggcggcggaggaggcggaggtgaaactatcagcggcggtgatggcagaggcggagacgctggagattccataggcgaaggggaaacaacagacgaagcgaatgctcgaaaatcaccatcaccgccggcatcagaggaagaagcaggggagaaaaagttaaaggcgagaggatagtaggaattagagtagaaatgagtaccgaggaagaatacagagagagagattagaacaatggcggagattttgacaaatgtcggagttttcagtatgtcggttgctgaagagctgacgagcttcatcgtatatcgattgattatatatacgaatcactgttgaatcggctttaccactgagatgaactcttccaattgctcctaaagaacaaacaaattaatcaagaatgaacattgtaacaatttatgaatctcaccaccaacaccgccgatggtagtaaatgaagaacaaaacattgaatttgaattggataggtcacatgaatcaaatgaaagcataataataaagaatttgattacgtaccaatgcaaaaagaaagaaagcaaagaattgattgtttgattgatcttctttccccggcgccggtgccggccgtggtggtggtggtcttggttctctgatgagttttccggttggattggttagcggaaagaaacggtgccgttttagatccagcggtagtagtaaattaaattctgtgttttaagcaaagagctttggtttttcaagaggagctaatatataataataataataataatctcactctttaattaatgcttctctttatggttgactagttttttttgagtaatagatagatagaataagattattcttgtttggattttggagcttcactttgataaactcaacttactcaaatattattcaccaaaataataataataataataataataataattagaatttttacctttaaattttgatatgttctaaatagtacctttaaattttttaggttttttttttttttaaattattgagattgttggatttgagaacttttatttcatttttattaacgaacacctaatattgacgaaaattcggaggacattatttaatacgcaatcactacgttagacattcgtttaagaaaattgaatgaaaattcttaaatccaacaatcttgatagttcgaagaaaatttttaacaacataaaaaatttaggagtacaatttaatacatgttaaagtttgagggacaaaatttttttaattaacctaataatatagggaaatttgaatttctatgcttaaaaactcataaattggcccctttaaactaatactatgcataattttttaaatgggataactttttcctaaaccccaaaatacccctcccatttttcccaaccgtccctctctcttcctcttttttctctcaaatttctcaggatccaaaacccataccggccacgcacggcgagcaccacccacgctgaaaaccaacccacacccatccatacccatctcgaccgaacccacgcacgcacactggccgaacaccaccggagaagaggaaggtacgatgccgcgcacaaagactaattttttttgggtttttatggtcgagtccgatgggcctatcggacgggcatcgggtccatcggacttgacttcaaaaccccaaaaaaaaatgcccatcggacccatgcatcgagaccatcggacccatgtatcaggacccatcggacggcatcgggcccatcggacccgacttcaaaacctcccaaaaaaatgcccatcggacccatgcatcagaaccatcggacccatgcatcaagacccatctgacccatgcatcgggacccattggacccacacagtcggaccatcggaccctcttcttcccaagattcgaaacaacccaatctcttctcctttcacagatctgaatcccaattccacaaaaaatttcttaaatctaacaaataataggtttcacaaacaatcccaaacaaaatcacaaacaaaataaatcttttaacactttctaaaaaaaacaaaaaaatcacaacatcccttggacattttagcttcgggtcaccaccgtgggtcgctcctcctctgcgccgtcgattggatcagccaccactgtcggtcgatgggtcgagcgtgggtcgaagtcggctgcaaagtcaccgtcggttggggttttcgtgggttgagcgatagtgagttgagagagaggaagagagaggccgagtttagggatttgaaatgtgaggggtatttttggaaaattaataatgtggtcatatatgaccaattttaataactatgcatttaaggaaaaaaaattagagtattataagtatgaaaattcaaatttctcatcatataataattatgtaaatctaattttgccttcctaaaccgctacattctaattaccaaataaatcaaacatcataatatcataatattcactatttttattatacataccacttgtcaagtacttaatcattattttagtgtatccatatattatgtcttatatgcagacatgataatatatgtgtcatataaattttgggaccctcactttcataaatatataaaaaaaaatattgaaaaaaaaaatgccaaactattgtataatgtgcaattaatcaaccaagctaatatttattatttttaatatacttaatttaatttaaataaaagcttaataaaaatttttattttatagattttcagaatatgtagactttaagcacgagcctaattcgctcatacttaggttccaccttgtttatatgtttataaatattgcggatgaaaaaatattgatactctatatccttattttaaatagtgtaatagtgattaaagtgtagaacatatggtgattacatttgtaatgcaatgttttcaaaatcaaacttgcaccaaaccaaacatggaggtatgacttagattaaaaactcatttgtagtttggtgaaattaatcatttaaaattaaaattcagaacatgattgcttgaaaagaagaagaaaaaaaaatcaattttaagaaactaacaaatcactctttatccaagatttagtatgaattttattagaagacttaaaagaaattcacaaattgatggtatagcctatcttattcctcaagttagtattttattcaataagtaataataagttcttaagtgaaaatatagtactaaaattgtcttatctatgaattgagtatcaatattgataattagaaagttaaaaccgaaagaatttcttaatgaaacttaagtttaactaaattcacttaaaagtattaaaatctcaaagacaaatagataataagtcttcttgggtttaaaataaaacttttttatttttttggactcgaaacctccaacacacacgtaccttctatggccacttgagctaacgtcaaggtttaaaataactctaaaataagtttatgtatactcttaaatttttggacacatgaataaaagtatggctttaaaaataagaagggtatatgtgcaattataagtcattaggtagcgtttggttgtgaggaatgaaaatataggaataggaataggaataggaatgtgaatgagaatgggaataggaatggaataaaatttaaattgcataaaaaaattgatggaaaaattattaaattttttcttttgttacattagaatagtctttccttcttttttaaaataaaatagttattccaccaaaataatggaaagaacattccattagaatactattctaatattataaaatgcaaccaaacaaaaaggaataaaatgaaaattgtttcttttccattctattccatttcattaccnnnaaccaaacgtcacctaagttatattgggtgtgggggtcactaatattatttcataatttttttttttttgctaaacaatattatttcataaattactaaaatgtatatatatatatata

SEQ ID NO: 94330 - DNA, 647 bp, Cannabis sativa
caggcaacaactactgtccctgttaacatgtgactaccattcacaagaaaccacgacgtatagcttcaattttacttacattttttttgcagcattatcacttgacactagtaggaatggatagccattaatattgagttgatgagcacaactcgcccatcaaatgacaagttttcaacactccatgttctaatcctagccaccatcttgttaacaagaatactacattcctttgctgaaattctcttaggacagattggtacatccaagtacctaaatggtagctcatgtcttttgaaacccgaggcatctagctagcactcattgaacatctttcttactcatattactacaatagaaagcagtttttgtgggtttaggcatgaaacttgatgtttgtgaaaacaatttaatgccttgtaacatgagataagtgcccttgaaatctccattgcaaaatagaaggacatcattcgcaaagcttaggtgatttaacttcaagtctccacacctttcatggaatttaaattcttgcttctgcccaacttttttcatgattctagagagatattgcatgcctaagacaaagagaagggagacattggatcgtcttgtctcaaatctctctttgcctcaaagaaaccatg

SEQ ID NO: 94331 - DNA, 614 bp, Cannabis sativa
  modified_base (437)..(440): a, c, t, g, unknown or other
catatgtcgatgggagatagcggattgggatgacttcaagtcttaagagtaagactgggtgttatcaagttggtgaaaagttagcgagtcattagaggatgcagggttgatttttggagatagacttgttacacagttttgagagccgacacaagcaggagccagaggggaaaattagctcagaggagtaagtatgcagtgggttagtggggccttttgcatgaagtcgttggtgtgcggtagggtcggagggccaatgttgagaacttcgcgaagagattttatgcaagagtgaacttggtgttgcattgggtgtagttggcttgcgagcctcgtccaggtgggacgcaccaaattttatcctgcgatgagagtgtcttgctcgattgccatcaagaagatggtgcgccatagagttggcatgtgaagtttccagnnnnacttgtccagagggacttggcttcagtggaagcgtgttctgtaggtgccgttaggaacggttggtttgcgaacctcaccctgaggggtacacaatacttagtccttgtcgaaaggagtatgcattggacgattggcgagtgagctacaaacagaggatgtggtagcttcagggg

SEQ ID NO: 94332 - DNA, 769 bp, Cannabis sativa
gcatgatgaagtactctacacgcttgcaggagcatctgctcgaacaagcacagatggggcatcatcatccaaagagtcttcctcctcctccaggacagcttttccctttccctctataagggttgatgattaggtagatcaggctctctaattcgaatagtatgtttgatgggcctctgcccggtcgggtgggttttcttcttcttgagcggcctctcctgctcagaatattcttgagcctccttctcctgctcagaatattcctgagcatactccttggctcctgcatcacccttcaacttagcctcacgcttaagttgaatgagatccttctcttgctcagctccctcaacccggccagccttggacttcttcttcctccccttcataggctggggtataaagtctgtcggataaagcttgtacttcacaaagttgtcttccgatgtcaacaaagtgatattccgagcagcatccgacagttggacaattttctaagccctatccctaagtgccattgtgaggggtggacgacaatatatcgggatatattgaaaccaagtataggtggcatccatgccttccacgaagtagtactcgtcaacaaacccttgatcttgctaacatccttgtccacggtggtcgtcagccatttgaagtttggcgagaagtagaagtaccccgacctcatctgcttaggggtagacttcaagttgaaaaaccaattgaccttgtgtggagatggcacaccccatccttgaatggcgta

SEQ ID NO: 94333 - DNA, 515 bp, Cannabis sativa
ttattttaaatttttagttgcattaaaattgtaaagatgatatttttatagagtattaaacttaaataaatagtgatatttagtttttaagtatttttcttcattttttttaaataataataaaaaaaatattttatatatcaattaaaaaatagtttgaagtctaattaaattggatgggatgataattttttaaatttaattgctactttttttttctaaagctttttaatatttattttaataaaaaacattattatttttttccttatttattaaattaacttatttttataaaatttaaattataaaatattatcaaaataattaaatacttaagtagaatataattggagtaagattaataaaaataactatcccatttaactttttttttagttatttgactaaaaataaaaagtaccttggacatgctccacctgtatttgtatttgcttaatgtgtccatatagctccaatgcacattactattttataactactctaatttatct

SEQ ID NO: 94334 - DNA, 706 bp, Cannabis sativa
acttcaaatcttcaaactaatgcttaactaaatataactattggctcatacccttatagtgagctttgaactacaatggttgtcctcacaaaaaatgaacaagatttctctcaagctactttaggctactatggaatgatcacatatcaaaaaatagcataatgcataccataattgatcgaggttacattctatgatgagttaccacatcaagatagagagagttctttatatcattccaggatgacacttttcatcattacaattatgtttttttttttcaaaattgctataatgattggtattattatgaatcaacaaaactatatgtatacttagctgttgcttttgctctttcaacaaatgagagagagggttgtaagtttcacagataatatatgtgttctatagtatataacataagatttttgcctaaaatgtgaaagaataatttgcattttctaaatcttggggttagttggtgtaggggcaattttggtatttgaatttcctacctccacaattctcaccacaaataataataataataatataattcatgatcaacaatataaaaaattttattgggacccgacttatccttttttactaaaaaacattatccaattacgctaccaaaatcttagatgtattaaaaagttgcatagtaagcttggaattcatgatattgtggatgcgatgagga

SEQ ID NO: 94335 - DNA, 1861 bp, Cannabis sativa
ataataatatatattaccacattttaatctacacttattatattataaaataatataacacattcttcaaccacatataaataaaatataggttgttatatatcttatattaagactaaaacttcattattagcataaaccacataaaatcatgtgtattccttttcttttaatttcaatctctatatattttgtagttgacagatcaataattattttagagattgtatgctagaaaacctcaacaaaaccaaagcaaataaaaagtacaaaataccatcgttattgttaataaaccaacattacttttattattatcaaattcaacctcacttaaaatatttattcttaatataattaaacgtactcttgaaacctttttcttttcaaaaagatttagttaatctaaaactacaagtattatccaaaaggagtaaccgaatttttgttttgcattagtcataatcacaaattaattaagccaaacaaaatagtattatgatcagactagggtgaatcacagcaaatttctaactctaagccatacaaaacaccaacaaattttctcaactccttttcatcagactcaaaataagtcaatctaatcttctgaaaagtcctcaatgtcagcaaactatccgaaccagactgatggctcaacccaacttctcttacgatctgcaacgaactagccaaactttccaaacccccatacagaccaggaaagaaacccatcaagtacttcatgtcataaacattttgaccaaaaaagtgtctcaccagatatagaaaatcaggcaaagcgtgaggaagtaaacaaccagtaagaatctttaccaaatacccaaaatcataggcactgtggaaggtaatccatgtaatgtcattgttgaggacgagcttgtaatggtacattagggcagcaaagtgggcagaattgattccctccgaaaggtttctctgaaaatctgtcccctgtttcttcaacaaatcgattgaattttgtgcacgatgatcgtagtttatgttgaaatcgttgaaattaaattgccaaaccacgaaagtttcgccgtcgagatttggcaaattaccgtctgagtcactgagagtgagacccaattggataagattgagcaaatcgacattctttttgatcacattatactgataaattggatgaactttgtagtgagtattggggtttggatgaggatgaaatatacaaccaggaaactcagtatccaatgagacgtaacgaaaaccctcatcatgaatcaattttccgatatgattgaactcttcgagaagatttcctttccatacttgtcgaatcactacccgtactggagattcttcattgattggaactggtggaaccactacccgtaccggagattgttgattgattgaattgattaacatggtgaccattgaagagagcgagtaagagtaagaaagagaaaaagaaaaagcagaagcatatatatatatatagagagagagtatcgttactataattgtagagtaacgatataaattatatatttataggtgttgggttttgatttcgtgatcctcaagtatatatatatatatataaatatatatatattactggttttatttatttatttattatgactcgaaataggataaatttattagtttcctattttaattaggttaaatcatttaaaattggctgttgtgagttgtagaaatgaaactggtaattttaaagtaaatatatggggtgatattaattatatcgggaagatttattaatatttctatatttattaggattctttttaataatattttattaggattttttttaataatatcaaatcatataatt

SEQ ID NO: 94336 - DNA, 1292 bp, Cannabis sativa
gattgaacattccccacccttagagtagtagaggcttcaatcaactgaccattgctatctcgagctactattccaactccatacgatcccgtactttgaaaaatttcaccatcgacattcaccttgattttatttgctttgggttcagaccaatgctcctccttgtgatgattatttttggacaccaacaagggttcaaaccgattagactgagcataacatcattgatcaaggactgaacgcgcatgagaaacaacttcagcagctgtacgggtcttgttcttccaaagtaactcgtttctagctttccaaatggaccaagccaccatagaaccttcctcaaccattcctgcccgtcctctgtgcagcagggattcgaaccagagagaaaaatctgatccaacagcagcagcagcagtgcacacagcagcccgattccagcacctttgtgcgaattggcactcgagaagaacatggctgatggactcagcactagattgacagaaaacacaagaagcagggacatccacatgcttcgtttggagctgcattcgagtaggcaaacattgggtgagagccttccacataaagtgcatcactttaggtggaatcttgattttccaaagccttttccacactaaatcctccatttcatgaccccaattacctttatcaatttgaataaccttgtatgcgctcttcactatgtaaaatcctgagtgctcatgtttccaataataattatcactccttccaacactaataggagtattcataataacagaagcatctctttggttaaacaagtcactcaccaactcaacatcccaacactgaccatttgggctcattaattggcgcgctctgctttgtgcaagagctgggtgagaagatgtaacaaacggattgatatcatcagctaaccatggaatattcagcaactcaatatctcccactcccactctgatttttgcaccagcaagaattaaactctgagattcatgaatgctacgccatatgtaactcgggttggcaccaagaggagcacttaacattgagccatgaggatagtagcgagccttatacacacgactgaccagcgtatcagccccttgtagcagccgcaagcatgttttccaagaagtgacagattgtaatcccggagattgcgaaatccaaggcctccaatgctcttatgacgactcaaacggctccatttcatccaagttataccacgcgactgttgggaagaattaccccaccaaaacttggacattaacttctcaagcaac

SEQ ID NO: 94337 - DNA, 907 bp, Cannabis sativa
tgtttctcaaatgcaaattcgacatgttctaagatcgatagaatatccacttcaacttattgtatttttattagagggaatttgttctcttgaaaaagtaaaaagcaaaatgttgtgttaggatccattcactctcaagagataagaaaaaaaaacataatattgtagcaatttagtcaatattaactgcaagagactaacataaacactaatttagtaacattatgtatccctacagttggtatatataggtcctatttggcttagattccttaaactcttttttagcttttagatgataagcaaaaaaaaaagagttaaatcattttagaatgtatccttactgttggtatatataggtcctgcttggcttaacttcttaaactcttttttagcttttagaatgataagcttaagacttctcttatttatcacaaaatgattaaatgaaacacttaatctattatgtaaatatgtacataggttaagttgtcttagtatcttaattttattggtttatttgtaatcctaggtggcccaagtctttttaaaaccaatgcttataaatagagaaggaacaacttcatttagattagcttagaattaaagaagagtagactctttgtggagagaccaatcatctcgaaagattgagaattcagagagacaagcatcttcaaagctcgatattgtaactttgtcattgtcttttttaaaataaagatcacttgaggaattcattacaagagtttattctgaaaaatagctgatggaatatttatactctaagattattctatcaaataggtgcggtgtgcagcgaacatggtgcctaagtgttagagatgtatattaattgtataaattaactgtaaaattagtgaagaattgggctaatcaatttctt

SEQ ID NO: 94338 - DNA, 831 bp, Cannabis sativa
  modified_base (773)..(791): a, c, t, g, unknown or other
tttccaaaaagggattatgacgaaaatgtcctctgtaattattaaaaaacactttttactataaaagaactttttaaggggcaattgttatacccaagatttggctgccatctcagtggaagacaagtgtcaagataaaaggaatacagatttatgaaatcgcttattatagaataattcattaattacgtaagtatcagagtatatttgtaacctactgattgtaaggtcatatgcgatgagtcaatatacaaactgttgcttagtatattaacgagaaaccatatgtcgctgaatgtgaatagcgaggcattaagtacattacttctaggaagacaaaagcaacccatatctactgcggaagcacctagtgcataatgtacaaactaagtgtgacagtcaggttggctcgagacctagtgtataataaaaatatgaacatggtgccttataaatcaacaaataacttattttcaatgcataattgtaaaaatagagtaaaatactaataaaaaaagacatgaaagtaaataaaaatcaactaataatattgtagattttggtgtagattcaaaatctaacacgtatctctaatggtacataatttcattaaatttgtgtaaaatctttacaatattactctaatagtacactaagttatgcaccaaattagtttgcaccaaatcctaccccaataatggtgttggattttgattttacaccgcactacaaaaaattttcattttactcaaaacaaaacttgtgactaaaannnnnnnnnnnnnnnnnnnttataaattattatttctatgttgtgactaaaaaatccgt

SEQ ID NO: 94339 - DNA, 630 bp, Cannabis sativa
ttgacttttgtattcttataattaatctaaaaaccttctaatatcctaccccctccaagcccaaattctataagaaacaccttatacactaatttaataatgagtaatattatatgtacactaaaataatacacattgttagttttgttgaacactatgatagagttgagaaaaatagagaaaagaccaaaggaaaggcaagagaaaggcaagaaaagagaaagaaagtgtgaatgaagaagatgaattctcattattgatcttgaaagaattacaacatcatatacacagtaatctataatagaatcagtcgagcttaactaacacaactaagcttaggataaataactaactaaatagttagttctaacaaactcctaacttcccaacaagctaattgtcctaacatgcaccctccctcaagctcataattgaagtttcttcaattgtgagtttggaatgaaattggttgaaccttaaaaagctcgagatgtcttttgttaagccattagcaagatgatcatgtgttggaacatgtttcactttgactaggccttgcggaacctttccctcacaaaattaaggtctaattcgatattctttgtacgagcatgaagaataggattttga

SEQ ID NO: 94340 - DNA, 530 bp, Cannabis sativa
ttatataaaatagatatataagaaactataggttggtgtagtttgttaatttaaaaaataaaaatataaaatatttttaaaataaaataaaaaattaaaaatataacttagttattatatactaaaaaatatttaatttattttataaaataaattaaatattttttttatagtatttaataaataaacaaatatattttatatacaaataaagttattatagttttttctaaatgttaaattatacctgttttaatttttagttgtagattctcaacaatttcttcgataagttgtttattaactgttttcgaaacgcatttatagtacaatttttttcttcaaaaagtagcttttagatttttcgaaactatactaaacggaccctaaaatgtattatagaatttgtgatttaatttttttttttaaacagagaaagatattaaaacagttagtgttagttattttcagttagacagttatgttgagtcagttggacctcgtgtactctgtacactgtatatatattg

SEQ ID NO: 94341 - DNA, 885 bp, Cannabis sativa
  modified_base (612)..(631): a, c, t, g, unknown or other
catccacgtacaacttccaagtgtatgtgtctcgctggataagtggattttcatctagaattatcccttctatcaagaaatctgccaaagcgtggtcattgatggatgtttatgggtgatatgttatgtcgaaatgccccagttcaatagaccattttatcaaccttccagaagcgtttggttttgtcaagacttgtctcaggggtagatcagttaacacctttatcggatgtgcctggaagtaaggccttaattttcgagatacataaattagggatagggcaagtttttcaacagagggatatctcgattctacccccagtaaccttttactaacatagtgaactggttgcttgtgctttccctcttctcccactaatgatgcactaattgcattctccgagatagccaagtagaggagtaaagtctctccagttattggtttggccaatactggaggtgtttatagatgtttctttatgtttgtgaaggcttcctcgcactcgtctgtccattcaaactttttgttgcctcgcaacaaattgaagaatggtaaacacttgtcagttgattttgaaatgaatctattaagagctgccattcttcctgttnnnnnnnnnnnnnnnnnnnnttttgttggtgacgacatttctataaaagccttaattttctctggattttctttaatgccccttgcgttgactatgaatcccataaacttctttgaggaaactccaaaggaacacttctttgggttgagtttcatattgtactttttttagtatctcaaagcagtccgcgaggtcttttgtgtgatctccactttttactgacttcaccaacatatcatcgacgtagacctccatgttccttcctatttgcttt

SEQ ID NO: 94342 - DNA, 539 bp, Cannabis sativa
ttaaaaataaaaattatatctataaataatcactatgtagatattttatataaaaaatttattttattatatatatttaaaaataaaaattacatctatatatattcacatttattatatatatttaaaccttaatttcacgataacttttattttaaaaagaactaatgatatatatatatatacatgcttctaataatttgtacattttattataaccgtataccctcctaactacaaattaagaatattgtatctatcactattattattttttataatatatatgtttggacataatatatttcgtcaaaatattttctaatataattcttatatatagagaaaaattaatacaaaatacgtatgataatgaaatttatataattttttattttacatatataaaatacatatatatatttatataatcacatctaatgagtacactaatgtaaccgcaatagctaaaaaaaatttaaagatcaaaatctcaaatcctatttcaaaaattaaaaaataaaaatatcttacctaat

SEQ ID NO: 94343 - DNA, 603 bp, Cannabis sativa
tgggaaaaaatcgaggtaatattttcctattaagtccctctatggatgtctgtatggataaggacttaccaattagattgtcgcaatcaagactactgtagcctttgctgaataaaaggttttccatttttagtcgtttgaaatactttgccttgactgtttaatcttattttttgtagtaaactaactactttaattatctctttgttgtgtaggtgaagtaagtgaagaaagggtcccacatgtactatataagggcattttagggcgaaaacccttttcactttttacatttcgcttctatcactagaaattgtcatttgaagaagctcctccttctctatagagggataaacccatcaagtgtcatttcttagaattttcgcaccgtttcaacgatccaaacattccacattcttccttagcagtttcttgtagtgggtaagctttttattcctgctatttcacttgatttggttgatttttccatgaatgcataaaaaaaattttgctttgaacatccattgattcctacattagattcttgcctttttagtattttgatctgcatgatagccttaggatatgtaatgtgtgatttct

SEQ ID NO: 94344 - DNA, 737 bp, Cannabis sativa
  modified_base (674)..(686): a, c, t, g, unknown or other
catagacttggacccgcctagacccgagatctcgaatcccgaaatccaaacctgaaacttggaccaagattcagaccccgaaatcaaacctgaacccaaccttgaacccaaatccagtggcaaatctagaatttaacaaaatgctaatcataccataaatatatccaaaacaatttttgataagctaacttagttgtaatgatgtttgtagaacttttgtcctttttatagttggcataagttcgaatctcgataagaatgtatactttgttattttttttttttttattttttattattagatacttatgtcactaaaaaattattgaatttatattgcaataatcccttcaatgtataacatgtttacttgaagatttgtttctctataaatgcttaaccattatggtaattttatgagatgattcatatttgatactttttcaaattgctatggccagtctaatacaatttttgaaaaagctcaagttgatttatttatttttgaaaaaattgtgccgtaaaggtgtttaattagtaaaaaatttcaaattagcttattgaaaaatttatggagacgttacagttaaaatttaaaactatagtaaaacccaacttttaaaaatagttgttttgattagaaaacctgttgaaaattattttactaggatctnnnnnnnnnnnnnaagtatgttgattaacacccaaaatatgaactttctgaaacgatgaaataa

SEQ ID NO: 94345 - DNA, 518 bp, Cannabis sativa
accactaagctttatcttaattagttactaaacaataacataaaactagcgtatatgcaactaataaaaaattcaaataaatgaacccgatgaactatattttgacaattcttgcaatatgtctcgctacaccataatttttacatttatacacttgtccatgtcttcttgtcattgttgcatttatatgtggtggttcatcaacatccattcttctcttcttttttggtctcccaaacatatttatttcctctggtgcttcaattgggttaatgccagattttggccaaaatatggtacctggcaaacggtggatcacactttcataagctttcaggatcatatcttacttgtatcagtcatgattataatcccaaacttcatgcccttccttacatatgcttgataatgcatgatcacaaggaattccacttagttggtaccttcaacaacaacaacaacaagtcttgttatctattttcagtgtgtaactgatagtgcatggggcagtccacttg

SEQ ID NO: 94346 - DNA, 835 bp, Cannabis sativa
gtttgcattcccaacaatcctcccatcaaacgatcttccattttggcatcgtcgctatcatcaatcgaaacacgccctgaccttcattgtcaggaagactttcgacacaactccgaatagaatcaaagcacactgcctaactgagcacatccacgaacatcatgaaagtacattgaggtacatcacattggacaccacccatctctactccaagtacgatattgtcaccttcttaaaaggtctcataccaatagagatatgtccatccttacatactcatgatctttcccatttctagccaatgtgggactttatttgaattcccaacaatatatatcttcttcttcatattacattgtatatgttgtatattacatgtattataattgatcttttttacctttcttatatataatatatatatatagtgtatacatatatatatattataaatgtgttgtaatatttatgtaataaatcttttattttagtctttgtattatttttacaattgagttgtaatttatcttctatcgatatataaaatctctagcaatttatcattttctcattgtaataggttcttgaataccattgctcagtgctcactctttagcaaaaagggtaatttttttttagatgagtctgtattttgtaaccggaacttcctatagatttagttatttaattttttgagctcctatttatctttatttaggtcgtgttttttaaatttaatagaatattttcgttttctttcaaaaaaaaaaaaaaaaaaaaagaaggaaaatgtatgacctattttctataaacgatttgcctttggtgaagtaag

SEQ ID NO: 94347 - DNA, 524 bp, Cannabis sativa
agggtccaatctgtaacttttgcaaaacacaaggtccaaaaaggtatttacccataacaaaatatgcaaagataaaacaataatgatgtctaaaagtacatccttactatcttctctttacctttttttcatttttattttcataaagtaataaaatttatttatatttgtctatgaactatggctcatgtattattgtactgaatgtataaattggtcattatgttaagttttatcatacttgtcaaataaaataatggcaggactacttaaacagttatcatgtaagtggtatgtatataatttaaaataaaaaaaaataaaaaattatgtatttttaaactaaaaatcaattgggggcaaaaatcttaaatagtctgttctctttggcagtttatggttggattaaaattgtggctggccaagaataaagaccctcttctaagtttgcaagacactggatttggaatggtgaaaagcagtactattgaggaagaaaaaactcgagaaagtaccccaataca

SEQ ID NO: 94348 - DNA, 528 bp, Cannabis sativa
tggctctactctcatgacaaagagaaattgtaggagattaattttctcacatgccgcatcattttttttttcattgatatttaaaagagtagtgtcaattataatcttctcttataacttctttcccaatttttgtctccaaaagagtggagattttttttaaaattttttaaatagttcacagtatcgaaaacaaagttcttaataattcactttacacgcttgtttaaaatacttcaaagatatatatgttttagaagtatattaaaaatagtctcacgttactaatatgtataaataaaacaccatatataagataaatcagttagttatctcatagctaactagttttgagatagaaccccgtacgccttaaccacacaattctaaattcgagccgaactaaactctaacaagtatttaatccaaatccaaaaacctgtccaaaaagacgttgtaagataaatgagctagttatctcatagctaattagtttttgcgatagaacctcgtacaccttaaccacac

SEQ ID NO: 94349 - DNA, 549 bp, Cannabis sativa
ttgtccttagtagttctgagcgagagggttctaaaggtaaagaccaattcattcctgtaatctcaaatttggtgaatgcccgggggctcatttctctgcctatccagggagaccggttgacctgggacaatcatcgttctgggtctaatcatgttaagtcagccctggataaaggtctcgctaatgttgattgggttaggcttttcccgaaggctgtcctttgttctttacagacggccaactcggatcatcgccctctgtgtctgtatgcttgtggtcttggggagaaggtcagaagaaattttaggtttgaggaagcctggacccgggatgagcgtagtaaacttgtggttgattttgcttggaagtctgtttccttcccttggcctccagccaggatctttaagaagattggggctactcgggtcgctcttatgcactggaatcgatcccagtttgggaactttgatgcccaaattcgtgacctcgaaagaagactggatagtgttcagaagctgcctgtgggatctagagattgggaaatggaga

SEQ ID NO: 94350 - DNA, 722 bp, Cannabis sativa
atggtggtgagtttaacaatgatgacttagaattttttgtgatgaacagggttataggcataaatttttgtctccaaggactccacaaaaaatggagttttcgaagggacgaatagaacaattcgagaaggctaggtcaaatgaaatttcactaccaaaatattttttggctgaggcagttaatacctcttgctctattttaaatcgtgttttcaataggccaaacattaataaaactcctcatgaggtttgaaaagagagaaaacccaatattggctattttagagtttttggatataaatgctatatttttaacaccaaggataaccttagaaaatttgaagccgaatccgatgttggaatttttatagggtattcaacacatagtaaatcttatagaatatataacaaaagtactaatgttgaaaaatctattcatgttgcttttgatgagactaataacacgcatacaagcaaatgtttagatgatgatgttgtaggtttgggagatggggttcaaaatcttgatatttgagattcttccaatgctccatcacaaacttccaaagagaaaccacctattgaaaaggtaaatgaaagccaaggtatgaattttaacattctacatgagtggaaattcaaaagttcttaccctatacaccaaattctaggtgatccttcttaaggtgtcactacttaaaactcccttagaaacttgtgta

SEQ ID NO: 94351 - DNA, 858 bp, Cannabis sativa
aatttctcaatgattctactagaaatatatgaatgtgtggcactagaatcaaacaaaatagtaaacataatacgaccaatagctatctcacctgtaacagacaaagggccagctttagcatctggttgggttaaaccctagcaggaaccataggactctctttcttagtctcacgcttttgtaactgtgggcagttgttcttgaaatggcctgcaactccacattggtagcaaactctaggccagaattcacccgagtgatgtctcttgcattttgagcattcaggataaggctgccaaaccttatttttgcctcgacaaaaaccctagttaccttaaaaaattttgttttgacccacaaccggtggtccatctagtttcctctttcggtcattagggctaaaacttttattactcactccaatacccgatgaggtcttccacatgtctttcctttgggtacactttttacgaatcaggctttcaacccctttagcattgagagctaagtccagagtctgaggataagtcttcacgacccatgattgtttgactgccataatcacatctctagcaatatattcttcaaggcctcttataaacttagcctttcttgcatcatcactgaccacttcatcagaagaaaacttggccagcctatcaaacgtggtagcatattcagtcgcagtcatgctaccctgaactaatcgtgcaactcttcagcctaagcagcataaatagattcattatagtgtttctcataaaatagttccctgaatgcatccaaagtcatagtattcagattatgaccttgggaaacaatctcccaccatatccgggcatcatcccgtaacatata

SEQ ID NO: 94352 - DNA, 742 bp, Cannabis sativa
attcaattttactatttcagtgattatttatgtactaagccatgctccccgtactttgatatctactaagtcatacccctcgaactttgagatgtactaaattatatcccctgaactttcattcatgttagactgtttttactaaaattagataaaatttcttaaattcaacaattccaatagttcaaggaacacttttaacggccttaaaagttcaggggcatgctttattacatgtcaacgttcagacggtaaaaatcctaattagcctaaaaaaaattagtgtgaaaaaaaaaagataaaggaaaaattagaaaaagaaaaaaaataaatagaggtaagataaaaagaaagaagtcggccaaaaataaataaaaaattaatgagtggtcataaatatagcctattaatttcacactttatcttacaaagaggaggtctcaaattcgaaactaatataaaaaagtcatgaaaaaaaatacaaatatacatatatagcctattaatttcacactttatcttacaaagaggatgtcccaaattcgaaactaatataaaaaagtcatgaaaaaaaatacaatatatatatacatatatatatataaaagaaaagaaaaaaactttaataaataaaaaagaatagtggttataagcatatattaatggttatacttagggatggacatctgatccaatacaacatttttttcctcatccgatccaatccagtccaattactaat

SEQ ID NO: 94353 - DNA, 580 bp, Cannabis sativa
  modified_base (540)..(543): a, c, t, g, unknown or other
agtttctaggtttctcatcacagattttgaacgcaaaatagggggaattgaatccttaccttgtcgtagatcactgttacattgattgttggccatgagaaagtgtagaaaatcattccgagcatcatccctaacctcatcctgcttctgaattatcctcagagaagtatcaggggacaaaggtcgaaactcatgtcgatcctctccctcattgagtcgatcctcccctggcatttcctcctcatccgtgacttccagtggttcaatttcatcgattcgctccaacgcctcagcaagatcgatatcagtatttccattaccagctttctttcttgagattttagtagcagatttcgatttttcatggttcttggaccttgttttagccatagcaccagcctcccagctgcaagaacgaaaaaccagagaaaatcttatctatttaataataataatgtattattatttgttataattctaatattagactatgtttagtttatgaattttcactaagctagggtttaattgtgaagaaannnnattttagggtttatttattaatttggagattttatta

SEQ ID NO: 94354 - DNA, 1209 bp, Cannabis sativa
  modified_base (26)..(45): a, c, t, g, unknown or other
  modified_base (89)..(90): a, c, t, g, unknown or other
tgaaataaataatgtgaaccatgcannnnnnnnnnnnnnnnnnnntctttattaataagtaaatatgattatattaaaatgggttttanntagggcacaaaacccaacaaaactgtcaagcagcaattgaaaggagtaagcgagccatcaaggagttgtaccaacatgtctggccaaccaagaaaaacctataggctagccaaagtgagcttgtatggttggccaagatctaggcacaaactggctatccataaagtgactttcagaccaagtgagcttccgttggactaagggaacctaacctctacaaggaaacggtgtacaaagctatcctccacttgcaaaaggctggcctccacatccaaaggctagcctcctcttggtaaatctaacaggaacatgacctgctaggtcctagcaggagcatggccatggccggccagaggggggggcagccccgaaaaaattaaaattaatattatatatatcaaaataaaaatacaatatatgtatatatataaattttggttcaatagtttccataaaatggcttatagcacaattggtaagagtgagattttgtgttaatgtgtgggtgctgggttcaattcttagctccctcacattttagctgttttaaaaattcaaaagtactggttaaaaggtttatttatttatttatttatttttatttatttaataaaaatataatattttaagatatattcaatgcattacttaaaaaaaatatataatataatatttaggaatagatctatagaaaattgttgggatttttttcttaaaaaagtacatgatttaaaaaagaataaatattatattataaatatttttggtaaggagcaaagattatgtttagtaaacaattttttaaaaattactcttggtgcaatcaaacggatataaaaaatttattgtaatactaataaataaatcaaatatttttaaaaaataactaacaagaatagtataacttaaataaaaaaaatatatttattaattattatttatcttcttaaatttataaaagcttataacatatattaaaaaagttaacataatttttaacatactattgattttttttcttctacaaaagtcctaaaatatataacacttcaataaagatgctattaattataatcaaatattacgttaagttaccttatgtggtgagaaaaattattt

SEQ ID NO: 94355 - DNA, 596 bp, Cannabis sativa
acaggtctctccattacagaaaaagttcgtgagtgtggcaatgttctgcttgattggggaaaagaatacaccggtaactttggtaagaggataaaggaatgcaaggctgaaattaaaatgtggaagaaagggcaagatgctaactctcttgagcgttataaagcggcggaggtgaacttgaataatctctatttgcaaagagagattttctggaagcagaggagcaagcagctttggttgagagagggtgatcgaaactctaagtatttccatgccaaggctacttcaagaagaagatctaatgttattcaaaagctgaagaataccgacggtgattgggtcggctgggaagatggtcttccaacagtggtgatcaattattttcaacaattatttcagcactctgatggtgatttttcttcagtcattgactgtgtctcccaatcggttactgaagaacaaaatgttttgttacttgaagaggtgactagagaggaaatcaagaaggcgttgttccaaatgcatcccgataaggctcctggcccagatggtatgactcctggattctatcaaaaattttggaatttggttggtga

SEQ ID NO: 94356 - DNA, 942 bp, Cannabis sativa
ttaaaatttatatactccacgagttcatattatttctgagttttggatgtgtttacaatttgacaaagtttctgtaaattagaattgcctctctaatttccctttgagtgaaccactatttataagaataggatggtggttactcaatcttatcttagtgaaaagttacaattgatgggtggttactgcccacgtttcacatataactgaatatttggataagtataaataactgctttatatttaaaatacataaaagtgatctttaaagtggtattagacttggtcagatcatgttatttgagagcatgtgcactactgctatgtaatacgaggcgatacattgatgcttgtgtattacgaggtgattcatcactgtagtgtattacgaggtgattcatcaatgttgtgtattacgaggtgattcatcactgctgtgtattacgaggtgattcatcactgctgtgtataacaagcagctacaagatctttgtattacgagtagctacaagttctttgttgcgagatgttgaatgtttatcaaaataacatcccgacaatgttgaaatagctcacttcatgaaccttctgatccttatttagataagatcacctcacagattgagtcttaagtttttttttgacctgtctcacaatgtatttattgtgagaatttattatttatgtcatgtggcattcaattcgactttttcattaaatagtctaaaaaataggtataacaacaacctaaaacaatcaaaagataaatttattaatatattaaaaattgaggttgaacattggaatctaatacataaaaatcagtattatttatcaattagttaaaattctaacctaggaaaaccagttagtaaagaaaaaaccagtttcttgatataatcaaattaaaaaactatgaaacttaaaactcaattataaaaa

SEQ ID NO: 94357 - DNA, 560 bp, Cannabis sativa
taaaaaatgctttaatatagaaaatgctaaatcataaatctatggaacctttgctaaattaaagaagaagaagatgataaaagatgagcgaaagtactaaactgaagccattgttggagattgcacagaagattatgatcttacaagaatacactatttctctaaagtattttttctggaaggagagaatacaaaaactctagtgtttcttggggagtaaaagtggtggaaatggagaaaatatttcctttatttgctttttttttttttttttgaattttgactgattttttttattattattttaataaaagaatattcgctttaagtttttactaatttgtaaaaaagaatatttatataataataataataataataataacacttattattatatttttttgttccacacatttgtaattcatttttccaatgtgatttctgaacagatagcaaactcccctgagcttttgatgtgtgggtgctcactttctcccaaagtgagcctttgacaaatcttcttctgaaaatttcttctcttattcaatgaagctctt

SEQ ID NO: 94358 - DNA, 730 bp, Cannabis sativa
ggcagaaaaatctgttttttttttttttacatttctgacggtttacaaccttcgtctataataggatataggcgacagttttaaaccgtgctctatactataggcgacgatttaaaatcgtggataataatttaacatgtaaatatacttacagagttttagaaatatgacttaagtattattaccgctaaaagttacttatgtatttatttacaaccaggagttagatttaggtatttataccgcaaattatttttattattattattatttattttaatattttcttacgaagcgctgtttttaaattgttttaaaaaagacttttatgttatattatttatttaaataatataatattaagattaaaataagtgatatatacaatattatatattaataagatattaatatatgatattaatgagagtcatatcatgtgatataatatatttactcttgaaattgtaacttatggagagttacaaatctgaatattagatttgtaacttatctattatatttgataccaataatatataattaagtgttaaattatatgcggcggttatgaattcaaaaggatgagtttcggtggtggtggttagtagtttcggtagtgtgaggaagaggaagagagagtgagaggaagaggaagagaaagagagagagggaaaaaaatgaaatggagggtattttaaaataggggctgtttcgaattcatgaaaaa

SEQ ID NO: 94359 - DNA, 813 bp, Cannabis sativa
ttgaggaggggaccggtggacattcgatggtcgatggcagatggagaagagacggagacggaggggaccagtggacggtttgctcgtgggtttcgaaggttgctcgtgggttttgaggggtggtggtgggttttggacggtggtggatttcgtggtggtgggtttcaaacaatggtgggtttcgaagttttgaaggtgggaaaaccggtggcggagagagattttgtccctgtcagccgcactggttaggggttttcttttatgaggttaagttatgagttatgtgtgagagattgcggggttagatgggaaaaccggtttggactacttatacccatacccgacggtttaaaaccgtcaggtatagtatagctaatgattttaaaccgtcgggtataggcccgcctaaaaattcacgttttataataaaactgtcacctattttgttacctactgctttaaaccgtcgagaatactaaattttatttgtcagttttacacagttacttaatctttttagcgacggtcctgatatttgtggtagtggacatacaagattagaattcgtcgattagaagatctccacgaatgcctaaataagagagagttagtttatactaaattaactaaaaagaaaattaaatcattttattttatttacaaaattaaaaaagataataattaagaatattataatttgactaaatagtcactgttataaaatataatcattatttatttatagacttttaaaggggtatttattttttccatttaaattaaaataaaataataaattaattaagaaaaaaa

SEQ ID NO: 94360 - DNA, 593 bp, Cannabis sativa
aaatctatgtttagaaagactgtactttgcccaaacatgttaagcaaaccttaacaagcaatcacaagtcttctttatggaatagtactccattgttttcagttcttttaacttatcccttacctacatttttttaactcactacgagctacaatcttagtaagtttcatatttccaccaatttgaatcttttaagtaagttttatgcatccatttaactcataaattatctttattttttgagttaaagtccacacatattttctaatagctcacaataagcccaatccctcttgatcttttggcttgcaaatatctttccaagccaaaagatcaagctgtttatattcagaaagtaccacttcataaaaatcacgacatattttatcaatagtttgtaaattttgcttaggaaggatgagttcttgggctcagtatgtataaatagcaacaagaattgagttgatctgtgtagctctcccagcataagataagtgtccagaactcaataattgaatttgaaccatcattttctctatatgaatttcacatttaatagaggaaatattaccttttattattattattaggta

SEQ ID NO: 94361 - DNA, 599 bp, Cannabis sativa
ttgccacgtgacaatttacttaattaggtacctacagaagttttaaaattataacttatgtattattaccgccaaaaattaaacttatgtatttatttgcaagttaatattaaacttaggtatttatgttacaaattactcataaaaaaatacaaacttgtttcattttttcctttttccttttttcttttctatttttcttttttgtttatcagcccaaccctttttattctctctccctttcatcttcttctttctactagtgaacttccaaagccagtaagaagctctaactatcattttcgtctttatcactcactgtcctatctttgcttgaaccccaatcacactagccctacaccatcacatcaccccaaaatctaggtcgtcgtcatcctcaagatttctattttccttcaacccaatgccatcgccatcacctccctcaagctctgcttctctcagatatgttcaagctagactaccttaagatcacaccatcatcccctgtttgtttaatgccctatcgtccccatatttccctttcacacttttttcttttcactacctagatttaaaatattttgagcaaaataggt

SEQ ID NO: 94362 - DNA, 610 bp, Cannabis sativa
ctacattctttcttcatcatcatcgtatttttaatttgaagaaattaggtgaaatttgtggtatagttcctctaaataaaaaggtctccataagtttttttgtctttccggaaagttagttgtctcccagaagagctttctcggaaggcctttgtgtccatccggaaagagtcttcaagaaagcaaatctttctaatgagtttcagatggctagctattcccttctggaagggagtcccagatagtcgactttagctgtcgctttttctatctgggaagaatcttcaacgtgtgcttcagttcatagtcctagaagcattcacttcatccaggagcactataacttaagctgaagtggagattctgttacgaggagtttgttaagtttgttatgtcttaactaacttaacaactaagcatttgcagctactgactttaggatccatatcccttatctataaatactgataactcttatcttttagtagagtgattatcagatgagtttcgagaggtggtcttgagagagaaagattgagaggtagagagagagaggtacaaagaaaagaaagagattgggtttggatttgtatgaagaatcttctataga

SEQ ID NO: 94363 - DNA, 556 bp, Cannabis sativa
catttatctttaccttgttaatcgttggtttagtccagtgctccacctcaattcttaactcattgtgaattaacagaggttcaaatctgttatgttgagcactttgccattggtaaagattaaagcgtgttgaaaaactacttctgcagctgtcgatattttctggttccacaacaggtttttcctcgcgttccaaatagcccaagctaccattaaagcttcttcgatctggtcactgttgttaatcttcactaaagcttgaaaccagtcatgaaaaccctgctgagataaggctgcaatattaagtaaacatctgtgccaacaagacatagcaaaatgcaaaatagattcatctgtaatgttgcagattgtacatccctaattaacatttgcatgttttatattgagttgaaccttggttgcaagtgtccctgtaatagccctccaaccaaagtgtaaaaccttcggttgaacattaatcttccaaaaaaaacttgcaaaaatcagggtccatatcagtcagcatcaattcatttttatctacacataagagggt

SEQ ID NO: 94364 - DNA, 641 bp, Cannabis sativa
tgacgaacacaaactagagggagattggataaatattgttgaacatttgcaaccaaatcattaaaatgagacttaaaggattttagattattaatggcattggcaagaagcatagaatcaatttctataaaattcaattgtaggttccaatcccaagccaaaagtagaccatagtgttaggtatttatagtatgaaatgaagcatatatgattattgtatgaagtgcggaattaattaaacatatatgcattataattaaagatcgaaataccttcagccattgattctttgagcttaagtcccacacaacctttgatctgcaaaagaaaaaggaaattgattagtgtgggtaatcgagcttccaagctctgtctactctctttagatggatttactgtattttacagaatgagtagtgagctcggggtcgagaccttatatttatataggtgagacctgttaacccaagatatgtttccaagaggagagtgaattagaattaaactaatttcagtaaataaaaacttttaacacaaaactatgcaattagtctcttaatcaaataaatgaaagtagtatggcaagcaatattgtatagaaaattatcatccagatttttctcacctgacgtggcttgctt

SEQ ID NO: 94365 - DNA, 847 bp, Cannabis sativa
aaaagaggaggaaaaaagtatacctacatataggctatagtttaacacatgtaactaaatagaaagttttagagactaagatacaagaaaactaaacaaaattcatctttttttctaaacacaatatcaactttgttagtttctttttcagacatattatgctaaattataaaataataaataagattttttttcgtctgaactatggtatttttagagttttatcccttttattgtaaaaattttccttgaactatacaaatcattatgaaaactctcgttgtaaatatcctcataattcatcgttagattgttatttatgcatttattaaattagattagattaatgttatgtactaatgctatattatcaaattattataggaaatatgcagcaaattgtttaaggaaatatgcaaaatgcatttgcagttacaagggatatttgtatcgatttttatagttcagagagaatttttacaacagaaaaaaattaaaaaaattacactctatacctattttttatttatttttttaatatttaccttcattttattattctttaatttatacccagttttgtaaatcatattctaattaagtgtattataaactttaattttaataagttatgtgaggttatatttggtattttgattataaaaaaaagcatttatcaattaaaattattttagagttacatttggttaatgtgtaataaaaagggtagtttttaacttctaccaaaaaaattcaggagacaaaacttaggggtgaaaatcggtcggttatggtcggtttttataattttataactaaccggtcagttacagtttttattttacga

SEQ ID NO: 94366 - DNA, 1187 bp, Cannabis sativa
aaatcatgttgagcttagtgatagcatataagatatgaacctaataaagaagactttaagaatctgtttgatatgttgtattatatcgtattatattgaattgtttcctatatcacatttttatccagtattacatttggtattgacttatatgtgcatataactagaggcggactcccttgagcccaaagaggactaaagcaccctaaaatttgaaaatatattaaaacatatatacatagtaattaaataagatagttgattaagatgcttgaatcacccctttttttctttgtttatttacattttattttctaaaaaaatcccacgaagtataaggttcaaactagattcggacttataaccactagaattgaaggacgttgttaaaccatgattccacttaaatttaacttgttattaacaattttggattatatttaatgtttaactaatctcaccctaaaattaaattctcagtctgccattacatgcatataactatactctcttttaatacgaatcaaaatttaacagtctaatacgacgtaccaaacgaactctaagcaaatatttttttggactatattgtatcttacagtgttccatctgtgatcaagaaattcattaatagcaatggcattttgtccatacatcataggagagatgtaatatccccaaagcatccatggtttgatgtcatctatcattcaaataatatttacatggttaattggtttagtgaataagggaaaaaaaaaagcctacttttgaaatgaaaagagtcttgaaactaaagtgacattacttgcctttagacactatgaaacctccaagaacaaagaccaatagtaatgtaaaagcaccaagtgtgtttgcaacaacttctgtccttccggcagctgcaatgaatcgaaagagagaaagagccatctgatgtacaccgaataaagccaataattgtttgaagaacctgaaaaacacaaagaaagaagaagaagaagatgacaatatggtaataatactcgtggagtttcatctcaaaaccaagtgaagtaatctgtgttcttataaatggtacaatgctcccactcactttccatgtgggacaatctacaaattacaagtaaaaggcattttcgcctccctgaacttttacaactatcaaatcacgcaccctaaagttt

SEQ ID NO: 94367 - DNA, 528 bp, Cannabis sativa
gagctcacagtgtttgagattagacccgggtgggttgaggagacatacctattttctgtgcttggtaaccagggatgagtgagtatattagtagaagccccattcccaatagtacgaatggctcccttcttcaccaagtgttgagcaccccagatgctacgccaaacaaagctggggttattgccaagttccgctgaaaggaagtcagaatgtgggaaatacttggctttgaagattcggctaaccaaagtatcagggttacaaagcatccgccagccttgttttgctaacatggcaagattgaaatcgtgaaggtgacggaatcccataccaccatcatctttggaagcccccaaccgattccaagacatccatatgattccattgcctttactagaagaagtcttccaccaaaagctagccatttgtttctcaatctcctcacaaatgccaataggaatgagacatacgctcatagcataagtaggaagcgactggataatcgttttaagaagaatttcttttcca

SEQ ID NO: 94368 - DNA, 572 bp, Cannabis sativa
atgcatctccttcgtgccgtgctccaacaccgcatgaagaccacggctgatctacaccgccgggaggtccgctttgaggttggtgacttggtgtttgtcaagctccggccgtaccgacagaaaactttggctgttcgtcgtaatgagaagcttgctgcccgcttctatgggccatttcgagttctgagccgtgttggcgaggtggcctataagcttgaccttcctcctagtgctgcggtacaccccgtctttcatgtttcccaactccgagctgtcattggggcggcttcctcatcttccacctttccttcccaactcactccggagttggagttgcaagtggaacccgaggaagtgctgaatgtgcgccatggaccaaacggacctggtgatgaagttgaagttttgattcgctggaagaatttgcccttgtttgaagcatcatgggagaagttcgagaccatccgtcaacagtttcctacttttaaccttgaggacaaggttcatgacatcggggggggggtaatgttaggactaaggtacgttttacctatgttaggagaggtaagaac

SEQ ID NO: 94369 - DNA, 869 bp, Cannabis sativa
  modified_base (26)..(34): a, c, t, g, unknown or other
gagttataatttctcaattctggagnnnnnnnnnaactctaggggtattatttgattaatatgtgaaatgtgcaattttttgtatttttgctcggcgacaacgaaaaatgcgatggatggctagtttgatcacatgagtaagtttagaaccttaatttttaatgggggatatttttgaggaaataaattatcgggattgagcggggttatggaatttgacgattttacccctagctttagaaataccttagttttaagtatgaggggtattttagtaattttattggagggttaagtggctggttgtggttgtggcacctagcaattttaagggcagcaaggattaattagaaatccttttccctttgaagaaactcaaaaattaacaaaaaaaaaaagatagaaaaatacacctcttggaactctccctctctttctcttttggctgggacaaactagagggatttaccctcaaagtttggtgtttttctagattgaagctaaggatttgatcattcatgaagtaaaggtaaaccctagaccattagttttatttttttaagctttctcttgagtttgaggttatgaaattgtgatttagtggctgttagggtttgggatgtttagggttcaatttttaaggttcatttgagttgattaagagttttagcagctggttttagtatgtggtgttgattttatgcaagtttgagttttgaactcaaagatttgatcattattggcaagttgagttttaatggttttttctggttaaattatgttgtaaatgcattgtacaggtatactggaaagtttggttggattttgaggtcatgggggcatttttcgggttcccagcacagaaccgg

SEQ ID NO: 94370 - DNA, 1013 bp, Cannabis sativa
taataatttttggtaaatgaaaaccaagtcgcgtttattaaaaataaatttgttgctcacaacgtgtttaattatactacaagatttatatgcttgttaaaaattgattcgaccaaagtctatgatacaataaagtgagatttctaacttctcaaagcatattcttacctacttaatttgtgaattgttatgtcttgcgttcaagacacaacatacttgttagtcattcaaaagatcaaaggcaatttaaagaggctaaaggtttatgccggggagatccaatctcatcactcctctttgttctaatcatggagtatccgattagaattctttaaagacaaggcaaggaaaaaaaaaattagacatcatccaatgtgcaacagtctgaatctagttaacttatgttttattaatgactttgattctattttgtaagggtacctaactcagatttaattagatgtattgctgaaatattgaagcagtttggcctatgttctagattggcagtaaacaaagagaaatccagtatttactttgctggagtaaacaacctttagaaacaaagaatcatagagaggttggatttaaaggaagactcattttcgatgaaatatttgggggtaagtcttaaaccaacaaaatagaaataggcgaattgtgagatcattattcaaagttgagaatgaaattgcacacttgggcaagtcggtattcgacttatgcagggagggcacttctcattaactttgtgttgattgggattagaagtatctttctcttggttcaaaaatttctaaggaaattgataaaatttacaaagattttctgtgggagcaaatatatggtgggctggattttgaagaagggtcgaaatggaacaaagcttctctggcaagatatttgtgggctttgatatgctagttttaggtttattttatgaagtgttttagtgttgtgtttcaactgactgtatttattttgtgtagaattacgcttgttttctacttgtt

SEQ ID NO: 94371 - DNA, 726 bp, Cannabis sativa
aaaacccaacaaatatatccaacaatgagaactatggatcttggaagagatcgatgatggtggccttagctgcgaggaacaaaatgaagtttgttgatggtagattgcctgaaccagatgaggaagacgaagaccacgaatcttggtgcagatgtaacaattcaatcttcctttggatattaaaagctgtatcaagtgaaataggagatagcatcatgtaccatgataatgcttccaccatttgttctgaacttgaagaaagattcaaccaaaagaatgcccctcgtgtttttgaagctaaacgcgccataaatctccttaatcaaggttcgagtagtgtgacttcatactttaccaagttaaaaaccctatgaaagtaatacaccagtaccaagaagaagataaagttcttgaatttcttgttggtttaaatgaatcctacagtcttgctagatctcaagtgctaatgcaagaaccccttccaggaattaataaggcttatgcctcaatcattcaagaggaaagtcaaagaggcattactaatcttcaaattgaatcccagaaatcgaattcagaggttactggaggatttcaatctcaaagatccaagttattttgtaataattgtggaattaatggacacaccatgtctagatgttacaaaattcatggctatccaccggggcataggttacatgacatatttcctagcaaaaatggtgacaa

SEQ ID NO: 94372 - DNA, 598 bp, Cannabis sativa
atatttagttttccttttatttactttatatttttgtatatatatattaataattttgtgttcaggatataaaaagtatcctttcacctactaaacgggagaaaaaaatgccacacatgcaaggcttcattcgtatctctgaatcaaagtcaaacatcttgattaatatattgacagttgtattggagtctggaggcacaattaattggaccgatgatactgaaagacattagagttgtggtaatgtcgatgttagaaatgaagaacaacacactgttacaaatgaagaacaaccctctggtcaagctatagaagttggtaacacaattcatgttccacctatgagtgaagccacaagagatgatcttccagtggtcaccccaggttattcccatccatatgttaacctcatccacaatgtatggaccaaaagtgagacaaagtgaaaaagtggattggtgcactgtcaaggcctacatagatcaatattttcattaatgagatcagaaatttcattgatgagatcaaaaatttcattgtttccttcaaagataattatgtcgctgcaacaatagtatattcatgttgaagggcaaca

SEQ ID NO: 94373 - DNA, 914 bp, Cannabis sativa
tataaaagagcatcaagttgagattgaacatgtttaatagaagaaattgcatccctatctctatggtgagaggactgaagtctctcaatatcttgctgaaggtaagaaatacgaagcttaaaatcttttctaatggacttgccccaagaagtaagagaatcaatagaagctttttgagaatgaaggaacctaggataagcacctaatgtggaatcattattggaccaagcactattaagggtggtataaaaatccggattctcaagccaaatattttcaaagtgaaatcgcttaggactatgaagattacggttgggcacatttggattgaccattactttcagtgctctatgatcagagccataatatggtaaatgataaagaacagccgaaggaaatgaattaaaccaagaatcagaaccaattgcccaatcaagtctttcaaaaatagtattattattccaagtatatttattacctataaaaggaaggggtgataaatgaaacttacttaaaaaagcagaaaaattatccatatttacaatattataacgatcactaccaattttatcactataataaagatagctattaaaatcccccatgataagccaagggaggttcggagcattataataaactttatcaagcaattcccaagtaaacacacgttgagaaacatcaggagagccataaaaaccagtaaaatgaaaagtttcattatcaggaaaagttataatacagtctatatgattacatgaaaagttaataatattaacatctaaacagtctttccataacaacataagtccccccccaaaaaacttcctagggacctcaaaagcatgatcaaaagaaagacccactctaaacttatccattgcatggacagaaagtctagtttccatcaaaaa

SEQ ID NO: 94374 - DNA, 637 bp, Cannabis sativa
tgtagtactgtaccaaagaaaagtgatataccgaagcttcttaaccgttgtgctgtgattgctgtctccatttatttctaacatttattactataggcaagtacttgtgctattttgaatcgatctctctggcttcgcttttttaaaaaaacaaaatttgaatggttctacacttctacttctatcttcaattaatttttgcatttatgtgtctgtctcacccccatcgcctctacacccgcacaagactcaaatactctagtaacgtcgtttttaaagctatgctgaatgcactatttcggccaggtttcaaaccattgggcctacgagccagaagcccatgaagtaatctatagtaactaactagtaagtacaatcaatgtatccaagcaaaattcgaatttgttggtgtttgagctagggtacgcaaaatgggtcacacagaaatctggggaaataaatagaatgagttttcttagagtaatttttgagttgacatcaataatttgcttgttaaactattcattttgggcgtctaatctaacatgatattaatataatttaaacataattatttagtttttttttttcacacaattaataattgaattgggtttacatttaacaattacttagt

SEQ ID NO: 94375 - DNA, 574 bp, Cannabis sativa
ctgtcaagagagcgtaccagatgtgttgtgggaatagagaagtagaaaagtctcctttgtgaaagataatatggaaccagaatatcgatatcgtcctcaatgattatatggagggtagttgctgattgtattccaacccgcgataaactccctttcattcaacacaagaactaccttctgtgtgaaacaataagacacatttttagggcatgccctttcgcgaaggcactgtggtttagttgtcctttcccaattcggagcaatgttagcgaggatgccacctacaaagatatcatattgggcttattttcgtgcatgccaattgagataaagtggcaatttttggagttcattggatgcttgtttgatggaatttggcaagcgagaaacgaacgcttgttcaaaggaaaggcaactgatattcacaacactagaagacacattctcatgcgtttccaagagctgaaccaattgcagatgacctccagctcgagtgacaccgataagagattgggggaaggattatctttgggacaaccgaccgtgactgccaaaatccctagcatcacagaga

SEQ ID NO: 94376 - DNA, 515 bp, Cannabis sativa
gccggaccgtcgacactccacagccacagccgatctcctcacttcctcaggtatggtattatatatatatatatttatttgtacagaatatatatgtgagaatatatgtatgtctgtgtctaacgatttgaggtttttcaattcaaaaccatcctaacctagcttttttacttatttggagtagttatattctgctatgttgtttcaaattgtctttaggaacatttatgaattttttggcatattcaacatttggaatctcagttgaaaatatgtcaaaattcctctgtagtgtttgtttcagtttgtgccttttgagattcatttctttcttcactctgtttagtatgatgtatttttctttagtgagacttgagagttcatagaaaattattttatcataaatttgtagctctcttgattgcccacatattcttgaacattcaattaaaaaataaacactacagaggaattgataagcattaatgaacacatatattgtaatcatatataca

SEQ ID NO: 94377 - DNA, 601 bp, Cannabis sativa
tatatgcttgttataaatcaattatcattattttgttattacaattattaattagttatcaagaaactcacacaataagatgtgccaatttgaagaataatctagctgtcactacacatgtaatttgtaaataaaacaatgttagatataccgaaatggatagtaatttctgttattaggttgtgcagtactatattattatttcctaatttcagtgatcatatataactattacgtgcgaggcaagcatacttagttttatgttaggtattttttattttatttaaaaacaatacaataaatagttaaaaaaaacatattattaattattatttcaaattatttttaggtatattaaatagtggtattgtaaattgtgtgttagtatattactatattttataagtaaaacataattgcatctataaatttatgatatgtacattgttattaataataaaaagtacgttaattttagtatgtacatactcatatagtagttattcttgacctgaaacttttgtattttttttaggaagcatgggttctcccccttaagcaactcaattgatcatatactatctatatgataaataacaaa

SEQ ID NO: 94378 - DNA, 1409 bp, Cannabis sativa
tcttaggaaaggggcttgtaaagtcgtgtcgaatggtaaggccaccaatatttggagggatccttggattcctcattacaaaggttttatcccgaaaccaaaaggcagtgttttacccaatgtaaactatgtggctgaactcctccttgataatggagactagaacatcctaaagctcaatggcatctttaacagggaaacggtgtctgcaattgttaagggtggtaaaccctctagtcaaggagaagataaatgggtgtggactttagagaaaaatggacaattcacgagcaaatcggcttacttgtctcaagcgttggaaagagctcctcattgtgaagttgctccggtgctctggaacaagttatggaatagcaaaattttggagaggcataagatcctttggtgatgcatcctttctaacgcgcttcctgttagatctgtgattggaagaagagtccacattgaggagacatgttgtcctttatgtggattaagggaggaatcgatggaacatcttttcttgtcctatgatgtggcgttgcatttatggcgaacttcgccatgggctatctatcctatcagtatgggattcgagtttgggactgggtcaaatttatatggaatctcaataatagggggatcagagtagaagaagtcttcctgtatgcttggattgtagttgaaactatctagaggatgcgaaacgagttcattcataataacacttatccagatgttttgaaatgtattgatcgggtttgtacttcttatgcaaagcttcatgatattttcttgccttgcccgacaccatattcgagggggacctgggggcctcttcctcaggattggattaaattgaaatgtgatgtcagggtgggattagaaagcatgtgcatagtagtggtagcaaggaaccatttgagtagggtggttcagattcatacggctcggttggacttcttggatgtcttatgtggagaagcagcggcatgttgtttagctatcttgttggctattgagctaggttataagtatattttggtggagagtgactcgagagtggttatcaatgctcttaatgggacggagtctcattgggggcttgagaactatatctccttttgttctaagtcatctccctcttttaattgttgtaatttcatgtttgctaatagaacttgtaattttgcggcccttaatgtggcttattggacttttattaacaagttgtatggctctattccggtctcctcaattccggaggaccttttatgtattgaccgagaggtctaaaactgtttatttaatggaatgaatatgcttattatcaaaaaaaaaaagtattagtggacattgatgtagtcacgctcgtgtgaattgcgtcaccggtacctctaagtatctca

SEQ ID NO: 94379 - DNA, 900 bp, Cannabis sativa
catgtgcgtgccaagatactggatgtcatgttcctgtcaacttttccaagaggaggccagcattttgagatgaaggccaacctttggcaagtggaggtcacctttgtacacctttttcttgcagaggttaggttcccttgatcgaatggaagctccctttgtctgaaaatcaccttttggctggccagcttgtgcccagatcctggctagccatacaagctcatcttggctagcaagacatgttggtgtagctccttgatggctcgcttaaatccttatctttactgcttgactatttttccataccttgtaaggacgccctttcttgctattggcaaggctgtgttttacctgtactctgtcttggcttatattgacatgccacgttaggtggaaaaaaattgggataatagtataataattgtttgactgttaaaatttagggacacttatataacaaaattaaacaagtaataaatttcaaatcataaatttagatgagtcttaattaaaagatcaaagactggacaaataaggaattgcataatttagtgggagtcttaaatgtactgagagtatattttaaaagaccattcaagaattgaatccatttgtaatgagttattaaaatttaaaattaaggagataattaatgtaagaatatatattgattttgaaacgaaaaatattcttattaattatgaattttaaataatataatcccccgagtgaatcagtgatctaaaacaagaaaagatatgaaaaaaaatatttattctgacatttgagttgactattcatgggatcttatcaaatcattaattatcctaactgatagaattaataagatgtgagtaagaaaagcttctagattaatcaatttttgaacaataattttga

SEQ ID NO: 94380 - DNA, 1282 bp, Cannabis sativa
atacgtgcctcgcacgtactttttgctagtatatatatatttctaaatctattcttggatgatattattaatatattaatttttaaagaagatatttttattaaatattacataaaatagaagaagaatatgaagtgatcataaaatgatttgaattaagagagaagttatgaatatttgtagtgctaaataatttttcacttttgggtctttccgctcaaaaaaaaaaaagttctctgcaatatatttaatttcccgagaataaactctctaatttcaaaaataagaaagatgacaataaagaaagaaggtttgaagggatattattatggcatagcatacccaaagaatataaatgaaggaaaaattgtttggaattaacagaagagggaagaaggttttcactcttgaccttcgttagatgatgtgtcaaattaaatgacatgtcagtacttaattagttgggacaggcttgggaaagagaaaatgaaacagcatatttttgttcatatttttgttctaatacacactgtaagattatgtaacccacaggtatggatcttggatgtgtgctccgagttcgccaccgcgtgatcgagttcggtaccagagaaaacgtgacaattcgccgtctaataggccgatcatgtctatgggagaggcctcgagatttttagctgctgtggagagggggcgggttcgttattcaggtcctacacaagaggacttggctcccacatctgtgttagagggccgtgagcgtgatgaaggggtgaagtctaggcatgcgactggtcaaggtggtaatgtggctgctggtgtatcgtcttcattgaatggcacacaggcgggtgtggctcaaacgaatggtaatgatttggggaaggtggtgccaatgtgtgaatcggatgagataaatgagccattgggtgatgtagttgctaatcaaggtgaggttggtgagtgttctttcatgcatgacttacccgattgtggcatgggtaagcctatggtggagggggagtgttctatggctgtgggtagtggctcggctgaggggaatgaggccgagaatgtggggggtaatatggttcataaaagcatgcatggattgaatcatgttgataagggtaagggtgttttggacctttcgtctcaagtggaagtttattttacccaagcacttcaacaaacatttgaaccgcttatcaatgcgcaaaaggccaagacttggaagcgactaaattcctctcggggccgtgggtctaaaggtatgtctaag

SEQ ID NO: 94381 - DNA, 1214 bp, Cannabis sativa
ttgactttattagattttgtctcagaatgatactatgacagtcagtagttttatgatctataagaaaataccagataagctgtgcaatcccatatcacttaagaaagatcaagtgtgatgattctaaggctgtgtaggtataggactacataattgaagatgacttagataagttgattgatactacttatatcaacaaggtgtatcttgttttctagtagaccattacaaaagacattcacagttaagcgtgcttgacttgagataatttcaggatgggtgatctcctgggaagtttccaagaaatgtgcgagtgaggacaaagcacgctaggaacactcgtgttcgtctgtagggtcagtcgtcaatccaagaaacagccagagtgacatactcatgtatatgagctataaaactaggaggaaggcccaatgaaaacttgaagcgggaacgttacgattggtatcaaagtcgatcgtcggttagcccgaaggatactcatggtatacatacagaagactcaaagagatccatctcactataacataagtgttattttttatatgcatagtattgtcaataataaatgcatatgtgttatacatatttttcttaagatagggcgcccagaattagagtcacatgaagtattagggtttatgccctgaaaagtctaaaagatatttttgattattaataaggagttgaacattttgatatatgcatgaatattaaattattaatatttatgattgaataatttatatataaatataagaaaattctttattcatatatgaggttgtgacttgtcgctgtacagagaactaagatcacttagctatgaataaaactgccagcaacatattaaagttatagaatctttaatcaatagttgctagtacggttcattaatgctcgttcttcggtgcaaataatctcaattcagattactgatatagtatgacatcaaagtgaaggtgatatagataatagatattataagacaaggaatgatatgaataaatctgtctttatctaacatgtcatttattataaatacctaattcatattataatgatgatcaatagcatatcgacctaaattctgattaatcgtgaactcctattcatgttattagtttttttttattcactcgttaaagattcttagagaagatgatttttacaacttctattttgggaatctaata

SEQ ID NO: 94382 - DNA, 600 bp, Cannabis sativa
catctttatgaagaaggcatatttaattcttttatccaattgaaacaacatagtagtactatactcaactatagctaatatatattactattgtctatgcgtggaaacatatatattaccaaacatagatattaatattatataacctctctatatatctttctatattataagaaaatccactaaaattaaataagggtctctctcacaaacacaataaatccggttacggcatattccttcccaaacatgtcacacacacgtatataaatgacaaatttttaaaaatacattttatttacaaatttacggcataaaatttttaattataaagacacatttataaaattttaaaattataaaaatacactttatttaataaaaaataaaaaaatatcataacatctataaatcaacaataaataaactataaaacaacaaaaaataatctcataataactatgatacaattataattaaactataaaacaactaaaaagaatcaatttattatttttactaaataaatatttagggaattaccccatatactattttttttttattttttatcaaatttacggtttgagtttttaaagt

SEQ ID NO: 94383 - DNA, 669 bp, Cannabis sativa
  modified_base (53)..(58): a, c, t, g, unknown or other
ttatacctaacataaaatttaatagacgtgcctcgcacgtaattttttactannnnnnatatatatataaaaaaaaaagcacgcaaagaaatatattcaaataattgtcatcaccgtatttcactactatatatatttgaaattaatattattaccatgtctcacttgtagtcatcattaatatcattctcagtagatttgctctatacataaaataaatcaaacaataatcggtaagtattcacttttacaggtaagtgaatcattaattatcaatattatatacggttatatagtttatttaaaaaaaacttttaattattagtaatctctaattaaataaaataaaaaaataattaattaataatctctaattaaataaaatagaataaaaaataagagaatttaaagtagaataaaaattaaaaaaaaatgagagaattaaaaagagaatagatagaatcatatactatagattacaggtgatcaaagatagaagtttgagagggcatgaaagaagctttgtagagagattattttgattgaggggctgcccctttgtttttgtacagttttactgagttggtgattaatgaagtattcttcttgatcaaaaaaaaaaaaagaatagatagatgtttttttaaaagaaaattttaattaattaat

SEQ ID NO: 94384 - DNA, 685 bp, Cannabis sativa
  modified_base (491)..(501): a, c, t, g, unknown or other
gtttcctgggccaaacgattcaccattttccaaatggttaaccgtttacggcacagtagtaaaatataattttttggacttacaacacgcataactcatagcttgtgtatccgatttcaaaaaatttagttgcgttctcttagttacaagatgaatactcctaaaatctaatttagaaaaagtatatatcatttttgaaaaataacttgtcacacaaattagtgagccaaattttaaacttataaaccctaatgtactatgcaaattactttaccaagactaaagtataaacataattgtatcatttcattgtgtgtaatattgatgtaaatgagcttactagcttgattttcctgttttgatccgaagttgactttgcctaagagttgactttgactttgacttttagcttctgaagtcctttttagatagattcttgatttattgatatcttggtgaaacttttgctcttatgaagtatgaaatagttnnnnnnnnnnntgaatctacttctttgattatgttgaattgtaattaactcgaaacaatcttttcttggtcttcaatgttgaatcgaaacaatctttccttagtcttcaatctatcttgaattgcaagccacaatacaaagctatgcatcagagtatttaatcttccctaccttctctactccaattaacatgac

SEQ ID NO: 94385 - DNA, 832 bp, Cannabis sativa
acttgaaagtaaggatgactaaaaataaatttgtaaaatgaaataattaatatagttaaattagtatattaataacggaaaaataaaaataagacgtgatacttaaacctttaattttttggtgggcggacttttttatttatttatattttttgaaatataagtctgattttttaagtccctgtaatgagattaatttactctttatctttcaaaagtaaaatagtattacttaccaaaataggggctcaattataggtaagtataaagtcatgataatttgcctttaaatacctgatttgtatatagtaactatttaaaatatatatagttaattttatttaatagtttgttttattttagttatatgaagatttcaacccaatatttaatgtgttgtggatgtatggtgttgaagactgcattttagatttaataataatcagatatgttgtgaaaaaaatatatcacattcacatgaaagaagaaatagacatttaatatctctatgaaaagaattagagattttgaattaattaatttttattgaatattgagttagctgagtacttttatatgattgtgccaatgggaaagagtcaataaagatatcaaccgttgtataaattcaaatcttttatatgatttgtataaattcaaatcttaatacattaatgatggtgatataaaagtaaatcaatctcccattatcaccacacattttgattctaaaacagactgagttatattgatgcgcatactactattaattgcattatatattatttgttttaggataaataatatatttactctctgaattatttattta

SEQ ID NO: 94386 - DNA, 573 bp, Cannabis sativa
catttaatgctctgaaagtaatcataatagcattggattaagagatcggggcaccataaaccaccacacaactccggtgggtggaccaaaaacccatttcgggtaccagagtaggaaacacacgcagaagacttgaacattctagagagaaaaagccagcaacagtgactatgatggttaaatgtgttgtagtgttttattattaaattacttattgtactgaattataaacttttacattaatttttcattgttttacataataaaataaatattaaaattcttgattaaattattttatgtttaattgaaaacattcattaaataataaatttacactgaattatacgagtatgtattgaaacacaatattaaaaattaatacaaatgcatagcaaagttagttaattttttgtctcaaatatatcacaattttgaatgaagatcctctgttagaaaattgtgtcccataatgtgttaattcaatataattctgacacgtcacttcttttttataaattaaaaagaaataatttatactaacggaaccttctattcctgtgaaagtttgtt

SEQ ID NO: 94387 - DNA, 1206 bp, Cannabis sativa
  modified_base (555)..(556): a, c, t, g, unknown or other
tgaggctgaagaagatggcaatcaggttgtcgagttcgacaaaggtaccattgaagtcacagttgattctgaggcggctcattagtatgttatttctacttgttgtatgttaattttatttgagcgatgtcttgtcttatttaagatgggaaccttgtccttttttggacttgtatttgatgtgtaatgctctatgtcaagctcttttgatgtgggtttatgctctgtggattgagctttctcgatgtaggactttgctctatgtattgagctttcttgatgtgtattagacctctttgatgcacaactttgttctatatgttgagcttgtgtatcgttgtttcttgatgtaggattatgagtatcattcactgaattttttagatgggatgttttattcaaatggaggatttgatttgatttattttttttttggttttcattttacttttgtatctataaggtagtcatgtagcatcatgtactagttaggattcttatatccatcctagaattgtcaggtagcaaagagtgccactctaggaatctccatcnntaatggaatttaagcatccttcataggatttaagtatccatcctagagatattatgtagcaaagagtgccactctaggactttccatccgtaaaggaattcaagcatccttcataggatttcagtatccgtcctagagatgtgacgtagcaaagagtgccactctatgactttccatccataaaggaattcaagcatccttcataagatttaagtattcgtcctagaaatgtcacgtagcaaagaatgccactctaggactctccatccgtaatggaatttaagcatccttcataggttttaagtatctgtcctagagatgtcacatagcaaagagtgccactctaggacttttcatccgtaaaagcattcaagcatccttcatagtatttaaagatccttcctagagatgtcacgtagcaaagagtgccactctaggactctctatccgtaatagaattcaagcattattcataggatttaagtagtcgtcctagagatgtcacgtagcaaagagtgccactctaggactctccatttgtaatggaattcaagcatcctttatatgatttaagtatctgtcctagagatgtcacgtagcaaagagtgccactctacgactctccttctgtaatggaattcaatcatcct

SEQ ID NO: 94388 - DNA, 1762 bp, Cannabis sativa
  modified_base (263)..(270): a, c, t, g, unknown or other
  modified_base (888)..(901): a, c, t, g, unknown or other
  modified_base (1549)..(1553): a, c, t, g, unknown or other
  modified_base (1722)..(1736): a, c, t, g, unknown or other
actcttgtttactttatggcaggagaaaccacaagttgggtaataatccatgtctacatattccttatgatataaaatgcaatcgttcggacatgcataaattttttcatacttcaatcctatggaatttacaatttttttcacttcatatgtaggttccgggaagcagttgtcaaatggtaagatatctttaaaagcatctaaaaattgagtaaaacatttatcgctcactccattttctgctttgatgttgtaaaaatttnnnnnnnnggtaatcttagttttttacaaccatcaaataggggtttatcaacatcacttagaaaattatcgaatttttcaggatcattaacaaattcctcccatgcttcgttaagcaagtccaatggatgatcatcaaaatcattatcctcgatatcatctacccctagctttcgtaatggatatggatcatcagctaaatgttcgccatgccaataccaagtagtgtaacttctattaaaacctcgtaaatacacatggtccttaatcattgtaatatttcatttagatccattacaacaatctacacacatacaatgaatacattcataatttttagaattctctaacgcaaactctaaaaatgcaccaaactttacttgaaatcgcagtgtgtctctcccctcacgcatccacaatttatccacaataaatatcctaaccaaaaaaattcagtatttagtaactaaatataactagttactacttacaaatgtaactaactatgtttctcacaattgattcattttaatttatatattactaaaattcttgttttagtttggttcatgttattaagttgtataagttgtaaaagtagtaattaactaactagggtagtgtttnnnnnnnnnnnnnnttggtagaattagaatgacttttcctaaagtgaacccattcatttgtttggtttgtcatttataacagaaaagtttatataaatgtgttatgtcacctaatttcttacaactggcgagtaattgactagttatttgtgttatgtactttttctttaatatttatatatttttttagtaaatttattttaattctactgaaattttggcagcataacagctgtaactggacgttcccaaaaaatttataaatgcctaaagtaacaaacaaaatgaatataacaatttagaacaaacaaaataacataaacaatataaaatttatccacccatccgaccgcagtacatgtattcgcagaacctacttcagtacagatgaatatttaagatattcaaactccactaagtatacattgataattaattataaaaataaaaagttagtgaatgtatatacatatagcaagttaaaattcgatcaataccaaaatatgtcgaacctcattaatgagctcataacctaccatataatgcaatacagcaaaattagaattttaattgtttaattacttactagttatattaaaaaatgtaacaagttactagttactaaattttatagattaatttttttaaaaaataacatatannnnnacatatataatcaattatatatcaaactaacataattttaaaaatttaatttctaaactaattcaatccctactacctcattctcattcacaccaaatatatatacaatacaatttcataatttacacaaatagtataaacccaatatatatatatatatgttgggttnnnnnnnnnnnnnnnaactccatttcaatgtaatctatttt

SEQ ID NO: 94389 - DNA, 508 bp, Cannabis sativa
aagtgtgggcggccaggccctacctagcttacagttggctggccatgtacaagtacgaaactcagggctggctggccttgagtataccctctcctagggtatggccaactaggctttgggcaatccaaggctgcagctcgttcaagaagggccaatcaacgaggcctctacagcaacagattcttttacgcaagcaccattagatcagatatgagacatgctcaaaggcctagctggtccaaagccttcagagcttgagctagacaggacaaggggaccaccattctcgatatatataaatgccttgccctggtctaaattcaagatgccgacttagaagatgtacacagggaaagaagatcccctagtacacctagagtactttgagatccaaacagatcaccaaaggttaaattcctctgctttgggccttgtgtgagagttaggggaccattagtagtgggtacaacatactgaacccaggtctccctcacatgaacaactccaa

SEQ ID NO: 94390 - DNA, 587 bp, Cannabis sativa
ttgatgtgcaacttctttgtgtgtgtgaggatacgttgatttttttttgcttaagtgttgagcttattttgattaatattaaatctgagtttggaatacatgtttagatgagaattaagtttgaaattatgtgttttaatgccctgccatgttatccaataatctgtggaatatggttttgagttatatgtatgtttgggatgttttaggtgtgttttggccttgggttcgagctaaaaatttggggtttcttgcgtcgcggcaccactcattgggcaccgcagcccacccatgtggaaatcctgggttttcaactcaggtgtcgcggcccccgtgtggggagtgcagcggcccgccccttgtttctgggcagattcgaacgtgttattcgaatattcgtaacttctcgattcggaccctattttgggagttccacatatcgttggaaagctctttctgagctctatatgtttatctagatgtgaatgccaattttataatgatgcagaagtggatttagggattaatccttttttatgaatcctagaaattatgactaagattaccggcacttggtcaggagcacc

SEQ ID NO: 94391 - DNA, 714 bp, Cannabis sativa
ataggacaatatttatagttacgaaaagtatacagtatgtacattattttaaaacattacttttttattttttttttctttcatctatatataagatttggtactttttttttataaaaagtactctaatagttcacaagtttaaaaagtatccactataatctcatatatatatatatatatatattaaagcattaaattaatcattattacttagtatatataaaaacttggattacattatacatgtgacaagaccactttaataagcaatttctatcgaagatgttttaagagcatctctaataaaatcaactaaatatagttgtccaattaaactcacttgatccacttttattttttagtcaatcacgatctttcttttatttttttaataaaaaacatgaaagagcatcggtgttttatgtgaaatctttttattatctctctcttcccgcataatatagtatggcctactattttttggtcaactacatgggctacacctattagatgacgtttggttggaggtaataaaatggaatggaatagaaatgaattaattttcatttcattcatttgtttggttgcattttaaagtattaaaatgacattctaatataatgctctttctaccattttggtagaatgactattcttttttatttttattttttttttttttgaagaaaaatgactattccattttgaaaa

SEQ ID NO: 94392 - DNA, 978 bp, Cannabis sativa
atgccccagcattcctggatttgatgagcatgtcatccacatatacttccatatttcgtctgatctagtctttaaacattttattcaccaatctctggtcggttgctccatcattctttagaccaaacgacacgaccttataacaatacagacccttatctattcggaaacttgtatgttcttggtctggtggatgcattatgatttgactataccccaaataatcatccatgaagcttaggatctcttgcctggctgttttatccaccagctaagctattcttggaagtggaaaacagtccttggagcacgccttattaagatcgaaaaaatcactgcatactcactactttttattgggcttgggtactagtacaggggttagctacacacaccgggtagaaagcttcaatgatgaacttgttacgacgtagcttttctacctcttcttttaatgcttgtgcctgttccttgtctaatggtctttttttttttgttgaacgggacagaagtttgggtcaatgtttagggtgtgagatattatggaatgataaataccaaccatatcttcgtgtgactagggaaaaatgtccaggtttgcttttagaaattttattaaagctaattttacttcaagcaacaaacctttgccaattttgagtttcctagtcgggatatttgggtggatttctacctcttccaattcttccactggccctacatttgtatttggttccccatgttggggatccacgtcttcgtccccaccttgggcgactccctattgggcaatacttttccccttgcctgaactttggccgaaggtattttcctttttcacctttgtcaaggcaaggttatagcattcccgtgttattctttgattcccttggaggcaccctaccacattctttgttgtgaacttcatgcacaattgaaaaactgatgtgacaactttcaagtcatatagggccggtc

SEQ ID NO: 94393 - DNA, 659 bp, Cannabis sativa
ggctgaattgtattagttttagggacatgatgtggcaattattttagggcaccataaagtatataaggggagggggtctctttaaaaggtatggagaaaattggtaagagttgagactcattggggagagccccaatcattttgaacaaattgaaataggagagaactagtctctcggaagcttgtgatttgtaattttgcccatcaatttaataaagtttctgcaagaatttcagttatcctattctgtaattgcaagggttaatagaacttatcacaacaagtgtttaaagtatcaatcctacatttttctctcaaataagtagcagcattctgttggaaggataacagatttttctttgtagcataactccgttatcatgatttttccatgggtgagaaggcaatctcataaggaaaaaaaaaagtagccccaacaaatagaagaagccataactcaaagcccatttgacactgcaaataaactattcaatctactccaaatgacagcataaacaccacagacaagttaaaaaccagtttgaaggacctaaatatctgcaccttcacccaataaataaattctaattcaaaggcaagaaattcaatgcaccttttgggagggaatacagctgctgacgatttctttgtgaacgtat

SEQ ID NO: 94394 - DNA, 526 bp, Cannabis sativa
accgtaaacacattatagaaaaaaatcatgatgaagattactatcagaatttacttacatatgccatccaactagaatagctgattgtctatttgaaaaatgtactttatcagataagagaatttaattgcactgaaaaacttataaagatactttactaatttatttaacaaattttattttttataaaatatatatatataatttacactaatttttttcttctaatttaatttataatcttaaatattatgacaaaaaaaattaaaatagataattatataaaatttgacttaaaaaattatatataaaaaaataagtattgatattgaaattaacaaacacaaataaaataataataaaaaaaattaataataaaatattcttataatttattttgtgataagtaaataaaacttctcaaatataatacttaaaagttttcttagaaatttttataaaaatattgaattttgaataaaaatttacaattaaactaacagggaattttttatctttttataaa

SEQ ID NO: 94395 - DNA, 1257 bp, Cannabis sativa
aatcaactctaaagatataataatgttatatcaataaatgcatattaaataactcgttattattaaataaatgtttgatagataatattcaaaacgcatcgactgtatactcataagcgagataatgataataactattaaactgagattgacgagacatatgcctacctcaaaatatacaaacaagaaggggatatttatccactcgagcagaacaaatgcaataactacataactgcctcacattacacatatcgagacagtcacctcgcaatactaatgagaagataaaaacgaggtaaataacttctcaacacttagcattatttccttattaagatgggcaaggaggataactcatatcaagcgagatataacattccaagtcaacaataatcgtctaaaggataaaactaaagagcggttgggcagttattagatattatcctacatgtgattaaatgaaacgtggggattgtccacgtttcataaaccattatatttgaatcaaattcaaaaagagtaactaccaacctatattcctataaatagggcagattccatgggaaaatagacgacaaatttgagagagaaatattattattcaaattttgagattgtattttgtactcaataaatatccataatgataaggactcatggagtatataaattttaactacaaaattacgtaaaaatatctggtgttattctatcatttattacttatcaatttctgtaaagtatttattacaaaaagactatttattttttgttaacaaaaatctgcattaacaagtagaagcacaattaattcagtcaatagaagagattgagtctacaactgaagagtaagaccccttgaattggtcttaattcaaaatttggctaaaatagaattttacttgacaaataatgaatgtagtatgatgaagtgaattctatccatgatcatgaaattattgaatatcaaatcacaagtaaggttatgggtagtcaagtagtgagtgaacaacaaaaaaaaaaaggttgttagatgaaggtgaagaaaatgtgatattgggggatgaagaagcttatggtatcattgatttaaattcatcaatgacatttattgatacaccaccaattgatccatattttttatcaataccaccctcaccatattatacatcctctatgagctactaaaagcttctccccaagctcatcctttaaaatcttctgttgttcatgctaaacatggaacatattatg

SEQ ID NO: 94396 - DNA, 708 bp, Cannabis sativa
tcctctttactggattttatgggtaatttcttggtgtttctatgattctgatgttgctctgtccgtttcaaatgaggaaggaggcgtcgtttatcccttgttactgttcacagtacaaaagaaaaaaaaaatgggcttaggcagtataaaagaaaaaaaaaataggcttggacagtataaaagaaatttctgccgtgtgacagatttttgtaaagattaaggaaaaaattagtatttttgtaaatttatctattgttattggtgtattttctatataatttaaaaaaataacttttaaaaaatattgttattcaatcataaagtgccacttatataagaggtactagacattagtgtatctaatagcaatactcaaatttaatactgtttttaaaaaaaaattaatttaattagtccacgtgtcaacagaagagaagagagaccgacaattgggtgaagtgggaacttattattcaatacaagggatccggtcacctctatattattattttgtgttatagcaaaattcactacttatgggaccaactacttcccatactctttctttatattatttataaaatagtattttttttttttatttttttaaaaaaaggttttgttccaacgcacattatacattcttagctgtgattaaggttttctttgctgccactttccagcattcatggcgtttgtctgattttt

SEQ ID NO: 94397 - DNA, 1103 bp, Cannabis sativa
cccactcgtgattacaatccatctcgccaacaaaagaataaaaagggtgttagtggataatgggagcccagtgaatatcctttacaaggatacactgatgaaaattggactgcaaaacgcgaagttaaaaccttacatggtgaatttgtgcgaattcattggggacaatattgccggtcaaagaattatcaaactcccgttaactttgagtgagccacctatatccagcatattgatgcaagactttctagttgttgacttaccaacggcctacaacatattattgggtcatcctacactaattggactaggggcaattagctcaattaaacacctgtctttaaagtttcaaactctgccaggagtaggtgtagtgtgtggtgaccaactactggctagggaatgctatcagatagagctacaaaataaaaaagttggtcatcaactaatggcagttacaactgaggaaggagagaagcagaacgaagatctggatcctcgagttcaagatgaaaagaatcaattgaaatcaatcgaggaatttgaggaagttattttagaaccagaaaatcccaataagtgtatattcattgggaaaaatctagatgaaaaactaaaatagcaactaataagtttttgaaggcaaacaaggatcagttcacctggagccactcagatatgatagggattgaccctacagttatttgtcaccacttgaatatcaacccaaattatccagccaagagacaaaaaagacgacccttggattttgaaagagaaggggcactcaaggaggaattggataagttgttaactaatgactttatacacgaggcattttatccctcgtggatatctaatcctgtccttgtcccaaaaccaaatggaacttagagaacttgtatcgacttttcaaatttaaacaaggcatatcctaaggaattctttccactacaaaggatcgaccagttagtggatgcaactgctagacacgagctgataacgttcatggatgcatacaagttttgtaaccagattaagatgcatgtctctaatcaggagcatacaagttttgtaagcaacatgggactttattgttataa

SEQ ID NO: 94398 - DNA, 711 bp, Cannabis sativa
atgaggacttctgtttgttgaagaatcatgactagaggcaaattcatgaattaaaatatataataagattttgtttcgtaagtttcttttaagttgttttagaattaaaatatatatatatatattgttaaaaatataaaaataagtacttctcttaaaagtaaattacacgaggaagtatattttgcatacaaattattgattaattataatatatggaaccggacttttttaaaatttatgtttataaaaacttatcaaaattttcaatcgatggttaatttagaaaagtccatcataaaatgaccatgctttcacatgtccccaatatattaaacatactacaaccctaataattttacaattaacaaatctattttcatcaaatcatcaattaaaaaataaaaaatattattaattaattattcaaatgaataaaacataattaacaacctaaataatatctcaaacattaaaactaaaaacaataaatcaactaaaaactaaacactaataatataaactagagatctaataataatcataattaaaaaaaaaaaaagcaataataaactaattgttggtggtgatcatggagctgtcttctgagcacttttgcaatatgataggcaatctagaattccttgaacccaatcgatgttacggtgctggtggtgacggtggtgatggcggtggcaacaaagactgtga

SEQ ID NO: 94399 - DNA, 785 bp, Cannabis sativa
ctagggaacgattaactatttcatgtaaaaactcttacccgtttggtttggcaggaccccaataaaggtgaactgcttaggggatccaatagaccggttggggtgattttgggaaccccaattttcatgttttatcgatatttagtgtattttcacgctatttatcgatagaataacttctaattttagtttaagtccccaaatgtgtgtagagtaacactcatcgatgttatgtaaatgtgacataggttctctgttttgaaagagatatttccactcacattgactgacatgcctaaattcaaaaagaggtaaaattagtattaagatatacatatgtgcatgtagtatacatgttagattatttgagttgtatagaccaacactagtacggttgaagtacgaaatatgtgtggtatagtatgctattaaggggtatagcatagcattaccaacactattacttgatgagtactgagtgtatgtggtataacaatcagttgtactcatagtatggataaaccctactaacactagtattagaaagatacttagtgtatatggtatagatgtcgtaccatcgtcaagaacgtttgagaatcattacacgcgttggacgcgggtcaaacttgtaactatgtgtatgggcgcctgagttatgagactagttatatgattatttattttatgtttttcttactgagtttattgactcacagatatggttttatgtgtcgataatggccaagactgagtttgtcgactcacaaaatattttcataaat

SEQ ID NO: 94400 - DNA, 596 bp, Cannabis sativa
gttcaatacatgggtaatcacatgtggacttatgttggtcatatctccttggtaccatgcaaaaacatatgtggctacccttagcgttttaacaattttatctttctcctctggttctaggctctttcccagtcagaggatcttggtagggtcaaggtcgcacactggcacttcctcgacgtcttccatgggttatacaatttttttagatcctacacggggatccaactcatcttcttctgccaattctgactcgatgccttcacgcaccattatcactagtaaatgggccgctacattataacactgcctggcctctccctgattgcccctcacggtccccactccgacctcctgggtggagaattttaggcataagtgccggatggacgtaattgtgccaaaatccaccaaggccggccggccaaggattgcattatatgcagttgggcagtctaccaccataaaggtgcttttttcctattgggataagcgtggttctattgaatcccgtgagctgggaatcgctcggtgataaatcccggtctgtgaggcctattgttgagggatcactcctccagagggtacagccggtg

SEQ ID NO: 94401 - DNA, 990 bp, Cannabis sativa
  modified_base (54)..(72): a, c, t, g, unknown or other
ttggatgagtaattatattttatattgttataggtaaaatatatatgtatatannnnnnnnnnnnnnnnnnntttactctttttttcttggattgtatggatcgaatccaatctaatatatactggacctaaaatattagatggatttaatccgatgcaaaaaatactaagtctaaaatattaaataaatttaaattaaaccaataaatatatatgaaagaaatccaccggatagaaccgatccaatctaacatccaatatataattggatcagatcagatggtaaaatctaacatctaatatataattggatcgaatctggatagacctaaaaatattaaatataatccaaattacataatattgatacacatataagtactcatacaccaatctaagccaaatatcacaaatatatacacacacaaaaattaacacaaatacctatctaatctcccaattaattctaacacttaattaaccattacactaacaaaaaaaaatcacttacctttgccgagggagagggagggactgtcgatagagtcgggactcgggaagaggaactatcaaacaatcacccaaagtaagaaataattttttattatttttttttctgaaagtaaaaaataattaaataacacaaaagtaaataccttttaaaaaaaaacaatttatagacagattacctctgtgacaggggagattggagatgatatgaaaaattagggttgggagaatggaggagactggcctgaacgaaatgaagaagatgagccgggtttgatctatataaaggactattaggggcgacacatttcgcccctaataaccttaaagttcgtccctaatgctcaaacatctgacatccctaaattcaaaatttttagggctggcttcaatttctagccaacttatccagcaaattgccccatttctagcgatggttattagttggtaacaatgaacaataaccctaactaacttcat

SEQ ID NO: 94402 - DNA, 745 bp, Cannabis sativa
attctaattcttataataaaaaaaatatccacttattatttgtataaaataatatatattttaattttaaaattaatttaggatgatacatatattttatagttttaattatttaagttaaaatacaatagtaataatcgcataattaaacatgaaaaattagcaattaattaatattatattaaattataaaataatatgtgcatttagaaataaaaatctattattaaaaaatagaaaaataatttaatattattactcaatgagattttattgaattatgtgtgtcgtgtgtaaatgatacgtatttattatgtttatgatattgacaatagtgatcgttggattgataaattgtcaaagtggtataatttagtatgggaaatttgaattaatatgcttaaattaccttataatttttcccctaaatgcaaaattattaaaattggtcatatatgaccactttaccaattttcttaaactacccctctcgtttgaaaccctctctcttcctctctcttggtctctctcagccgaacaaacccaggaactcgcaccccatttcagccaccacggttagcacacagcccaactcgcaacccactccgacgaacttgcaacccactctaacgaactcgcaacccactccaacgaactcgcaaccccaacccactccgaaaatgtcaaaggtatgtgttttttttttagaaaggatttaaagatttattttgtttgagattgtttg

SEQ ID NO: 94403 - DNA, 635 bp, Cannabis sativa
aatatagatataccataatatttaaataatttgcttctaattttaaaaaaaaataaaaaacaaatactaattttgaaatgaggacatttactaatatagtctaataattagggtcatttgctatattttttttaaaatgagaacataaactaaaatagtccaatgacgggaagattttttttatgcattaatgcgtataatataaatacagacatataatattaatttatgtgagctcagaatttataatattctacttactatatatgttgttttctactctatgtttcttagatataaatataaaaattaattggactgtcaaatttattgcggcgaccaacacggcgcagaagtagaacactggcaattttgtttcattaagatgtggggattattatttttattacatattaattaactaataaactagtatttaataatatattattgtcaaccataaaaaattatggaattaagtatataagcatgttttataacatatagtttttttttggtttgaattaagcgtttatatattacaatacataatttgatattcgaacttagaacctccaacacacacgcacctttctatggccacttgagctagcgtcaagtggttaaatatatat

SEQ ID NO: 94404 - DNA, 2219 bp, Cannabis sativa
ctagtatcttgttatcaaagaagcaagatgtggtgtcacactcaagtacataatctgagtattgagctttggcacatatggctacataaatctcatggattcaggccttactaagtgaattcaaatttcttttacaaagaattcccatcacctcctgtgacaatatgggggctagtgcactagcaaccaatccaatttatcatgcacgtaaaaagcacatcgaattaaatgtacactttgtgagagataaagttctaaagaagcaactcaaaatcagatatgtgtcgtctcatgatcagattggagactgtctaaccaagagcttaacacaccatagattccatttccctagtgacaaacttggagtggtagaaacccctcttagtttgtggaaaggtattaagaagtgagttaatccttgattattggcttaattgtatttattactaactatgccttgttgtcaattttgtacagttagcatgtggtcccaaggataacaaattatgtgatgtcagatgtttgttcagattctctccttttttgtgtatcattcttttccctgtaattgcactatctagaatgtactgaacatgcctataaaatgaaatcagtcagcctcatttttccttgaagtgagctttatacaaattgtgcctttttactctaccattctttgttattctttgatttctaactatgccaagtacctttgtttttcactaatgctgaccaagttcacagaagtttggtggaagagattgcctcccgaatggcttcatggctggaaggagttgcagtctgccttttagaaacagtttatagctactacatactacaatatggaggtcggttcactgaccaacctcaaataacaaccaggtgaaagtgtaaataacttcatcgagtgaatgatagaagcagctgcaaagatgaaggttagtgatgacatgaaacttgtggctctccagcccagattaacagtaggctccttcttatggagcaaagtgcaaaataatagggttgagactctgtccaaattcatgtctaaggcacaagggataattaacttggaagacacttatcactaagtttttagaatccctctggcacctactccaccagtagtaacactaagttttaccctgccagttccaattttgacagttacactcctagctagagaccccaatatactttgattgtctacggacccactgcctctgggtaggcacccacacaggcccatttttttttgggtatggagcggtacaaaatggatgtaatgtcacttctggatagtcaacacaataaataaaagtccctgaaccaagtgtaagccattcccggagcaaggaaggtgggaaagattagaacagaatgaggttctaatgaaactaaggaaggaatattagcccaaattttttgagtacacaagtctacttgatactcgagaaaatgtgtacaaggccacctacaatatgatcaactaccggaagcctccaaggatgccctaaggaggaaaacacaaaagagatcaaagtaagaggtgtgaatatcacggagacatatgacacaccaccaacgagtgtggttacttgaaagatgaaattgaaacactagtcagagctagacacctaggtcagtggatctagatccaaatcatctatcgtggataggggtggtctacgggctgttgctcgttctggctcaatagggaactataaatcctccacaaggggtatgtctccctcaagctcctagaacatagcttccagtcctacctgctctaccaagacatgctatggtggtagttttagctccgggaccagggaatctatacccactaggtttagctctgtcgcccgttgatggccatgttgccaccatttctggagggccacacattgcatgaagcactcgaaactcccaaaaatgatacttgaaagtgttatccatgtttttgagcatatgacatgtggcatgtaaagaaaaagattaatctcataatctcactaattaaaatcccccattacaatcctctcataaagaagcctcacggaaacaggattaagtcaagactaagaaataagcaaaagtctacctcaccttatcttagcgccccagacatagaaactgtactatctctctaggacccagagtggtctatgttgggttttatgccctaaataaaactccaattcaatgtaatccatttt

SEQ ID NO: 94405 - DNA, 611 bp, Cannabis sativa
agtgaaaaacaatagtaagaagatctaaaatattacacaaaattataaatggtaagaaaaaaaattaaatgataatgtaaaaataaatttcttttaagtaatttaatgaatttcataaaatatcaaatatcaaataaaatattgaaaataaaactgaaatcaatcccgagataaaactggcacaaccattaaaatacaatcaaattcttaaattaaatatatcattaaagataaaaagtcaaaaacttattaagtaaaattagccttatacaacctactatatatatattataaaaatagtatcggatttattaaggctattaaagtacaaaaatattaaagcaatactagtaaaagatgatagactaaaatattaaattaacttaaatagtagtacatcaacataaaatttaaaattctacaataaataaatttttctatttttagaaagaaacaatagctattttttttttttttttttttgaaataaaacaatagctattaagacaattaaattaatgaaaatttgtcatagacataaaattatcataattaattctaaatcataaataataacataaattttacctaaaaagatggaaaattaatta

SEQ ID NO: 94406 - DNA, 997 bp, Cannabis sativa
atcctcatttattgtatgaattgtgtatactgatagacatcatattaacttggtatgtccaaccattactaatcagtcgaaataataagatcccatagtacataattcataattatgtctttctattccacctatggacctcctaaactgatctactaacttaacttattaacaagttaatattcatttatgatagatattcaattagaatatttctcatttctactcactaacatatactcatcttgataccttgtaaatctttacttgttaacacatcccttcctcttgataatctctagaacgactatcgattctgcatcctaatatgaatctttctaatgtactttgtccttactcgtatgctttctgagatgactcccctaaagatttcccatgttgagattaccccaagttaagtatgattaactccaaggtaagctcatggtgggttatcagaaagtagatgcttctttgtcgttcctaattgtatttcttgcttccattcttttgttaaaaaaaattcaattcacatcactcccttcactagacttttatgattcctcatcggttttgttcacttcactatgaggaatttccaccttactatgaacttgaatgttgttcatctccactaattttaacttgcatcaattttccttgaactgacacaacttttaaatttcccaatcacttacaattaatcactagtataaagtgaattgatgtaacctatatggtagaggcaacattgctcatactgggcacccataactaaactgtatataccattacccgaattctcagctgataataattaatcagagatcattccttgatcttgaagtttcatttctgtgtttggtagaaatcttaaaaatcttttcgaacacatccataaatatacatacctcgagtatattctttgttttattgacaaccccttggtacgaattgccataccaacttatagtgagtctcccattgattatgctga

SEQ ID NO: 94407 - DNA, 571 bp, Cannabis sativa
gatcttgtaaaaaaaaagtgtaaccgtcactttggcgacctgtcgtatgtaaaaggtcgacattcgcgacacttcatgatggtcgacatccgcaacacttcattcgaatactagttcaaatataaaataagcaagctttcctgttagaccctttcagattcgggaaaggtattctgccttccacatttaagaagtcgaggcaagtatgaataagcttccgtgttagatctcctagccattagaacagaaccaaagaacagaggaaccaaagagaatgaaagagagaaaggattggagaaagaatggagaagcaaaagaaagatctcattaatgcaaaagagatacaatctatatatatacagagagaagctgaactaactaaaacaactaatcaaaaacagaaataacagaaaagagctaacatccaacaacaacaataccaaactcataactgcctaactaactctcaacagtacccttaacatctcccctcaaactcataattgaaagatcttcaattttgagtttgcttctgaaagttgagaatcgttggctagaaatggctttggtt

SEQ ID NO: 94408 - DNA, 869 bp, Cannabis sativa
tctttatctgatcaactttctcacctcatcatttcattatttttaattcattccaatttctatctttttctatttatactaatctttagtggtaatttagctctctgtggatacgacatagcccgtttactaccgcgaccacagtgtaactaattgggcgacatcagcccctcatcaaatcagaaattatctaattggtatctaaatattaaaatcatgacaattatgctgttatatcataaactttatttcaaaatagaccacataagtttgacttatttatttgatgacccaacacacattttacatatacaattgtgaccctataaatttctaacataaacatgtttttattcctggtagttttttatcaagattgtctttgtaaattcattattagagacatttgtctgaaatggaatactcaggaccaccaaagaagaaataagtttctttatcaggagacttgtcttctccaattctgacatcgtagcatactggcttggtagcataagtggtgagttctggctctttaaaggtttggccattatattactaaaatagtgtaacaccctaactcgcataggcgtgttatcatgattttaaacgtactgtgcagctcattgctaatcaacgatgttattgaaaatcgtgaataattaaaatttgcttatttaattaaaaacttaaagtattacatatataatatttcgggatcccatttacaaaatactttagaaaagtttgctacatacataaacaaacgcttgtcgcccagcgactttacagcaaaagccttgatgtcccaaagatcgtacactccaggcctaaccgccccgacataaacaatcttcatctgctcgtactca

SEQ ID NO: 94409 - DNA, 811 bp, Cannabis sativa
  modified_base (97)..(102): a, c, t, g, unknown or other
cttgtgtgtgtccttattgattgatggcagtaatatccttgtctaatgatatttttagacaaacttttctagcccgcatgatccccacagaagcctnnnnnnatttctctaatgatttcatttgcttctatggggagagcacaccgaagtaggggcattgaataccctcttctatatagtttgccttcgatcattgtgtagcgaggcaccgaatacaatagttttcgcaccatgtttttgtcatttggaagttgtctgccgagtaaataattgataataggtgtcatccatgctcaaaagttatctatcatctcgacgtcttcagtttcacatatacttggcttgcttagcatctctatcgaaactaggttcaattcatccaagtcattctgtgaggccagttttgctaaggcatcgacgttggagttttttcctctcagaatttgttcgattttaaagtaatcaaatcttttcaagttcttccgaactttctctaaatagtttgccatttttaagcctttggcctggtattccccgaggatctggttcacgattagctacgaatcactatgacaaatgagatttttgactttcaatggctctgctatctttaagtcaccgatcaaggcttcatattcagcctcgttattggatgcgtcaaattggaatctcatagcatagtgaaacttaaagcctttgaccgatattaatattacccctgcacccgaaccctgttcgttggatgctgtacccacatttagcttctaggtttctacgtctcgctaatcaagtggaatttcttctagagtta

SEQ ID NO: 94410 - DNA, 529 bp, Cannabis sativa
ggcctatgtactccccttggctggccagacatggtggtacaactccttaacagttctcttaactcctttcgcttgctgcttgacggttttgtcatgccttccaaggagactttatcctgccattagcaaggttgtactccacgtgtcctctgtcttggcttacgtggacatgccacgtaaggtggataaaatttgggataacatttgctccccaagtccctgtttgaacatctagtcgaatagggactttttagctcttatcttgcttgtggtagcctctgtcgagcagccttatctagccaagtgttggctttcttcatggcatgtttttagatttttgatcttctctctccatacatgcctcatcttctcttctttaaacatgtcattgataagtttcaagctttttaagcttttagaaactttttgattctcacgttagattgtaatctttttagtatgttgatccacatgacaattttagaatgtataatgtatgatttcttgatggaaaatatgcgattttggc

SEQ ID NO: 94411 - DNA, 661 bp, Cannabis sativa
  modified_base (401)..(409): a, c, t, g, unknown or other
ttttcattcaaacttaatataattgcgtttacttgcgttttcattcacaatgtaaacaaatatatcctgatcaaatacagagtacttttgggtttttccattgctcgtaattttcctgtttaagtagttaataatctaccaaatttttgatttacgagttgcagtcaattctacctcgcaatgacagttacaatctgtcttaagcaaacttgaatatacatttaatgactttatcacttttgtacacttttgattgcttgtatgaatagttatattatccatccattcactaggtttaagtacttttatcaagacatctcatgtctcgtttagtactttcctatcttgcgtgaactgttagtactcagctttgtacgcaagttatgagttatatctcattnnnnnnnnntgattttcctttctcgtcagacaggtttaaacgaaaaagttatgacggtttgatccccttctcgtcagaaaggtttaatcagtggtttaatccctttctcgtcagaaaggcttgatcagtggtttgatccccttcttgtcagaaaggtttgatcaaaaactttattgtttttctaagttatggttttgcattatactatgtgtttctagatgaatttcgattaatcatacacaaatgccccttaagtaattt

SEQ ID NO: 94412 - DNA, 507 bp, Cannabis sativa
cataatccaacaccattcagcttcagttactttagatcctacaacgtcacttggatcagcgtcggtaacgaattttaccaaaaccgatactgaaaggccttataaactgcctctaaagcctaaatttatagtagtgtcggttcattttgtgagattagtgcctgttattaattaccaatcaatataaaaattgatttacacctcatatgaagatcttttagtaaataagacttaagggcccacaatattgaatatttgtaactttcctatttttaaaaaaaaaaatagaaataaaaataatataaaagtaattttaattattgatataaaataatagagtgacacattatagaaaaaaaaaaaaaaattgtgactccacctaagcatatatgcttcccaaaataatatttgtatatttaatgtcaataaattaaagttctgataacttaaagttgttagactaactcttagcaactatacttctaacttatggttcataactaaatg

SEQ ID NO: 94413 - DNA, 1263 bp, Cannabis sativa
gatctcttcggttctcagcgcaaccacggccagaccacgttgttagcctaaacagaccgttggtggagctcgtgaaagccaaagctcgtgactgtggtggagctcgtgaaagccattttttgtgactttgattgatccatccaaagtcccaactagccaaaccaaagctcatttttttttgttttccctcattgaaaagttctagatcagtgccttccatcttcgagcgtcactgtgaaactgggaccaccgccatatacggtggtgctccggtgagggtttcagtcagaagttattaatattttgaaactcaatttttgtgtttgaactgtattgataatttctgtgttatgagatttttttttgctattgagtttgattatttgagtttgatatatgttgtgatcttcttattatttttatattgttctgattaaatcatgagaaaaatattcctccttattattcctattattattattggaattttattaaaaaaattcatagagatatcataaagaaactaggcaaactaatattaaacaaaaaaattataattataattttaatataaataatacacaaattatgtaatatcaaaaaaaaaaaattatatcttttcaagttttataatttctaaattactaaaaactattttgacaattttttttctttcgaaaatactctttatagtatcagtttaaaacagacatttataccattcagcctcgattttaaactaacattaaagggaaaaatatatatgtacactttaagtttcagtctcggtttataatggacacttaaactctgactttttgtgactgtagaataggtgtcggttctatgaaccaacactaaaggtataagtgtcagtttaaaactgacaccaaaagtgtagtttgtagtagtgataaatcatcattcctatgttgtgattaaaatatccgtggctaaaggtattaatcacaaaaatcacaatttattatgactaagtgtattttgagccaaaatatttattatgactaaaactaaattagtgataacttgtatttaaataatatattttagttacaaccaacttttttgttatgattaaaaatcacctttagtcataaaattttttgttgtgactaaataattatcattaaaggtatctatttttatagtgtttgttagttaggctacaacactcctcttagtgtgaacactaatacaagtgtcaagtttcgaccattcaaattgaagttaaaatcactacct

SEQ ID NO: 94414 - DNA, 1158 bp, Cannabis sativa
aagatcgatcttagagaagaccgtcttcccctttagttgatcaaaaaaatcatcaattcgaggtaacagatacttattctagatggtaagcttgttcaactctcgataatcaatacacattcccagagacctgtctttcttctttacgaaaaaaactggagcaccctaaggagagtagctcggtctaatgaatcccaaattcaataactctttcaattggatctttaattccatcaattctactagagtcattcgatacggtgcttttgataccggttccgctcctgaaactaactcaattacaaattcaatctctcgagtaggtggcaatcccggtagatcttctttcaagacgtctaggaacttgcataccaatcttgtactttcaggtccagatgtcgtaggttggctggtatccattgtagtaactatgaatccaacacaacctttgttcatcaggtctttagctttcaaaagtgttattcttggtatgtgtgtcccctgaactttacccacaaacactactagttagcactatcgggcttaaataccgccatcttccgcttgcactcgatcgttgccccatatactttgacagaaaatccattcccggattatatcaaaatcaaacagttgcatctcaattagatcggcggttaattcacaaccgtcaatccagaaatacaaagactgaatccacctagtggatactataaggtctcgcgaaggtaacagggtaccaaaccccgaagcataaatatcacatggtttatggaaactttcaattactctactcgacacataagaatgtgtagctcccgagtcaaacaatacagtataggaacaaccatttatagataactgtcaccacttacacactagcatcagcgtcagcctgagtcataataaaaagtcatcccaggtcttgagtagtattcttcttaggctcttccttcttggcctgaggacaatcgtttataaagtgacccaccatgccacaatggaaacaagtcttggcccgacattcaccctgattgtgtttcttgcatttcggacactcaagattagatcgaaatggagatccgcgaccttgacgaccacctctgggttgggttttatgccctaaataaaactctgtttcaatgtaatccagattat

SEQ ID NO: 94415 - DNA, 611 bp, Cannabis sativa
aaccaattctatttttatttatatctgagacatctatttctggtgactttttcagtaacttttttggcgacgatgacatttccagcaatttttccggcaacaatgactttttcgatgacttttccggcgataataatttttttggtaactttttcagtatcttttccagtgttagtgatttttctggcgaaacttaatattacaagttttgttaaatttatttattgttttttcctatattttaaattttaattattttttaattttatattttttttgcattatttatttatgacatataaaagtaatctaccatattttcccatatttatgaaaaaatccctattaaatattatatatctaagaccagggccgacctaaacattacgcagcttgaactattgcacaagatctctattttttaagttctaatttttttttttgaaagaaaaggcatatatatttttttttaatttttctatggcacatacataaataaaaaaattataattaaaagtttagaatatatcctaaaaaaaattagtaatataatgggtaaataccattttggaccccctgttttacaaaagttaccaattggaccctgtgtt

SEQ ID NO: 94416 - DNA, 653 bp, Cannabis sativa
aaacgaaattggattatttttcaacatctgttattttgtacactacagaaaacgcagtcgtatctgcaaccaactactttgattatatatattatattgggtaaatataattttggactctgtgttttgcaaaagttactaattggaccatctgttttggtaaatgacaaaatagacttgtattttctaaaataatacaaataggatcctgatcttaatttttgacaactttttttttttaatataaccaacttacaaatataaatagatacagaaaatgtatacagttttgtcataacacctttagatcagataattattaaattttattttgaccaaaaaacagttcagggtcttatatttactattttggaaaatacatggtctattttatcatttaacagaatagaaagtccaatcagtaacttttgcaaaagacaaaatctaaaatagtatttacccatttatatataaaagctgtacttgtataaatttatgtcaaggctccatgaatttgtcaatataacaacacagtagtaacagctatcgaaaattgactggggtcatatgtatgtacatatatgtattcttatattcaagaatatacgtatatacatttcttatatataattacatatgttttataatgtgaa

SEQ ID NO: 94417 - DNA, 783 bp, Cannabis sativa
  modified_base (711)..(712): a, c, t, g, unknown or other
attcacgacggtgatattctgatgactggttaatgcgatgcaacagcaacataagctaattggtgtagatgagatatgaaatctgacgtaacagtgtttttttttttaaattatcataaattttctacagttattagtagtgatccaataactttcattttcttatatagtatatttaattttatatatattttataattacacattacagataaatttaattcttatggaattaaggaatttttgacactaattaacatgagttatgataaactactaaactttcatgagttacttacaaatcataagatcatttgtatttttgaagtgataaataatactaattaatctaactaaaaccaaaagtagtatactaaaactaattaagtagtatttcccatattatatatgcaggcaatatattatgtatatatattggcattatatgtgtgtgatgtccagcattgcaattattatctcatttgtctagtagtggtagtagttactatatataatgaaggaccatcatgaattcatcaatcaatcaatcaactaattattaataatgggtcgatgcatgtgaatatgcgctccatggacctactcttatactgcatcttccaagtatcttttatgctatcatttaatatatttacgtgtgtcaatatcatattattattattattattattattagagaaatgctaaagnncaccagtggtgcctaacacctttttatgtgtcaatatccctattggtacaactaagtatcgggtcccatat

SEQ ID NO: 94418 - DNA, 509 bp, Cannabis sativa
cacggttaatagctataacctacaatactctaaaacaagattgagttgtgtatcataataattaataaatttcatatttttgaattatcaaacttttatttttttttgttaataaaagtcaacgtagtgtcatcaacaaaattgtgcattaatataataagatttgaaaataataatataaaatatctagataaaatgaataaaatctaataagaataattataagagtgacacgtgtcataatgattttaattagtgatatagtgtgtgaaacacaaccaatattttatcccacatcgtgggagtatcatatattagtaagtgtataaatacgtgtgagtttaaggagttatcgccgggtcaagtagcgtgggcctgtgaccaagcggggcaataaaatggtgtggatgcatgccatggcgtgggctgagagcactcgaccgagttcgatgaacccaactcaacagagtagggtgattccatctaataaccaatcacttaagcctctc

SEQ ID NO: 94419 - DNA, 631 bp, Cannabis sativa
ctttaaattattttcttctctttcattcccttttccttcttggcaaacaaacccagttttttcatcctattgttttttttttttttttgaatatctattgttacttatttctatttgggctttaatggttttgggtttctatgactgcattcctaagattaatcgattaaagcttcaaattttggtacgtgtctagctttcttttattttgggtcttttgtattcactactttcatcctaagaatatttattgttctatattttactgacttttatgtttggcttccccaatcctctcatttatcgaaaaagaaaaaaaaaattacttagaaaaataataaattcatatttacatacaacatatgcaaacttacattgtacagaggacatctcatgaatcttctaccttgatttgcatcagtccaagaggtgaaaacatagatctcttcggaggacgatactaacattttacaatcattttctttcttgttcttcgttcttcccttcttctgctaaacgtcgtctcctttatctcttcttcttcgtcttctctttctcttcttcttcgtcccctctttctcttctttttctctgctctttctcttcttcttcgtctccttctttcttttct

SEQ ID NO: 94420 - DNA, 856 bp, Cannabis sativa
agcaatacgtggctcggcacgtacattcacctagtagatatataatattacaagggatatttagcaaacttttgagatattattataagttttcattaatattaaattttttttttgcttgtataagaatttttttttaaatatacataaataaaaaaaaatatataaaaataaattacaatgaatctgctgcaataaggtgaatgaatctggtgcaacaatttctactgttgtgacttttgagagataagatgaaattaaatataagcgttcttaagtttaactgtgatattataatatttttcatctgattttattttaattttttaaaaaacgatttagaaattaggtgactagttatttgactcgtatttctaattctaattttgatcatattttcaacggggtaggtgtcccaattagatattgtaaattactatttaattagctaattactattaataaaattacataactttgttaaaaatatatataaataaaatatacaaacttcgaggagatgctgtcgccgattgtagattgttgctttgttaatcatgtgtgattttgattaccgcgtcaaaaaaaaaatataggaactttttagtatattgaattttattctaataaaattgcatgatttattgataaataattattttagtatattaaatttattctaaataaactttgtacaaattttgtttttgcatgcattatttaaaatttatgaattaataataatcatatatcaaaacaatttaattgatttttattaatttttttaatattataaagacatttattattattatcacaccattatttgtgaaatagtactacatatttggtaaaa

SEQ ID NO: 94421 - DNA, 749 bp, Cannabis sativa
  modified_base (286)..(299): a, c, t, g, unknown or other
taatttcaagatggatgacctcttatgaagttttctcaagaagcatgcgagtgaggacaaaacacgatggaaacactcgtgttggtttgtagagtctgtcgtcatcccaggacgtagtaaaagtggcgtacccatgtataagagccatcattccatgtgcgtcagggcccaatggaggcttgaagcagggacgttacaaaattaagcttttatcctttcacaagtaattagaaaaatgaagaaaaatcaaaattaagggttagctctccatctctctctctctctnnnnnnnnnnnnnnctctctctctctctatctctctcgctctctctttcagatgaagctaatcttagtatttagcaaaggttttgagggaatttgaagctagaatctgaggtaaagctcttgatctctctttgtttgaaattttggaagttttacctgggtttaaccttgcatatttggaaattaagttctgtttgatctaaggtctattctggtttattttcttatttgtttttttattttaatttgtttactcaaacttagcttaataatggtgtttttagtttcagaacgtttttcttactgctgctgattggaaactattattggatgttagtacaggtgttctggaaagtttgagagaatttagggaagaattgattgagtttcgaactggtttgggatttttagtatgaaccggttaaccacaggtaggaccttagaaaatttggtttactggtttgg

SEQ ID NO: 94422 - DNA, 503 bp, Cannabis sativa
tgtgaattgttggctattattttatcagtttaattggagaggaatgatagaagctttcaaaagtccacttgagcaaaattatggatgaggatcaagttttgggtagctatgtggtcaaaaaatgaggctaacattttcgttttcagttctttaagctctgtttcgaacttagattttaacaaggaaaaattttgtgagtggaaagatattgtgttatatttgtttgaattcaaataagagaaaatgaaatattttggaattaatttagtttctttctaaaatccaagatccaaaggtgatgtttgttttgttttgtattacaatgccttttggtttcttttcttatttttgagagagtatagagttcttgaataaaatgaaatcaaatataatacaatggaactgaatcttccatttatttatttcagtaacttctttatttacagtttgagataatgcaaaaggaaaagcttctgcagtaaattattttagtaagttgaact

SEQ ID NO: 94423 - DNA, 1480 bp, Cannabis sativa
attaattaaattgtttgctaattttacttggtagtaatcataaaaatagaatttcacgtgctcatatttttaatgtaatctatgttgtgttcagttttttttttttttgaagaattagaagcatatcactaaaatatcatagtatatatttattagttttgttaaaaataatttttcttttaaagttatgttgatttttttaattttttatagctaggttatgggatgttgggacttaaatgaccctttattattattttttatggaaaataatatatatttatatataactaaatattattatagcaattaactaataaggttggtgggaacttttgtattgtgtgggaggaaatggtttaatcgcctttctaaacaattagtacattttgtttcttaataaaaatgctatatatgttttcaaaattcatcttaagcccttccaaatcttggggatgacaaaaataatatataggattattggataccattttttttatggaatttgcctccatgagtacactgagagagaaagaaaaaaaaaacacacacacacaaatggcagagtttaacaacaaaaacaaaagctccaccacaaagaaaagaaaaaaaaaacagtaaggaaccacaaaactagaaaattacaaaaaaatcatcttttctatttcaattatatattatttaatttgtagaggttttttttcatttttacattttaaaataatttttttttgtatatttttacgaaaattcatatagcgaatgacataactaacagaacaacttaaattattcgagcaatccaaaccataaaaataaaaataaaaataaaaattaaaaaataatatatgcgatgatttttctaatttttaaatatttaaaataatgatttttttaatttatttttcaaaatattatagattttatcttttttatcaattaaactatgcatacatttaatatatttttttttttttgataaattagacataatttttaattaatagagatattttagaaaaattaaatgaaattttactgaaattttgtaaaggttatatatatatttgagaaaagatatatatatatatttttttttaatgtgtactcaaatacaaaataatatttcagtgggtattttaaaatattatttgttgcgaattttattagtgttataattccaaaagaaatgttgatagtccagggagaattataaagattttgtaatttctagatatcatataaaaaattatttaggtctaggaaggaatagtaaagctaaggttattacgaagtaaaatacatgagttaagttactactagccaaaaggtttccctttggctagttaaagtaattcatagggggacgtagttaattttttttgggttttaagtgtttaatcagattggtaatgttctaattacaattttgtgtctgatgttgtttcaagtggaattttagtgttacaggctgaaactt

SEQ ID NO: 94424 - DNA, 617 bp, Cannabis sativa
aatttttaacgacctaaaagtttaaggactatgattggtacatgtcaaagtttaggggacaaaaatctaaattagcctaacatataattctttacaaaattcaaaagtaagaaaaaagaattaataaagattataattaattgataataaaaataattactgaatagttattgatgatatattattgtgtttcgtttattgtttattattgaatttttattaatgttatcggtaaaaaaactaataattattttaaattagctgctcgcgaaggcagcatgtttcctagtacttagactcttttgggcttccacttgcagtcttggctatatgacttccacttgtattcttgactttatggtgaaattattataggaatttgaatggttgtatattaaaaaaattggaagatattatttagcatcagtttatcgggtaatcgaacaaacaattcaataaaattaggaaaagtgaggattgagagatagaaaaaaacaaccatataagctttcacatcacctcttcaaaacacttatatatactagcgaaaagctacgtgcaaggcatgtatactaaattttatgctaatttttttttatgttagttgaaagtgatac

SEQ ID NO: 94425 - DNA, 735 bp, Cannabis sativa
aatagaaaatatatatcatgtccactactagttttctagtccaacattgttggacgtgataaaaaaaaaaatctagtccaacaatgttagactagaaaactccttataaccttttcatgtccaacaataattttgctggacatggaaaagggacattaaaggagtttctgtagtagtgtgcagttggtgtcacccagccattggtggccaagctggctgaaataaaaatagttggttctgctctgcttcggcccagacttcaactaaaaatagtacccaatctcataaggggtaggcggaggccaaccaagatccctgtacaagacaaacatcgctgacagatatttaatgctcttcggcatgagctgtgttaggcacatcccaaagtaggctgtgatgcctaggaagtaatgatgaagcggcaacaccaccccatgttctatgtggcgccatgaccatgccaactagctcaaagagggcttgtgctgttggattattgttttaccaggatctagatttactacgacgtatgttgtttaacatcccaaattgaatttctaaaacaatgtaatttaaacacatataaagtttgagaaaccttccatttcttgcagtggaattaaatgactcagtccgcttagatctctaatacttgtatccttttctgtagcagagtatcaacaagatctaagcccgattcaccttcacttgaattggattcttcacaatcttaca

SEQ ID NO: 94426 - DNA, 1107 bp, Cannabis sativa
tggtaatttttttattaccttttaaacaatgttcaactagcgtattcttatcctgtttgaactgaaaaatattagattcaatgtggcaatctagcccaagcactaaggtaaattcctctacactaaatttaagaaactttccagcgacggatacagaaaatccatctcgttaggttgttgaacttccctcaacaacagaccatgcaatagttagaaatgaataatgtactctggaattcgaaggaagtgaccaactacaatttgggaaaaaaaaaattcaactgggttagggttagaatagttttaatatcgttaatgaatgaataataaccagaaattattactttagaatgataatgttgtgaacgcctatatttacatgtccagtcctgggtaaaaaaacttgcatatctactcaaaacaactcaaaaataacacaaaaacaaacaaacaaaaaaaaaagcctacaaacctcaacaacaatatcagtagaaggctcttcaaacctagaatcagaaggaatattaagaataagggatttctccttcccctacagaaaaacaaaaagaaaaaaacaggagaacaatgcaactattatagaacgtataaatcaactcaaaacaacaaaatatacaaaatataaatttaaagaacacaattacattacaaatgaaaaaatcaaaacacaacaacataaaaaaaataaaaacacaaaagacacaaaagacacaaaaaccctaaaaaaccacaaaaacaaacgactgaccttggcaactttagatagttgaatgaactcatcgtcaagttcaaaatcagaatcaaactcctcctcaatagctcgatgacgtttagaaaccctcttagaaggagaataaatatctaacttacgtttggcaggagcagggaaggacttggaggatggtctttaattttttgcttccacattgtagattggggtaacttagatttacgagtgttttggggctttttaactacaagggaggaagaattagaacgagtgacgaccatggaaaagaaaactaaaatgaaaatttataggagaaaatggaaaacggttggaagaaaaaaaattaaaaggaaaatggg

SEQ ID NO: 94427 - DNA, 739 bp, Cannabis sativa
tgtagattttcgtaaaaatacaaaaaaaaaaacttaaatatttaaacctaaaacaacataattaattaataataataaatcatttaccgtagctttttttttttaaaaaaaatatctattgtttttcttttcaatttgatcattagaaaatttgatattagaacttcatattactttttttttttccaattattcgtaaaagtataaaagaaacaaagtatatgtcacctaggggtgggtgggatattcataaaataaaaagtctttttgaccatgagactgtttctgctatcctcaagagtggaaaccctcctggtattggcaaggatagttggatgtggactttggagagtgacgggcgtttctcttgtaaatcagcttctctggcccaagctttggatagagcacctcaacgtgacgtggctccaactctttggaataaactttggaatagtaacatttcggagggtcataaggttctcttgtggtgcatcctctctcaagctcttccggttcgagcagtgattggaagaagatttcagattgaggatactagatgtcctttatgtggagtgggggagtaaaccatggaacatctatttctatcgtgtgaagtggcgatgcacttgtggcgttcgtcaccaaggggaattttcccggtgtgtgagactggtattcgagtttgggattgggtgaagttcatttggagccttagcaataggggtgtcagggctgagga

SEQ ID NO: 94428 - DNA, 521 bp, Cannabis sativa
tctcttggtttaaccttgtccattattcggggcctcaaagtggagcggaaacacataaaaactcttttggtaactcttatttgagcttacttgactaaaaaaatatttcatttcattgttgaatcatgctactatctatctattttgtcacactgaagaatttcattttgatcacattatgatttttcctatttgtctcctgaaacttaaatgccttaaaagttaataataaatgctaagtgttatgtgtttctatgttctgttctgttctgttaaaatggttgtaatttaatacaaaaccttaactataatgagtcatcacttagtgacacgtatagatgcttagttgttatgaccgaactagagtcccacattggctatctgaaacacatttctgatgtatttatagtccattctgtggtcttcagtgcacgaccttacttgaacaggatctgttctataggctcgtacctctgtttccttgagttctaaggagacaggaaaccaaacctggtggatga

SEQ ID NO: 94429 - DNA, 702 bp, Cannabis sativa
ccttgtaaaatcgagctcgccgacttcgactattttctaccaaaatatgctaaaatccctccaaaagactctaaatgtatgaatggtctttaaaatagcccaacaaagtaaaatcacactaatttataatttaaagaaccaatttaagaatattaatacataaattgatcatatttataagacaaatatggactcgtcaataggttacctcctttcaaaataacagagatggtattgttgtaaaaaatactcttcaacttctgtaaatcccatttcccattaactgataaaaggtcagacaccatgtctaaaccctcagcaggtcgcccgttagaaccacgataaaaggatttgccatcagccaaccacggatcatcacaaattcttgtactcctaccattagacaccactttacaagctccttctcttaagatctcattcgcttttatcacatttttttaaaaccaggaatctaagtctttgtatttgcagttaagcagctcttttcctctgagatacttggcttttaagatcttacaacaaagagattgattgtcatttaacaagtttcatccccacttggccaggaaggtctgattcatctctttcttttttctaaaaccaagtcccccctagacttggggagacacaatttatcccatgccttaaggtgaattacatagttacctttctcaaactccc

SEQ ID NO: 94430 - DNA, 1114 bp, Cannabis sativa
tcatggttgttctaactttgcctttcccttacctgcaccacagagcactcgtgagtcacatagactcaacaagaaaaatgataaagaatgatacataaatggctaattaaatatttcattatcacaaaatgattaaagtatgacattcaacagtaagtaatgtcaccagtcatatgcatagaaatagtaatgctcatattttgcattgcctaattaggcaagcccgtgtcataatataatatcatatataatgtcattgcaccacctaatcaagtgagcccatgccacaacttggcactaatatatcgcatcgtctaagcaaacgatctcgtacctacgcctggtacttatcatatgtcactaacgcccgtacctacacccgatacgtcgcaaggaatattgcatcacctaatcaggtgatgcccatatattatgtccattagtatcattacgttatcattgcctaatcagacaatcgataactttggaacccatcatgccatgtagtacattatacttttcttacctcaagttctggttcaggtatgttggccgactttcttggagaacaatcgatgatcctaggccctatgtcataacaataataaactatttagtgtttactcgaaaacactggttaatagttgtagaggacagcttagggttttccaccgaattccataatacaaatacactaaaatagacttatattttggctctaaaacatacatcatatcgtagagcttgttgcaagcttcaaaatggtatatagaacgtccaaaatggacaccgaagtgaaagttatggccaaaatacgaatagggattctctcaaaaataacaaaaacagttaaccgtttctttgcggggacgaaaaaaatcgaatttcatcttctcgaattctacaaaaatctaaccaattgattttaaacttcacagaacacttatataatacccatacaatattctctacgtagcagaaatcaaaatcatgcacccaaataaaaagtgtcattaaagttcaagctcaaagctccataactgaaaaataaccttaactgcctccactcaataattaactacatgattaaactctaaatcattttagaaatcta

SEQ ID NO: 94431 - DNA, 857 bp, Cannabis sativa
gagcagtttccaaccccatttggctaagaatgccagattcatttcttttgttttccaaaagccaaggcccccacaggatttagggaggcacatcttatcccaagatttcaagtgaatcccataccatcaatctttctagcgagccgactaagcttagtagtttgcatagcataggttggcatagcaagccccacagatttaatgagggtagcacgtcctgctttagacaatatttttgccttccaaccttgtaatttggaaatcagattcttcagaatgaaattgaagtcgacatccttgtgtcttgatctgaacaaagggagacccaggtatttgatgttgccttctgggctgccaataccaagggcggctttcctaatctccgacttcatgttctcaaaagtattcttgctgaagaaaatggaggttttaagcttgttgacacgttgccctgaccaatcacaaaaattaccaagacagttccacaaacccatagcctcccccacagtggccttacaaaccaagatgaggccatccgcaaagaaaatatgcaagatactagggtcattttgactaattctaatacctttgatctttcctttgttcaccgaatcctcaaaaagtctagataaaatctctgcatcccaaatgaaaagatacggggatagagggtccccttgcctcagaccacaagatggtttaattattccaacctgacccccattcagacaaacattacgataagtggtagagatacattggtcaatccatttacaaaatttatccgggaccccaaagcaccttaggacataatggtcaacaaactgccagcgaagcttgtcataggctttcacaag

SEQ ID NO: 94432 - DNA, 690 bp, Cannabis sativa
gtatgtctagttgttgaataggcctagaaagggaaacaacaatggagagaaccagtcgaatagttgttggcttgatgacgggactgaaagtctcatgaaaatcaaggcccagagtttgatcataccccttggaaactaaacgagctttgtaacaactaacggagccgtcaagattaagcttgagacaatagacccacttagaaccaatgattttgtaatttggaggcagaggaactagaatccaagttccctaagagagtggcaaaagaaaagtgatctttattgaaaatgacatgacgatcgacatatagacgaccggagacagggttaaggcatagatagcctttgtgttggctgctagaaagacacacgaggcaaagcgaagctctaacttatggtgattataagaccagaggaagggaaaacattggcagccaaaaacacaaaagtgggcataagaaggaaggttatgatacaagacttgaaaggggctttaagaagaaagaacacgagttggcatgcgattaataaggtaaatggttgtgcttacagcatagggccaaaaatgtgtattccttaagatggtactaaaaacattacagagtatatataagaacaataaagtatcacataaagaatggacaactgtcccaaagggtaaaaagagaaagaacaaaatataaaactgat

SEQ ID NO: 94433 - DNA, 1735 bp, Cannabis sativa
aagcttgggctataagaaacgagatttttaaagatgaagaagggtcctcgagccccaacaaggccctccctcattctcaggctcctcaccccagcgagggcccctcacgccattccacgacaccaatgagggggcctctcttcgtgtcacaccacagcccccaacaagggttcgtctcttcgcaccgcaccacgacccacagagagggggtctctcctcacatcctgacccaaggagggggtcttcctatcgcacacatgacctcattcacacgagagatcctgtcacatgaagaccttcgttgaataaaggctcttgttcaatacgtaacaataagagagggtgaatcaagaagagccttgtctcttgctattatctactcaccaagggacatatgacgaggtccctatactcttatacatagcaaactttaggatacaaggcatgaagatgcaagacaaaagatatcccataccacgtatgtgtgggggaccagcctaaaagcctgcagactactgcaagctctaagcaagtagtgggcgttggaagggtagtggagaccaaatccgtaggtgtcagttcgaactgacacgtgaccaccactacctccactacccacctgcaatgttaattccttgggtacaagtcggggtatgttttatgcttttgggaccacatgtatactagggcaaatggtgtcactataaatatgaccctcctccatgagaaaagagattggaaaatcattctttgtaatccatattcagaaaccaatacaacagtagcacttcatcatcttttctaagttttcattatagtttaccattcaaaccttgatttctaagttgattttttaaccataacttagttgacaagttcttactgtcaatagtttggcgcagtctgtgggaaagaaagagctacaactgcatttttctcttgaagggttatccatcaacattttgccatgccaagatgttcaaggcgggtataagacattgagatccacctagataacaatcaattgatggtaatgagagggagccccacaactccagctgccagagtaacctaaggtgaagccaacccgaacgaaggacatggcgagaatcatcatgaagaaggtaatggaggcgagattagcgttaatggacacaatcaaggataacaagagctgcctacaaaaggaatgcacgtacctccagccaccagagaagaaaattgagctcctataacaggagaaggcatggacgaacgagatgggaccaccacattaataacccttctcgtcgaggttaaccaataaccacaaaatattcgtcacccataagataccccgcaacacgggtcccacaagagctggttataaaagaaatacagatgtacttcgtgagttctagttcgcaaactcgctcttttatggagcagatgaatggcttgaagatgaaaaccagaggttaaaagagattatggcaaacatacaagaggtactaaatgacttattgcaagggcacttcgatgccccctacacaagtgtaggactaaggtaatttaaaaccaaaggatagaagccaaagaaacctttaaatccttggcaagcggtgcaccacgatctgcaccatagtacaagattcgtggagggtcgagttgctttgccctgcttccaaaaaccttgacaaaaggagtcacgcctgaccaatgggagaaactcaatgtgaaacgcgttgcaggggag

SEQ ID NO: 94434 - DNA, 1362 bp, Cannabis sativa
tatatatatatatactagatgaaggttacgtggcgagccacgtaaatattaattttatttaagttctagtaatttttgtttaagaattcgctaactaattgtaatttttaaacgatttgttttataaaaataaacttgttaagaatgccataattgtgtgtactgtaagtttatctcaatttatttatactcatatagtaattatccttactgtgatgaaataatttatgataagtcataacaacatatgactttaacatttacttttggtttcgggaaaattaaaaggatcaatatatttgtttcggaaagtttaaagaaaatattatgtaacgaaaatgaatgaaaaaatatcatcttaaaatagggaaaaaagttattagttaaagtttcaccataaagaatcataatctgtattctgataaccaacaataccttgtgtccactaaacttttatctattaaatacaaggcaataaaaaacaatcagttttcacattgaggataaccaactcagatagtgaatgtttgaatattaatacctctttgataatagctgcgaactccttagccacgccaattcttttgaagttattagaattaacaaaaggtatattgcaaaacatttctttgagagttctcatcatccacctcaagtgcatctcatgcaactatggtcaaaatcattaggatcataataacaaggcaagcattcggagctacccaaaaaattgggccgaaaatggtggactgagcttaatacatcttcatctggaaaggaactttaaagatgtaaaagaaatactctagtatactctatgtatatgtatctatatagtaaccttatatttcccgcttctcacaagcaggtaaattttagaacagttaatagtgatacaaacctgttcaagataacagaacgaacgatagatgaagttgaaaaaaacgatggatctaggtggaaagaaacagaagagtggagatactaaccgattctcatgtcaaatataccaaagaagatggcggcaaagtcctcattttgggcctgaaaaatgataagtaaacacaaactcacttaactgaagttccatgctttaatttatcgatatatgataacaaatactaaacatggtaacatcaataaatttctcttctatctaaaacaataggatccatagtgtttccaagaactttctatagtgtgaaagtaatcgagaaaatctcaaggcaaattcgccagatccttagtaggattttaaagtggaagaacaattattgttgttttgctatagtcgttaatgtgtaaggcaaatttaatactaatttatttgttatacgtcaatataataacattcctcatagt

SEQ ID NO: 94435 - DNA, 657 bp, Cannabis sativa
acaaataagacaaatgaaaaatatatgaatatagatactctgaagccagctcacatcaacaaataagacaaatgaaaaatatgtgaatatatacactctgaagccataaaacacatacctactgaagccatgtcgatgtgatcaaaacatatagatatatatacaaataaaactagaaaaagatatacataacaaattaagtattaaaacaagactgaagcaatataaatcaatccaaaacaaaaatattaaaattcaaatatacatcaatcaatattatcatatatatatgccgcaaaaaaatatatacaatataaatcaaaatctaattgcgaaatccccaaattttataattaacaaaatcattagatcatcaattaatttagcaaaatgtggtactgatactactcgttagaatttataaaatactcaaaatatatatatatatatatcacagatctaaacatattcctaaaagtactttaatatagaaaaccccaaatcataaatcattagaatattactaaattaaagaagaagatgataatagatgagcgaaaatactaacctaaagtcattgttggagattgcagtaaaggttatgatcttccaagaatgcactatcttcctaaagtattttctctgataggaaaggag

SEQ ID NO: 94436 - DNA, 642 bp, Cannabis sativa
tattataaaattttaactttaacagtttaaaattaacaaattctatcagttacctctaaaaaaaatttcgagctaacaagtagcacaccttagattggagtcacgaggttttatatcttaggacttgaagatacatgttaaaagcaaatccacagtctcataagaatatgaaatgtttaagattagaagttttaaccacttatatacctcatgacccgaaagccttgttagtattaggaaagaaagaaacctttattcgcgacttaaaaaagatacatatgaaatcaccgatcagtagtataatattagttcatttatctaatcgaccaataaaatagaaaacttaaattgtccaaagagtagttacatctctaggattcacttctcactgcacgacattcaagggagtgacccaaattactcaaccggtaaaatgaaatttgtttttacataaaaagtagttaaatattatattaatctctacaagtggtgtaagctttaggctcgactctaggttaggcctgcatttaaggcccacccaacccaaatgtcaaaataattttttttttttaaaaaaatatacataagattcacccaatctcaaagttgacgtgagtgttaatttgctcgacgaactgtaaa

SEQ ID NO: 94437 - DNA, 541 bp, Cannabis sativa
gataacccaccctacatagaggcagactaatatgtctataaatgaattttgtgcaaaggcatgaatgcatgttgaacatctcatttgcttttaagtatgacactaaacgctacaaaagaagaaactacattaaacttaccttgacaatagccgaagtctctttaaaaagtaagctatccccacgaacatggttgcacgaatctgtacgaggtagacaatgcagatgcatatgtttatcaatatatgtaatatgtatatgtgtgtgtagggaaagccacaacaagatccaataatgcaatctataaaatcaatttacaacttagggtcaaataatttataatctcaccatcagttgtgcaaattgacgggcctataaatcttgaatggcagcaggaaaatgcagatgaagaaccaagagatcgtaataaccttttagaaattgacagagccatggcttgggaacaatcagcacttctattccaaatacagcaatagaaagtctagctgctcatctacattccaaattgcacaaatcagtgat

SEQ ID NO: 94438 - DNA, 540 bp, Cannabis sativa
cctagggttgaagattttgctagagaattgatgaagtgatctaagcttttccctagtttttctgctgggttcttgagccgaaaagagaagagagagagagagagagagataggttttgatttcattcttttccattctaaacttatttaataaacttactatattagctaaaataaaaattcaacttaggataatgctaaagcattaaataaaacaaagaattaaacttaacaaaattaccattttaccctcaatacacacctaagccaaaacataacatagggttattttggccatttctaactattccacaaaactgacaacttggaattttaaactagtctgatataattcccattctaatccataattcattatcatgacatatccaaccattccgccaaatccccacgatcgccgaacccggagatattatatttcaaaaatggtatccacgatacccacatattctaataaaatctccgtaattaataaattacgctttatttattcatctactcaaattccactaattaactc

SEQ ID NO: 94439 - DNA, 930 bp, Cannabis sativa
ttatagtgtgggagtttgtgctcattatcaaagtaatcctatggaatctcatgtttgtactattaaaaggattattagatatgttaatagtactcttgatttttgaatatggtattctaaagacactaattctagcttggcttgctttagtgatgcagattgggcaggtaatgcagatgattgtaaaagtactagtggaggttgtttctttcttggaaataatttggtttcttggcataatagtaagaaacaaaattctattttcttgtctattgctaaggctgagtacatagctgctagtagttgttgtcctaaattgttatggttaaaaaaaatgttgaatgattatgggttggaattgggtattttaataatttctttataataatactagcaccataaatatttccaaaaatcatgttcaatattctcaaataaaacacattgatataaggcatccttttataagggaacttgttgacaaccaaacattgctgttagaatatgttgatactgcaaaataattggctatattttcaccaaggccctagattcaagttgttttgactccctcagaaattttttgggggtttgcattgtctaagtcttttcattttgttctcaagtttgtccaaaatttttgagtagttcttatcttttattcttagttgacaaaacatgcttatgcttttggattatatttagctttgtgtcttgtactcttcatacttttgaggttgagttaaaagattcaaattacttatttatgtgtgatggggattacataaagaatttatacagagttgagcaattttttgtttcaatttcttctcaggccccttgctggaatagagctacccatactgaggtgtgaaagccatcttttaagtaagctggaactttgtcattaagagttatgaagaggatgca

SEQ ID NO: 94440 - DNA, 534 bp, Cannabis sativa
ccacaaatcaagcttgaacccaagcgatttctctacaaattcacaagttgcaaagatgaaaatagggagagaggggtggggggtgagtttggggtgtaagaaaccaaaaaatgcttttcattccaattaaaattatcttttgttgtaaataattaaaatatgaaaaattaccaaattgcccttaaggccatatttccgtactcaaactttcaagggcaattatgtcatttaacttcacatatctacccaaaataaatttggattaatcacacataaataaaatgccaataaatcatcccaaaattgtactttgaccctgaacccagttcgtcccgaaatacccgattgtgactataccgcgtcgacttgttagaacacacctgaaaaaggacaaaacaggcatactatataataatatagtccataagctcacaattaaattaaattcaaaattttacccttctcaggtcaaaattactaaaatgctcctggctcaccaatggggtcttaaacatgtcatatattaaattaatt

SEQ ID NO: 94441 - DNA, 618 bp, Cannabis sativa
ttttttagctttccaatacatcttgaatcagctcatttggagtttgtatgttaaagttatgcatattttactgagaggtcgaagcagtaaaaaacgggtccaatgaccgcaacgaggcttttggtggccgtggtaagggactacagaaagcccatttttttacttttctacaaccatggcggcgagaatattggccgccgccgcggcgcctccatacaggtcaaggataacttcgccttttcttatttttgggctgcaaaactttattttaatgaaaggggatcgcgaattttagaggggagactatctggaaccctagaaagacaagaagaaggctcttggagcgagcatagacaatttgcgataattctccatctagtttccttctcttctcttaatttctaatgtttttatttgtgtttcgtttaattatggatttgattatgatctaaactcactatttagggatttgatggatattaaatgagattattctatggattaatgctatttgattgttctttctttctctattatggcaatttattcatatttatgcttattacatgtgttttgttggccaccttatatatgatctatgatctcagaacaaaattt

SEQ ID NO: 94442 - DNA, 926 bp, Cannabis sativa
  modified_base (90)..(101): a, c, t, g, unknown or other
actaattataatatagaggttattcttatttataactggcccaaatttggacttatttttttataataaattagaggttattcttgaatnnnnnnnnnnnnaatagaggttctactgtactatgatctttgagcaattcactcttagatcgaggtttcactcttgagtgttttctctctgaattaatttgtgcccctaaatagtgagattaaactactagtatttataagggctaattgcacaaagaatggttttccttaatctataacaaataaaataggaaattagcatatttccataattacaatgaaagattgagaaatctaaattaatagcatttattctctaaagatacgaattaattctacaaatgtagggattgtctttgtgacatgtaagcttggaaataacaacgtccatctatgaaattgccaacttacatctcctagtcggtacatgcgaattacttacgtgattaggttggtcggatgtcgtgagcttgttcggacatcctgctacgtatgtgtgaccttgagtattatatcaacttgcatagcatgctaggagtataatcatctgcccaggatatagaatgcgagacacgtgtcatttatttagatgccacattatagtacaaaaattataataacacaaattagtagtgttaattaaattttattttgaaataaattaatcttaaataatattttataaggaaataaaaaaatattaataaataaagtaaaatcaagttaattttaaattataaataatttattaattatttttaaattaatcttgtcgaataattattttagggctaaaattagaaatttttacaccaaaaatctattttgcacaatttattacaaatttacccctacacgcctacatcaatatttttacttatcctctttcttttatta

SEQ ID NO: 94443 - DNA, 1578 bp, Cannabis sativa
  modified_base (1542)..(1548): a, c, t, g, unknown or other
gtatttatattataataatagatattaattatttatatatgacaaagatcgatatgaatgaagatgtctttataacatgtcgtttatcagaaagacctaattcatattataacgatgatcaatagcaaatcggcctaaattctgagttgtcatgaactcatgttcatgctattagtttctatgattcactcgttaaattttcgcagagaagattacaacttttgttttgggaatctaataatgtggatgactgagaacatgatttacaattatggaatcttaactttcctagcaaatcgaatgttggctccctttatgtgttaattctagtactaaaaagttgcgtgcaaattcagatgggatcttgaattacacttccactagtgaacctccgagaatgtgctttacagctatccagttatcctaatttttgtccacatgacgcgacatgtctacataggcaagaccgaggccacatggaatacagcgtgtcagtaggtgagcaaagtcaccatgcacaacacatcaattgacaagggatccaaatactcaggcaagatcaagttacgagaaaattgccaaccaggagggtctagccggaccacaccctggccggccaaggaagtctatgtgccggctagccccaaccaaaaggtaggccgaccatcacagataaagagcactaaaggaagcccgattgaatggtggggttcacaaccatctttctggatgggtcaaaacttagtttcaattacaggacagctccaacaacccacgaaagtaaggattcaaccccaaattatctacctaccttttagggatcattaattagttatttttataaccttaagagttggttttcccttatttttaaaggatatttacttacttaaagattaatcttttgtaagtcctaaaattatataaagggcattaggcaaagtgagaggagaactaaattctaagtccatcaagccctagagcactcttactcctctctcacacgccatttgttagtcattggatacttagtctattttctcatctcacttgtttagaactatgatacataagttctcatcattgtactattcaaagagagtcatgcctagaaattacaaggtcaaagcctgtaatctgcgtagtgttatctctcgaattaatacaataaaaagagaagtaaattattacccgaaaaacaaggggagcaaacttctataaattgttgtgtcaattttattatttggttttacaatttacctgtgatgattatcaatcataaataaagctcggttaactaagtagtttttatattttcaccaaatatagatccataatattttaaagacactttgaaatatgggatttgaatttataaatattggtaaaactaaaattggctttgtttctaataagaataataatttccattatggagtataatcgttaagagtacttctacataataaattagcttcatcagaatatatttatgtaaacaatagataaggtgcatgtctccaaactattatatatatatannnnnnnatatctaatctatataaagtgtgcctatat

SEQ ID NO: 94444 - DNA, 566 bp, Cannabis sativa
acttgagggggtgacgaccgccctagttgggtgacccccaggacccatcttgaggggggtgacaatcgtcatcttgggatgaccccccaagaccccttgcctgttgtcagtaggtatggtgtaatgtggatgtccccaaataccttggagaatgttattataaaatgtatgacttgtgctatgagggtgtagggggtagggtatacccctagactaactcttcatggttggcggtcatcccaacggtcatgactttacatattcttcattaacttagtccctgtatttttttccacgtgttgctactcttgacacgtcatcatcgtaaaaatttggatatacatttgcccccaagttcctagcggtatgaccatacggtaggaactttcttgtgtagttcaggtcttgcttctatgttgacggcttgacacagcggcaccaaaaatactatgactatactaaaattacatttcaaaaatcctaaaaaaatttccccaaccattacttttttcacattttacagtatatcccaatcataatatctcaagaaaaataaattacaagga

SEQ ID NO: 94445 - DNA, 1827 bp, Cannabis sativa
agaaagtaaattatatagaaaaatggttcagaagcaattactaaaaatgaattaatcgaatacctgaagcatccaaaaaggaggtatggtgataatatttagccttataaacttgagctggaagcgagtcaggtcgattaagaatttgccaagcttgcgcagctaaaagagcctgattatgatggacaaaagatctaaaacctagcccacctttttgtttaggataacagagcttatgccaagctaaccaatgcatcttctttttatgaaccgaagagctccaccaatatcgagccattagtgattccaattcatcacaactcttaattggaatttggaaacatgacattacatatgtaggtatagcttgaattactgctttaagtagtacctctttaccaccataagaaaagagcttgttttcccatgaattaaggcgcgaccatactttctcctttatattatgaacagtcgttgtttattttgtccacttagcattggtaatcctaaatatttctctatagcctcagtcacttgtatttgaaaagtttccacataaagagattgcagatcctttggagtatttgggtagcaatacaatgtgaacttagtgaaatttataagctgcaatagttaagaaataatctataataattatctattgaaaaatactaatgcattatgaaagaaatgaatatacataaataagggaaagaaagaacgagagttgtttatgcctaatttttattctagaaatcattttgaaagtaaggttgtattgtatagtagaaaaagtatgcagctatctgtcctcttacacaaaatttactccactaccatggccctagcttatcatctctattatactattccttagtgtttcagttacagatctaaaattcttgaacagaagtaggtataaagcaaagaaccaaaacatgtattagcatctatacaacatgtggtatatccaaatcagaaactaatttgcatgtttattgactactttccaccaatcatatattcatatatctgatttttgatgaacaaaaagtacaaacacactttcaacaaaattcccaattactaaaattgtcaaagaataaatgaaaagtgaagaacaaatatatatcatcatggtcactagattagaactactaaaggaaaatataattgaactggaccatttatgataaattttatataattctctctagtctaaatggggcagaactaggaacaaaacaaaagagaaaaatcaagagagagggaataaattatatccagtaagttaatcctttaaaatcagaaaaggccatgctaaaaatggaaccgcgaatacaaagaagctaccctaaaagacaagctatttaattcaccgaagctaccattttcccaaaaaaccatttataatattaatagagagccacgaaaaatataaatttaataaactaccctcagtataaaataaaacagtcaattaaatacttacagtttcaaaaaattaaattgtagaaagaattggtaatataatccttccatgtatgagatctttttaagttttaagtcttaataccagtataccattcatgggcaaagtataattgaatgaattcctacatcctaccacagtataaaataagaaaaataaaacttagtagaatgaaattaatgagaatacctgtccggaagctttggaatataaattaaatagattcatcatagtataacaagcattaggagttgcccgacaaaaaagaatactgtcatctgcaaagaaaagataagaaattgatggagcaattcgagcgactttatatccaaaaa

SEQ ID NO: 94446 - DNA, 625 bp, Cannabis sativa
cttttggatctggtgcaaggtggtatttgggctactatgtgactattttgaggtgttttagaaagtgtttgggatctggtttgtggtgttttggaacaaccctctcctttcatggttttggatgttgtttggtatctgttttggggtgatttgttgagatctggtttgtctggtttggggtggtgtaatggatggagttttagacttggtttgaggttattataacagttttgtctggcaagtttttttcttgatttcgggtggtgttttggttgttatttggaaccacattttgggtgatggccaggaatttaattggcctatttttttcttggtttggggtggtgttttggatactctttgacacacgatagagaaaggagaaaatattatgctgaaagtttggatttattatggtagaggggcaatggagaaaaggatttaaacaagagtgtggtttgtttgcgtgaagatcagactactaattagtactctaagcttagttatacattgacattaggatgatgcatgtgctagtttttaacttatttgtttatattttgtaaaacggatgtacccttttatagtgcttgtagttctagcttgttattgtaaatttttgggc

SEQ ID NO: 94447 - DNA, 1348 bp, Cannabis sativa
tcgtgcacttgcgagtataaatattaaaacactcacttttgaggacaacactcacctagggttccttactcaacacgcaaaaagggccaaaaacacaacaagaccatctgactgctgtggtttggtaagtagttttcccatcgtgtggtgctcgatcaacacaagatatctcgttagggtcttaacacgtgtctctcaaaggtttctccatgtctaagccattgcctagacaagtcgttggacaataagcaatatagaggcacgtacgtgcacaaccatggtctgacgcatgggacagaatatgatttggtgtcagaagatatgtaaccaacgggcttagctccagattaggccttacggagtttcaggaggtttggctaaggtcttcctggatcagccaatccgctatcatcctagagcatatgtgactcccattcactcccaatagcggaagcataagatgagaatctccataatcacgtcagccttcgctggagaagcattcttctgagtatttcaacaccttccataaccttgtttaggggaaggtttatgatatcaatatctaatccaacgtggcacctttccattacttccatgtaaaacacatccgggaatagggataacatttacccctaagctctcaggacttgagagtattgggagcttgcagccttctctcagatgttcgtttcatgtatctaactcgcggaccaaccatcaggaggtgaaagggatctttcgtagcacgttaggtacctacaagttaggcgatattattgatgactcattgaagcgtggtgcttggtcaatggagttgtgaaactcacactctgcattttaggcgcatttctcagtggaaacaaatgatggctggttttggaaagacgtctggccttaggtatattggggaagctgccacgaaatgatgagtaataaacactttattctcttcctttagacacatgaaatgtcaatctttcgtatacccaaccgttgaatgatttagccctcaatcaattcgatctagaccatgcattttaaaaacattccaaccgttgccacccatataaatggggtttttggtgattgaaactattttctttccttactttaccaacaacctttcgcccaaagaaaaactcttctcaaacaaaccttttgcccaaaaattttagccctctcacacctctttgaaccaacctcaacccctactttcccaacttcgtcgttgtatttccttgatgcacgtcgtcatctcgagccatcctactgtcggagctaggagagccaccgtctccaaccaagcagcaaaattctagtggcacaaccgtcatctccatttctt

SEQ ID NO: 94448 - DNA, 565 bp, Cannabis sativa
ttttgttttttttaaaaaaaatattaaaaaaaattaataaataattttctttaatttaaaattttaaaaatatacataataaaaaagataattaaaaatataactaagtatacttaacaatcccttagcgtacatatatattatattcaaaagtgatcatgcttcatattattttgagtatataatatttgcttatatatgtgtgtttgtcttgctgatatttgtctcacaataaatatataaatctataatatacgtacacatacatatcaaaactttaaaatttgtgttataatttacattaactgatcattatatatattaatacataaattaataaaatgttttttttttttttttttgtaattcttatttataaattaagtgcaaagggactaaattaatattatttgataatttaattatgttcatacttttttttactaactatcaattaagtttttaaataattttgaatatatatttagagagagttatataagtacgtatatagctgacaataataagggccaaataataataataaaatagtcaaaatatatac

SEQ ID NO: 94449 - DNA, 824 bp, Cannabis sativa
atataaattctaagaatgttgttagttattataggagtaattatggaatgtaattaaaaataaggtatattgataaatattgtatgtatttgtgtcatattatgttttatacaccttttttataattactttgtaaatagtgtatagttatgttaaatttccttttatttttgccatatttttgtaaagattggcccaatttccctatttttatcttttttttttatttaaatttttttatactccattatttttaaagtaagctactgtagcttactttatgcatgcagctgagctcactcagtactcattagtcattaccttattgagattttcttctacttcaatcaatcatacatttcgttcatatctcttcattttcgttttatattctcttagcttagggtttgcattttatcctttctttctttctttctttctttcttcttcttcaatttttgggttccatttctgtttgattgaagttgtgggtgctgctgccgtgtgtgcttattcttcgtttgattcctttttcgagcaagctctcttggtttaacagaagtatttgttcatttccttgttagtttttgttgtaatttgtttagtttagtgattagagtgttttattttgaggttcgttatttttttattattcatgttatttttggcatgatcggtggtatttttaggttgttttaggtatttttgttgcgtgttctgtgtaattttgacaaaatttgttggttgattattgttttatttagtttatttttgtattaagtttgtgtttatgttcatttttttttttggttttgcaattaata

SEQ ID NO: 94450 - DNA, 570 bp, Cannabis sativa
ttttgaaaaaaatttcgtgtgacagtatttttataaaaattaacctaaattctagtgtttttgtaagtttttcaaaataaacacgaccttggaccgggcttatggagttgtggagagcattgctttgtatgggctacaatattaccaatgtttttttctttggggatcttcatttttatggtttttaaggtataagcttgtaaaatatttttttaaaaaaaaataattttatggaaaaattaaaaatgaaaagttaaaaaaaatatggagaaaataatataagaccctatggttaattactctaagaagacctagttacccttatctaattgcatcatattttttaaactttttcttccattttttcgataaaataactattttgaaaaaagttatatttttgcacaaaaattataaaaatccataaaacttgtattttccacttattttatagggataattacataggatactattttcttaaaaaaattacatttttacgtataaattttgtttttacatatttttgattttccataaaaacaacacgaaaacaacataaaagtaaca

SEQ ID NO: 94451 - DNA, 532 bp, Cannabis sativa
  modified_base (30)..(31): a, c, t, g, unknown or other
ataagtaatcagattgtaaagagttttatnnagggcataaaacccaacaagcagttcatatatgactactcaacatctgtaacattcaaacattcgagcagaatgattgagaatatgtccgaccaaggtctagacatgtatatgccaagcgaagcatgagagataaagattccaaaaattaatctcattgcgcccaaatgcgatgacaatccctataattacgggtttgtgtcagagaataacggtaacacaacctagtgtcctatttctcatgttataactatagaattaatgtagtttcctatttaaaacattataagcaaaagggaaaccatcaattatgtattaagtccctataaataatggtctaacctccctatgaaggggataaagagaattgcttcagaaatatattatagagagaaaagagtgatataacagagaaagttactcaaagatcaattgtgagagccttcgagaggaagatcactttgtttccttctctcatgtcaataaaaatacaaggggagta

SEQ ID NO: 94452 - DNA, 524 bp, Cannabis sativa
ccaaactgatatggtatcagagcctccattaaagtgtgctctttcgttgctatcattctctatctgctgcttatctgttcttccatggcgcacgaggaagagtgcaaattcgaagctctcgtgaagatggtgattcgaagcagttctctattctcggtgagaactcaagatcgacgaatgctaatgatctatcgaattcttattttctttccaatggtaacaatccatgagttgttttagttccaaagattctcataggaagtgagagttgagaaagcagaaagaaaagagatttctcaaaagtgaaaatataattgaattgattcaaagagttcaatacaaagatgagcttttatatacaaaagttacagaccaacagcaccgaaaaataaggacaaaaggactaactaatccttaactaattaaccaactaatgacctattttaacagaaattcaactgtcatgtaacagactcctcaacagtgagaattacagtatatggaggagatcaatgatgatcgca

SEQ ID NO: 94453 - DNA, 518 bp, Cannabis sativa
aacatctgtagctgctgcagttgacgaccgcagatacaaaaaccatctgacccttggaaatggaaaaatattaaccggaatgggactgtctcgtaagtcttttaaacatattattattattatgaaatggaagaaatgaatcttgacatgccaagcactttttttattatcatattattttttatatagaattcttggatgtctggaaacaataaacggggatacattgttttctacttgtgaaataacagcttttataatcccagaaaaatagtggccattatgaacgtactagattattttcatcatactatagtgaactaacttggcagagtttgcagtgacccctctttttcactgtaaactaaaataatgaaacaatgtgggggttaggattgggtttacaaatgaagattctggttcattcatagcgtctctttttaactatggttggaaacgtagttcattgtatgatttcttttatataaaatgacccataaacatccaaggtaaataga

SEQ ID NO: 94454 - DNA, 767 bp, Cannabis sativa
gtatttgtgtaataaaaccaactttgtaagtaaataagttgatatacgcgtgtgtgagtattttggtaataaattgtgcaaaatggatttttcatgtaaaaatttctataaaatatcgagtagtaataagtaacattaatagtactaagtattttttagacgtgtcactttttaattggttagtgatattctttaaaagttattataattaaattatatgagacccaatattttataccaagaaggccaatactcgacactattagtattttttaacatttttcttatcaaaaatattaattagtaattcaaagctcctccatatataaatatttttttttggtaaatcagctaaattttattaagcatataccaattacaaactccaatcaaacttacaacatgcacgaacataattaaaataaaaaaaaaattcagaaatatcaaattagcataaacgatgaaataattttttcaggtaaatgcaataatattatcaattggataaataataaatgtccattatcatttatcataacaagatggaaaagtgttaagtggcacttaaagtttcaagtaatatagtatattattattagtgtatttatcatttaaattatataaaaaaaatattaaattattatattattcaaattgactaatagtatatatatatatatatatatatttatatatatggaagaagttttaatggttacatttttattgtaaccatcatggttacatttttttaagccattggatta

SEQ ID NO: 94455 - DNA, 513 bp, Cannabis sativa
gtaaaataaattccaacagtaacccctcgtccgttgtcagtagttatggtgcaatgtggatgtccccatatacctttgagaatatcattgtttatatcataaatgtcatgactcgtactatgaaggtgtaggaggtaagggtatcctctattctaacacttcatgattgacggtcatctcaacagtcatgactttacacattcttcattaatttagtcccggtatttttgtgccacgtggtggtactcttgacacgtcatcatcttagaattttcgaataaacaattattattataaaaactcatattaataattctctatagtttatatacttatttgaaatttaaaaagagagaaaagtaatggtaagatctcctcacataaagttttcaagtgcattttcaactatgttaatctcaaatatactgtggtgggtggatgaattaaaacttgagaacaaataaaaagtttgggatactagtcttcaaacaaatataatatgcaagaaaagta

SEQ ID NO: 94456 - DNA, 753 bp, Cannabis sativa
tggaaagctaacttgcaaactatagtggctctttcaacaatagaggttgagtacatagcttgtactaaagctgtgaaggaagctttgtggctaaagggaatggtcactgattttggtttaaattagagacaaatacatgtacatagtgacaaccaaagtgctttacacttaagcaaaaatcagatgtttcatgaacgtaccaaacatattgatgtgcgactatattttatcaaagagataattgcatatggaaagatcaagctagacaagatttcgaccgcagaaaacccttcagacatgctgaccaaggctgtcacaacaacaaaattcaagcactgcttgaagctacttggaatcctaggatagaacctgtcctatatcctaagattgataaatgtatttatttttgaatatatgtttactgttgttcttaactgtctttgttttttctactatattatggatcaaggtgaaaattgtagttagttatgaccgttagcacagtgaagacaattagtattttgttagctctagttagtttttacagttggttaggcgttgttagtttcaagtgtcaaaatttattggactaacctatataaagtccctgtttttccacttgaaagtaagacacaatttggttcattgtgtaagaattagacaccattaataatgatctgtatttctattattgatttataatcattgtaactggttttagttgtatggcattcgagtattagactcaactca

SEQ ID NO: 94457 - DNA, 662 bp, Cannabis sativa
gaatctctcaatctcacacttttcttatgtcattattatacccgaaattcggctaccatttcagtggaggacacgtatcaagataaagggaatatggatcgatgatatgacttttaatggaataactcattaattacgtaagtaatagagtatacttgcgactcgctgactataagggcttatgtgaggatagggtgtacaaactgttgtttagtatattaacgagaaaccatatgtcattggatgtataaagcgatgacatcaactctgttacatctgggtagacgatagtgacgcatatcgactgtgaaaacacttagcgtatactgtacaaactaagtaaaacagtcgagtgaacccaagacctaataagcgaggcgcctatctcgctataggaaggcgcattcctgtaactaccaccaattaacttcagatttctttcagtaagacttataatcttgacgagacaaaccgaatcaaaatgagtcattaagtcttcagacaaagaggcagtaaggtgtaaatcatggacctcagaaagataagggacaaaatttctaggtcgctatcaaggttattggaaccaagttcctgtcgagacatcccaaaacgctacaattaaagacgtatttaaacacacgatcattttgacccaataaaag

SEQ ID NO: 94458 - DNA, 561 bp, Cannabis sativa
atttcgggccgaactgggttcaggcccgaaatgcaatattggattgaataattggaattttaattattagtgagaaatttgaaaattatttgaatgtatgttatttggaaagacttaattgcccttgtttgctaaagtgagtgttatgaggccttaggggcattttagtaaattggcatatttgagatatttgttgtaaaaggatttttttttaagaaaaaagatgaattatatggtttcttgccctcttacccgaacccctctctctctctcaaccctctttgaactacaaacttgatttggtgaagatttgcttggtttgaagcttggtatttggggaatgattgagcttggctttaaattggatttgaggtaactttctttggcttgaatctttgtttaatttctgagtttaagtcttgtaagagcatgaaatatgatgtacattgtgcttatgaatttgagatgcatgttgatgttgtggggttgttttgagcatgcttggagcttcaatcttttgagtttatttggattaggtttggatagaaattttaaggatta

SEQ ID NO: 94459 - DNA, 1281 bp, Cannabis sativa
atataagtttgactttattagagttttgggtctttgtcctttccggcttcgaatcaaaaaattgaaattgaaacaatcttgttctacaagcactacttgtcctgctctgcttccctcctcgtcttctcagatatgatcccctactagctccgcttcaatatacaattctacccattcatcattcatggcggacttggtccaggttctctttctttctctttacttaatctgatgggttcctttcttcgtgtgtaaaaagataaccgttacttttaatttaacactctatgctcttgttatctttaattttaagcttttactctatctgaatgatgattaattatctgagaggtttgggtagtattactgagacttaaattcattatgtgttataaaatttcagaaggggacccaattttgttgggacaatggaaacttagtctgtggcatagttcatattaatcaaaaggattgttatttgcttgctttaattttttgtctgctgagcttaaaaatcactaatttggatggatattgggtaatcaattaggacaattttagtttattgaattttttggttgaattgaatataagtaatttcaatgagtgtggatttcagttatcttttttatgtgtatatgtagttgtttctttacttgttttcatgatgctcatgttttgtaagggttaaataatgtaggagcattgcataaccccaatcaatgaaaattctgaggtaatttgttggggctgtgggttgcggcttttaattccgtctcactcacctgttttcaagtgtggatggtgtggagctgtaacaaatcagaatgcacgaaaacgtgacggcgagtaccttctgttgagacgatggcgagatcgttgctttgtttgtgttctcctcttgtttatgacctttattatatgtaggtagttgtaaatttatcatcattattacatgaaacttccctttctcttcacacacacacacacacacacctctttggtatgtccagtgttgtgtttgtgtagttttgtcttgccaccattattattgttatttttctttcaccattaagaaacaaactattattggaaaataacactaaaaaggatagtataaagaatccctccaaaacaaaacttaaaagcagcaatagaaacatgtatagtttccataaatgatcactgagctcatatgaaacttaattgatgattacaaagtgttggcatttcaaattctccaacagatacagagtttttaattttgactttactaggcta

SEQ ID NO: 94460 - DNA, 593 bp, Cannabis sativa
  modified_base (550)..(563): a, c, t, g, unknown or other
tttttttttataaaaaccgaaggtataaaattggattataccatttagaggcagtgtggaatcaaacgacgtagggattggttgtgtgacccttccaggttgttatagaataaccgacgacatagggtacacgtgaaatttgacacatgtaccctatgctgtcagtttttctataacaaccgacgacatagggttatataaatgaccctatgcatcgtctccttccttcttcctcacgatccaaacccagtagagactagcccagtagccaccagcgaagaaaaaaccctcgccaaccaccacctccgccaccccttttctcctccatttctcatccatttcagcccatttttttttaaatctttcattttcgatacttaataccatacacccaaaaagttttcattttttaccctctttaagtatcatccgaacccaactagaaatttgtgggtttaaaatccaaccaccattttttgttcagaaaacattgaatcttaacatcttttaaggtataaattgttggatattttactaggatctagatttnnnnnnnnnnnnnnttcattaacatcctaatataaattctaaaa

SEQ ID NO: 94461 - DNA, 704 bp, Cannabis sativa
tgacgtcacaggccacgtcatacgccttgacctcaaatgcagtgggcttcatggcattcttcattccaacaacactcttttctctctctctcatctccaatctcttattctatcttataattattttggtggctccacaatttcatctgaatttggtaagttttcaaatatggttcaccttgacctttcttactctggtttcagtggccaagtccctctccaattgtccaatctaactaatctcagagaattgtttcttagtggtgttgatatgtcttctacttcacctgattcctttatgaatctctcaacttctttgacatctcttgatcttagttggactcatttgcaggggaaacttccagaaaatgttctcagtttgccaaaccttcaacaactcgatttgagttacaataccaatctcaatggttcttttccacaatataattggagcagcccactgaaagtgttgaatctttcttacactggagtcatgatagatccttaccaacacaattcgttggtatatcttcatttagaatataataacttacaaggcttctttccaacatccatttttcagcaagtcaatctttcttctttgattcttttctcaaataatatgagcggtgtcgtgcaattagaccaattttcaaaactgaaaaaactcaaatatcttcatctttctaataatagtttttcat

SEQ ID NO: 94462 - DNA, 1246 bp, Cannabis sativa
  modified_base (1200)..(1213): a, c, t, g, unknown or other
catgttcagcaaggacatgataagcgtcaggaccaatccctccctccacatatcaagaagaatgtgaacgtgatctccggaggatcagacctaagtgggaatttagtccgagcctcattggcccactctcgccgatgacagtaattgataatgaaggacccgatgtgcagatatcattcaatcaaggggaggcttctgagctagaacacccccatgatgatgccctgatcattaccttagatgtggcccacgttcgtatgaagcaaatgcttgtagacaccggaagctcaaccaatatcttagttgctgaggttttgaaggaaatggacattgaagatttaaaggcccaagagacacaagttactctggtaggattcttaggggaaagtgccgtcgctcgaagtttcgttcaatttcttgtctacgctaatggaataaacaagttggtcaaattcctaattgtggattgtccatcagcctataatgtcatcctcggccgaccatggatccatgcaatgaaggcagtcacttagtcttaccatcaggtgatcaagtttccatgcaaaggcgaagtaagagaaatatgaggagatcagctaggggcttgcgagtcctatacctcatccttgaggagcaaaaacaagttataacaattaattaactccttgaccccagcccaaaagcaacaccctgcagtcgaggagtaataggaggtacccatccactcgacagatccaaccaagattacttacattagcatgggacttacgaggaatcagaaggaccagattgtaaacttattaaaagaatattttcaggtttttacatggaaacactcggatatgctcagaatagacccagctataattacccacaaattaaatgtgaaccaaaattacatcccggtcaagcaaaaaaggaggaagatggaagcagatcaaaacaaagtcgtgaatgatgaagttaaaaaaatgctcgaaaatgataccattgaggaagtacaataccctacatggctcgccaacctggtggtactaccaaaaaagaatgggaagtaaagagtatgcatagacttcactaacttaaatgaagcttgcgcaaaggacagtttccctctactccacatcgatatgataatcgacgctagcgctgggtgtaacgtgttggaatttattttaccaggaccttagatctactcannnnnnnnnnnnnnaacaccctaaatatgaactttctataacgataa

SEQ ID NO: 94463 - DNA, 519 bp, Cannabis sativa
agtcatcaaatatacttttaatagctaaatcaaataatatatgtaatatatatataataaatacaaaatatttttatcaattaaatatataaaaaataaagtaacaatatacatccatatttacaacagtataactaggctttctcctaccactccatccaaaactagtgataaattgtgattttatgttgagcatcgctatttgattcggggtttatttttatattattttaaattatatttttttatcataatattatattaaattataatttatattaaaatattatatatttataagtctataaaaattgatatcacttataattttaataaaaatataatataaaatacagtttaatataatatactataaaatgcaataagatgtctattgacttcacattctataatttttttttggtgccaacttaacattttataattagttactattttaaataaattactaaattaattatgtgacatttgttcttaaaatgtactaaaataattctt

SEQ ID NO: 94464 - DNA, 635 bp, Cannabis sativa
  modified_base (118)..(121): a, c, t, g, unknown or other
taaattttataggaacaagtttgagtctatttttttctccaaaaatataaatttggtttagtaaacataatatttgttttagtttaatatctaatttttttttcaaaataattttatnnnnttattgaatttttaattatttttaaaatatgagtttataagaatacataagcttgatttcttctacaaaaaatattagtttctttaaattatttattgaatttttaataattttaatttttcttttaagatacgtgtttataaataaaataaatttggaaatatttttttaagaaataatctaggtttttttttaagtaaacttactatttttatcaaattttttttttttactaatttttaaataatttttttttattagaaagggactattttgcattggtcaaatttcagggaaataataattagtaatggttcttgtaatgttatttcacgttctaccaatgatataactcatcatgcactagcaacttttattactagtttggtagagtctaattggatgaatatttattattattttgatttaatttaatgaaaactttttctttcaaaaaacaatatatataatatatatatttacatttttctgaggggtcctccacatgaccaat

SEQ ID NO: 94465 - DNA, 531 bp, Cannabis sativa
ttcttacagctcattattataatcatattttaatagttgccgaaaacctcggtcaacaaaggggaaggtgaatttgagtgtacaactgccggatattcatgatttctgtaaagtccttttttggcaatttaggtgtcaactttttttatttatggtttgatttccttgtgcaattaaaccaattttatcaccttaatattgtgtatttattgctcttttctatcaaaggaaagaatcagttttcagctgtccattttcttgttctggaaacttcttgtaagagaagaaattctcttatgaaaagttagttttatatggaaactttgaccattgctatttctctttaatgtggttgattgtgtcttgataaaattagatcaagcacattgtttttggtatctatcaagtccatgttcttgatcagacaacgttttggcaagttttcttttatggtctggtttgctgctgtagaacctgatactgatgctgcaaaataagattttcttttaggaaagtatgtacagctgtgga

SEQ ID NO: 94466 - DNA, 887 bp, Cannabis sativa
tatatatatatatatatagtcctgctttgtaatttatactattccgacttgtttggtttgtatttgtatttccatgccttctgttggctttttttaatgataaaagggtacgtgtttatgttatatgcatttttttatgaatattttaaagtatctaagtttaaatagatttgatgattaagcataaaaaataataatttgataatttaatgtttatcgagtttttcaaaagttagttataaatagagatttagaaatacaaaaatgaataatgaagagagatttttaatacgggttctcgtgttaataaatattattcacgagtcaataatcattacaaaaagttttactttaatttagtcacaataaaatttgtgactaaaaataaaaaatttgtgactaattacatattgtgactaaaaagtccgtggttaaatatattagtcacaaaaattacaatttattgtgactaaatatatttttatcacttctacttagttaatgacttctgtgtttggctattcattctactcagttaatgacttctgtgtttggcttagttgttaatgactgtagaagtttgttatcctctctttttgatgttcaattacgttttgttagacgatcagcaaatcgtgcggcccactttgttgctataggcacacatgatcgctaactggtcgtagcgttctggagtctttcatacctcttgatcttaagattattttgtattcagagtgctaatttaatgaagttacaatttcatgtaaaaaaatgtattttttatcacaatatttattgtgactaaaactaaattagtcataacttgtgtctaaatgctatattttagttacaaataattatttcttgtgactaaaagtcacatt

SEQ ID NO: 94467 - DNA, 686 bp, Cannabis sativa
tttatcacccacaccaatccatgtaccgttggcaaacaataataatcaataattgaaactatagaattattctcaacaacaataacaacaaaaagaataaattatgaaaaatgctaaagagcattagcagtgtttagttaatatttttttacgtgtaatattgatattggtacaactacatatctagtcatatacaattagttattataattgaatcgtgttacatatcgttattgttacaattaattattagttctaatataatttaatataatttttatcaaatatcactaatcaattgcgatgtgccacttttaaatggtgttagcactactaacactatataataaggctcgtaattattgatgaactatagcttctgagatccaccattgggctatatatgcctataatggaaacagtaattttagttgtcatatttatatttggtttacttgtaagatttattgagtacgccttatatattacttttggacaatcctctcaacaactaaaaaatccattcgaggaacacgaggagtaattgaagtaatgagcctcccaatatcaaattaatatcgggagctattttggaatttctgagaaaacttaatcttatggtcaaagcgagagtggtggatccgagatttaaatatttatatttttagaaaattatatagttttta

SEQ ID NO: 94468 - DNA, 820 bp, Cannabis sativa
cggccctgttgggtcgggtcgggtcagacccgattaaacttctgaggtaatcggagcggggcggggcagggtggggtcagtagcgggtcggggcaagcccgccccgttttccattcctaggcggaagtggacttggccaagaaggatgctgatgaagccaggattcaactctgagccgtccgaatggaactggcatgggtgtaatgaccgttatacttagacatgggattagtgggacacttagcactaattaatatgactacgtgattatttaaatgttttattctttatagaccatattttcataaaaatatgtgttatgattattatttcacaatttctgagattttattgaattatatgtgtgatatgcatgttatctgtgaattttcatatttttacatttttatgcccggtaacagtggaattgggtcgaatggcaattttagtgacatggacacaaatttgtatcaagtattttacggggaaatattattggatatcctagaatattggggtctaacgaaataatagaattagaccattttaccctagggctacgagataactttgcggggaaataagggcattttagtcttttcacccttagagcttagtcactctttttggaagggataggtgattgtggctcatccttttgaggatgaccagctgcttaggaagcaaacaaaaaaggaaaagcaaaataaaagaaaccaaaaaaaaaaaagccaagtcaaaagcaaaagaaaagtaaaaaaaacaccaaatcaccttctccttctccctctacttcgtggcttctgaaccagggccaaaa

SEQ ID NO: 94469 - DNA, 1536 bp, Cannabis sativa
ttgcttggtagtgttatataattatatatcataaattttgtttcatatagaaatcatctgtctaatatcaattagtaaagaaatatcaagaacctacttattataatatgagaattatagttgcgagctacatatcaccacacaatgctttttccaaacaatatacctacacccacaaaacactttgaaaccaattaaaaacattgtaaaatttataatataaatagatgtaaacacaatgtaaaaacttgagaaaagtgtttaacaagaactgtatttacaatttagaaaagtaaaaataaaaacactattagtgaacaaactattttattttgttatcagatttctaattaaataaaaagaaaaaaaactgcttagataataattaccaacaagaccaaagttattcaaatggtttatacctcaaagtcagttcagagagatgtctgtatctccacgagtatttcaatgaagtgaagtactcaagtttaattaggaagttgtgcaaaagttcctacatttggatcgcagccaacaaccatcattttcttgtaaactgcataagcatgctctagattccctgacgtgctataggcttgaatgagagcgttgtaggtggaaacatcaggtttaagacccttaagctgtagatcttcatacatactcactgcttgcttcaccatgcctgccctcccaagatcgagtattagattgttgtatgtatagagatcaggaaatattcctctgctctgcatttcagtgtagagagatagagcttcttctaccctttgtgatcttccaagggcattgatcaaaaagttataacaaagtgaatcaggactgaagccactctgcttcaattcctcaaaataatacagagcatcatcaatttctcctagaaggcagagagaattcacaagaattgcataagtcctcaagtctggtcttattccttctttaaccattctttgaaacaactgacaagcagtttccacgtctccagttttcccaaacccatttataagaatattgaaaatcgcacaatcaggttcgcatccatattccaccatctcctcgaagaaaagcatagcttcttcatgtcttcccatcttaaggagtccttcaatgagtggacagtatgtacgagatgagggagagaaatcacaacctacatgatcatagtaaaaatcgatagcctcgtccacactattaagttccactaaactggaaatgagtatattatatgtgattgtgttaggcttgcattccctactacacatctcttcatataatttgaagacttcaacgattttcccagacttcccatgtgcaccaagtaacaagttgtatgttatagctttaggggtatagccaacacttttcatttcattgaaaagatcccaagccttatcaatcatatgaactctaagaaatcctccaatcaaacaggtgtatgattccaaagttggcttcaatccctgagtcctagaaaattttgcaaagaaatattctgcgtgaagaacttccttaaattta

SEQ ID NO: 94470 - DNA, 710 bp, Cannabis sativa
aggaggtttccctcgacttgaatctcttgagcttgagtttctatttgagttgaaagagtggaaagtggaggagagtgcattgcctacacttgcctatttgcgtattacaatgtgcaggagattgaggagagtcccagatggactaaaaaacatagagacactcaatgagatggtcatacaacatatgcctaagaaattcaaagaaaggatggaagaaggaggagacgatttccccaaagtcaaccacgtgccgtcacgtgtctttatcaaatgtgatgaaggtacatatctatcttttgttgttaattccattcttttcttttccatcattattttcatctatattacacattatttgcttatgcattttctgtattgacattactatgaatgcagattggccgaacgactataaatgaatttaagtgggacaatcatatcaacatttggaggatgtgtttgccactgtcaatcaccaatgtctgtttattcaataattaatatttggaatataatgtgtaatattcgaattttgttgttgtgttttaattcttcaattagtgaatgttttaaattttgatgtttcatatgttatcatgtaatatatatacttggattgttgtcgcatgaacattgttgttttctttaaacaagatgtgatggtgaaacacataaaatttgatttgacaaaatggcaatagcaagaaaag

SEQ ID NO: 94471 - DNA, 545 bp, Cannabis sativa
  modified_base (52)..(62): a, c, t, g, unknown or other
  modified_base (485)..(519): a, c, t, g, unknown or other
tacaactggggcaatctgggtaagcgtattgggtttcggtgccactttggcnnnnnnnnnnnccctggttcccctggaacctcttgttctgacctaagccaccggttgtagtagatgtctttcttttctgatctatggccgaaccactacctcccctgctgaaagtgcaggagaggtaggagcctcgccaataactggagtcccaccagactcaaccatacatcccactgcgccctcagctcgcagtgccttatccaccatttgagcataagtggttcaatcgtcagtagtgatcatcaaatcgtgtctaatcttctcatttaacccatccaggattttccctttcttactgaagtcagttggcgcaattcccaaggccaaccttgccaaacggtcaaattccgttgtgtactcaggtgcattcatattttctttcttagttagtgttggatattatattaccgggatcttagatctactcacannnnnnnnnnnnnnnnnnnnnnnnnnnnnnnnnnnaaaacgataaaataaacacatataca

SEQ ID NO: 94472 - DNA, 644 bp, Cannabis sativa
ccattcccattcccatttgcatttctatttcctgacccattaaaattcccattctcattcccatcccattcccattcccattcacgtttccattcccattcctcgacccattcccatttatattcccattcccactcccactcccactcctactcccattcctattctcattcacattcccattctcattcttattcccattcccattcccattacccagcccattcccattccaattcccattcatgttccccgatccattcccattcctattcccattctcattcccattcctattcccattccccgacccattgccatatccattatcattcccattccccagcccattcccaatccccattcccattccccgaaccatgcccattcccattcccatttgcattcgcattcctattcctattctcattccccagcccattcgcatttccattcctattcccattcccatctccattcctattccccgacccattcccattcccattccccgacccattcccattctcattccagcccattcccattaccattaccattcgcattctcattaccattcccattctctggcccattcctattcccactcccattcccattgccattcccatttccattcctat

SEQ ID NO: 94473 - DNA, 593 bp, Cannabis sativa
acccatatgataaacttaaaaaaaataaacagaataaacaataatttatatttatatatagatttgtgaaattgatatttttcttatgattattgacaaaaaaataaataaaaattaaacgatgaattaaaaaaaaagtgaatattgtaaaataacacaaaatttgattaaaaaaaactattattaagaatgtattcagttaaaatgaatcagatagaatacattgattcccgtatgatttaaactttatatgataagaatttaaaataaatacataatgaatatatattatcacaagtcatgattgaaatgtatattaaaatctcccgtagtaaaaatcaaaaatatgtctatgtgttatgtgtatctttttgaggaaaaaatgtactaaaaataattatattagagagatagaaatataatggagattggagagtaccatatgagaatgagcatagctattacttttcttgaatctcaagagcctattagtaaaaaaaattatttttttcatcaaataatttatgctaatgaataaattataaataattcgaagtcatcgaggacggtcaagttgtctaacataaaaaaaa

SEQ ID NO: 94474 - DNA, 840 bp, Cannabis sativa
cccccctcgcttatcaaaaaaattatattctccctcattttaaattttgagtttgccaatatataaaagggattatttcacaaaaacataaaaaacaacaaaaaaattacaaaaatacggtttcaaatatttttggcgatttttttgattttatttacgaaaaatacggtctttttatgttgtaatcttgttaatttgttgttatatgtatgttatttttattttacttttatgtagttttcttgttgattttctgttgtttacgtgttatttttttgaaaaccatcaaaatgtaaaaaaaaattctttgaacgtaaaaatataattattttacaaaaaatagtgcattatgtaattattcctacataaaatatgactatatatttatacccatctaaaatttaaatatggtatgaacttattcatattttccaataacaaaaatcatatatattaatatcaatcttttcattatttacatattatgaacaaaaaaaggtttacataaattaaaatttaataaagagtcaatataatagtttaaaattttcataaaacaaaggctaatatatagaattataagtgataagcaagagagttgtgtctgatttagattgtaattgaatcgaaacaagccattaattattttaatttttagactttaataagtaattgaatcaatcatgaccaattttaataaaattaaaatatttaatttttaattaacatatatatatagattcataaaatagaaaatggtagtaagtattacataacgtaacagtgttatggctagggctgccctaattctagcctcaaggatcacaattttggaggctc

SEQ ID NO: 94475 - DNA, 573 bp, Cannabis sativa
ctaagaaaaagttttgggcggagttaatggcccttggggacaggtttgggggtccatggctaattataggagataccaactttgttcttagcaactctgaacgagaaggttcttcaggaagagacccttttatccctctcatttctaaccttgttgattctagaggtttaatcaatctgtgtatacaaggcgacaagatgacttgggataaccacaggtcggggggtattcatgtgaaatctgctctcgataaagggatagtgaatggagcgtggatccaactgtttcccaaagctgttatttgctcttcccagacgagcaactcggaccatagacctttctttctggatactagtggtcattcccctaacttcaagagatttttcaagtttgaagaaggttggacgagggatgatagaagcaaacttgtagttgccaatgcttggcgaacggtaactcattcttgggctcctgcccgtattttcaaaaaggttggtgctactaggcttgctcttctgaattggaatagatcgcagtatggtaggcttgattgggtaattaaagacctggaac

SEQ ID NO: 94476 - DNA, 1104 bp, Cannabis sativa
  modified_base (27)..(36): a, c, t, g, unknown or other
  modified_base (63)..(72): a, c, t, g, unknown or other
  modified_base (98)..(107): a, c, t, g, unknown or other
  modified_base (1045)..(1057): a, c, t, g, unknown or other
aaaattattttttgttctcatttctannnnnnnnnntctcatttctaaaaacaattttttgannnnnnnnnnatttctaaaaacaattttttgaaaannnnnnnnnnaaaacaataccaaacatgctcgaattgtttttttaaaacagaaaacaacattatgttgttttcaaaattcttgttttttgtaactttatttttttcaaacagttttcagaaaacaaggccaagcatgcctaattgttttcataaaagtaattttctattttttaaaacaaaaaatagttttttagttatgatgtcaaacatgcacttagtgaccttcagcctagtccgagggagatatgagcagatagactgtaatatcctgaaaaataaaatgacatttaattagacatattttattaaatatgtaattattttggtaatggagtaagattatgatcttacttggatcaattaatgaaaatctattaaatgattatataaagcgtaatttattaattacggagtttatattgagatatgtgggtatcgtggataccattttttaaataaaaatatttttcgagcccggtgactgtggaaacttgacgatgtggtcaaaaatatcacgacattaatggatggattattttgaggctattccggactagtttagaattttagaatgtaagtttgattgattagtaaaattaccataatgcccctaggttatttttaaagctattaagttattctttgaggagtagattagtcttttcgcaattaagtttttgtccctttttaatgttgtgggctgattataaaaattgaaaaaaaaaaaaaaaaaacagaaagaaaagaagaaaaagaaaatagatgttgttaggcaaatattaatttaagaataaaataataaacaaataataattatccaaattatatatcaaaaatatctcaaattaagctttttaaattttctacaaaaaaatatctaggttatttaaatatttcaaatactagtcataaatttctaataaataaaatgatataaaatatcattnnnnnnnnnnnnnatttataaacaattaaatatttcacaaaataaccaatttatgaattt

SEQ ID NO: 94477 - DNA, 627 bp, Cannabis sativa
gaagttctcttcgtaagtctatttggagatagattttcctttcctatgtgtggttcagcagaagcagtgataatcgattttggattgtggtaaagccgagttggtactggagaattcaactgactgaatgtagaggaggcctggacagtagcgtttgttggaggatatgttgcaaaaaagtttgaagacacatccatagcagccagaggagtaaaaacccgtgataggtcaaccacattatcattggaatttggctttgattgcgcctgggacattgctgcagaaaattgcagcacattgcgatgttgttgggccgtaggtacaactggtttagagaccaaggttggggcagtattcatggacttagaaccatttatggcaacactactagacatagcagtgttggttactgcagggatactaactccagtcgatgtagcaacatcaaaacccgattgcacagatctattaactccagggatactacctccagttgaaatggcagaggaaacaacccttggttgtgaagattcacctataagtaagtgtgttggattaggactttcacgattttttaagtttgttatggccgaaatgagtgatgtttttgccaatcgggtaagtaat

SEQ ID NO: 94478 - DNA, 1076 bp, Cannabis sativa
tgcaaactttgtaggcttctttactcccatttaaaaaataaaatatcaaaccccataaaaacccaagcggcggtgacctccgtttggctcgttggcgatgctggacgtttgtcgtttgggaagaagatcggagctcggagtcgggccacatgaggaaaccagagggagagaaaagttttcacctccgattagctcatcctttttgatggcgtgtgagcgaaatggggtgcgaacgtttggggaaaccactgccgttcgggtttcaagtgttgcgcgcatcatgtggccaatttgaccaccgtagttcggagagaggccaggcaaaatcaccatgcaagggaaataggaaagatagatgaaagagatattgggtctttgggttttgtggggttgaggaagccatggccgccggagaaagaaggaaccaaccgtggtcactccagaccacacgcaacaaagggagagagatacgtgaggggaaaatgatgagatttattagggttaggattagcaatggtttgtttgaggaaaaagaaagaatgaggttaattagggtttcaacatatcccttttatacccccatttatttatttatttatttaattttcctttattgcttttaataaataaattaagagagaaagaaggaatcatattgcacgtgtccttcaatttttttttactttttaatttttttatttatttttattgaatctttagtgacaaaaaaggtgtgactctcaatacatttagagttaggatgtgtgtgtcattatatatatttatatattttttaaaataaataagtttttagtgaccccttagatatatagtgacacgcattatggaacatatatttgaaatttttactgtctagtaatgagtgtcactaaaaattgactaaaacatttagtgacccacactttttgtgtgtgtcactaaattttgtcactaaatgtgtaaattgtagtagtgactccactcctagagtaatcaccatcttatcagcacacaaaggcaagtcttgaaatctgatgtggtgtaatctaagagttttaaacacacccttattgact

SEQ ID NO: 94479 - DNA, 933 bp, Cannabis sativa
tacatttatgtaagcgatgcgatacatatatgtgagtgaatgtgaatatgtgtctcaaatacataaatttaattataagaaataaaatgaaagtgattagtttggttgtgaaaattttgaattgggtatgttaaataaaaatgtgatattggatgtttgaattttaaacagatacatgcagtatttttcccactgcagcctcggtcgtttgttattctttgccttctctagtctaatctttctggggtagtggcgtgttgttctagttattcgttttttggttggtgaatattcattagagcaaggtgtacggcaagaagtatgaaattttatattaaaactaattgcagttaaaacattttctcctcgagggagtcaatcttcacaaacacatgtttatcaccttcatgctgctaagacaatcccctcaagcccataattgttcgttgttgggttttttcatttattttttctttgtagagagtaattttgaagttattgtgagttctattcattttttctttctaagagtgtctccgagtggagttgtttttttagatcttttagatctttgttatttgtcttttcgaatttatgtcttcaacatgtaatgcaaaatggtaataccgcagcacatggtgagtatgatatgtactacagatggaaaacgaggcatcttggttgaaagaaatggcctgcttgtttaataatcaatgtattgtttgattttcagcaataaaattgattattatattaaaaaaaaaactaattgtagatgagtagagtagcctactacactctctttcactattaagttaggtctctttaaaataaaatagaaaaataaaaaaaattagagtgctcaaaattgattttttttaatgaagaatttacgctatatattgtttatttgccttttcctttcaatattgt

SEQ ID NO: 94480 - DNA, 710 bp, Cannabis sativa
ttttataggccaaacgccgcgttccaatgatgtcgagcacaaaacatgtaaaaacgtaaaatttcatatatggcataaataatacaacctgaattcaaataaatctccgtaaaatagtaaatcatgattaatattctagtttcttaattaagccttaattatctactaatttctataacagaactaagcggtctatgaatgtttacaaactcccctcaccaaaatctatgaagtgcaaatcctagataaatggaggtggttggggaaggtaacaagagaattaatgagccaacaagctcaaaaattagtgactaaaggttaaaatagaaagggttagctagaaaggcacaaaacgtctaagaatgccctaaatcatgtctaaggtggaatgtcaactaggattttacctcaaggatcacactaacttttatgcaagtgagggattattggaattattccttaaaagcaagtaattaattgataatatattacagaatatatgaaatacaattataagataaacaaatactttaattttagaagtataattaataaatatctaaaaattcccaattcatatggagaatgtacaattttataaggatgtacaagagaattaacattatatgatatgaataaaactagtcagtagtgtatttgtaacgccctaatgctaaggcacgctacattactttttcaattacagtgca

SEQ ID NO: 94481 - DNA, 560 bp, Cannabis sativa
ctaaatgtcaatgcagatatttttaccccctttagcttccctttttataaattgggttgaaaaaagggaagctaaagacttagattgtagtagtgaatctcttaattagtcaactttcgtgcctgaaaacacaaaccaagatatatttttttcaatttgtttttcataaatatatgtttgttatagttatcatcgctaaaaattttgaagaaatttaaatagtttacagtgctaaaaatatgtttgaaatattttaaatatgcgtgataatttggaataatatcagaaactctattttcggtactataaagtatttcgaatgtcttaaaagtttaattacaagaatgatattactataacaaatattgctattaaaaaattaaaaaaaaatatattctttcatgtgatttcatatgtggaaagtttactaagaaattatataaataggttaaaattagcattcccgatatactagaataaaatgaaaatggattcgtattaaattttcattaatatattaatgaaaaaaatagatcataatggtctaattgttaaaaata

SEQ ID NO: 94482 - DNA, 525 bp, Cannabis sativa
tgcaaagttcaaaaagtgtgagttttggctgtcacaagtaaccttcctaggacatattgtcgggaaagatgggattatggtagaaccagggaaaattgaagcagtgaagaattggcctagaccaaaaacagtaactgtagttcgaagttttctcggtttagcgagttactatcggcgttttgtggaaggtttttccaagattgcaatcccgttatctgaattaactagaaagaaccaccggtttatatggtcagataagtgtgagggaagtttctaagagctaaaacaacgactgatcacagctcctattttagcattgccgcctgatcaagagaaatttgtggtgtattgtgatgcatcaaggcagggtttgggctgtgtgttaatgcaggcagataaagtcatagcttatgattcacgacaattgaaaaattatgagcagcgctatccaactcatgacctggagctcgcagcagtggtgtttgccgtgaaaatttggctacactacttatatggtgagcggtg

SEQ ID NO: 94483 - DNA, 762 bp, Cannabis sativa
tactaaaaacttttcatattaaaacattagctactaaaaaaatattattttcctatgtaattactaactatttgccaaacaagatattagaaattcatatgtaattaccatcacatatctaaacacactttgcattttaaaaatagtgtaattactaaactgtcatagtaattacaaagttacttccaaactagggatgcacattttccccatggggatggggctcgcggggacccgcccctaatggggcggggataccctgtctaaatggggaacgaggcggggacgtgatcaaattttatccccgaatgttaaacggggtggggacggggatgacactccccgccccgacgcggacccgtttaatttattaatgattttttattaatattttatatatgtttttgtattttttttagtatattaatatcatttttacaatttttgaagttgtgtttttgtataataattactatattgaatattaaataatatgtaatattttatcttttatgtaatttaataattttatacatttaaatttttaaaatatactttatttttacaataggggatttcccgccccatccccgtcccattaggggatttcccaccccgtccccaatggagaataagcgggaatggggattaaaatcattaacggggatggagacggagagagcactccccgctaattctcgctcaatgtgcaaccctattccaaacaaacctaagtacaatttaataaaattattaattttc

SEQ ID NO: 94484 - DNA, 879 bp, Cannabis sativa
gtgacgtttaggggtgcaacatacaagtggttcaagaggttggcgcctgggtccatcacatcttgaaaatagttcactgatgaattccttgcccaacaccatgcgtccaaggactatactatcccaagaaccagcttggcaaatattaaacaattaaggagtggccaaaagcctcaggagctacatctagtgtttcgatgctaaagcagctagagtggggaggctgacgaaggatgaacacaaaatggccatcgtggcaggcgtctgtccaaagagtaagttgtggaacaacatgctgaagagagaactagaggacctggaggactattggaacttattttaccaagatctagatttactaatatgtatttttgattaacaccctaaatacgaattttctaaaacaataaaattaacacaggagagtttagaagaccttacattgatggcagcaaaataatatgactccttctactcagatctgtaactcttgtccatttatgtcgtagagtaataacaagatctgagcttggatctccttctctcctttggtttggttaaccaccgtcttctgcactatgattgagtacttgacttgctatgcgtgggcatggtactctatcactaaaggcttgaagatgatgaagaataacaagagggtcaaaatcactatagaaggagtttctcatctactagttgtctgacagagttagaaaactagatttggttagttgaaagagttgaatgagaatgagagcatcatgttccttttatagtatttcaactaaaatttaggatttaataatatgaattaaaaagaataaaataatgggcaaaaaccactttagtggccgaccacttaatgtgggcctcactagt

SEQ ID NO: 94485 - DNA, 956 bp, Cannabis sativa
gattattatttaatacaatataatatatcttgtttcaaatatttaaatatataatgttaataaatctataatatatattatatttttctggctacaattgttataataatattttttaaatattaaaatcaaatttatttgagtttacttgatttttactctctatttaatttcaattatttgaattatactaaatagtaccttttaaatatatgatatattaatatttaaatatgatggaaaagatgttacatctatataagcttaatataatatatgagtaatttattgaaggaaaaaaaaaacaaccttttaaatatatgatatattaatatttaaatatgatggaaaagttgttacatctgtataaactcaatatgatatatgagtaattcattgaaggagaaaaaataaatcaaaatattttgtaatttgtttgtattgttatatgtatctttaaaaagggtatatgcgtaatttaataagaagcccaaaatattgtggtttttatttaagttatagataaatagctagagttaaaatattagaaaaattaattaaaccgcagtcgcctggtggttcgtcttctcagagttatgccgctcctccactacatcaaccacaacctccttcgtagcaaaaatttcggtctttttcgcaacaacaattccaaaaatttcgtagcagcaacctcaatctttcctcaacagcaaaaacagtttggtacgcaattgggaaatcttatatagaactccatcagagtctcctccgctcggctcaaactttgctgattttggattatttgggagttcgtcgcaagagcaacaattttttttgactcctattctccatcaagctgagctggagaatctaacactgggtttatcatcaaatcaattatatgttccttctctgccacgaccatcgggaactcgtaatgataataatgcgaataa

SEQ ID NO: 94486 - DNA, 595 bp, Cannabis sativa
gtcaccgtcgatgtgaacccccagtcgccaccgttgttacaaactgcaaaccaactgatgcaaacatcgaacagctccaacagatctgagataaaaaaatgaaaagaaaaaaaataagaggaagaggatgagattgagatcgacaatcccagtagaagaataagagaaagagatcatcgatctcaaagaagaagaagcagaggaggaaaaaaaaagtacgtacctgggtttgctgttggtcagccttggcagcagctgggaacttcagagaaaaggctaggggtgtggcgccggccctagttccatttacacgaagagagtttttttttttttaagagaggaagagagagagttttttttgctggagaggaagagagagagtgaaaaagatatatgagtaggttttgttttatatgattataagaaaacaatgcatttcgttgccccattatataatctaaaattgatttttttttacttttttatttttctattcactgatgataatggctaaaagaatataaataataataataaagatatactgggcacattatcattggcgccccattcaagaaaaagcttcctttgacat

SEQ ID NO: 94487 - DNA, 529 bp, Cannabis sativa
  modified_base (359)..(366): a, c, t, g, unknown or other
  modified_base (491)..(503): a, c, t, g, unknown or other
ttggattggatcggttactttttgaggtcaaacaacatccaatccgatcggagaatgatgagaaagagtttgagtaacttgatttggtggatgcttgtaattgtttacttttatttttgagagaaattatttaaatatttttttatgtttcctataatttttttaagttcaactaacataatttttttttccttttattaaaaatctaaatttattttctttcatacatatatataatgttattataataggtaaatagcgacataaacccaatatttatttttagcggcataagtatccaatgtttgtaaaactgtaattttcctccagttttgtcagtacagactccgttttgaatnnnnnnnnagaacatttggaagtaactgatatcacatgtttctgtctaagaatttggaccttatatgtggtatctttaggaaaataatagagcttgtactgacaaaattagagaaaaattacagttttacaannnnnnnnnnnnnatgccgctaaaaataaacattgggat

SEQ ID NO: 94488 - DNA, 548 bp, Cannabis sativa
gccgaggcccaattaagatctgctatggcatcctcattgggccatgctgtctaatttgttgtggaacatgggcccattattgaccccacgcttgaaaacaacctctttgctgtgtactaccagaaaatgaaatattccgctacttcccaaccatgtataaaagggacacttaaaataacagtgatttctttacttttcttctatttaatattataatataattaattattactcatgtatataagtgatccaggtggttctagtgttcagaattttagttaaatttaggaaaaaatttaaatcaagaaaaaaaaataaatatagtgtcagataaaagaaaattcatctcatcgtattaaattaattaaagtttgaaatgccaaacaataccattaatatatattgtagcatgttagtcaagagaaccttgtttagttgtcacacaataccgaacccaaagaataacaaagtagttttcacatgatgcagtataaaattctagggaataatcctaggatcagctgccttgaaatatataaatatatata

SEQ ID NO: 94489 - DNA, 789 bp, Cannabis sativa
caagaaccaagcatatagagcttgttgtccactacatcagagatcaaattgcagaaaacaaactcgaaatctgctatattcccacacaagatcagacagcagatctctttactaaacctttgtcttctccatgttttcaatttttatgtaacaagctgaatttggagcactccaaatacaacttgacggggggtattagtgaagaaatgtatagttagttaatacagttatacagctggagttagttagttatgttacagctggagttagttactcaaactatttttcagttacaaggagctgtgttagttaacacagaagctcatcttcattctttattctcaattagctcctacaatctaactccgcttgaattgcaaggccctttacttacatggaataataatgtggcctcgccaagaaacatccaggagcgtattgattggggccttgttaaccatgcctggaccgaccttttcccagacgctcttctctctcaccttggtttttttggctcgaatcaccgagctcttgagattgttactgccaatgatacaatttctccgactaatcgctctcagaagcgctttctctttgaaaatgtttggctcgctgaaccaagttgggatacaaccttggagtcggcttggatcaatccctctggtccctccgaggaaatttattacctcgtagccatccaaaccgcctgtgccactcatcttaatgcctggaatcacaaaaaagatttctaattcaagacgcgtattaacaagattgagcgagaccttg

SEQ ID NO: 94490 - DNA, 2007 bp, Cannabis sativa
ttagggttataatatctgaatgggcgttacaaaacatttaggtagggttttataggaaaaagtgcgagtttgaaatgactaaaaaggacatgggatcgctaccttctacgaaatagttaaccgttttgtcaggtatgcaaaaaagggctaatagtttcttatagcagcttcttttcccaaaaaatgcttcaaaacatgttttatccaaccatttgacctcaaatcttttataacaccttaaatatgataaaacaaatgctcaaccaagaaaatcataaaaatgttgaaaactgacgatttacaatatacttttgggaaaatgccatgaaaactagaaccttaccaaaaataaattttatgcaacaaaattgaaaaattatttttccagtagtttgaggatctaaaatttgaggtgtacacacttacaaaatcaaaaaattttaaaaaatgagaaagtttggcgaaaaacactcttttagccctaaaatctataaaatcaatatggcgtaccaaaaatttattcaatgcatatttcagctataaaaaatctataggcatacaaaatgcacttaatttgacatgttcaaaaaaataaacacacatactagtcaaatatgccaaaaaatcacatgttcacttatttgaaaataagtcaaaagtttacaaaaaaattcacacaatgacctataatttagatttttcagtaagtatagttcatgtaggtcaagcatcaagaaattttctcataaatgcatataagtcatgtaaatatcatttttcaaatgaatatgcataaataagtgagcaaaccttatatttcatttaattaagttggtcatgtctagctctcatataatgaaactaaatatctcatcactaggaggcttggtaaatatattcgctagatggaattcagtgcttacaaagtctagcatagtatcacctatttggatatggtctctaaagaaaaggtaccttatgtcaatatgcttgcctctagaatgcaatattggattcttagagaggttaatgtcactaatattgtcacactttatgggtgtacactcaaaatcaatatcaaaatccttaagagtttgtttcatccaaagtattggtgcacaacaactacgtatatctatatattcgacttcggttgtggatggggctgccgagttttgtttcttgctaaagcatactctagggaatttcttagaagtggcatgtttcactagtactactcctatttgtcttacaaataacaaagtcggcatatgagtgacttattattttaaagttttagttcttggaataccaaagtcctaaatttattatgcctatcaagtatccaaagattctcttaacaataattaagtgggattttttgggacaagattggtacctagcacaagacatagatataatattctactcaaatccatcaaaaatgttaaaaaaaatccttaatagtttaagggtggaccatttcatggctagaaaattagtgaaatatatttgttcttgatcgtatatatgttctattatctcctaaaatagtaatagataccactaaattgcctgaatatagaatcacagtacctaatcatagtgggaggatttcaaggaattcctcctattattttttggatgacactagtgatgacttacattgatatgttcagaaaaagaaatttaagataaagttaagaaaaattaatctaaccattcacatggatagttataatttatcagaattattaggatgagatagaaaatccttctatgtctattcaaaagacttaagcacaatttttgatccttatgaattgttgtttacaacaaaatagttttatggtatctctagtgattacttattcttaagcaaatattctacagtaatgtgatactaggtgttggaagttattttaccaggatcttagacctactcacaagtatgttgatttaacaacctaaatgtgaacttctaaaacgatattaaattaaacacat

SEQ ID NO: 94491 - DNA, 1834 bp, Cannabis sativa
  modified_base (1197)..(1211): a, c, t, g, unknown or other
  modified_base (1428)..(1435): a, c, t, g, unknown or other
ctgaagttcatcttgtcactaagaactgcgattatcagatggagcgttatgtcttcagtcacaggaacgatgagatttacattataaaccatggaaagacatgggaaaagcttcagctcgctgctagggttattgtttctatgttcccagtgagatgtcccaaaacgatatgctttacaacgtatttaatacatgtatgcattgacccggtaaaagcagaccaatcacagctatgtgatttttaaataataacctcatttatttcacgtgaaacgtaatcaaatcctacaatttcaggggattcttgttgtatgatatcagttcgatttgtaattaactgccttcctatgtaactataaatatgagcaggatacactaaaaaatggacaaaaaaatccttcagagaaaaacccctagaattgtgttaacgccgattttcgttaaccaaatttgagcctcacgatgataatgcaacatagaaaaaatagaagctatagaaaaataatatacgaacacagggtttttttatgtggttttgcagttaaaattttgcatagtccacgattcaatcttattcaaatttttgagtatttttttagggcctctttcataagagttttttcatctccttttttgagattgtttgccagtatttataattgcatattagcaataaattacaaagttggccaaaatataattacagccattatccctaaaatcgtgggatctgattacgtatcataaaatgtaaatgcggtgtatgatttggaaaatcatataattgtgatctttccgcttttgctgggtcaagaatatcgtgtattaaatacgtctttaattgttgaagctagagatgtctcgacagaaacttgattgtagtgatcccaacggcgagctagaaccattcttctttccgatgtcgacaagatatgtcttacgtcgattgcaggtatatagaaatcttctgacttgtcagggttatgagcctcgctcctgttagttggagaaacctagagaaagcttccttgtagtgagatggtcatctcgcattcttattctttgaggtgatctgacttttacatttagtttgcttattgtaacctaaggtatgtgttacttttgtctggtgcctcgctattctcctttagcgacatatggtttcttgttattacactaagtgccagttcgtacatnnnnnnnnnnnnnnngaccttacagtcagcgggttacaaatatactctgatacttacgcaattaatgagttattcataaaaatatattgcaacgattcacattccattttccttgacatgtgtcctccagccgattttcgggtttaacaattgtcccttaaaaagttattttttagtaaaaagaactttttaaaaattacggagggcattttgccaaaatcctttcttggannnnnnnnctcctttgattctggcggttgtatggttttgaagatcattatgaatcgtctgttcatattctaaactattcttagtcgttaaatttctcaatctttggatttcttgtcactgaacttcatgtataaaagggcggctcaagcttgtcatttttcacaaaccttcttgctctttagtgaaatccctttttagaatggattacttccttcctgccaaaatgtctcttttgagttcagaagtttatccttccagattcataatacccagatgcaccaaccaatttccatttgttcctacagacttcacgtttcaaccgaagctgaaaacgatggattccagggctgaggagcttctaaccaatccaaactaggggaaccccgtagcctgccatggccgatcct

SEQ ID NO: 94492 - DNA, 614 bp, Cannabis sativa
tgatgtattgtaaattaatgaaatgtttacttgttgattacgatttcttgggagtctttgatttatttcaaaaattgtttgacatttgggattattctaaagtttggtgaattagaaatttagaattatatttgctgcccttttttgtcttgttataactttttgccttaatctgttactggttcaacatacagtaagaatatttaaagtttcataaaatggtttgattgaagatcaattagaaagttcacagacatattggtaattctactaagcatacatatatggttagtttaaagcttcatatgaagtggtagcagtgacgaggagtgaaagaaaacatattgttaagtatggtttttgattattctatgtgtggtttaatttactatatgtaataaagatttgttttttctttatttttatttttctccttggttgcccacattgtgattgtttaaatgccttatagaaatatatattcagaattatcagattccatatacatagttggttgtatgtgttaagttttatcttgattttatgcaggaaggttaagcattgctgattgtttttgaggtgagaacttgtgataatgtgcatacttgtgattt

SEQ ID NO: 94493 - DNA, 918 bp, Cannabis sativa
tttttagcctttgtttttgaagtgcttttgtctgtcagtatggatgagttcttaagctctgtgtctaatgctttagccctcccccctgatgagtccactgtcttcacttgtgaggttggttcttcgagttcctcctctgctcctataagccttatccttaagctccataccattaggccatataatcgaccctctctaatgaaaactctgtctagtatgtggtcatcgctctgtcgattccctatttttgtctctgagcatgccgatggtatgtttcttgtcacctttggctgtaaaggtgataagggtcgagtcttggatggtcagccctggcattttgctcagagcatcaccatatttgctgctactgatagcagttttccccttacccctgataacctacattatgttcccttttgggtgcaagtatatggtatcccttttatgtgtaagtctcatgatcttgctaggtttatagctatggaagtgggtgatcttatagaggttgacaaagacaccattaaggagggtactggttcctacatgcgtattcgcatcctccttgatgtcaatctgccattaaggaggggaatgaatatcaaattcatccgtatgggtagggaatttgttaaatggcttgattttaagtttgaaagatttcctgatttctattttttctgtggaaagcttgatcacactaagagatactgtgttgcttttcttcaaaagtgtgatgaactttactctgaacctctgtgcccttataccattctccttcgtggtaaggaaaaaatcactgacaagtctcaacctttccaataccctcatccccctaccataactatgatgaactatccacctgtaaacctcaacttacctccctaaaattttaatggtcaagccatcaactttccttct

SEQ ID NO: 94494 - DNA, 518 bp, Cannabis sativa
cccagaaactatgagaaaaattcccttttgggtccaagttcacaatatccctttctcccgaagatccatttctcttgccaaattgttgggccaaattgctggcaccctccttgaaattcatcagctctctttgcttgaaacttggggctcttacatgcgagtgcgtgtcatgtttgatgttaccaaacccttaccctgtggcataccaatagtgtttcctggcctagcttccccaacctggctcgaattgaaatatgaggatattcctgatcattgttactattgtggctgtctaggacactcttacccctcttgcactgagtacatgagagcctctgatgaatctacccaacccccacccctcccctatgaaaatgtcttgagaggaacaacacgcccaaaccatggcccttttggaatactccccaacccttttatccttaactcaccagccatagtgtccctcccaaatgcccctacacttaatccatccaccaccaatctaataccaatcaatc

SEQ ID NO: 94495 - DNA, 733 bp, Cannabis sativa
tagtatatggagtaatttccatatttttttacaattaaatacctatataaaaataatttacattaattttagaaaagaataatattaattttaattaaaaattaataaatgcctaatactatgactatttctaaatttaaaatatttgtatatatagaccactaattacaaaaacatttactattttcggtttgccatcaaagtgtttatataagtagttaacttcaactaataaaactatattaagagttattctttagttttatttaaatttagttgtgtaggttattatctatttatttatatttaaattatatttaaaagtgaagtgaatacattataaatttgtattatttggaaagaaaaaaatatactatatatctaatgtaaaagctcatcaaaataaatctttaaaatataaaagttattttgaacttttagttttttacaataattttatgaaaatattattaggaagtaaacttttttttttttgaaagaaataacaattttatttaatttagcattcttaatataagatatccagcatataggcgtagcgttagactcataaatgctacgatcacaatagactcgatttatcctagcaacagtttgtgttagtcggtttgatgactgttttacaaaacgaattttaacactatatatattgatagtaaaattggtaactaaaactattttttaaaaataaatacctacatataaaaaaaaa

SEQ ID NO: 94496 - DNA, 1154 bp, Cannabis sativa
attaaaaatatactaaacttaatctaaaattaatactaaaaataacataacaatattcttgacaagagtcttatcatccttccatatcccctttttttccatcaacacatgaatagagagagaaacttagagagagagagagagagagcaaggaagagacggagatcagctttgaagtgttcttcattctagttcttttcttctccttcaactcttattaaatattagattttcgttataatgtctagttcaaagtagttttcttttagttaagggttatttcaaaacccgagacaagaattcttagtttcattattgaatattaattctagtttccattatatcaaattacttcttttcttctatgtttaatgtcatgattattgttttaatcttgagtagacggctgctaaattagattttactttaatctaccgtcatcttaggattactattcacctaatagtctaggattctaagtgtttgtgataaattacaatttttaattgtgatgaagaatagaacctaggttaaatgaattatatgcttcattaatttgttgtctagattaatctatctccatgaatctcaaagctttatctaagttaaataaattgcatgcttcgtggatttactccttaggtaaaagagttaattattgagcgcttcgccttgattacatacaatagggagattggaataattgactgcttcagctttatctgcgaaattaatagtttgattggaaacttaacttacatttattaataggaattaagaatgattgttaagggtggcgaataacctttaactagtttctcatatcatagtctcactttaaatttgttttttttttttatttttattattgctattttattctaatcatcaaaaaccccctcttctaagtcttgttactaatttgtgaataactgaataaacatagtcctcgtgggattgacccttacttacaattatactaaaataattggaggtattggaattaaaacattagtaaatttgttgtggcttacgacacgcatcacattcctcccttctctgaccgatggaggtcccagtccctgtaaaccccaccccttactcttctcttcctctctcgtctgcccacactctaatagcaaaaggaaacatat

SEQ ID NO: 94497 - DNA, 604 bp, Cannabis sativa
aaataattataaaaatatcagaaattagtgctaatttcctttactagtccaaattactaaagcggtcattacacattactcaagaatcttgagtatataactcgacacataaatcaccttctttgtcaacttaggcactaggcctagggtcttccctgattgggcatagtttaaaaagaaagtcaagtctagcgtcattcgttgtatgatttcaagaatcaagatgtaaagaagttcctgaaaagccaatcctaccatgactggaggctcgggaagagccactatggccattggcagccaaggggcttgaaaataatacacacgtgtcaaatgacgcaaagacccaactaggtcttgtcttccatacacacaggaagagtggcgttaatccctcttgcatgtcgtcacatgcattcatgtgagaggacgaccagaccatggtagtcctttctggccgagagaaaggacctagggttcctttcttcaagacatgaccgaaggacctttggtcctagctatagtcaaagctcctccatgcatagtgacggtcaagggctgctgtatgatgtcatccagtggtcgaacaaccctagtgaatgagaac

SEQ ID NO: 94498 - DNA, 599 bp, Cannabis sativa
aacaagagatttgacggaatcgttataattttttttttctcctcaaattttgatgtaagtttgttatgtttccaatatcaatatatatatatatgtgaataaaaagatcacgagacatgtaatctctctttaatttttaattattactttattatgatttcctgtacgtgtctttttcacatatatatttttcatccaaacttaaatttagtttaagagttttcttttggggtgtttttaactgacaccgtttagaaaacaaaaaaattaaatttaaaaatatatgatagaatttaaattaaaaaaaaatgatacaaatttaaaatgaattaaatcttatatatattttttaaaaataaattgaaattaaagttattttttcattattattatttaaattaataatttttatcaatatttgctatagttattagacacaatatttgccatcaagttttatttaatagcaaacatattggccctcattaattgggttttagggtccgtttggtacgcaggactggattggattagacatgctaatttgtccaatccagtgtttgggcatgttacaagtctggataactaatccagttaac

SEQ ID NO: 94499 - DNA, 681 bp, Cannabis sativa
agctccattgaaaattaatgaacgaacaactcctgtcaagaaacgaagtttggattttgaaacttgttctcttgggataaagtcgtgcttgtccattaaaagagtaaaaaaagcagtcatagatttttcttgtggatcgagcctagtgtgtctgtggttaaagatgttaaggttaattgtgtttctgatggaacttcagataaatcgctgcgttgaaatgaagaaaaatgtgtgtgctaaggtcactactggcattatccaccatgttggcaaaccgatttcatcgagacaatcaattagacttacaaggtggaaggtcaaggctcgtttgatggacattgcgataccgaccaacgattttgtactgattgaggatgaggaatttgctgtcggtgtgccacatgctatcgttacccctgtggaggtggatggtccatcccctccacaggagccatgattggtgttgcttggaactgtagagagttggagaagacctctacagttttggaattgaaatccctgattcggtcatgctcacctgatttcattttcatagccaaatcaaaagtagaagctgttaatttggtacgtactctaaagaatttgtatttttataataacattgttattcatgttgtgggtaatgcgaggggtttaattcttgcttgaaatgtggatttt

SEQ ID NO: 94500 - DNA, 767 bp, Cannabis sativa
tcaaagaataggctgctaaggatgccgtcacgacatcgaaccctaatgttggtggtagtgtaagtaaggggaccgacagtgacaacccagaccacaagcagaaggctgaagctttcgaaatactagggaataatagaaagttttgtaggaacagaggtggccatcaaggtcgtgggtcttcatttaaaaacttacctgaagtgtcccaaatgtaaaaagcgccatcaaggtgagtgctgagccaaaaacatgtttctagtgcgatatggtgggccattttatcagagactgtccacaatctaagaaagaagaaccaaagaagaacaacaatcagaatctagggtatttgttctctatgactcaagctaacgctaatgctagtccatcagtggtgacaggtcagttgtctattaatggttgttcttattcagtattatttgattcgggagctacttattcttatgtatcaagtagagtgatagagatttttcataaactatttgatgtgtatgcttcggggtttgggatcctgttaccttttagagacctaattgtatcaacttggtggatttggtctttgtctttttggattgacagttatgaattaaacacgaacctaattgagttacaattatctgattttgatataatcctaggaatggatttcttgtccaagtatggggcaacgattaattgcaagcaaaagatggtagtgtttgaatctaatagtgccaacccagcagtgttttgttggaatttattttacc

SEQ ID NO: 94501 - DNA, 700 bp, Cannabis sativa
ataaatatatagtattacattattcatgatttttttattaagaaattcttaataaaatattagtggtgcaattattttataattctgtaatttgtataaagtttatatttaagtttaattattggtgataataatatctaattatatataatttaatgggattagaggattagttaccatatcctgttaagtagcttaaccattacactacaccaaagttaatattatgtttataaatatcatcttttattacaaatatatgttttaactaactaaattgtatatatattttttttctcgattttttttttagggaggtcactgcccggctcggttatatgtgggtccgcccttagcgtttggtaacatttttttaatcaatttttcgtttaaaaaaaaaattagaaaagtgaaaatattttccaaaattatgtttgatgtataaatctgtttttaatttcaattttttaataaagaatgtaaattttaaaaacaaaaaaaaaaatcaatttcaattttttttgaacaagttttttttcattaatattttgaattctgaccccaacttagattttgaaaactgaacccggccccagacttggacccacctccgatcccgacacggtttaaataaaatcaataaattaaaattaatgatatttaaaccgaataaacttttattttttgtttataaaattga

SEQ ID NO: 94502 - DNA, 692 bp, Cannabis sativa
aaacttcttgtttcctcgcaacacgttgatgaacgagatgcaattatctatggactttgagatgaaactactgagggctgtaatccttccaataacaatttgcatgtccttgtgccttttgggggatggcatgtcaataaaggctttaatcttctctgggtttgctacaattccttgagagctgatgatgaaacctaggaacttcctaaaggagacaccaaatgtacatttattgggactgagcttcatctcgtacctttggagaaccaagaaggcttcctcaaggtctacattgtgatctttagatgtcttagacttcatcagcgtgtcatcgacatagacctccatatttattcccaactaatttttgaacatcttgttaaccaaccactgatatgttgctctgacattactttgtagaaatacacacctttatttatttggaagctggtgtgttcttcactagctatatgcattttaatctgattgtatccggagtaagcatccatgaagctgagcaactggtacacagaggtggcgtccaccatctaatctatctgcaaaagagggaagcagactttagtataggctttgttgaggtttgtgaagtcaatgcacatcctccatatgggatacaaagcttcctagaggaagtcgttcgtgatcaacttatccacttctgctttcatcgc

SEQ ID NO: 94503 - DNA, 880 bp, Cannabis sativa
ttaaactcaaaaatagaaataatttattctttaaaaatagaaactatagtttgtgaaatgaaaacaactaacatttaacctcatacatgtgtgtgtgtgtgtgaaatggaaacaaatatcataaaaaatggaaacaactcacactaaaaatggaaaaaatttaacatcgaaatagaaataactagcacttaacctcatatatatgtgaaactgaaaccaatatcataagaaataaaaacacctcacattgaaaatagaaacaatttaacctcaaaaaatagaaacaatttaacctcgaaatggaagcaactagtattttacttcatatatacatatattatatggaaacaaatatcataatggaaactactcacattgaaaatagaaacaataaaatgcaaataatttaacctcaaaaaatgaaaataatttaactttgaaatggaaaatataagcatttaacctcatttatatatatatataaatatatttgtgaaatggaaacaaacatcatgaaaaataaaatcaaatcaaattaaaaataaaaataatttaacctttaaatgaaaataactagcatttaacctcttatatatatatctgtgaatgaaaaaaaaatatactaaaagatagaaacaactcacatttgaaatggaaacaaaaaatagaaataatataatgtcgaaatgaaaactataatttgtaaaataaaaataactagcatttaacctcgaaaaatagaaacaactcacatcaacaaatgaaaaaaatttaaacttaaaaaatagaaataactaacattgagaaatggaaacaatttaaactcaaaaaataaaaacaatttaacctcaaaaactagaaactatagtttgtaaaatgg

SEQ ID NO: 94504 - DNA, 1230 bp, Cannabis sativa
acatcaatcttccttctcttcactttcctcttcactctctctcttttccttttcttcctcatcggttcatctcaccacatcgattacccatcatcatcatcacctctgatctctcaaaaccattttattccctcggattcgatcaaagtctacgtatcagaactccccagatctctcaactacggcctcttagacaagtactggtccttcgattccgattccaggctaggtagcgatgcagatcgggagattcgatcttctctttcgcacaaaaccctagaaattcttccgtatcctgagaatccactggtcaaacagtacagcgcggagtactggatcttgggtgatctgtcgacacctttggaggaaagaacgacgtcgtttgctaagagggttttcgatgttgaagaagctgatgtcgttttcgtgccgtttttcgctactgtgagcgcggaaatgcagctgggaatggctaaaggagtgtttaggaagaagattgggaatgaggactatgaaaggcaaaggaaagtggtggatttggtgaagaagagtaaagcttggaagaggtccggtggtagagaccatgtctttgttctcactggtatgttgggtattaattttatactatttttttcgccaattttatttatatatatgcaaaattgagagttaaagtttcaatttttgtttgtgttggatgtgtcttcttccaattaattgtttgtttgtggatattcttttactttgttgctgaaagtatagccataatgatgggtagagacctagagctgaaaggtcagtttattcagcattgttacttgaattttgtggggtttttgattttttaccatgtcctacatagtacacctcgaaattgggatctgggtatgtttctttttcatcattttgtttgtttctcgatatttgaactagggataggctgagattatggttttgttgttccatgaagtttgtggtttgatttcaccttgggcctacatagcagtgtgtcctttcccagctttaattctcttcttttatgtaccagaagaagtcagaacttatctctgtgtctacttactttcccatattttattacaaggaaagttttcactttgcttcagtgtcatatcacctttacaatgttcatgggaataggaaatgaaactattatctcgggatcataaatgggagtttcataattgtaatctcagagtgtttatattcctt

SEQ ID NO: 94505 - DNA, 1640 bp, Cannabis sativa
tgttgcaattattgcttgaattctattgttgggtgcttttataggtatccttgaaagtttggtggagtttgggtttgatttgagtgagttatgaagattttggagatttttgctatgaaccggtcagccggttgtacaggtagaaccagttagctgattctataggtagaaccagttaactatttcactgggtaggatcccaaaaatctaatttaccagtttaggccattttcagcaccgtagtttttgtgtttcctcgatatttagggaagctttttgggtttgagtttaggcccccaaaaagggttttaacaagttttttacccatttatgtgaatgtgacatagggcatccattcagcacgtgtttttttgttcaggtcgaccagcacacttgaattcagaaatgagaaaagactagcataaaatgtatttatagatgaataagtgtatgtgtaatatatccgtgctattttagattcgtatgctaccaacactagtacggtagcggttctaagtgcatttttatagtgtatgatgttcaataagtacaataaagtgttaccaatagtagtacagataagtacgtagtgtatgtggtacaacacttagtggtacttgaggtatggtgcaaaccctaccaacactagtacagtatcggtacgtagttcatgttgtacagtggtcatgccttagttaaagaatgttcttactcatcttttaagcctttgtggataggtgtatggacactgagatacaagttgataatatattgtatgttacatgcttttcttactgagtctgttgactcacagatattactttcgtgtgtaggaaaaggaaaggctaaagctgaacaatactgattccagagctcacgggatgattgtaaatgtcgagattgtgcgacttaaagagtttgatctctggacaacatgggccttattttgtagtcgttgtgcgacatgtctgtaaatattattttgaatgtatatgtagttcaatgtcatatagtatatgtagttttaaataaatattgatttattgtcatatattgaaatccctacaggtttattaatattattaaatatcataatttttaaaaattctttcgatcaggaagagagaaatgcagttgaaatcaatataatgttttgaaaaatgttccttgctcaaagtatatataaatatagttcaaaatgataaatggcaactgcaaattaatattattcaaagttgagttagaatgagtccaaaattatctaaaatcgtaaataagaccaattgaattcataaataagtcctattctcatttagaattctaactgattaatcaaaaccaattgattgagtctctaacgcaacattatctcacgtagtgtgggggccatggacctatataatcaagctcccaataagtagttctaaaatttaatgattaaattacttatctttttaattcatcctgactccactatagattcagaattatactcttgattacataaaacgctcaattctccaagaatagatactgtataagttatacattatttcaatctaaatagtcaataatcctctatagatagtctacattgaatagggactaaattactcttttacccttcaatgtattttatc

SEQ ID NO: 94506 - DNA, 901 bp, Cannabis sativa
aaaaaaataccatgaacacatacagcatacactacaacacatcaagttagattatgccctcaagtccaatcaagaaacttcaaacaatataaatatatatatatatatatgtatctagaacagatcaattagtacactcacatgcaaggtaagtaaagcactcttgccttgtaagaccataaatgttaaaacattcaacacatgagttgggttgccaatgtcactaatgacaattttatcatcaactaccacaaaacggtaactaagaaatggaaattacatgtagtagtagtagtagtagtagtaatcataaaagtaagaggagatcgaggaatatagtataaataaataaaactacatgggattaaaagagagaagaaaaaagagggaaaacaatcaataaataaatacagatttgagcagtctatttcaacaaagcagattcatgtgtctttctctttccatctaacctgacttccattccaggtcagaagtaaagtaaaaaaagaaaaataacagggaaaacgggtatcaaacaaaatgcaataaatattcttcaaaggtgcaagtgactacaaaatattaaataaacgaattgtgtggtgttttctctagcagatcatcatcacatcacaaacacgtcattactgtatttgggctatctccattttcttttgtaattttgcagacaatctactgtgcacaaaatgcaatttgttcgtctttccccttccgggaagggaactattgaaacattcgcaggaagttatttgcatatgccattggcttcacatcagggtgtggctgtaaggagattaaaattactcaaaatattaatatttactttaactagaactgtttaggggagggaaaggtaaatggatgaataagcattaaatat

SEQ ID NO: 94507 - DNA, 603 bp, Cannabis sativa
aatatatatacatatattaatacacagtattgaattaaactaataatgtaaaaatattaaaatttataaaataatctcacttaagttattatgatagtcttatagtataaatttatagttattttgtagttggtcatagaaaaaaatatatttatgcttttatttagaaaaaatatgtataattataaaaagggataaaaaatttttaggttcttggactaagtgggttctagccacaatcctaatcgacctataaatttatggtcgcacgttataattcataatcatttctgttatcatataaagttattttgttaataaaaattccatgttatgtaattaatcttattgatttttagtagtgtaatgagaacgagcaggcacaaattatatatgtgtggcatttttaaaatgttgaataattaattttaccaataaaaaaatattctatctcacatttcaagcatgagataatatatattataattaatgcaggaaagaatatattcatgataaccaaattatcaacaaagatgggagattatatatagagggcttgatgatctgaacccagtgagatctccacaccaataatatatatat

SEQ ID NO: 94508 - DNA, 849 bp, Cannabis sativa
attgtaaattattccgaattttttaaaattttgtaggatatcttaaatagctataacgtatgaaaaaaacaatacaagttaattttctcctggatccaaataagccttttagctttctagtatttcttcaatattttacaacttgcccgatgaatgatgatgtaatgatttcattttcatccaaataagtcttcttctgcaacttgctctgtttgatatggtagtagctaagataaagataatgtgctcctaacaaaaaatcttccagcatagctacaccaaacacagaaccagcaatcaaatcaaacaaaaaatccaagtcatgatcactatgaagtactcaatttgaagtgttaagcaagttcatagttaagtaaaagagaaaactctatccacgtacgaatgtccccgagtcgggtctggtctattttagacatagttgcctatattaaactctaagcacctggggctagtgttttttgtgattatcaagtcctttcgtttcgtgtttagctgtgcctgatactggttttctagtttcaaagtccctcagtttcaagtcatggagaaagagccaacgggtatagtgaatgttccagtggatgtcattgacactgaaaatgagaaacttcttcaaagagacagtgctatggagatggaaatgctggagttgttcgaggatatcaccctggaagatgttgttcttaacaaagcctgtgttgggaaggtcatgggatgcaaagatatgccagcatcagttgttaagaaaatccttatgggaatctggaggaatgttggaagctggcggatgaagaaatgtggcgaaggagttctgggattcttctttga

SEQ ID NO: 94509 - DNA, 578 bp, Cannabis sativa
taaaatgaaatttttcactgaaatttaccaatcaccacgggccgcaaaaggcccgctgagattagtgccttattttttaaaatatttcgggttgagatttaccaatcacggcgggccaatatatgcacgttgcgatttctctcctaaaattttaaaacctcaataagcctgcaagcctgcccattcttccctctttcttcttcttccccaatttttttccctcttttctctaaacctccgaaaatggcagccattattgggtccgaaaattcctccaccaaatctagattttcttttactctatttcatcacaatcactctaagaagcaaatgtgagtttgaatgcaactattgatttattttataatattttttccctaatagtttttaattaatagtagtaatactatcttgtattttgattttttaggtttgaatttgtttgggtaagcttcatacaacataaagaaagcttgagaattgtttggagcttcacttgtgtgagttttgatttttttttttttctttcttttatgtttttgattgaaaatggcttttcattttgttttttttttttt

SEQ ID NO: 94510 - DNA, 739 bp, Cannabis sativa
tcaactagtttataaattaataagattgtaaacttaccaaaatagcacatacttaaacttagttaaaactatgaaaatttgttttaaaatattgtacttgtttccatcaaaaattaaaatattcataaatatataaattttaaatttgaaagaaaaaaattatttctgtatttttaccccaatctaatatttttcttctaatatttatgcatttttaatgaaatttatcataaatctatcaaaatttcgatagcataataattgtaatcggacgttcccgaaaatttcaaacatacaaaaaataagaaccaaaatgtacacaaaataacattaacaatacaaaaattatccacaagtccgaccgcaatacaattaattgcaaaacctacttacggatgaatatctaagatattcatttctttactcagaaggatttaaacatgagacaaagacgtttattagagttggtaaggactatgattaaaaattctttatcgtcctagaaaatcacatgtagtagcggatgccttgagtaggaaaggtccctgacagattttcagtaccaagatgatttctcctcagttagcatttgacatggttatggcagggattgagtttgtagttggcatatttagtaatttaacacttcagtctgatttgttggaaaggatcagaagtacccaaatagaagagcctgagttttttaagtctcaggaagaagttctagttggtcaagcta

SEQ ID NO: 94511 - DNA, 1162 bp, Cannabis sativa
  modified_base (1058)..(1061): a, c, t, g, unknown or other
cagattaacaccagcagccaaccgctgccaacatgccttagcaaaagagcaatcaaccaggctatggtagatgcagtttcttcgcacacagggcatacgatatcaatcggcacatgtctagagcggagtcttgtttttgtaggcaaacaattagtagcagctcgccataacaagtctttcacttttgggggaacacttttgggttattaccattttcaaaccatgtattgtgtaaaagttaatgattggatcctttattattaagttttattttgacaaaaaatcagtttaggatattatttaaaactattctggaaaatacaagatctaatttgtcatttatcaaaatagaatgtccaattaatatttttataaaacacaatgtctaaagtggtatttacctaaaataaaataaaataaaacaaaataaaaatgattgtttctacaatgcacgtgatgcaccttctacatgtttcaacctccagaagaatttttagtccaatttttttatattcgtgtacattatagttatttaagatatcttacaaaattttgagaaatttagaataatttacattataaaaagcagtattcaaacaatctatttcacaagcgtaaaaaataaaatacacactacaacacactttttgaaccctgtttttggtcggtgtgttaaatttttctgaattttttaaaattttgtaggatgtcttaaataactataacatatatgaccatgagaaaaaaaaaattgattaaaaagttatctcggataccaaaacatataagagtgcttcacatccataaatgtagattgtagaattttcctaaattagttactattaattttgaatataaaaatggtgcttctataatgtatctcgaaatgcaatgatccactctttacctatttcggcatggaaaaattttttttagtctattattttgttcatatttgtctgtacaaatagtccatttcacaggcgtagaaaataaaataatcaatatttgaaatcttatttttagcgtgtgaaattttaggagttttttcatttttnnnnttcaaaatagtttttttttttgttttttttttacatttttacgaaattttacatagaaattcctattgcaactagcgttgaaacctaaattgcaacaaaaa

SEQ ID NO: 94512 - DNA, 546 bp, Cannabis sativa
caactccaatcacacacataattcttaaatcatcatatatatcgcacattaatgacatatcacattattcataattttggaccccaaattcaattcaagccaaaatacccatttgtgactgtcgcggtaacttatcaaaaatcacatgcaataagaaaatataaacatactatataataatatggtctattagcacaattaatattaaaattatgattttatcctttataagtcaaaattataaaaatacccctaattcataaatggggtcttaaatacaataattcttaaataatttcaaataactaattatataataatataattactcaattatagttaatttattttaattagggatactaatctatttactaatcctatgatattacacgattgacgttgctcaagctcctagccgaagctcatggttattcaagtcctcccgtccgaactgtctacatcgttcaagccctctcatcgaaagctcctggttgttcatcaatttctggctatggtggttatggaggtaagtaaaaggaagag

SEQ ID NO: 94513 - DNA, 872 bp, Cannabis sativa
ccttcttgtcagtacttaataaatcagttaactagggaccaacagacatacaaagcgtgactttggggactattaccgccaatttttaaaattggagactaatctgcgtcagtcttaagtttttggggacttttgccgcaattatccctagtatacctacatgattgatctatagtaataatctcaattttgatagtgcaatactatcagctaagttttcctctctagttggactagacttgctcattaaaggctttagctaactaaaaaagtcaacatttctgcttcaattaggctttacacacatagatgctaagtctattaactattaatcaccaataatatagactaacacaatacaaaattatctaatgtactaatattttattaaactcaataaaaaataatgtaaatccaaataaaatatttaacaaagggatttaggaatttgaaagatgatcttagattaagtaggaatggcaaaagtaactctcttaatcaaaacatccttccctcaaacgataacagtaataatatgttaaattttcataatattaaggtctatatataaatttttggagggtaatttttttaatgtaattttagccgaagtaaagttactagacatagacaatagataattttcacaaaacataatttatttttatttaaaaatgatcattctttcagcaaaatttgaaaaacaccacctctcaacggtcatataatccgcgtcaataataataaattatccccatttgctcttatcgcttaatcacagccgtctattccagattgacaatgaatcaagaaaaagtcattcagtcctacggcccataatcatctcaggaaaactagtgaaatgagtgtag

SEQ ID NO: 94514 - DNA, 803 bp, Cannabis sativa
ataatagcaacatctagcatcataaaagttgagttccaccttgtaggcacatctaaaatccaaccccctttataatcaatcttttctctctcagcacgttcattaattttcccaatcgcgcaggagatgaccgaatgtacctcataatattatgaataacagcaattgaatcatgcaaatcttttaggccctcattcacaattaaattcactatgtgagcacaacacctaaaatgcataaaatcaccatcaagaacagaccctttccatgcattgactctcctcttaacaagactaacaactacatcattagccgatgcattgtctacagtcacaacaaacaccttctctattccctagctaagcaaacacgattcaatcatcttaccaatggtatctcctttatggtttggaatttgacaaaaacttatgatttgtttttacaaacaccaattactatcaatgtagtgtgctgttagacacatatgaggaatttgttgttaaacacactctttgacccatcttgatcaactcctcttttagttttaatttttcatccaaataaagttggtatatatctgtagcaactgtcattttgccaggaacaacaaatctaggttgcactactttcatgagatgtttaaaaccttcactttccacaactttaaatgcatgttcatttaacactaccatcttagctagtgcttttcgacaattctccttattaaaggccactgccaacaaatttccaccaccctcattactattttgaaaactcaataacttttgtttcttatcagatac

SEQ ID NO: 94515 - DNA, 1275 bp, Cannabis sativa
ttattttttttttttattattatttgaacatgatatcacttacgcttacgctttttttttttttttttttgcagtaataaataacctcattaaagataaaattataatgtcatacaaaaggatcttttcacaattttcaataataactctttactaaaatattttttctcaaaaaaataaaaataaaattgtataaagttaatattattataaactccttatgttgcaaaaattatcaagtgaactctaatatatttcgtataaattagaccctaaactcaatttttgataatttattttaagattactaacataaaaataatttctaacaagaatagatacaaaacttattttatataaatacatttatatgaaattattattaaattttattttaacaaaaaattaatttaaaatattattttatactattttaaaacataaaaaattcaaactattatttaacaaaataaaaaatccaaataatatcttttacaaaacataaaattcaaaataatatttacctagttatatattaataaaaactaccaataaataaaataaactataaattctaaacaattgtcatttatgttaaggagataactgcaagaaaaaataaaaataaaaaacctaaaaaggttcattttcacaataagtcaattcacaaataattactttctgatttgcatttgccatttacaggattatataccaaccactcttcaaaccaaacatgaaaaatgaaaatcaaataaataaaataaatcaaaaatcaaaaagcttgatataactacatgtatttggatgatcaatgatgatgatgtcaagtcaatgcaaaaacatgaatatgaattacattaatacaaacactataaaactaattttgcatacacaacttaaaatgggaaaattagcataatgaacaacatttcgtgaacgtttgaatataaggtggagaagaccttgcttgagctgttggcggctgctgcaaatgaagagggcgctaagtacagatcgatcgatataggcaccattttcaatcgaaaaacaaaaaggaaaaacaagtatcaaagcaccttttcaaccgagtttcttgtctgatcctttgaggttgagattaaaccatttctttttggctgatttgtctttcccatcatcttcccctggagactctgccttcgaatcttcaccggggaatctgccactcccattacttaacccactgccagctcctccaccattattcacaggccgagtaacagagaacgagga

SEQ ID NO: 94516 - DNA, 527 bp, Cannabis sativa
gtttacaattcaaatcccttaaaaatagcatagtgagttagatatttataaaagaccaaaataccgttagattctaaatatttttcagccattctgttgggcttttggagcccaattcacagcccacctatgatgtccacatgtaggagtgtcctacgggacctacaatgcaatccttggctggccgaccatgatgttgtcccagcctggccgggtaggccaggggtggctggccagctcctgagagtgagctggtctgtcacttgatccatgtttgaaagtcagggtcttcatttgctcgtatgatgacttggccttccttttagtgagctgcactgccacatggcataggttatgtccacgtaatcatgccacgtgatgaggacaaaaattgggataatttttgcccctaaggactttaccagcaatattgatgttgtcaggactgtagttacctttgttgaacaaaaagtggtgagtgtgttaaagcactttgtcttgactgtctgatcttattgcaatagaga

SEQ ID NO: 94517 - DNA, 828 bp, Cannabis sativa
gatcttaactttttttgccataaacaacctcagaaatagttttcgcttaactctacaagataatttgttaattaggaaactctgacaatttttgttttatattttacttcatgcatattttttatttacagattttacgctgctaaagttctagtagccttgaagtcctcacatgttggaatcatctacatagatttaaaacctaaaaacacactcatcaagtcagacaatcacattatgctcactgatttcgacctttgactttactcggacacaatcccatgcattgttgaaccacttgaatcatcacctgactcattctcgtttatttgattctccaactggctcttctattcgtgtcaagtcaagacacttaaggctgctaattggctctttgtgttcgagtcggtaacgatcaggtcgtcgtccactgttgatacacacgagtacattttacatgagatggctaaggataagtcccacgacaacaagatggactggtggacatatggtgtcttcatctacgaaataatttacgatcgtacactcttcgaggctaagtcccacaagacaattatctcaaacattatcaatatgccactagccttccccaccctgacgctatcatgcgagcctgagtttcacgggagggagttgaatactggatttcttaacaaacacctatttaagtgtctcagggccaaatgcagagttgctgaggttaagaaacacccattctttaaggatctcaatatagccttgacgaggtcttcgccgccgccaaggcgaaattgagtcccttgtagaagggatgcttcttgacctcag

SEQ ID NO: 94518 - DNA, 525 bp, Cannabis sativa
atcattgcaaactgttttggagctcggaccaatggtaccgttgtttggtgtatgcatgggcttgcagtgcattggggaagcttttggaggtacctaattagatacaatcaatcatatcgattgtctcattcatctaattgctttttttcttgggcttatgattttggtgttgcaggtaagattgtaagatctcctaatggtgtcatgcatggaaaaagctctcttgtttactatgatgagaaaggagaggaagggttgttctctggattatccaagtatggctttttttcttttcaataatatttatcaccattgttggtaacacttcattgtggggtagagattttctagattgcagtgttttattctattacacatgttgtctaaactcaagtaccattgcgctttgaagccatgctgttaaaagagcataaatggctatgtcggagaatttttttttttttttctttttcgataatctgctttagtttcatagtagttaatatgtttatattctttacagcc

SEQ ID NO: 94519 - DNA, 575 bp, Cannabis sativa
catcctcgtgagccaatcgatcggctaaggaccgtcgagcctgaactgggacatcagtaacaggggcaggggaggaatttgctggtgcgatgtgttctttggtacgagttcttgggttggcatttcgtcgagcagcaacggaagtatccaccattggtggtgcggaagttgtgtctggattagattccgtttgatgattctcggaagtgggcgggggaatgccgtcctgagaacgggtggtgggtctagccatgggaatggaagcttgaatttctgttgataccatatgagtgaaaagagatgaaagtgaagaggaaaacagagaaaatactctgtattgaactcttttattattattgaactaaattaatacaatttacatgagaaggactctttatatagagagctgagttagttgggaataactaactcagctgaaatataacagcaagagtcaagaattagttaaccgaattaggtaactgagtatgaaggagggtaatctcgtaataattacctccaaccaaacgccacctaaattctaacacaatataatgataattgttgtactaaaa

SEQ ID NO: 94520 - DNA, 804 bp, Cannabis sativa
tggctatcccgataatatgaaagcctacatcctattagatattgaatccaacaatattttccactcaagagatgttatcttctatgagtctatctatccttgcaccaaaaccagcaaccataatgtcaataatgacacgttttttcctgctgctaccaaacaagcagccactactttcgataatccctcaccaaatgacaacaatattgttgcccccaaaccaacaacccatacacctgctgattccataccagcaatcaacatacccactgatcctattgcatctccaccagcagccattattcctccaaaaactgctttagacacacaccaaaccatgtccaagacgggtagaaacatcaaaaaaccactatatctacaagactacatatgtgacaaggttgcccacacaaccaattatcccattataactatgtttcttaccatagattttctaatcttttcaggaatgatattctatttcttgccactcaatctttaattgaaccaaaatcctatgctaaagcttccaaatatgctgcttggttaaaggctatggatgctgaaacggatgccttagaaagaaatcacacatggattgttacaagtttaccacccaaccaacatgttattggaaacaagtgggtttacaagattaagtacaatcccgatggcttagtcaacagactcaaagctcgactggttgccaaaggttatacccaacaacaagatattgatttttttgacacttatgctcctgtagctaagttcaatacactcaaacttctttttgctcttgctgcc

SEQ ID NO: 94521 - DNA, 504 bp, Cannabis sativa
agtttttagaaaaataaaatttatcctaaatctgcttcaatataatagtataagtgccctttaaaaaaaattgtataaatgcacattgtcatttaatattccctctgttaataatctttgaacacttacgttaaaaaacatctccaatcaaaggtaagaaattgatgagcataattgtatttaaaagtatatgttaagagtgagactagtatagtaactcatatttactgaatgggaagggaagttggttcaataagcatgattagcagaactagaaaaggtagtagtacaccaaaaaagagtaaagaaatatagttctcttaatttttttggaactgattagtttactggtgctcatagagtcatatgttagacatgaaaaataaagcacatcaatatgtgtgtgttgtcttgaacacgtgggaaaagcccttggtaactaacaaccatataaaaaacttggaaattatgcatttgatgttcatcttcttaaagagttcttca

SEQ ID NO: 94522 - DNA, 723 bp, Cannabis sativa
ctactaacatgcttcctaacaagcttttcttaaatcatactactaaataaactactaagcaatgaaagcttactgcaccgtgcaacgagctgactgctgatgatgattgtacatgtcatgacgatctttggaagacaacatggcggctctgatacaaaattgtaacaacctaactattataggcgtattagagtaatttttaatgtacggtgcagctcgttgctaatcaacgagattattagaaatcgtgaataattaaaattttgcttaatcatttaaaacataatatattacaattataaaattctgggatcgcgtttacaaaatacaattacaaaaacttactattcctttacaaaatatttgtcgcaaaacgactaaacaacaaaagccctgatgtcccaaggattgtacgctccaggcccaaccaccccaaaatgtacaatcttcacctgctcgctctcacgactcctcaactttagcttttcccttacctacacatagcaatagcgctgtgagtcgatagactcagtaagaaaagcatgacatataacatacaaataaccctggttataacctggcgcccatacacccaatcataaccctaatccccgtcggtacttagtttagaacattcattcgacaatactatcgatcataatgtcagcctatactcgatacgctagtcatactctagccataatgatgtgacagcatcgatca

SEQ ID NO: 94523 - DNA, 570 bp, Cannabis sativa
aatcacggtaaaccttccactatagcaataataatgggtacacattattacactctcaagttttgacaaatacttgaggaatacacttaaaagtctcacactcactagtatggtaatctcaccatctctctacaaaatatttctcacaattttataggaaccctctttttcttctctcttagatttctctcactaagaggtattttcactatttctctctcaagagcatcactcttcactcttgaaataacttatgatggttgtgatgggatgaaaaaataaaagggatggagctctatttataggcctccttggatgtacgaacaagacacaaaaaatcaatcttgcattaaatgcatagttaaatatgtgcatattcctcaagttaaaaattattattataatttttcaggtagttgaaaaacacaactacatttttacatggttgaaaaacaactattacctatgtgattcgggtttctttttctgccatgtttcagttaacattgagctatactttaactctcaatcccaaatattttgttaatggtaataaaaacaagaaataaa

SEQ ID NO: 94524 - DNA, 601 bp, Cannabis sativa
  modified_base (27)..(54): a, c, t, g, unknown or other
aacaactatcaacacctaaacgatttnnnnnnnnnnnnnnnnnnnnnnnnnnnnataggtttcttccactagctaatacgaccagcgaattcttagagaaccttccgtgtccattcggacattgaaagcccctacaatggatacttttgcgtattcagatccatcctccatacttttgtgtccattccattgctccatataaaataaaggttgcatcaattgttatgcggatctcgtagctgataaagctagtaccttgcaaattgtgctcaatcatctatgctttgttatggtaagcatgaacaccttatgttgcgctcaacaactatcaacacctaaatgaaatttatatccaaaaaaaaatgggtgttaaggataggtttcttccacgagcaagtagggccagcgaattcttagagaaccttgcatgtccattcggacattgaaagaccctacagtgcataattttgcaaattctgatccgtcctccatacttccgcgtcccttccattgttccatataaccaagttgttgcatcaatggttatagtgatctcgtagccgatcaatctagtacctcgcatattgtgatcaattatcca

SEQ ID NO: 94525 - DNA, 1063 bp, Cannabis sativa
gaactttgacaagtaccaaattgtgctttccatgaactttgataagtaatcgtaccccctgaactttcatccatattattttgattaataaaattaagcaagtccttaaattcaataattatcttaataattcgaaaaaaaaaattaacagcataaaaagttcaagaaacataatttaatacataacctaatatatttaattacaattctcttgccaatataaagcaaaacataaaaccttaaaaatgaaaaataattctacagtgcatcctttctggtaaatctagtcttatttgttgtggtataggaagaattttatagttaatttttttttataattgtacgttatagttatttaggattatttataaatttttaaaaatttaaataatttacaaagtcataaataaaatttaattattttattgcatacatactattattttttctaatatacattaagtaaacgtttaaacctaattttctaaagtgtttttaattcatgaatagctacaatgtagtacagaaatttccaatattatttatttattttgtataaaaatggtgtcggtaattattggaacagtagtatatatatatagtatttattttatttttttatttttattttttgtaattaataaggttaataatatatctacgtacgtacgatgcacaaacaatggtgactgactgacaacacatgctgtagtgtcttacatgggaaataaaacaaaaaataaataaataaaataaaagagagaaattaagtttaattaattaatattatcagtactaaattaattaattatatgtgttagaaaatattccattcagatgaattaattgtcgtatttggtgacaaagagccaatacaatgctgtattttagtactatgtcttctgttcttgttcaaggtgtaataaatgcacaacttaaaaaaaattacatgtaggatttttaccaattcaccctacaccaacaagaacatttatatcagtatcaaaggtcaaaattgacctttcctagtctaatttaaccttagactaatacggcaccgttt

SEQ ID NO: 94526 - DNA, 598 bp, Cannabis sativa
ttgatgtgaataagatatcaattaattatttttccattaaaaaatttattttagaattttatacatatataaataataaaataattattttaatatgtgagaaacatatatttttctgtatcaaaaaaaggacgactaatattaaaagaaacttttttgtttcttttttatattttcaagctatattatgttattttattgtttaagatacattgaggttattttttttttaaatttaactcatatgatgttttagataaccaacaacaacaattccctaaataatttgatatttacatgttgagatgtaattaattctaaaaaatatagagtaacttgtgatgctggttgttgtattgaattttaagtactatgtgattgccatatatttattttagaaacatattaaaattgttacaaaataagctaagtgtataatagcttattacttagtaatgttggattaaaatctctaatgtgggctcatatgtatttatgtgtattgctatataaaatttgacccaaataaaatgatcattttagtttttgtgggtgtcataagctaaatgtgtagatatcctgagcgatatttctaatt

SEQ ID NO: 94527 - DNA, 650 bp, Cannabis sativa
ctaagatcctggtaaaataagttcgaacagtatgaccaagatgtttctgactatatatatacgactttatccaaggtgccagatttcgacttctctatccttggagcggaggcggctgagatggcggaagcttttcatgctatgtcgtctactcagacccaggggtgtggaggaaatattttccccgaggaggcagagactgcggatgctggggaagtcgctgatggacctgtcagcaaggtcgcagatggttctactgttctaatagctccaaccgcttaatttatcgaagtttttatttccttagttattaaacttctttagcggtacatgggtactcgcatttgtacttggacaattttcactttgctttctttctatttcgaacagcatataccccttcgaggatatttatttgtttaattttcgcggtacacgtgtactcgcatattctatagacttaatcataatctgtttgcattttaattacagcttggtgtaatatcttttaaaaaatgctcaggaaaaaaattgactaagtataaaatggtacaaaaatgtcgagaaatcgagaactcaataagaagtcaataatctttattaaaactagaaaccaatagtacaaaatggtaggttacagtctatacccc

SEQ ID NO: 94528 - DNA, 607 bp, Cannabis sativa
ataaataatttcatgattaaacataaacagctgctaatttccaaattaactaagcgggctttacattgggagatactaattttgttcttagcggatccgaaagggaaggctcctctggtcgtgatccttttattccattcatttatactctcattgagggtagaggtcttatcaacttgcccatccaaggggactttttgacttgggataaccatcggtctgggagacaccacgtgaaatctgctctggataagggccttgtgaatggggcctggattaagttatttccaaaggctcaactttattctgcccatacgagtaattcggaccatagacccctttgtctcttctctgcggacttggagcccaaattcaagagctgcttcgaatttgaggaaggatggactcgtgatgttcgaagcaatcttgtagtagcccatgcttggaattccgtcaatcacagttgggctccctctcgcctctttaagaaggttggtgccaccagggtggccctcctgaactggaatcgttcccaatttggaaagttggatgtaaccataaaagagcttgagcaaaaactcaactctcttcaaagcctcccggctgg

SEQ ID NO: 94529 - DNA, 697 bp, Cannabis sativa
ttaaaatttggttttctgggtttttcgaacccagtggccgtggccagatttatggtcgccgcggccataaaacctagcagagagccatctttattttgatcttgttgtggccgtaacttttcactcgggactatgttttggacgttctttatatcattggaaagctcgttccgaggtgtacatgattatctgtattttgaatgccatgattatgttttatgaaaggtgaattagggattaaccctatttgtgaaatctcggcttatctaactaggagtaccggcacctgattaggagcacccaggggtttggaatctgtgttattgcgcgacaacaagtaagatagtagtttacacgtagattatgcgtggtggcgcttatgttgaatatgatatatgtgagtaattgcaaccgggattaaggttattaccctaacatgagcggtttaatagcctagggttattaccctagagatattcgttgtgaaatactatgccatgtcaaatatatgtatatattgggattatgaattatgcgcttaagtcataattaaactagactcggtaagctagtaccttgagtttaatattaatccggtctagggttattaccctagaatattgtgaatacagtgaaaggatgagttagggttaacactcttagtaaatgttatctgagtatatagaaatgtattata

SEQ ID NO: 94530 - DNA, 530 bp, Cannabis sativa
ttctcaagaaggtttatttcttttcttttctattttgtttacttgggttgggctcttttttctagatctctacagtaaaattcatgtacaacaaaagaatattgttccattgatactaaggttttgctttgatataatatagtgaaacgtttcttgttataattttctaagatgtgttgtggtgtgtgtgtttggctgcagagaaaacggagagaaagatgttacattcaaagtgttgtattgtggaatatgccactctgatttgcatatgctcaagaatgaatggggaaattccacctatcctcttgtgcctgggtatgtgcatataattttatataattacattaacacttatattaaaaaaattccttcaaataatctgatttttgtagtatggtaagatatatactgactattccttttagtgtgttgggtattaatctctgaatgatttaatcgaaaaatgttttctttttcttaataactgtaggcacgagattgttggtgtagtgacagaggtgggaagcaaa

SEQ ID NO: 94531 - DNA, 3520 bp, Cannabis sativa
aggaagagccaaaagaatggtggagcagttatttagaagttctaggaagctaaaacaaagcacaagttaaattacacacaataactcattaaccataataattgttagttttttcctattttttaaattgtgcaaccagaatggtactataaatataatataataaaacctaacttctaaaaacaacttatagctttgttacttcattgttgggaatttggaattagttgcagtacgaaaaacagagttgagaaaaatggattacagttagagaatgaaagaaaaagaaagagagatgaaagaagataaagtttataattatagtaaaagcaaagcaaaacgaacttcacctttgtttgcaataaacaacttggtcgtaatatcagatccaagcaaagcgggccaaaaaattgttctaccttgataatcgaaccaaacaaagctattcttgggatgaagaataatccaatgtggacgagaaaaaaaaaactgttcaatgcctaatggagttaacgaattctgcatcagaaacggccgagtgttcaatttggctaacttcatcttcatcgactggagctggaagattaagatctaacaagctttccacgacctttcttgagctcttagtagcttgagtatgagtagtagtagtagtaattgtgtatgaacccgtaacatgtgatcttttatggccaccaagggcttgcccagatgagaaaactctgaaacaaacagggcattgatggactttcttctccgccattaacgtagcagtagtagcagtagtagcggcattttcttcaggctcattcaaagcagtggtagtagtagtaacaacatttgaagctttgatctttttgtgactggctctatgtccccctaaagcttgataagatcgaaacactttcttgcacgtctcacacttatatttacatcttgttctacttacattaacaatagtcctcgttgatttgagctcctctgattgatcactgtcatccatggatctttcttcttcttcttcttcttcttcttcatcttcttcctcctcctcctccaagtcttcttcgatgactcggggttggttctcttctctcctccatttgtccctcgacagcatcataagacaaaaagcaacatcttcttcagtagtagcatcagagacagaacttaccggttctggctcagcccaagactcggtcttattacttagcttgctaagctttatcttctttaaagaatcattctcttcttgatattgatgatggtggtcaattttatggtattgccgttgttcatgatgaggatggtggtggtggtggtggtgttggtggtgatggtggtgtctgtcaaacccacaagatttccgagctctcttggatcgtctccgagttgggtttttggaggactcggtctcgctctctcggtcttgaaggacaacagagccagcatctaccacagcaaacgaaaattcaggatctcccaatcgaatactcctctttggattctctctcagcccataatacacacccttttcatctatcagttccctttcctcaatttcttcttcttctgcttcatcatcctccgaagacgaagctgactcagcggagtcactgagttcaggcggtgtctgaggtggtcgaggcttctgcttctgctgctgctcatccccttcttgcttcggaggaattggaagattcaacatatgagacctcatatgaccccctaaagctctgccattagagaagcttctaaagcagagcttacacttatgcttctccattgaaacagagagcagaagcgcagctaaatggctatggccgaactttgtttgggaggttcttgagagctatatgttgtttttcttttgtttcgattgtttatgagagagagtggaaactaaaaaggagtaggtgacaagcattcctccaccaagagagagatatataccaaaagttacagcaaaaaaaaaaaaaaaattcctttctctgtttttattattttttatttttgttattgtaatttcgctgttaatatttcccatttattccataaaaaacggccagaaaaaaataaataaatttagattttaatttaattaaagcgtatgcatgaagggagaaaagagcgacatgtaacatgcgaaccttgcccgtttctgtatttattcccaccctctttcctacaatttaacccttttttttatttccaaaactacccttattgacctctaacatataacttcaaaagataaatcaaataaattattatgctaaaaatatataattagtcgtcgttttcttgtttttgtagcatacttcttttacttaataaaggtttttcttaaattaataattatagggaaagggtaattaagtaattaagtataaggttaccagaataaactggtggcttgcgtgtccaagtcaaggaaactgctaggtttgttgtaacgacggagcagaaataaaaacatatcgaagggtgtcctcaaaaaataaaaaagaaaaagaaaaaaaacgatccagcttaatttaaacatcacccagctgtgacctgtaatcaataacaaacacacaccattgtattgagagcaccacgcgcaccaaccaaatggacgtgtcaccaccagaccatatcataggtgggccctacattttcatccataaatcataaccgaaataaaaaagattgatattaattttgtgatttaaattgccttttaagccgatggacaattaatttaggggattgtataaatcatccagattttgttaccattaattaattaatcaggtagtttaattttttttttttggagggcgtaggggtttggcttggtattaatagttttccattgaatatggatctttagttgaagaaggttgataggaatgaagggtgggaaatgagtagggaagtaataacctcttttgcataggggaaggagttttctaagggtggggaaagtagatgccgtttcgttaggagttggtagacccagtcctatttcctacattttcatcctaagctaatcccatgtcggttttttaattaaaataataaattacattatatataaatattatatatatatatatatatacactagtagttcctgaactttgttatgaaagtcccatgtcatgtactactagtatatatcacttttttcatcaatgattattaatcaaaccccaataaacatctccaagtaaatgtcattgtcactatgctagcatcttgttcggcttcactaccctattataaatataaatatatatttttaggcaggctaagtatgaagaaagaaatggtctttagctttgtgtttatatgttagtgatacattaaatgtgatttatataatagaatgaatatataatttttggcaggctaagtagtatgaagaaagaaatttttttagttgcaaaattacttagagcatgtttggtattattttctgttttttgttttaaaaaattgtttttagaaataagaacaaaaaatagttttt

SEQ ID NO: 94532 - DNA, 538 bp, Cannabis sativa
  modified_base (410)..(420): a, c, t, g, unknown or other
atttataaaatcaaattatcttttcaacggtaccaagatcgctagaatcagatcattattcagagagatattcaggttttactgagacaactttgtcaagaaaggaagagttagttggtttatacaactaactttctgttattcaatacaacatacacaattcatttctttcattctatttctctattgtttacatggtaccagagctaattctttctctctttccttttctggttttttgctttcgtctgtcgtcttcaagctcaagccttcgttcatggctgtcaatggaggttcgtctcagacttctggttccaatctgcctagatccgcacctgttactttctctcattctctatctgttcgattggatgagcacaattacctcccctggcgccatcaagtgtttnnnnnnnnnnnaggtagcagacttcagcatcatcttgatcatacaagtgctcctccaaaattcctcaccaataaggatcggatcctcaatcgacattcccttgagtatgaaatctgggatcagcaagat

SEQ ID NO: 94533 - DNA, 893 bp, Cannabis sativa
tccaccaatttattaagggatgactttaagggtaatgatttttatttatttttattttaataatgaaaattttgtcttttaaaatatgtcttacaaaattataactatcacatagtatagtttaactcaaaatgataaattaatcaatttaagcactctgattatatttcctgattatatatatattttatttatttatttatcaaattattatatatattgtacctttaaattttttgttttgtaaaaacaaaaatatagcatcaatgtaaattttaagaataacattctattatctccaatgatatagcatttatatattttgtcatctagcttttcacctcatcaaaaattctctaaaatattaccattggagatgctcttataatttataacaagacaattttacaccgcgtgagagattgaacaacccaacaagcaatcagtttttgtggttttaccctttgtggtttttccatctagcccaaccaccaagttacaagtgatttggtcaataaaaaaaagttacaaatgatttggtacatgattttaaaaaataaattaaaagattagattgcccaatacagtaaagcttaagggatatttgaaataaaccaaagaacttaaaaaaaatatttagtattactatattttagtacacttaataaaagttatttctccactttgttctaaaaaaatgtaataaatttagcacatataaaaaattatattaaatttagttcaaaatatagccttgtatcaaaattttgtccatgtacacatactattatactaaactttacatacgttatttattatgttaattctatttttgacatatttaattgacaaaaatattttattattctttgtatatttcggctggcatatat

SEQ ID NO: 94534 - DNA, 2073 bp, Cannabis sativa
aaaaaactaataaaataataaaaaactcactaccaaactctccattaagcattaatacaaaaccgtatgtacgaatatatcacacattcttctcaataaaaactaataaggagtgtctacaaatttcataaaaagattgtacatgtagtttcacctcaaaaacaaacaggaaaagatcataaaccaattaaaaaaatataaacataaaattcagagaaataaacaaatcacaccaagctataacgagcttcgatcaaaattgataacagtggcaattgtttattccccaggggaacaaccttaggcttaaatctttattgataaaattcttagaactacaatagtgtagaaaactaaatgaggattttgctaggaaatcacaaaacaagatcgaattgtctagtttaatggtctatataatttatctagagagaattttatgattagtgatcaaagagatcaactagtacaatatatagactttgtccaagatatttggagatgccaactgtcataaccaaattcctttagccgtctaagataaagccaggctagctcactagctgaaaagaataaaactgcttttaactacttttaactaacaccacaaatctacctttagtacaagttagtgagtccaaaactagtttaatgattgttccattgagtccctaagggcgctgctgttacaaatgcttagcaatctcaggcaatgcctaagcttgctaatgagaactccttttagtgaacatgtctgtaaggttgtctttagtgttcactttgcttatttgaacctcatttctgccaatgatgtctcagatgaaatgtatcttgaggtcaatgtgttttgacctctcatgaaacatggggtatttcattaagtgcaaaatacactgtgatattgtccgagttaaagcaaacatctttagttaaacctttcacccgtatggtctctttaatggctttagtggctgccatatatatactctcgttgatcatagggctactaccttttgtagagtaattttcaactaatgcatccaccttgagctgttaaaacataagtgtatatgcatccagcgtagtcactgtttatgttatggattttctaacacgcaagtatatatatcatttacaagtaatagactctcaaaagtgaggtaaatcccacaaggactgtagttaattaccaaacaattaaatttccaattctatttggtgataataaaaataagaaaagatgttttaattctactaaaaagaaaataaataattaaggtgaaattaataatgattaaagtttaggggtaattaatttcaattgaatctattttacatggtttaacataattcaatttttaaaatccaattttcatgtaatagcgaatttactaaagaaacttatattcgggctagaacatataaatttcaaactatatgaaatttttttactctcatgacaaatttaaataaataggaggcattaagcataaaaatcttaaatgatacacaaaccatatagatgctctcgtcttatattgaaatttgtgtgtattttcacaatatttttccttagagagtgaatgtatcatagtggaaaatttggttgaagcttcatacttgattttcaatcataaacgaaatgtgttgagcatccaaaacttagaaattttcaccacttatatcctagaactccaaattccatgataattcatcatattcatctcatttaacactttttttctcatttttaattcacattatgaattttaccatttaaacctgaaacaaatagaaaacaagcgtaattttgtacaaaatgaatataatcaattgaaacacacttctaaaatactttataaaatgtacctaaaactcgcctatcagtatacataccctgtaacatcttcctttgactttttgtaagcataataggccaaaccagtgtttaagatcccttaaacatacctcattatcaacttttgagcttcctagtgttgttctccaagatcataaatgaacctgctagtaatgctcatgccatgaactagtgttggccttgtgcagaccatg

SEQ ID NO: 94535 - DNA, 968 bp, Cannabis sativa
  modified_base (898)..(912): a, c, t, g, unknown or other
aaatcaaagtgagacaaacatcaggtaatacaaacaaaaaaaaaggccagttataatactaaaacaagcaatgaaacacaaaacatatgaaaaacattaaaaaaaaaaagaaaccaattataaaaagaatataaaaactaaattacagaaaataaatatttaaaaactcatttcttaaagaaaaaaccagttataaatagtataaaaactaagttacagaaaataaatatttgaaaacccatttcttaaagaaaaaagccagttataatacaaaaacaagaatagaacataggaaagatactcaccttcttcttctttgcacgagattttttaaattctgctttcttagaatcatcaactggaatcttagaaccggtttcagaatcaccacataccgaaggaacattaacagacttatcgaaattaattttttaacaataacaaagacaagattaaaactggttataaaacagttataaaaaagacaagattaaaataaaagtattttttttaaaaaaaaaaaaagaacatgaattaacaccaaaaaatgaacaagaaataaacaagaaaaccagttatatacctaatcatttacattttctgacacactaattgcttaaggaacatcctgcagttgaatagcaggatcaacataaggaacaatatcctgaaaatattgatcagaacataaacaacacaagaacataaaaaacaactatgatactgaaaaaaaaataaagaacataaaaatttaaataaatacttttatttcttcaggcctctttctttttttaacatacacaatagtatcagctttcttatccatgatcttaaacctaaacaacacaaagtatacagagaaagataaataactatgttatcccaaaattggcactcnnnnnnnnnnnnnnnagaatggtgacacgtggcatcaacttagagcacctggtcggatgaacatgccgagc

SEQ ID NO: 94536 - DNA, 1099 bp, Cannabis sativa
acaaatatatgagagtatttttttatttattaatgttctttaaataaatatgatatgtccccaaaattatgttcgttatagaattttgcctcttaaattttgttctattgtaaaaattttcttggattataaaaattaatgcaaataacctcctacaactatattcgactcatctttttaaataatttgttgatataacactaacgagacattaagatggtataataaaacgtttagacaaaaaatacatacataaataatagacttatagtaaattataagaagttcataggctgagaagccctgcatatctctcaaaagtgcgatttcatggctcatattgtggtgaagtgggctataaaaaaagtgtaatagtgtcttaagaaggaacgaagtgctccctgaggtgctaaatacctatacggaatggatgagtacttgagtaattttaagggtgtctaagaggtctcctcgttttgttatctctagcatttgggctattatttttctctagttttctgcttgggatgtttcctggcttttgtcatttcctttccttgttgtattagatgttggctttttcttgtttttttatctactagtgctaaggtaccccctcttcataagaaaatatgtatacacatttttagagctattgtatatttaaagtcaataagttggattttttaagtagtttaaaattgttaaatagaccatcatactacaactatacttgtaactcatgtaaattattttaaaaaagtaagcaacatataattgaaggtggatatttacagcgatttgtatagtttgaaaagaattttcgcagcaacaaaaaaaatatcacaagaaaaaactttataagggtcatagttcaaggaaaaagtgttatttattcttttgagtgtcttttgtttaggttatttcaattactcttgtctctgtgacatggtcttgttaggaattataccttgaaaagcttataatagacattttgattataaatataagttgaataatttgatattgctatgcccatattttaagccataaatatggacatgatacattgaacaatttattattgttcttgcccatt

SEQ ID NO: 94537 - DNA, 566 bp, Cannabis sativa
aatggctaataaaatgtcactatcctatgggacaaatgaagtgttcctattgtagaattttcctatatcaatatatatatatctattctatataaagtgtacctaacgttatttttttagtttcctatattaactttaacagaatatgctattaattaacagaatattttttattaattttatattattttataaatattttaaataaaaataccctgaagtctaacaagatcccctattcttcagaaaaataacttcatagacaattcgagaagtaaaataaaaggagcattgctatcacgaactgaagaagacaaagtcggggaagaataagaattagcggcagaagacgaagacggcgacgacgatggagactgagtaagaccaaccttctctctaatgtccttgagcaatgttacccatttcatcgttctccctctcgatccgttgaatagactactcttctctcatccgactccaccaattgcccccaaaaacaaaatcttagccttctaaaactaatctagaatgatcgcatcacattttcaccacctcaacaaatcttt

SEQ ID NO: 94538 - DNA, 589 bp, Cannabis sativa
  modified_base (339)..(346): a, c, t, g, unknown or other
accagacgaaccatttgcgcttcataacgaactgtttaaagtagctaaacctagaaaccacaaaaagaaaaagatcgataatgattatgaaatatatctatggcctttacgtttatgtcacataggctatgacagattcaataggataaccaaagacagtccattgaaaaatgttgtcttaggtgaattacctgtatgcaagtcttgcctagaaggaaagatgaccaaacgttctttctctacaaagggagagcgtgctaaagaaccactaggcatagtaccttcagatctatgtggaccgctgagtgtcaaagctagaggtggttatgagtactttgnnnnnnnnattgacgattactctagatatgctcacatttaccttatgcataagaaatctaaaacgtttgaaaagtttcaggaatttcttgcactagctcaaaaccaattgggtgaaacgttaaagatctagcgaactaatagggatggagaatgtatggatatgtagttcaaagatcatttgattgaacttggcattgaatcccaattaactgcccctagcactccacagcaaaatggaggtgcagaaaga

SEQ ID NO: 94539 - DNA, 826 bp, Cannabis sativa
aaagatctactgtatctatatagtctttttgctgggttgtctaacatatagtcgaaggaatacaaactccttcatagaaaatactaacgattaaaagataaatacatctacccaataaatgtaaattacacatttaaccttgtcattgtactaatttactcaaaaaaataaaagacattaaaaagttatttatcttattaaaaattgtgtaccatccggttatcaaaaccggttttaccaagttaatatcactatagctacagtataattatttttgtctcatttgaagcatgtcaaacctcaaactcgggtgaggttttatataagttcctttttttttttaaatataactagaagtatttgacatcatttttagagaataatttaccgtataaatagttttagattttatacatttaaggcttgtttggtacgttgtattaagttttattgtattgtattgaattatatatcatatttttatataatactattttaaattttaatttatactaaaattaggtgtccataaaagtcagtaccgcatatagttttacataaaaatattatatgaaatacattcaatataatattatacaatacaatacgatataatatgacgtaccaaacgaacccttaaatactttatttttattttggaggcaaaaatatctaatgttacaattctcttacacctgttactaccacttatgttaattttagggaattttctaggatgattgaagttttattttagggaattttctagtggggtgtggtcttattcagaccgtgtgtaagctatcaataaggtgtatattgatta

SEQ ID NO: 94540 - DNA, 810 bp, Cannabis sativa
tttttcaaaagctagtgaaatctacaatcaagaggttagtaactttttttttatatttattttcttgagaatattgtcttataatgtataaatatttttgaagaaaaaaaattaccaagaattcaaagtatgctctaaggttgcggttttatccgatcttccttatcagaaatgatttcttgaaaaaaatatacaaaaaaaatcattgacatcttcttttatttagtttcacaagttttttgcttttaaaaaaaagtctattccatttaattttttttttcactttaatttttgtctagtgtgattgtttatactatcttttagttattgttttctttcttcattagagtttgatttgtctttttttagtactcttagaatttaaatcctttttaaaaaaaaaacatcataaaatacccaaaaaaaaaaatctaaaatttctttcataaaatacttagtatttagtacaacggtgtaatattttatatgacacaaaccaaggttgagaaataaggtttgtgttagtgtaccctctactttacctgggaacctcagttctgtctaggcaaggttgggactaagcggtaccatggcaacctttccaattggcctgggaacatttttgtgttaatcattgtaatattgcatttttgtgctatttactataacaaaaacaactttgttttatcaaaaataaacgactcatttttgcttagaaaggtctttggtcgaaaaggttagtgaacccttcacacttacctggtaaccccggggagttctagtaagttgtgaaggaccattctaaaaacc

SEQ ID NO: 94541 - DNA, 1936 bp, Cannabis sativa
aagtccagctcaatatgcttagtcgtagtgtgaagaacaagatttgcagttaggagaattgtgctcaaattgtcacaccagatgacaggagatcgaggaagctggacatgtatttctgtaaacagagaatgcatccaagtgatctcagaaacaacttgagctaaactcctatactcagcctttgtgcttgatctagatacagtatgttgcttcttgcactgccaagcaacaagattggagccaaagaaaatcaaaaactcagatgtggaccttcgatcatcaggatcactagcccaatctacatcacagaaggcagtgatgtcaagctcagtaagtctctgtagagataggccatgtgagatagttccactgagatatctcaggatgctcttaatagcattccaatgtgtgtgaagcagattggacatgaattgacataccttgtttacactgtaagatatttcaggtctagtgatagttaagtattgtagggcgccaacgatagacctgtaatgctgaggattttctacaggatccccttgaaacgcagacaattttaaaccactggtcataggtgtaggagcaggtttggcatcctgcatttgagctctacaaaggagatcctttatgtactttccttgagacaagtgaagccctgtttctgtgtgctcaacttcaatccaaagaaagtaatgtaatttcccaagattcttgagtgaaaacttgctgtctaatgctgaaattatggcatcaacttgtgaagcatcactaccagtgatgatgatatcatcgacatagactagcagcaaaatcatagagtgagaagaatgttgaatgaaaagactgtgatctgacttggaggaaacaaatccaaaagccagaagacattgatgaagcttatcgaactaggccctagggagcttgtttaaagccatagatggccttattaagcttgcaaactaagtgaggggcatcaggcaactcaaaaccaggaggttgagtcatatagacttcatcttgaagatcaccattcaagaaagcgttattggtgtccaattgttgtatgcaccatcctttggccagagctaaggacaaaacaattcttgttgtcacaggtttaaccacaggactaaaagtcttagtgaaatcaaatccaggttgctggtggaagctttttgcaaccaatctagctttgaatttggtgattgtaccatgtgcattcagtttaatcttatacacccacttgcacccaataggtgttcttccatctggtaatggcacataagtccaggtaacatttttccttagagctcccatctcatcagacatggcattattccatttgtcatcttgcagagccattttcacactagtgggttcttggtgagccagatacacttttggtttaaaaatccctgattttgcttttattttcattgaatgtctgtttgttacaggatcattggactgggacacaggctgaggaattggattagggagaggactagaagatggctcaactgaagtgatagagtcagatgacacaggagtgtgttgagtatgtgattcaggcaaggatgctataggcataggagcagacaagggaatttctggctcagctgtagtagcaggataatacacaggtgtttcagtggtggattgagtttgatctgtaggaaacagatattctgcagtgtacatagtacaaggcttaggaattgttggagatggcatagtttcttcttgacaagaaggtaaattggaggacttatctgtgttgacagcaaaaggaaatttggtttcatcgaaaattacatctcttgagatgtataatctccctaaggcatctagaaatttgtatcctttgtgatttaagctgtatcccacaaaggcgcaatgagaggatctaaagtctagtttgtgcattgtatgtcct

SEQ ID NO: 94542 - DNA, 574 bp, Cannabis sativa
cctctccgttatgtgccaagttagggttgaattttagggttgttttctacattaacataatccaataataatatttgaattattttttgaaaatatttttagatttgcagattcacccctaacaaaaataaagttatattacttcaaatcaattatgtacatccacaccttatagtttaataatctttacaaaccatacccttttaaaactcatacttcctattaaacttcactcaacaatctattaaatcatatgatatctttatctcctattttaaatatatgtagactatggtttttttagagagcgtctgcccactaaatgctctgaggcagttattttattgtgatttttttttcttttatcttcttgatcaaaccttcagtaaccgccatcttcctccctaaattcatcttttttcattgttctagtaatccttttctactatacatcacatgggttcatttgaatattccatgaattacatacttctccactttgatggagaaaattttagatttgtatcaacactccaaaaagtagaagtttttgaaaataaagatgtaccaccat

SEQ ID NO: 94543 - DNA, 718 bp, Cannabis sativa
tttacgttaataccgcttctattccctaaaatacccatttacatacaattaagagcattgttaaaaataaattcttaaaatctatagatctctattttattaataaaatttaatcatagtttaaatgctaccgtagacgtatacaaataatattctgccgaactacttaaatttgtgtattacatatagcaatatacacacatagtttcacttataattcatatatacatattataatataattacgtttatttatataatttatattaaatttataattatttattacgcattatattataagtttttatttatttatttcttatatatttataattaaatgtttagttagaactcttaaattcacgtttggcaggttaagactaagtaatattaaatatttattttgatatatatgatacataaaaacaactaattcttatatttgaatgatgaggtttcttttggttactttgaggttggatagctgatgttcgaactgttaattattatttttcttcaaataagtgttaaaatatgatataatttggatatccataaagactaactaggtagtatagctagttcaccatctaaagaaataattatcttacaataacatatacaacttaatagcatcattaatgatgaatatgattagggattaaagtgttaaaaaaaagtagtgtattattatatttagcatatttgaaaaaaa

SEQ ID NO: 94544 - DNA, 687 bp, Cannabis sativa
aataataataataattcattttgccttcttaataatcaaaggtagaaaaacacagtaattaattcccaaaactacaggaagatcaataaagataattattttgcttctttgctagggagagctcaataaagttgcttcatttaaagggagagctcaacaatggtggaccggaagttttgacaagacatgagcccatagacacagaaaatctggacatgggctagactcaacatgataccgtagatcgtgcaaggcttagatgtcaagcacaaatgaacaacacaacacaacagtgaacacatcaataagcactaacaaactgactcgaaagcttgaaaaacctaaattaagctccataatttgacattaatagtgataatacaatatttaattgtaaattatattttaagttaaaatgacaacaaaagtgataataattatttgttgtgacaacaaaataaaaaccattttaaattatttgtttataaggtttgtgagttacatattagttggtatacaaattctaataattatgatatatattaatataaatttatgtaaagtattggcacaacaaataaaattaactaaatgtattgtttgaacaaaaatgtacatttaatttagggattaacaaaaatattaagtagaagaatatgattttcattttctgaaaacttataaact

SEQ ID NO: 94545 - DNA, 593 bp, Cannabis sativa
atgtgccaaaacttttaattaaatcccagacttatcccgtcaaccgtcacgacctagagccttctccggatgcatttgaaacaaggccctacgaacttcctcttccaaaacaggtcgcaccaaattgtcattttaagaagctaaaatcaaaggttgaatatcatcaattaggttaccccactcggcatccaagatagtgaaaatatcctagaaatactcctgtactaactaaggaagaccatcatcccatgtaaactaagcgccactctcatcttgtaacttagaaatattatttgtccttttacgagcactcgtcaccgcatgaaaatattaactatttttatcaccctcttttaattaaaactgcttcgctctttgcttccaaaatatttcattttgcatcaaaatctcataaaacttatgttgctcttcctcatacaactttgtgaaacaacatcagttttttgacgaaattgtctcaaccgtctcttgcactgcaacaacatctccttaaaataatcggtaacactgttcccccaatccctcagaatcactccacacctagaaattttctcaaaaagatttgctcccaa

SEQ ID NO: 94546 - DNA, 779 bp, Cannabis sativa
ataaccatatgagggcctttaaatattcaatgcccggattggacatgaacgaatgcttagagcatgggctatatatgtcctgcctgatactcaccatcacatacattaagcatcttaaaattaccatatagtacatctttcatttcctctttctctttcgcactgttcagacattgttccttcaacaaaaaaaataaataaatgttcgcctatcagaacggatgtactctttgcatcttccacgttgaacttctgaataaatttcttaatgtacccagactgctttaacttgattttcccttccatatgtttcttgaaacttcaatactaagtatctttagaactggtccaaaatccttcatctcaaacactctcttgatcttggctttgatacttttgatcactgattggtctttgctcattatgagcatgtcatccacataaggcaataagaacacaactgtatatttccatagattcttgaaatataaataggatcatatgttgatcgtttgaacctgagttgttgcatataagtatcaaatcttttgttccattatttgggatctgtttcaaaccatataaggacctgttgagcttgcaaactaactcctttctattacacccggaacccaggtggttgcttcatgatctcttcatccaagaatccattcagaatagcagtcttaacatcaagttgttgaactttaaactccatttaagctaccaagaacaacatcaatcttattgtcttgtattttaccacaagtgagaagatt

SEQ ID NO: 94547 - DNA, 606 bp, Cannabis sativa
aaataagtcaatacatttcagaaaaatgaattgaatagtcttataataaatagtgtcatgatcaatacaataataattttttttttacactttaaaataattttcttttaccgttttacgaaaatttatataaaaattcacataacaataagcaacctaaataataacccacataaaaattatgaaaacaactcggaaatatatatattttttaaaatagtatataagataactattccccaaatagtaatgggaaaataattaattaattataataataataaaaattgtaaacaaaaaaaaatgaaaattatgtttacctaatatcacaaaaaaattttcaatatggaaaagaaagtaaggaatattcttgaaaataaatcacggattttccctatatataaaagccaaatgtggcaactttctatacattcattcatgcattatgtatttgtataaatatatatatacatatttatatttatatttatttatataattaaataatagtcaaatcttataattatcatgtatatgtttctaaaaaactagctagagccattgtgaaaaaaaaatgtcccttcaccataagtactgataaaaaca

SEQ ID NO: 94548 - DNA, 604 bp, Cannabis sativa
tgttattatttagtataattctaaaagtagtggttgaaatcaaatggaaactaaaaatcaataaaatttaattagttaagaatgaaatttattttaataagaaattattatagctataatagacaaatatatatttatatatatatatatactacattataagtttactaataatatttaaatatttgctatcaaaacaaataatatttgaatatttgacaaaataatatattgtattaaataatcttacaaaaaaatccaaaaaaattaagagagagttatgtttattctccataaaaatataacatatacattatacttttcaaaatatataccaaaaattatttagttatgtcttaagttttgtaaaaaaatcttctcataaaatcactaaatattatgatagtatttgataagaataggaatgagaatagtattgacatttcaattctttaagatgtaactaaataaaataatagaataaaaattgctttctttcctttatatttcattacctgtaattaaatgccacctaaatataaatataatttaacataatatatcatccatatactaatacgtgtgaagcacgtggtacttcact

SEQ ID NO: 94549 - DNA, 659 bp, Cannabis sativa
atttttgggtttgtttaattagatttggactcgggatggtggatgtgatgcatcataaatttgtattttattttattgtcttcggtgcaaaatcgacacaacttgtacaaagatcacattgtgttagttgagaatcaacacaagcaatcattgagtttcgttagatatcaatcgacacatcaattattgcgatcgacacattagttattgcaaccgacacaatatatgtgcgcatgtgtacaatatactgacgctaatagagcttcttgtagtagtggttcattgttactcttaggcaagtagtgtacaacacccttattcttatggaatccaacataagtgagtggcatcaatggaaaggatcggccagtagtgattccaattaatgataaataaataaataaataaataaataaaatagctgaggtaggtcgtcctcaacccaattaaatatgagccagatgaggcgggaaaatcgtagacccaaaaatcttcctagttgattcaggttagtgccttgttatatcggggctgcgacaaatcctagtgttattctaatttttttccacttaacgtgacatgtccacatgtatcttaaaattctcttaactgccatccaatgttgttgcagggatgcttgcataaattgacataatttg

SEQ ID NO: 94550 - DNA, 598 bp, Cannabis sativa
agtggaggaatgatccccttccaagttccaatgctcaccaagagcaattatgccaattggagtattaagatgaaggccctactaatcgctcaagatgtgttggatattgttgagaaaagtcataaggagcaagacaatgttgctctttcccaaactcaatgaaaggccttaagggattcaagaaggagggacaagaaagctctctacctcatctatcaagaggtagatgaagatgcgttcgagaagatgctaaatgcaactacgactaaagaagcgtcggagaagcttcaaacttgtaacaaaggagtggagaaagtgaaaaagattcatcttcaagctcttagaggtgactttggaactttatttatggaagatactaaattaatctttgattatttttctaaagcattatcaattttcaatcagttaagaagaaatggcaaagaaattagtgaaataaaggttataaaaaagttcttagtactatgcaatgaacctttgagtacattgatacaatcattgaagagaataaagatttagaattcatgactgttgagcaactcatgagttcttgacaagcgtatgaagagaaacaaaa

SEQ ID NO: 94551 - DNA, 581 bp, Cannabis sativa
ggagaatattccaaccaagatggaaataacttaaaccaagatggctgaaaagaacgtgaatgagcttcttctgatttttgatagctagagagtataatctgatacggaccagccttaatgtaagctctacgaacttcgtcacgcttctcaggtggatactcccatattggcgggcgtattcctggatcacgctctaatgaattaatatcaaacccttctttaatgtcaagtcttaaagattttgttgggcgattttttgaattgttatgatctacatccactgatggatttgacgagacttcagatgttgaaacttcaacattctttcttttaaagaatgtatcaattgtggttgactttttcatctacaattaaaaaaaaaactatatattaatcaaattatcaataaaatcatatctataataattaataaacaaaactatattaataaaaaaagcttataacatgtgtatatgtatgtatatatttttatattaatttatcattaagtatcactccaaacaaaaaaaaaattattagtagaattattttttcttttcaatgtaaggcacctacttaat

SEQ ID NO: 94552 - DNA, 719 bp, Cannabis sativa
tattctcacttttcttttgtaatcctgtcatgacggagccaaaccaaaatttagcaaagggccatgtaaaattatataaaaaaaataatattttattatttttaattatatttaaatataattttaaaaagttcttaaaaaattggggggtaatgacactctccgacaccctagcttcgtcagtgctaccattattcatgttagccatttttttgagtacgtaagtacgtagtaggggtaatcaggatccaatccaacccgattgcaaaaaattagatattcaattaaaattagattgtgttagatgttaaaagttgaattctaattgaattagatcagttatttattgaatgtcaatctcaaaattaaattaaaaattgatctatctaattatgccatttagtgggcgacaaataattactttagtaggcggccacttaatgggcctcactagttataattatatcattttatttcaaccatttatcttttctttcaataatgccatattttccaatttcaatcctataaatctcaaaagtatttatttaataattataattaattatcaaataaaattgccattatcttatttattattagaccttataaagtctcttaattaacaaataaaccttaaaatctcttttcttcacaattaaactcttgcttagtgaaaattcataaatattatatcaactagtgtattttagaactat

SEQ ID NO: 94553 - DNA, 567 bp, Cannabis sativa
tagtaacactctaggagacaacacatttataagtgttgcctttttttttttttagtttaaaaaaagtgttactaatggtgttttttctagtagtatatatactcatattatattccttaaaatatatcacttttgtgaatgggttgcctaatatactctcatcttccacttaagtctagcacaatattttcattaacttaaagggtatgatagggacatcatccataaaagtgggtatatctcaaaaaatatagaaataaagttaaaaattaaaacatgtaaagtaaagtgggtatacaatgtaacttcctctactttctataggtgacaccttatgattagttagttatttcttaaaaactatttttttttaagttatatgagatccaatacttaattacaccaataacggtatgacaacgagaaaggtattaaacaccaatggtaccttttatcaatttttattaagaaatttgacttagcatgcttaaatgtttttttttttttttgagtgtagcgtaatggtattttacaatctgttaatagcttaatagtttcaaggtccta

SEQ ID NO: 94554 - DNA, 542 bp, Cannabis sativa
tagtagctgcagaaggggggttacgccgtcagactttaatacttatggcagttttaatatgccttctcccatgcgatattaaatgcgaggtgactgttcagataagatttgatacctcccagagatgtctcattgtagtcttgctctccgggagtatatggaacttacatgccttctccaggaggcatgttaaatgttgatccctttgattaaagagacttagtcgaattatcccaaagtcttgcctcttcggtccacgtgtctcaatcctgttggtccacgtattttgaataaaatcaggggcaacaataataaaacatgtaatagtctataatttgcagtatcatatatatctttccactcttaaatcctcatcatcaagagatgggttccaaacgttttaacttcaaattcagaagattatacaattttaatgattttattgactccaatatgcttctaccaatctttaattattcattgtttcattcttatgattttttttttttttgacgtggtattttcctgaattaattaggact

SEQ ID NO: 94555 - DNA, 593 bp, Cannabis sativa
aatagttaaatatttaataaaattaattattacattatatatgtgagattcgatgcttaacactagtagtataataatgtaataaattagggtgttaggtagcatgtgtactttttagtaatatttttctatttttatttttttgagaaggaatatttttctattttgatttaattaataatgaatataaaaaatactaagtaggatttttatcttttaaactttgacatataataaactatgttccttgaactttttttgcccttaaaaattctcataattgagattgttagatttaaggatttttgttcaattttattcaattttactaatttagttatttatgtactaaatcatgctcccatattttgatatctaccaaatcatgttcttcgaactttgcaaattatactttttgaactttcattcaagttagacattctttactaaaattgaacaaaagtccttaaattcaataatctcaataatttaaagagaatttttaacgatcttaaaagtttaacgtacataatttaaacatgttaaagttcaaccaataaaatactaattattgataataagtactcacatcc

SEQ ID NO: 94556 - DNA, 837 bp, Cannabis sativa
tttggattagtaatctagattctggtaaaacataatccaacagaaagcgtgtacatggatggatgcttgtgcacgatttttgaattttctctaacaacagatttatcttgaagaattgtattttttattaaaagaaaatacatcacgaaatagttctttttaggcaaatttcatttgatattacatgtatatatatatatatatcagcgagaataataatgcaaagtttttattaataatgaattttaaattgcacattaaaactacgtacacaaagattaatttttattttcttagggcgggaatgttattttatgcagtggcggacctagatttcaaagtggggggcaaaattttttttggtaagtgaggggggcaaaaaagtaaaattaaaaagaaaaaaaataaatttaatggaattaaaacctttgtcctctaacttatagactaagtagcttagccattacaccaaaattaatattattcttataaatataatattttattacaaatatatgttataactaattaaattggatatatattttttttttcggattcaatactaataatttatgtcataacaaggtgtttttatatattattaattagttttattgctaaatataaatatatatatatatcagtaattttttttttgaaactaattaaatacatatcaatttgaatgtaaattattattaatttaaaattctatgacagccatattgccacacattttaaataaaatattatactaaatacatatatcatccaaaacatttctattttcttagagagtatgattacaaatgcaatgctataaaatcatatagc

SEQ ID NO: 94557 - DNA, 789 bp, Cannabis sativa
tccaaatccattggatgtgatccaatgaacacccctactgaccaatatttaactaattttgtaagtttattaatttaattttttattactttttaaaaaattgtcattatattagttttcttcattatattttttggttgttgtttagttgttgatattttttttgttttttgaatttttaacatgtgtaattttttttattgtttagcatttgaatatcattttttactatttacgaaaaaaggaaagtatgcaaaggaaccgaaggttaagttcacaaccactgattgcttattcaacaaaatcattaatgcattgtatgaaaaatttatggcaaagaaaaaagatcattctttgataactgctcagcatgccattgctaattatattagaggtaaaaaatgttttgtctggtgcaccttggcatttgtgcgatcatgttttgtttatcatccatatggagtctgaatcacattggattcttggtcgcttgaatattgagaaaaggtgtatgtacatgtacaactctttgtcgactgctatgaaagatagtgccactatcaaagcttgttagccatttttgttgttgttgcaccacttttttgctttgtttgatgagttcaaaaaggataacaaaccgatttctttaaaccctttcgatgttgttaaggttgatggattacctcaacaaacgtcgaagtaagttgtttatagtttatattttcaagtgttgttttgtttatttatagatattttctttttttttttttgtttttctgatgttgtttt

SEQ ID NO: 94558 - DNA, 837 bp, Cannabis sativa
tgattttttgcgtgttcgggtgcgagtcaatattgatcaaccgatcaagaggagaatgaaactaaaaaaggttggtggtgactggttttgggcgccatttaaatacgaatttttcccaagtttctgttatatctgtggcattattggccacactgaaaatttttgtcacaaactgttcgacacaccggaggaagccattgtcaagccgtatggtgaatggttgagggctcaaactcgtcggaaaaattatctgcttcactctcaatatttgcgcactggtacggaggccgatgtgcaaacttttgggccacgagaaccggctgctgagttcaaagccgatgaacaccctgtgccgtccatggatgcgatgaacagagggaaggagaagctgccgtccattgatgcgattaccagaggcaaagagaagttgccttttttaattgatggagagaatcacgacattgtacaacccaaaccgatttctcctaattttatgggaggtaatcaatctccactatttcctcattcttttcaaaataattcatttattgagaattttggccagaatgctttgattgtaccaaagaccactaatttattattggccaatggggaaatttcggaccataaaaggaggaggtcaaatgaggtagtttttatggaaagtgggcctaatgatgtggaaataatagatgggccgaatgatgctatggaggctgatttaattatgtcttctaataatgctactctttcaaaaaatgggcttttggtgggttctggtgtccaggcccaccacacattatgagtgtccttagttggaattgccgtgggcttggg

SEQ ID NO: 94559 - DNA, 1222 bp, Cannabis sativa
gaaacatgttttaaagaagtttaatagggaagaggttggtgatgtagaaaagctctataattggtgcaaagctgatttatagatcctaataacagccacttgcttcaggaagagaataggctaggccatgagtatgctgctgctttgaaacaatactcttgtttccatcgacaacaaagtaaagtttcttggatgcagaatggggaagataacaccaagtatttccattctttaatgaagaaaaggaaaatggaaaatcggattacaacgtttgagtcacgtggtaaaattgttgatgactattctgaagtagttgaacatcttcttaaccatttcaggaactttatgggcaagaaaagttcagctactaggaggttgaatcaggattgcatccagcaagggccaactcttactttagagaaacaagccaaactcatcagatccttcactgaaaaagatgtcaagaaggctatgtttggaatccattccaccaagagccctggcttagattgatttggttcggggttttttaagagcctctggaaagagattggggcggatgtttctaaggccattctcaacttctttgaagagggttcaatgccgatatctttgaaggatgctgtcattaccctaatcccgaagactcaagatcataaggatgccagtgattatcgtccgatagcctgctgcaacactgtgtataaatgcatttcgaagatgatttgctctagactggaagaagttcttccttgtttggtgagtgacaaccggggggcctttgttaaaaatagactccttgctcataacatcatgatcttccaagacctcctcaaaggttacactcgaagaaatgtttctgcaagatgtataatgaagattgatttgagcaaggcttgtgacacggtggactggcactttgtggaagacattttaaatagcctttgttttccttcgagatttattcattgcttgcttgtctacttgagaggtatgaattgcttccttttacttaatggtcggattcaaggttcatttaaaggagaaaaaggtcttcgccaaggagaccccttatctcctctgctgtttgtgttgataatggaatacctatcgaggcttttatctcaggtttcgaacaaaaaaggctttggtttcaaccccctctgtaagaatctgagactaaccaacctctgttttcctgatgacctcataatcttttgta

SEQ ID NO: 94560 - DNA, 849 bp, Cannabis sativa
ggtatattttgttagttttttgtttatatgtatatgaactttattttgaatacttgaaatggacggccattgtagagattaggaacatacagagaggcaaaataagacacgataatacaatttgaaatccatacaaaattaacaaatttgagtttaactttaaatggatttgaattatttttaagttgatccgtttattccgtataataaaagggtctcgaacattatctaattataaacacgtaattaatgtgtttaatcccactctagtctcgaacatcattcatttataaaggagttacacaagtcatattatatcatcttatttataaataggtagtatatgtatgggtttcatttgttgacacatatgactattaaatagattatgtttgcaggtccaacatatatatatgtaatatattagtctcgacataacacgaatataacccgtaaacatgaattatcatccctagatcatattaagaaaaaccaaattgatgagcgaaaatcaccaacaacaccaaactactacaaaaaaggatttttgtgtcaatcaacgagtctgatcaaactcgttgattgacacaaaactcaaccctcctttttttacttcagttgttaaccgacgcaaattgttaactgatgcaaataataattagtttacatcagttattacttcgacactaaaataaaaattcgacaccaaagataaaattcttaaaaaattacacaaccaatacaaaaaatgaggggttgaattttgtgtcagttttactcaaatgcaccatttagcgtcgatttataggatattttgcatcggtgcaacacatcacagacacttatggg

SEQ ID NO: 94561 - DNA, 549 bp, Cannabis sativa
catccgatccgatcccattatgattggatatccgattctattggatcggttggaattggatcggtcggttagaattggattggataactttctgcacacccctaatcgtcagtatttattgtcgtaacataggagcgtgaaagaaattgcaatatagtaaaatttttaataaatttagaacaatttataatattaaatataaatttgattattttaataaaaagaaaaatcagtagtaaataatgagaatacaataatttatctatttatttatttattttacaatattttcaaaaaaaattacggaaaaaatgatagctacaataaccaacattaattttaaaaaataatgataattactctagtagatataactttagagtcgaaggataagaaaaacgatgaagtgactagtgagaaggatgtccggactagatcattgataggtggatggaattggttccaaattcttaagtgaaatttacatgatatattaacttttgtcatttttttacaaacatactgtcaggcggtattttttattttttt

SEQ ID NO: 94562 - DNA, 514 bp, Cannabis sativa
agtggaatgagacattggctcacagacacctttcgtgtggccaacacttagggagatgtctttcacaaaggccatttcttgcgaggttaaggccttcatcctcccagggcgctaagtgaggcacttgggcggcttagtgactccttatccttccttaaataatatccatatctcatgcttgcaaaaatgcaaatgacatttacatattaaattaataaaatacaaatgactaaaatgccccttaaaatagatatttttcatctacttttgtgggctgttaaggcctgatttgcagtctagcttgttgtccatgtgcaccaaagtcctgctaggccaagttctggatggccatgcatatgcaggatgcaggctggccagccttgtgctgtacaaaagctggtcggccctatggccaaccagcctccttaaggtggttggtttgtcactcatcatcctgtttaagtgtcgagactccctatttgttgaagtgttgagtagatgacttgaccttctt

SEQ ID NO: 94563 - DNA, 1102 bp, Cannabis sativa
aattaaactatatatatatatatacaatttcactgtacatatataaatagagaactatatatatatttctgtatttatatagaatacacgtttggaattgtaggatcaaggaccacatcaccctcagccatcacagccgtactgccacttgtgccacggttcacgcttacaacattcccactatgctgcatggtagtggaagcaccatgcaacgtaccatcttgtacttccttgttaggccttcctctccctgccacctgtgctttcatcttcacgccattcatagaggagccgacattctgctctgaacggatattatgttgtctcttgcaaacaactttggcacactgggcatttccctgtaaatttataccttcatcacagacaaccaactcatagcgagagccagaggccataaaacaatttccacgagctccatctaccttgatccacgacccatacattctcacagcaggtccaaccgcggggttaacccatacagtgggttcagtgcattctttgtttgcatgcatagactaatttaccacaattaaaacataagaaaggcagtttttcatacttaaactgaatccaggattcgaggtttacaccagctttgaggaaaaacccagtagggatcataggatgactaatccacacatcaatccaacatatgagataatcacccctcacaatctccttcttcctcttcccgtcagttttgacaagccaaccaaccttcttagtgagaataggggcatttgtttcagagagacaccgagtaggcaaaccgtacgtgaactcaacccaaaaacgagccactttaaaatctgacatacgaacctccccttcaatcagccaaggatatttgagattcagcagcacaccattcaccagcgacgatctttttgttcatgactaaagcacaaccctcttctgaatcgaagaagaaacccaagacccctcgtcaaacttcttcatcttccagccctgctccagattctagataccaaaaagtattttcttcaccattgacggccatgttcttacacccgataaattttccagccctattcaccacaatatcctcaagagagaggtc

SEQ ID NO: 94564 - DNA, 834 bp, Cannabis sativa
tcgcagaaggctattcagccagcccagttataaacctaccttgcacattatatttccaacgagttgttccatgctaagcgtacttgtcgtttgtgtgtttgaattcttaccagctcgacatgtgtcctcctctgatgtgcttaccaaacttcaggtataacaattgccccttaaaaagttctttttaattaaaaagagttttttaatgattaccaagggtattttcatcacgctcctctgtttttgaaaagacgcattcctctgattttggcggttgtgcggtttcgaggtacattagaattaaatgatcatcttttccacttccacttcgaatcacgtccattggatcaaatcttttttgaaatcattatcatgagtataaaaaaagaaaaaggaaccacctttgcaccatttcagaaagtttgagaaatacccttaacttcttcgttaaggatcaccataaaacccctctgaagatttgaatgccatccttgtctttgaccttcttcctacgagtttccttcgactgtattttttcaaggcgatccttgcttcgttcgaagggttgcagaaggatttcccaggcgttgccccaagccctaactccaaacggtaagttattttcttcttcctcatatgtgtattacatagtgttgatcagttgcttgattcgcttgtatcgttattatctaatctggttttggtagttttttagggttaaaactgttcgtactagggttgatgcaatatgtaggttgttttaagacctccaactcatttccttctggtttgataaaattctctccaaggattgggactgctttttgctggtag

SEQ ID NO: 94565 - DNA, 793 bp, Cannabis sativa
  modified_base (36)..(42): a, c, t, g, unknown or other
tactacatatcgtttatcgcttataaaatagactcnnnnnnnttggctaaaagtgaagtcaacattttagtgctttcattgagagaagaatcacaaactgctctttattcgacactcaaccgccaacacgatagtgcaaactagtagaggcctgtctgacccagcaaattcaaagacgttggatccggcattacaggacccaaagagttcaagggttctgcatactgttaatcccagacagaagggaaacgtggtgaatggtgaaacaactactgttattggaattgcgcctggtttgcaagagactagaaataacagttccgcacacaacttgggcatccataatacgactgttccacctggagccaacgcctagacgaccatcggagacgcaaccgaattacaaaatctctgtgacgcgctcagactcatgcagggtcatagcaacactttgcatcatgatcaggaggaactgcgtgctgcagtaaatctcgcgtttgacgaacaaaggcgtatgttcactgaatggagagataaagagatggaggcattaagggctcaccatgcagagatttaagaatgtagtcgtcaagccaccgtgctgatacaaagagcctactaaactgtaggtcagcaatcactgaacgtcattcccctgggagaaacggaagacgacccaacgatgaatacttcttagactacgaatggtcaaccgtctaatccccggttacgagttctgctcgtgggccaagcggtaggcgagcagaccttgttcggtaattcatcaggagga

SEQ ID NO: 94566 - DNA, 610 bp, Cannabis sativa
gcaaaacacattttcattttctgtttttaaaatttgaaaacaaaattggttgtaaaacgcatttttgtttttcaaaaacaaaattttaaaaacaaaaaatctacttttatttttctatttaaaaaattaaaaagcaaaagtgttaccaaacgccaccttaattatttaacttattttatattagtatacattgttatctatgtgctaattacaaaatcataaaaataattatatatttgattgataccgtaaataatttgtaggaggtattcaaatttttttttcttcttttgttaaataaataacgatataaattataaaaagtaaatgaactaaaatatatacaattaaatactaaattatataaatttttgataaaagttatgttatattaatataaatataattagtaatattttaatttttaaaataaataataattaatgaaaattctaaataatgaaatatataactatttttatataaaaaaaaatgattgaataatatttaattataaagtaataataaaactacactatttgaaaatgatttaaaaaaacaatgttgcactacaacaaaattaaactttagaggtggtttttaaggcctt

SEQ ID NO: 94567 - DNA, 1126 bp, Cannabis sativa
tttatttttttttttttgctgattattaattaggggttatatggctttaaggtataagtttgttataatatgatttttttctcaaaaaaatttattttatgagaaaatttacaatttttcttttaaaaatatgagaaaaatagtataaaataactggttatttatctgattatcttaagagtacccgattacttttatttggttttttcatattttttcaactttttctttaatttttcctataaaataacttttttttttaaaaaaaaaagaaattataattttcttaatttgtttataggtttagagctgggtgcatcaggcccagatcaatgtcatggcccaaaacccctaataggcctaaaagtgtaggtccaataattgccactttttaattgctcaaaaaagagaagtgcaaagtttagaatttgaccaaacacaattttttctttccttaaaattaatttattcttaataaggctatgtttggaaggaaacaacatgaaaactggataatgtgaaataatagaaagtagaaatttcataataataatattgaaatcaaaactttttattacaataaggattacacaatttcatgtaattttaaatggcgagtgttaattacaactttttcgtcaattttcacgcttaaaattatttattagaatattttttttatagcgatatttattataattacaatatcatttttgaatttttttgaatagtttacaatatcgaaaattaaggccgactctgaaatttattgggttataagaaaaaaaaaaaattggactcttagttagaaaaatgtgatctgtttcaaaattaataaaaaaaatatataattttaaaaaaataaaatttttttggacccctatgctaggtggactccaagtataagtctagtccgcttatgttcaaggtcggacctgccagaaatagaattcttaatatttcagtttactgcacgtattcaaaaaaattttaaactagcattataaattaattaaaaataatattgtatttataacgaaattttgttatttttttgttatacgaatacaaaaattaattaaaaaattataatagagagtaattactcatcaattcaaattcattc

SEQ ID NO: 94568 - DNA, 918 bp, Cannabis sativa
  modified_base (624)..(630): a, c, t, g, unknown or other
ttcttttgcaacattatttatccataagatatatatgtaaatgtctcttctatatagggtgtgtataaattattcaatccaataacacaactcatctaaatataactgattgccaaatattagatatccaattataatcggatttgattggatgttatttttgaatatccaattagatcggattgaatattagatggggtgaccaaaaatccaatatataaacatccaatcgaactaattaatattaagtaaatattagattttatattcttatacgtaaaatatatatgtatatataaaaattaacattaaattttactctttttttcttggcaatacatactgtacttaaaatattagatggatccgatctaatccaagaaatactaaatttaaaatattaaataaaccctaattaaatcaataaatatatatatatgaaatacatcaaacggatagagccgatccaatctaacatctaatggatgttagatcgattggatcactaaaattaattggaacagatcggatggtaaaatctaacatctaatatataagggaaatttgaattttcatacttacaatatcttaaaattatttccctaaatgcatagttattaaaannnnnnntatatgaccacattgttaatttcccaaaaataccccacatttgaaatccctaaactcaagcctctctcttcctctctgccgaccacgaaagcaccacacccacatccgacccaactcgaaacctcacacccacaggcgactttgacccaaccattaaaaaaaaaaaaaggggcatcgggtctgatgggtccgattggtacccatcggacccacatgaaaatcggaccccaaaagaaactaaaccccatcggaccccatagcatcggaccatcggaccccatagcatcg

SEQ ID NO: 94569 - DNA, 688 bp, Cannabis sativa
tcgaagaagccattcaacgagcggaaggtgagcaaaaccctggcaagtcaaaaaatccttctactggaacatcggctcaactcccccattactcaaataattcgaactcaagtggtaagcgttctagcaacaaccacaggcaagggaacgggaagaagggaaaatttgccggcaaatccgaacaagctccccgggagaatcaagaaaagtacactgcattcactatcatgactgaagacgtagaaagtatttacatggaaactcaatcattggtcccatataagaaacccgggcccatgaagaaagatatcagcaagacggacatgacaaagttttgtcgattccacgaagactatggccatcacactaatgaatgcaacaagctgaagcgggaaattgaattcctcataaggaaaaacaacccacacttgcaagagtatgtcaagaccaatcagggtcagaggtacgacaataacaaagagttactacctccaccggtagatgagcatctgcaagtcatcattggaggcccgcatattgctagagatttgggcaaagctccggagaggtatgctcgaatagcgcagcatgaacaagaagaagttatcctagctgtggaagaaaggaagcccaaagttccatgagaaggagggccaaccataactttcaacgatgaagacgctgccaa

SEQ ID NO: 94570 - DNA, 527 bp, Cannabis sativa
ggtctatttagaacacgtatgtcctgatggtgagcattattatggcgtccatttttatgtctagttatttttggccaccttgagctttgatatatgtatatatgcatatctttttgttatgtctagccggtgttttgctttctatatgattatgtttttggtgaactcgctcttagtccagtatctttgttctaggtgggttttttgctatgtttattagcaaccatggtagttgtgccacttcgtctactaagacgaccagtttgtctaatgatccttcgaatattcctattggggtggtaggttatgtgttggatgatgggtatgaggatacggatgtctatcgctatgcgtctggggttggagtagacactgatcgccctaggagtgatagtgagtcaggcgatatacttttgggtgttaatccaaggtcagtattaaccttgaatgacttcccaaaaattcgttgtcgttataatattcccatacacattagtttgtacactccggctagcggggaacgggct

SEQ ID NO: 94571 - DNA, 619 bp, Cannabis sativa
atacccttttttattcatttcttctatttttaatttatttactttaattttttttttaaaaccattaaataattaaaatattaatgtaacaattaaatctaataaaaataatgcattaaatttatatatatatatatatatagatcaatttatcatagaaatttagaaaggtgtcaatttattcaataaattttgaagacatgtattgttattgtatcaatcagtttagtgagatttaaattggtgttcattaatcattgttctaagagttgatctcaataaaattataaagcaatacaataacatccaataaataaatcaaaacaaatgatcaaaatatggtgtatatcaatgcttaaaattataaaattacaaataatgttgtcctgtataaggtcttgtctattgacatggtgagattgtttctttgatttttgtttgttttgttgaggtctgtccttgttttcggtggtttgttgtggtctggtttgagaagttttcagatggcaacgtcgtatggtaatgaggacgttgaggataggttgttgatcatcccactcgaggaggaagaggggccagcaattcaatatgatcagcccttggtcgatgatgcagagct

SEQ ID NO: 94572 - DNA, 1553 bp, Cannabis sativa
aaaaaatattaaatgaaaataggttataaaatatgtatgtgatgtcttccatatggtatgtgtgaaaagtctctcatttgagtgattttgtgcgggtctgggtgcatcgttttgttgttctggtgctattgttgtttgagtaatggatttgcaaggactggaggaccaatgggcataattggaattggaggaagaagaggagattggcttagttgccccacgagtagaacaagaggaactggttatcgacactcgttggtgtttgattgggaaacttctcttaggaagagtgagtgattttgatgcttttcaaaatatgatggcatttctatggcagtccggaaaaggaatgtatgttaaaaaattgaactctaatctatttttgtttcaattttaccatgagatagatattgagagagtgatcacagggagtccttggactttcaataagaaacaacttattctccatagattgaaggaaggggagaatcccaggaatgtgaaccttcattttttagacttgtggattcatatttatgatctggaacatggttttcagtcgttgaaggtggttacggatatcggaaatttaatgggtaaatttgtggaatcggatattaataacttttcagccttgtggagggaatatatgagaatccgagtaacaatcgatgttgaaaaactactgcggaggaggatgaaaatttttcgcgaggatcgtagttggttctgggcaaattttaagtatgagaatctctcgactttttgtttcatttgtggtattttgggccattcggaacatttttgtcctaagttatttcatacaccttcccatttgattcaaaagccttatgggatgttcttgaaagctaacagtaggcgaacttctgaaaaaattggagctaaatggctacggccaggtgctgttggagggatttccgagagaggggaggggagtttgaagcctgtaactccggtgatggcaggggtggggcaggcgacggtgactgaggagttgattgagggatttggtgatcgtgggctggcaactaatttaggggaaggtggagttattgctcgagatttgagggaaaaattggtggaaggaaatataaatggtgctgaagaggatatccatgtgaataataataatgattttattgtttattcggactctaaaaggaaagggttgggggtaagaatgttattggggtgggcgagcccagtgggaaagttgggccaaaagatattggattagttgaaggagttttgaattatgttgatatggagcaagatgaacatgtgttggaagtgggtccaaaaaacgagttgttggcgggttctgggttccagacccactgttcatcatgatcactttgagttggaattgtcgtgggcttgggaatccacgagctgttcgattccttaaggacttggttgttcaaaagaggcccgatataaattttctttgtgaaactttatgtagaaaagatgtggtggaaagagtaaaagtccaattgggctttgagggttgttttgttgtggaagcccaa

SEQ ID NO: 94573 - DNA, 1025 bp, Cannabis sativa
  modified_base (49)..(54): a, c, t, g, unknown or other
attaaccaccattgaaaatcgaggatgtcataaccctcatattttacannnnnntgaaaattagtatcaaataaaaaatgttgtttagtagtagttgtagagttgtaaacacgttgtatgcttttatttatgaggaaattagatcctataccctttttaagttagcctctctcatttttaccttttgttttaaattctctcatttataccttcttttttagtttcgatccccattataccccttccattcaccatctctatttgtcctccaacctgatattttttttaatatcatatgagagattctcagccatctctgcctatagaaggctccatgagcttatttgtaggcttcgcaactattttatcttccctcgaacattgatcaagctgagaattggactgttgatgttctccatgagttgttttggctgatggttcaaagaaaacatacatttgactcatctaaagccactaccaattattaatttgcttattcatttgttatgttaataacagagaagaagaaaaaactaaatggaagattagaggaaggagaaacaagatctaaagagaaagaataatacaaatttagaaaagggaaagagaaagttattgacctccaaatatcgaaggatggtgtagcgttgatgccggcggtggaggaggcataaggacgctagtaatggcggaggaggtagagcttgcgtgggttgggttgggtcgctatggcagaatggggagtctttagactttttggattggggactcaattaatctgataagggtatatttggtaatagacttataaaagaaggtagattttaatggattttcatctggaggtatttttggttaattgataaaaaaaaaaaagaggttgttttaaatttatccctatttttgctctatttttatcattttttattcaaaataaattaatcctaaccctaggtgaattagtataaaaggaaaagaatggtctcattatccaactaatatttctaataactcttgacctagtt

SEQ ID NO: 94574 - DNA, 699 bp, Cannabis sativa
atattaatcgctttttatcgaggtactccgatcaaattgaaaagagatcattgtacagtaactaacaaactatatgatgatattattaggtctcaatcaaagcagcaagcatatgatcattattgttcttctagtaaatataaatcatttattaataaaccatgctattaactattagttgtgtctagcactattcatattaattaattagtcatattttataaaaataattatatcaaattatattggataagatatttaattacatatgacgcattggaaagtactattaactgatttattttagcatttctcttaattgaaaatagtaatgatagtttcaggatagatattactgtcttctcttaatgagcacacaaacctgttcattgttgacctctctttttctcccttgtttctcggggtctaacactggaaaagaaattatatacacacatgttatacataaacgaaaaagctaggaaaaacaaaaaaaatacatgaatcaataatgggaattcatatacatatgagagaaaattcataaggaatatgtttaaatattatagtttaatatcatttggaaatttctatttctaccacaaagaaattagttatatttaacaattaaaaaaaaaaaaagacaaagtattatatatagccaatcatgcataattcttccttttttttaaaaaaaaa

SEQ ID NO: 94575 - DNA, 814 bp, Cannabis sativa
atggaaaaaatcagggtatactagctgttgatttagaggagggaaagaatgaagatattcaacaagatggtcttcttattgctgatttgaagaggaggcgtgtaaatgaggggaggggattggagtatttaaatggtgaagatgggggcccaattcgagttagtgaaaaagggttcagaggcccacttctaagtgggggtggaaggaaaaatgatattcttgtaaaagaaggtagtgggaaaggaattgaccaaatggataataatgggccggttgtggaggttttggaggaaagttcaaataccaataatggcatttttccaaaaaataattttctggcgggtactcaaattggggcccgcctaccattatgagtttactaagctggaattgtcgagggcttgggaacccgagggctattcaattccttaaggaaatcgtttttcaaaagaaacccaatgtgatttttttgtgtgaaactatttgcaaaaatgataagattaattatgtcaaaaggttgttgggctttgaagggagttatgttgttgaagctaggggtcatagtggtggcttagccatgctatggaagaaagaagaagaaggtcagctccttggtttcagccaaaaccacgtcgacttggaggttcggttagagggttgcccgttgtttcgtgcgactgggttttatggagagccccagcgaagtctaagaggcaatacttggcgattaattcaccaactttcaggtcagtactctttgccgtggtgtttgtttggtgatatgaataacactttgtgtaatatcccagaaaat

SEQ ID NO: 94576 - DNA, 648 bp, Cannabis sativa
atgaaagcaaaatatgcctattttctcatatttgaattgcacccatcgttttacaccatcacttagatcaaagaaacaccccgagactagaggatcttcaatgttaatctcaacatgggctcttaaacagtttgaccaggcagcaggcgtgtcatcactgaaatcaacagataaaaccttccccgcctgagctcccgataactccccattctccttagaaaagtactcccgggggagaagatgaaactgaacccacaccttaagagaagtgatagcatactcatttccaacccgtggcgtccaggagataagtaccaaagtatagcccttaacgcagcggggggcattatccaatgcccatttactgtcctcagcatttttaaaaccaaagacatagcagttaatgttcttaaaaccttccaaagcacccactgttacatgtctttcccacgcattcaaagtgtactcttgcacaatagaagactccacactcatgggaggcacaatcttcccataaaggcaaaaagaggacagagccttaactgccgaagcacaaggaaccaaagccacagaggcatcatcaatagagaggcatttacctttgatcccctgtttggtagcattaactaaagccataaagacagtcaa

SEQ ID NO: 94577 - DNA, 659 bp, Cannabis sativa
tacatagaactagtgcctaattgcaatagactaatatatagaatttaaaagtattatatttattatttttgtggattgttgcataagagatgatatcactaacttcaccaataaataatccaatgattaaaatataagtagtttaataaatgttgcgtatcctatgtacttggatttttggattattattgctattatttgcatatgtattttttttttattttaatcactatttatattaaataatctttattaggatttaatgcatttggtacacgaaaggtgcacatgtaaagtaatgttaaattattattttattccttaaaaaaccaaaaaaaaaaaaaaaaaatgtttattttattaaaaaaaaaagcatctttaacttatgtctcatatttacaaagtgtatttgaatatgatagtaattacatataaattaataatatcttgttagtcaaaatattaataattatacaagaaaataatattttttagtagttaatatttaaaataaaaaaattgtagtaattacactcaattctcatatgggtcatagaattaaagagtgtaatttgaaccctcaattacctcaaattacacatttatactgtaattactaggggtgttcacaaagtatctgatccaatccaatccaatcc

SEQ ID NO: 94578 - DNA, 1266 bp, Cannabis sativa
tgctaataaggttgcacatgttcttgcacgatcttctctttctgaggctgattgtactttgtctggggatgttttacctacggtaattgcatctttggttttggataatttgatttaacaaaactcatcattattcaaaaaaaaaaaaaaaaagtagttgtgacatggccccagtgctagactgtgacacatatataatatgtataatttgggggatcaaaactcacacttaacttttgatcctaattgaaaaataatacttataaataatcatttaaattaatatattacaaaattatattataaaatgaatttttttcaattttaacccaaaacagtaacaatattacaaaaaatacttctagctggccaaataaacaaatatacaaccaaaaaaatttacacaaataccacttacacacaccttcaacccaagatccatactttctgggtaaccattgtgcaaccacgcaacaacctaacgcagccaaaacaaaaattcaaccagaaagagaaccaccattaattccggcaactttacttgagaagacgatgagaatcaatcaaaacagggactgtttcgaattcatgaaaaaaaaaagtatagaaaaactactacaaaactaaaattcatcttaaaattcaatttaatttgcataatactaatatactgacttcaatttttagatccatgaaatgcatatctcaaaaagttgaactggagttcccaaacaatccaactcaagtataacaaaaaaaaattatattaatattatagtaaaatatttatcctagtgtatttttgttgttttctaaatttctaatggtgaatttgttcatattaacttataaagagacatgtagatagagttacgtacgtggaaacattgttttgatttttaatattttataacttgcattacagtttcataaacaatttgctaacaattattttgtatgattgaaaccttcgtctgatgcaatctttggccaaccacccagcaaccttcgtctgatacaaccttcggccaaccacccagcaatcttcgtctgattaaacctttgtctgatgcaactatcgcgcaaccgccctgcaaccatcgcctgattgtgtaagtgatagtgtaagagatattttggtaattaaaatcacataaaaggtataaatattatccacaccttatgaaggtatttttgtcaataaagtgtcaatttgtatgtttcatgtaataattccttataaaattatatgaaatacatatttaa

SEQ ID NO: 94579 - DNA, 1005 bp, Cannabis sativa
gccttaaatccaaatttgatcgcaacgtccaggtgttgcccctaggtgtgacaaggccaattcctacaccggacattcgatctgtacctgacccgtgcacatgtagcttccaagttggcttatcttcactattgctcgggtgaggtacttgtactggctttgggttgttttctgaaatgctcttttctttacccgtacattcaactacaaaatctgctaaggcttgtcctttaatcgctgttcggggctgaacgataatctcgtactggcctaactccactacccacttgagcaaccattcagaggcgttcgatttttgcaatacttggcgtaatggttggtcagtgtatacccgaacaagatgagcttgaaagtagggccttaggtttctcgttgttaagattaggcaataagtgagcttttctatcaatggatatcggcctttagcttcaatgagccttttgctgatgtagtagacggggtgttggatattgttttcttctctgatcaatacggcatttacaacaggttccgtgacagccatgtatatccctaactcttctccatccagaggttttgagaccacgggaggttttgcgagttgcatttttagctcttgaaaggctttttcgcattcttccgtccattcaaattgcttgttttctcgcaggatgttgaaaaatgggacacacttgtctgtttactttgaaacaaatctgttgagtgtggcaatccaaccagttaaactttgaacttctttagtttttgttggcgatttcatatctagggggcttgaattttctctggattggctttaattcctcaggcattgatgataaagcccagaaacttaaacgaactgactccaaatacactttaagggattcagtttcatattgtatttccttagcactttgaagcactcgtctaggtcatctatatgcccccagccttcttggatttgacgagcatgtcatccatgtacacttccatattttgtctgat

SEQ ID NO: 94580 - DNA, 923 bp, Cannabis sativa
  modified_base (153)..(164): a, c, t, g, unknown or other
atatttagagtatttatttaaaggtggtatattaaaaaaataatctaaatttttaagtacattttaacaaatttcccaatagaatagggttgctacctctgaatggcgaaaatttaaaattggccaaaattcccgtgttttgcccatagtcgnnnnnnnnnnnncctagtcgcgaccataggcaaaatgaaaaatacaagctctctgcctagcctcgtagttgcgacccaagtcgcgaccatgggtatagctggtcgcgactactgaagcgttcttgacagcttcagcagatttttctccaaaatgtcccgtcttttcaacaattgatacaatttgaactctaatgtctcgggcacctgaaataagggaaatcaagcgtaaaactattccaaaagatagcattaatagagaaaacacctatgaaatcgacctggaacttagactaaaaatagcctaacattaatcgcggtaacaaaaatcaaattgcagtagcgaaatacaatctcaatcaaaccacacctatccacaaaaagttgggggtggttagaaaagaaagtcaactttcgatagctttagatttaagaactagaaactctaattaattttttttctactatatgttattaaacattagagtttagatactcatctacagtacttaattaagccagacttaattctaagatctagtataaattaaaatttattagaatactctaactcgagaattagcaaaaaaaaaaatatgcacatatatatttttaagaataatttatatatattttgttgctgaatccaacatttttaccacagttttattcggctaatcaaatttcagtagctctcatcaaaaatgttagtcaaaactaactaaaaaattgtcatcagagtcgaattcttatataaatttaaagaataacttg

SEQ ID NO: 94581 - DNA, 736 bp, Cannabis sativa
gttgcagaaacatattattaagttataatttaaatattaatataattgcttcaaaaatgtatgtaatattaatactattgttaatacttgaattaattgatagatgtatatgtgtgtgtttgaaataataataagcaagaagaagggctggggagagttatctctagctatatttgtgaaggagtattgttatgttagatacaaattcaaattgtacacggtttaattattacaaaataatacctattaaatattagtcttttttttttttttttatttatatttactagaacaaaacccttttaattatttgttaaaaaagtttaaatatgagtatacggtgaggacttttttccatattctatacaaatatatttatgtaatttaaaatatgattatataataaaaaataattttttttaaaacatattacaattcaaatttataaactcactacatatatatatttttttatcttttatcatatattaaattaaatatgattatataacataaaatatatattttttaatattgtaattttaaattcaataactgtacatatttaaaaaatatctatctattatatttttttttctttttttttttttaaataaacacttttgcattcccttaatctatcttaacatttacaacctattatagacaatacatctatattgcaaatctattcatatatacctttgatccccacatacaacatatatatatatat

SEQ ID NO: 94582 - DNA, 801 bp, Cannabis sativa
tctcactttttatacttacaaggcaacaaggaagtaactctttgactttaaaaggatttttccatcttgagataacgttacttgtcaaagatttggactttgaatgaatcaccaacacttgttgccctattaaaaactcctcctttggtttctttttatctcgaggcttctttgtcttttctttatgattagtctctcgattatcttcattggagttacaggattcaaccatattgcatgtattctcaatatcaacttgattagaagacttatacatatgaaacttgatttcttcatcattagcactcaaggttaaatggcctctttgaacatctataagcgcaccaccagttgctaagaaagggcgcccaaggatcattagcatatccttatcttcttccatgtctagtaccacaaaattagttgtaaatactagcttacccacttatattggaacatcttctattattccccttgataagttaatgatcgatctggcaatcgtaacaaaattgttgtgggttttacttcaccaaactttttgaataccgaaagtggcattaaatttatactagccccaagatcgcataaagacttttcaaatctcaaaccaccaatctcacaaggaattgaaaaactacttggatttttaagcttttgaggaagcttcttctgaattatggtactacattccttaattaagctcacagtttcataatccccaaatttcttcttctttgtcaacacctccttcataaacttaacataattggacatctgctctagtgcatcagtgaaagg

SEQ ID NO: 94583 - DNA, 854 bp, Cannabis sativa
  modified_base (73)..(80): a, c, t, g, unknown or other
aaataccatacaaaaacctaaaaacaaaaaaataccatataaattggccaaacttaaatgtgccatatttatnnnnnnnncttttaaaatcccatactaagtgtaatttccttatttgattttgtaatgatctcgtgggcctatttatgggcctagtatttgaatataaattattgggaaatttttataaatacgggaattgagggtataatttacttttttatgacataaataaataatactatagagttatgagtttttttttattattatttttttacatttatatgggttttttttatgccatatttttgtaaataaaagtagaaattccatatttttatggcatcccctgtttacgcaaaaagggctccatctcatgggtaaactgttccaaaggaccttctttgagctccacagtttctatagccaagcttcctgttctcgcaaaatcatagtcctcgtattcattaaatatcctttcaacctcttcttttggcaaattggtacagagaagtccagcatctccacgcagaagcttagaaactttgtaaatgttcggtatgatttcatcagatgcggatcgacctagagcaacttgcatgactttgttggacccaaggaaaaatctgctatttgctttaagctgctctcgaaactgcttaaatttgagatttctcatgttctcggaagagaatacatacataatcggcgaaatcgaatcaattaatcgaaagaaaaaatcaaaaaatgattcgatttgattcttttgattgattgattgattcaattggttgtgtgattcggaggaacccatcgtcaaggagagactgagagttgagagtagccatttt

SEQ ID NO: 94584 - DNA, 876 bp, Cannabis sativa
tcgtgcgactccagctccctctccagcgttcttgccgactcctccctcgacgatcgcaccgtctgaagcttcgtcctccactgctcctcctccttcgacgattgcacctgttgacagctccctcgccgacgcctcttcttccccgattttatcttcgccacctgagatcgtgaccgagaatgctaccccgaacattctgctgccaacttcacgtccccctagacctctttcttcttcgccgatcttctcaaaaactcttccaacgggattcacacctatctcctcgattccctcgattttcccaactcctcctcctgtggctccgacggcctccccctcttttccacctggttttggtttctttgacactcctcgggtgaatcttgatattgaccttccattgatgaacgcaatccgtatcaccttggaactggagacaatcccaattttttcattgtccccttccaattgactggccaagataatttccagtcatggaagcgtgcttccacgattaatctggctgccaagaacaaaactccattcatcgaaggtactcttcctcgtcctcctgttaatcatccatatcgatctgcttgggatcaatgcaatcgtatggttatggcttggatattgcaatttgtctcacgtgaaattgcagcgagtattatgtttaaagattcgattcttgctatgtggaataacctccacgatcggttcaaccaaagtaacggccttcggatctttcatctcaagacttctttaattcgcatcaaacaaggtaccaactccgttaccacctattttactcagctgcaatcgctatgggacgggctcaatgagtttcaacccttcacaccatgttcttgtggctgt

SEQ ID NO: 94585 - DNA, 601 bp, Cannabis sativa
  modified_base (535)..(541): a, c, t, g, unknown or other
gaatcttcatcaaacaaacaaaaaagaaaatttatgatgattgaacataaagacaagttcaagacattactgtaaatgttataatatgattgtttaaaattctcattcaaatgcactaatgatcttagtaacaaatcaacttcattaaagggcattaagcacaaataattccccaaattactaatctttaatttaaaaaaactaaaaaatggaagcaagaaaacacattttaccaagggttttagataaaggacaccattgattgttgccagtttgatttgacaatattattcaatctaagtatacagagcatacatatcacgagagtttcagaaaagaaagaatactgagatacctttgagttgaggatgaggaactccgtcgccgaccgatgtgagaaactccgccactacgatgaactcactgagagagagtgagttcagttttgggtctttattttgggcccaaaggcccattaagatcttcaatgatgatcccttcagaggaaattatactctataccttttttatattnnnnnnntttatttttaccctctttcttaaagtctatcatttttacctctttttttaaacattatac

SEQ ID NO: 94586 - DNA, 1419 bp, Cannabis sativa
tactcctaaacatcatgtgttgtagtacatgcactcagtatcgttaccgtactagtgtttgtagctttagagttagatttttaaaactttattttatctaatgaaacttaagtgtcttttctaatttcaccacttatctcatctaataatttaaaaaaacaattttattttaataattatatataattatcaaataaattacaatttaaatatatttattaattggactcacaaaggggactaattaataaatatactactatacctcttttcgtctcaaaatttcccaaacttggtgaaaattctcaaataagacatagtctatttttaaattctaattgacttattaaatcaattaattgagtctacaacatgatattatctcaaacaatgtggggactacgagcctatgtaaccaagctcctaataaacagaactttaaatttaccgagtaaattttctaacttattaattcatcccaactccactataaatttacaattgtactcctaattacatagaacactctgtacaccaagtatagatacgctataatgtatctattgtttcaatcacgataattattgatcctcaatagatggtctacattgagtagggataaaattactattttacccttcaatttattttatccttgaaacacttagctacttgtaaatgatattttgagaaactaatataattaccaaaataaatgttcaatcatttaaagcctttggcaaagctcataggaaaccatcgtttcacttctaagagacatggaagctatagatgtccatatatatgattaacactcccactactgagttcccaatatgtaagtatgagctagtcctacgggtaagctggtaacgaacaagtcaaagaacccgcgaaatacaattaagctagagctcaattatctcaggattgaaattaaatgatctatgatcaactaagtgatattgacttagaaaagatataatagtaagttataatgtcttttccactgttaatatcggtctagtcctacgggtaagctggaaacgaacaagtcaaagaatctgtgcaatacaattaagctagagctcagttattccatgattgagatcaaatgatctatgatcaactaagtgatattgactaagaaaagatataacagtaagttataatatcttttccactgtcaatattggtctagtccgatgtatagccaatacatccgatcttggtttactttactaaaaccctgaaaaagatattccacttatccaagtataagtaaacctcattgatgattatcatgtcagtgtaaatctagtgtactgataaaccatgggactaaataaatttgaagcatgtaatcataattactttttactgtgacgatatcactgtaattatgaataactatatgtt

SEQ ID NO: 94587 - DNA, 762 bp, Cannabis sativa
ttgtttaatcctatacaccaaggatttcaccatcggaacctaaagacttcattccgacctttccatagtggattggattggattgaaattcgcacttagtgtggatcaaatgagctatgaacaaaatagtgtggattggattggatgaacacccctaaccaccactgccattgatgttgcaaggacttgccgttgaaacttggaaactttttgggggccgaccctaggcataggcgggttaggcccgtgcctagggcccacactttttgagggcccaaataaaaaataaaagacctcattaggcttttatttaagtaaattaagtgtattgtgaacaataaatattcataacttggttggttggggtgtatgacatattaccaaggtcgacccaaccatatgacagcttaggctattgcacaaggcccctacattaaaagaccctatctttttatcatcatatataatataaatatttttttgataatatatgtatacacaacaaatattcataggagcaaatatgcagttagcacttacaaaaaaaatcataaaattttacggtcccaatacacatgattgtaaaattcttatctattttagaatttatgaagtattttttttaaaaaaaaaattaatttattgtcgaaagtctccaaacaactagggtcggctctgcacattacacaataatgttggccccaaaatttaaatagccatgacatgaccatattttttgaaccagtcctactttccatctct

SEQ ID NO: 94588 - DNA, 2304 bp, Cannabis sativa
aaaaaaaaaaaaaaaattaaaagtgtaaaaataaaaaagacccttaaatatataatgcataaaaaaaaagttaaaacctaaaataattaataaaatattctcttaaagtaattaatagtattctatatatacacaacataaatagtaaaattttaaaaaatattttataagaaatttagagcatttaaaatatatatatagtgtttttaattaattttgttttccaaatattttaaagaattttattttacatcacaataattaataacacacaccaataatagagattttcctatttggagagagatattttgttggtttttatagtacacatccataatatatttatttctttttgttctgtccacatatattatcaaccctataattgaaagcataatttgattgttttctttatcacgtcacgtgataatcattttcaaaaatgaaaagagataatattattgaaacatataacataccaggaagaaagatttaatgttctcttgggttaatttgacatctgagccctcatcatcggaaattttaagtaaaatatcaaggaaatcccttggaacatgattatgatgatgatcacctcggctagtcttattatgtgctcgatgctctttgatgattttctccaccatgttgtcaaacttgtcatggatgaccttacttctttttcgaagtccctgcaagtctaaattcttacagaaccaaataaaatcagaaacgttaaaagttccaacaatctcagctgagtcatttaccacctcattgatctcatcagcttcgttatcatcatcagcacacctcttgctcataatcattctcgatataacattgttggtaagctttttgagctcgtttccaatatcaactgactcatttgactcagcccttttgaggagtgatactaagaatctcctcctctcatcattcctaataggaagaagaagattaagagtttggctgcccagaagctgagacatgcaaactttcttcaagaacttccagtaaggaccgtacggggcaaaggttaagtcatctgagggataagaaatgtgtttgaggatactcggcggggggcgactcgagaaggaggcctcatgagttctgaggaattctttggccatttctggcgaggaagcaacaacggtagggattgagccaagatagatatgcattaagggtccataacggtttgaaagcttatagagagattggtgtggtaatggaccaaggtggtgaaggtgtccaatgattgggagtgaagaagggcttggtgggaatctactattcttggttcgacgtttggagaatatgtttcgaaccaatatggtggacactaaccaaagcaggaacaacatgatgtagtttttgagatcttccatggctgattttcttggggagtaacaagatggtgcaaaagatggtacttgtgtaaaacaagagaaactaattacttcacactatatattttcttgcacacttatattttgtatattatttgaagttcccacctcctcaatatatagacggccggtaggtatggaggtagcatgaccaatactattctatcttttgaaaaagagaattgctaaaatactattcaatcttagaattgctaaaaagtaccactacgagtaatataaaacaattagagcatttttaggtatgtcaaaaaaaatttatttagtcgaatcatattggagctccaatccaacaaattatttctgatgctgcgaaacattagcaatgatagtattctttaaggaagttaaaaattttcacattattcaaaaatataatattttattttatctctcttccaattattgtggcactcttactttgcaaaacactccaatagtcactataaaaaatcatacttttagtcacaacaaaacttgtgactaaaagtaaaatagttgtgactgattataaattatcattcttttgttgtgactaaaatgtctgtggctaaaaatattagtcacaaaaactaacatttattgtaactaaaagtaacaacttgtatttattaaatactatgttttaatcataactaactttttgttgtgactaaaagtcacattcagtcagtctcttaacaaatttttagtgagtatataaaaaaatctatgaaaaattaaatttccaactgtcaattaataaaactattatatatatttattttaaaaaaattattgtatgtataaacttttttattattattattaaatcactatatatattctaatttttaataatagtaattttttagctttaattttttat

SEQ ID NO: 94589 - DNA, 1198 bp, Cannabis sativa
tcattgttaatgtttaaattattacaatttataattataaatataataatgtattatgtttattgtagtaatgttttaattttttttaataataatataacatgtttatttgaagaaaaaaaataaccacttttacacaagaaacatgctaaatatttttttattataatttaaatgttgatgatttattttaggataatttttatatatttatatttatttatagtgtatttattataaaatatatgatttattatatatatataagttgttttatgaaaaataaataaacatgtttaaaaataaaattaaataaataataaacagtttaatataataaatatactattttttttgtatagtataaatgtttattatccattttaatataatttattataaatatatgtttattttaacaaaatatttaataaaattaataaacattaatgtattaataatttatatctatgtttatttaaaattaagtagaaaaaaatatatatatttactagttataactatactttatatttataattaatctatctttttttttaccaatatatatctttattatttaataaattacatgtttattaaaaaaataaacaatttcataaaattaatttaatatttagaataattttttacaaaagtaaacatactaaatattttttattaaagaataaatgtttattatttattttattatgatttaatataaattaaatatatatagtaaaattataaactaatagtgtattaaaaaaattgtatgtaactttatttaaaataaagaaataaaaaataaatattttatttttgttgtcacaataatattaagcttgatataataaattaggtaaaaattaatatttaacagtgattatcaaaattaatctattaataacacaataaaatcatcatacttatatcattaaatatatgatacaatgatgagaatatcattaaatatatgatataattaagagaagaaaatcaactaataacaatgctattgaattaaattagtatatataaatttgttaccatatatataatttgtacataaaaataagaatatgtttctcaatgtataatttcttttaaataagcttttttttttttttcacatataatgtaataaaatttgataagggaaatttcactatttgaccctaataaaatactccat

SEQ ID NO: 94590 - DNA, 510 bp, Cannabis sativa
tgtattgaatgttaatgtgtgttaaagtattttcttactgggtttttagctcaccccccctactttctcctacaggcaatacacatgtaatattggatataagcgtgatgagttaggtcagttctagtatgcatattgcgaggggctatggatgaacaaatagtctagaacgccggtggagcctttgttttgttttcagataataaagtaatccgagcttagtgggatgttgtaaatttattttaaaattacactcaactttttattttattcttaaatatgaataatcattaactttttgcatacttattgtaaaacctgctgtgtatttccaaatagttgttttcagttaatgcttcaaaaatagtattttgtaaaataaaataaaatattggggcgttacaatttctttcttacattagaatttgaaggacaatgcacttgatcttagttatcatgtcaaccttgtatttgtcttgcactacccttatgaataagtaatatttatgt

SEQ ID NO: 94591 - DNA, 566 bp, Cannabis sativa
acaaaataactcaaactagttataattaaaatagaactagttcaatcacagtgttataataaacaaaaacaaataacacgaaataacccaaaccaattataattgaaatagaactagttctataacataatgcgtacaaacaaataacataaattaaaattcaaactagttcaacaacaagttaagtaaaaatatataacacataatacctcagaaattagttataattaaaaaaaatagtgggaattaattctaaaaataaaataaataaaaaattttaaaagtataaaacaacaaaacaatagtctatcatttttattaaagagacatttttataaataaaaaatttcagtgtgaaaatgaaaaaattacttatttttgtaaatcttttcaaattcttagtttattatgtaaatttttcatattttatctaattagtacttttttcaacttgagtttattttttttatcttggattctgattttttgtagtttggatgagaccaagactttttctaatagagtaatttgcgacataactcccataagtgtttagtttattgcaa

SEQ ID NO: 94592 - DNA, 693 bp, Cannabis sativa
ataataaaaaattgagtgtaacctaaaaagaatagataaatattataacatataataaatactatttatcacatcttaagaatgaaacctcaaacttaagatctaaaatttagagttggctccactggcagcacttcgtttttcttaaattaaaattttacttggaggaaaaagaagagcctaatttcaaagctaaaccaaaagcgtagcaagatggaagtctcaaaaatagtttcaatttttgtttttaataacatagaaataaaaatcttgcttaaagtttattttgtctcttgtttgtttgtgttgattgttaatcatgatatgacaaaatgataagaaaactaatggcttaaccaattcacaaaaagatagttagggtgtgataaggcttattaatgatcactttagttgcttcaattcttgtatcatgtatatatacacacacgtatattccatcttgtctagaatatatcaattttttcagcctcactgaggggccgttgacaatactaacccaatttttccagcattatattagaattcattctagtagattattatgcctttgttattattaaatcaaaagcatgacacgagccatcttaattatgctacagaaacatatagagctaattatgccaacccacttactctgtgtacacaagaaaaatacattccataataataaaa

SEQ ID NO: 94593 - DNA, 501 bp, Cannabis sativa
tgtaattaaagtaaatacttctatcttaagtgcaagttttagtttatgtagactcattaaatgtcaaactaggcaactgaaagtaggaaacacgtactatgtaagagatgaattaattcctatggttcctttctttattttacttaatgaaacaaatatttttttttaaggaaatactttggttattgctcaatctgattctagcaataattatttgaaaatacagaataatactattattacatgcatggaatctaatatctgttattccaagccgcaatgagaaattgaagcgttaaaaaatttaggtaattaattaataattagttttgttgttttatgtaattggttttcaagtttttgtttttaatttggttatttaatatatatgtgttagttttaaattgagaaatttgcggccaaatctctttatgtttcatttgtttaacatttaaccccattttctttgtctttggtggaaaacctcctttagtttaattc

SEQ ID NO: 94594 - DNA, 691 bp, Cannabis sativa
  modified_base (122)..(126): a, c, t, g, unknown or other
taagatatatattaaataataatgggtgagatcataattatagtatttttaaagagtgttatacattagaatgtttatagaagtaagagtgccaaaaatgatgtggaagagagataaaatannnnnttatatttttagatgatgtgtaaacttttagcatcctttaaagatgttaccactagagatgctctaaaagtagcatgcactttaagtatgagcattgttataaagtaccaatagtgtctagcaccatctaaaagtaacgtcttgtgattgattagcgatataatctataaaaaattaatatattaaattataaaagaccttatacttaattgcaccaattaatattaggcaccgtaccttttagcatttttctataattaataagccttgtaaagaatgtgacagagaacaaaatatactaatatatgtcagctcagctgttttcaaattgaatggcatttctctttaacactaaatttgcaacttgctagcaatgccctgtactatcttcatcacaatattatatataaatatgtatatatatataagtaaaattataaaatcttgaatcagtgcaggccaagttcatataaaggacagtagctgaactcataagtagtgactcaataaaatatattgtatcaaaaccttaaaatataatatataatagagaaatcgactaaaa

SEQ ID NO: 94595 - DNA, 656 bp, Cannabis sativa
agtttagaactgttgggcaaaccgagaccagtactttgcccgacggttcaaaaccgtcggggaaggggaagcccgtttataataaaactctcatctctcatcaataatacaaattcatatcacgctcaccctctctctcacgccccaaaccctctcgttcttcgcctccaaccaccgtttcagatcgttgttcatcatcgacgagccccaaaccctctcattcttcgccccgcgagcagcaagtttctctccggtaaaactctctctctttctctctttctccattttttctttcttttctctcccgagccccccatctctggttttcctctcaatttgtcgctgctgctccgcccatccaggctagttccagtctcaaactttcgttgttcgctcgagattgaaggcctcgtacaagatcagaacaacccatatcccatcgggttcagaggcctactctgctccttccttctaggtatgttcttcatctccatgatattcagttttttcttctttttatttttgttattgatgaattgtttcaccaaaacatacatagtttcttacgaaattttactttggtcgaaacctgtttataaaattttagggtttatatccattttatgatttacttgattacaaagagaattcaaaag

SEQ ID NO: 94596 - DNA, 540 bp, Cannabis sativa
  modified_base (496)..(502): a, c, t, g, unknown or other
agtcatcatgcagactaagtttttccaagcaataagcaaccttattttgttgtattttaaaatattttgttattttgatagaatatatattttttttttttgttttttgttttcacatcttagtgaaatgactattctaatttaaaatataaaagtaaaaactattcaattacaagataaaaaaaaatttaataatttttttggttaatttttgagctattgccatgtatcctgtatattctattttgtttttttatgtaatttttagattttttttcatttttataaaagttatttctatcttgaagttatgctgttttcattttgaggttataaaatttccatctggatattatgctatttctatttttataaattaataaaaagtaaattataaaaatataaataaaaaaagttacttatttttttatatatattttaaattttatttaattttatttttattctgaggatctttgtaaagcccgcttagttnnnnnnnaaattagcagttaatcatgattaattatgaaattattt

SEQ ID NO: 94597 - DNA, 2485 bp, Cannabis sativa
acatatataccgtgcactgtaaaaaaaaaaaaaacctcaaaatagtatatcgattggagtctccttagagcattaaccacagcatatatacatatatgccggttggagatgctctaataattatcaaatatagaaacaaaattaatttgagtcaaaactctaacaaaaactctcatgaataccaaaactaataaaaaaatctacaaaaacaactctttaaagggatctactacacaaatttcctacaatctcacaatttgaaagtatagcaaaactgattaaactatataatatacacacatatataaaatattaaagacaaaagcactgcatatttagttggactcatccctagaaaaatcccactaatcaagaaaacgcataaaatgtttttgggcttttgggtgtcgtttttacatattgaaactttataatttaacaaaatagattagaaccctaaacagtttcaaaagagttcagtttattcagctaagcatatcagagtttgtctcattcatgtttactagaactgtaccaaagcatcttaagcaacaacagcagcacttagtttcataagcacactttctgacaattaagtaattaaataattctgaatagggactttattatgttaaccaagctgtcattagtaataataatccactgatacactttaatccaaatgtattccattctataaagtggaaaataaaattacatataaaaaacaatcatcatatctctctctccttatctcaccaaatcatcaaaaaccttaaactaagttccaaaaaccaattaaaggacaaaaactaaaactcaacaaaagaataaacaaaacacagagaatcagggccatgtctttatcttaaatatatatgtatagttttcttttctttagtctcaaatggggtattctcactctcttttgactgccttcagtccaagatacttcttttctttccacaaggacaaggacttgggatcacatggtgtcactaactttagtagctcatctatttcactttattattcaaaaacaaaaagcatagtatatgtattcccacaagattaaaagagacccaatttggatgaagaaacttataaatatatatccttttaatttatcatcatccttctttacaaaaggaaatcaaaaaccatcccaagaaaaacattaaaaacacctatgatgttaaagggactatttatattatattatataacaataacagtaataataacacaaaagatcctattagccaaactgctatgctttgcttttccttctaatttttgaaaaagaacaatagcagtagaattgtgctgttgttcagttcatgctctatgatgtctatggttgttcttttctgcagcaatggaaagcaaccttgagacaccttgagtccaaatatcatactctctttggttcctacactcgaaatctacaacgccacgcgtgatagttttcaaaccgaagtatcgccggttctcaccgccttcaagcaagtggcgaccaggccaagccggcatatctttaatcacttccacaaccacatctgcaaaattttacaaaagaagaaccatgttgagtttttctcttttttggtttaagctttaatgatccactttagaactttcacaaatccccaaatggaacaagacccacctccatttctgcttcataaaaattattagtgaaagacaaaagcagtaagaacttactctttttcttttttgtgatggtcccagcaacgtgcctactcttcatcttcaacataacctgcacaaaaagaagttccaaagtgtcttaatgcttttgttaaagggaaaaagaaaaatcaaaatcaaaatttaaagacacaaaaacatccaattccttcaatcatactcacaccctcttcttttcttttcttttttattttcctttctttcttgcatatggaaaccttttcaaacaatcaagttcacacaaaccactcaatcaaccccaaaagtccctactgatgctcaaataattttggctagaaatttcaaatacagtaaaccatgtgactagaaaaaaaaaattacctggtttgttctgttgatgtaaaccgacacaactttccaatgaagatcacctgtgttcagattaagataataaagactgtcattgaatgaatcaaaaaaacttaaacatgcgaaattcaagatatgatttgggacaccaaaaagactttaattaattaagctaaaccaaatttacctttacgggttcgtttgaggagttcacagcctctggctagtaattctctactgcaaataccaagaaagttttcctcaggaacaagttcaccgctgaaactactgttggaattaccgttactaccgttaccaccgttaactcctcctcctatccctttctccaccggaataacagccgctatattccacacttcctttaatgccctcgcctttaaagtagccgcgccacgcagagctg

SEQ ID NO: 94598 - DNA, 541 bp, Cannabis sativa
tgaagaccaaagccaaggaacaataaaagttataggagaatgcatcaaacctaagtttctgaacataaagacaaaagcaacaccactagatatcaaaagagaattgaaatacaggtacggaatcaaaaatgaactacatgaaggctttgagaagtaaggagcatgttataaatgacttaagaggaaatacaattgaatcatacaacctgataccaagtttcttgcacatggtgcaaaaaaacaaaaaatattatacctctttgaagcctatcagggtatccttatttctttttgtataattatcgaacatccagtctaaggactttgttgaagaattcacaccttaatcttccaagccaatctcaacacttaagaatagagtggggtattagatcttaatttgataaacaaatttaggtattacaacgtgtactcatatcatgagacactataattgagacatggttttaatttcacaaatacttgaataggtgtgggcgtgtgagacaagagacacacacaaagagagagagagagagag

SEQ ID NO: 94599 - DNA, 769 bp, Cannabis sativa
agttagaatcgtgaatacgggagtgatatcccaaatcgtttaggtaaatttcgaggacgaaatttctataaggaggggatggttgtaatatcctagaaacttaattatgaataattagaatttattatatattgtagataaattaggtggtaatgaactaatctagtttagcataaattataaatttttctataagtggataaataagcgtaaattattaattacggagatttattttgaatatgtgggtataatgtgagttattgatgaaataacaatatttttagacttggcaaccttggagacccaattggaggtcaaaaatattacaatgagtttagttggaaatttcaatgggcttgagataagttgattataaaattattagagtattgagataaattaattatgtggtgttaggacattacattattattatgtggtatatttatcaattaccagcgggtacaaattcgttcgagcaacatagtgaaaactcatagtgggaaaaataccagagtacggtatttagacttatttggtagaaattattagtaccggaagtaactatttgtgtgaataagttatggtacactttagttgggtttcgcttaattaagctagtaaaatatgatagaatttgtaactatttattagtcgagatttatttacaatcctttatagtaattattttgagaatttcttagttagtagaagttggtgattagtttaattagcttatttatttaagtgataatttaatacccgt

SEQ ID NO: 94600 - DNA, 563 bp, Cannabis sativa
ttaaaccctaaactgaaacccaaaaccctaaaccgtaaaacgtactctctaaacccttaacgataataaaccctaaacttaaaccttgaactctataccctaaatcctatacccaaaactgtaaaccctaaaccctgaatcctgaaccctgaaccctaaaccctaaaccaataaaccatatacacaaatcactaaaccctaaaccctaagcactgaacccctaaacccagtattgtaaaatctaaaccctaacccctaatctataatccctaaaccttaaaccttaaaccctaaaccccaaaccggaaactcttaatccctaaaccttaaaccatataccatatacccaaaaccgtaaccccaaaataatatacccttaattgtaaccctaaagccctaaacactaaaaaacctaaaccctaaagcacactaaacccttataccctaaaactgaaactcaaaaccctaagcacaaaacctctaaaacctaaagaataaaccctaaaccctaaatcataaaccatcaaccatgaacactaaaccctaaaccctaatcccctaaa

SEQ ID NO: 94601 - DNA, 695 bp, Cannabis sativa
  modified_base (656)..(656): a, c, t, g, unknown or other
gtcgctttgtcaggtgataactctatgaaatagagttattgagctcttctgtgcattaaattagttttgttttcaagtatttttagtttattttaataatctttttatttagatttaaataaatattaattttaatattttttattagttttaattaatatttttttcatgttaaatttttatttatttagtctcctgattaattaaatacaatcatgtatggtgttgtaggagtttaaaatgcaaaattggcatttagtgtattgggccttttttttttttttttgagaaagaagatcaaagacaaaaactagagctgggctaagatcttcaaggagaggaactgaaatggttccaaattatctctttgtccgttccaagggctgatctggcaagatcgtgagctatggtgttggtagacctgggaatgtaatggacaacagcacctggaaaagacgacaaagaggaaactatcatggcaactagacccgagagggctgaacgatctggagagaacttctggatacggtgcaccaagttctggcagtcggaggcaataacagccattggaaatcgaactgctttacaccaaagaagcactcggtggagagcttcagcttcagcaaaaatagggggagacctgaataagaaggagncgtgagagttgcaatgactgtcccatgagaatcagttac

SEQ ID NO: 94602 - DNA, 559 bp, Cannabis sativa
gatgctgacggagatgtcctggtttagggcgtggactacgtcagtgaggagcttactgctgtggttcctcacaggaggcaaagtgccttgggcgccaagtgggtgaatcctccgtcaagggttactgaggcgtgcctgctgactctcgaccaggatggctacctgggaaaattggactgctacattcccgcccactataatcgtgccacaaaccctgaaagggggatgtgcgcttggtcggacgctcatgcccagcaaggggcattgatgcctttgcatcaataatttaagaatgtggcggactatttcggcctctgtccagcccagttcactcctaagggcattaagtatctgtctgccctttttgtcctttacgcctcccagaagtgggatatgccttctcctcacgaggtcagctggttctttgattttaagtccacccccatgaaaggcaggtcggggtacttctatttctctcaaccagacttcaagtggttgacgggcattgatgatgcagccatcaataaaattggacgttttgttgatgagtactttttgg

SEQ ID NO: 94603 - DNA, 4010 bp, Cannabis sativa
  modified_base (419)..(427): a, c, t, g, unknown or other
tattttagtattttattagaattgttctgaatataaattaaataaatttttctctttcgttgtaataataaataataaaataaaagatttttttaacaataatttatatttttaattttctaatcattaaaataaaaaagtataaaatatttaatttacatttatacaaattttaataggcaaaaaatactaattatgaatttaataactttattggtaagaaaagttaaagcttaaatttttacaaggtgggcatagagaaaaaaagacaggacagggcagtgtcatcctccactaggctgaaatctgcaacgaaatggcgaagcagtgattttggttttattagtaggtgaaacagtttgactattcttctccattttcatttgggtttttctttttatattttatttatttatttnnnnnnnnnattattattattatattatatggtaaaggaaacgatataatcatacaaagcttccgttttttctccttctctctctctctcttcccccctgtctgtgtcaaacccctcttccatagttgtgtgctctcgcatatttcgggtattagctgtacatcttttttctcacatctataagggatgatttgacctgggtttcttctgtaagttgctctatttctctctcttaattcaatttcaccgagaaaaattggtgtagaaagatacatggatgagcttgtttatttatggtttttgagaaaagggtatatatttgttctagttttggcttcagattttggaaagtggattacttgataacatttttgtggacttaaaagggtctctaatggctttcttttctttccatttgattatgtggtcaacggtaggtaatgatgtctgcgctcgttattttagccttggtttatgggtatttagattatttagtcttttatggtttaaagtgaaagaattggtttttatttttttggggggggatgttcaacttttgaagatccaatttttaaggaggaattattagcaacatgttatggtttatgagaataaggagaacttagaagctttgaagatccaatgtttgaaaatgaatatatagattttttattttggccaacccattattatgataaataagataatgaaatcaacccatgttgctaattggtaaggaaaccatgtagctaccgttggtttagaactttaaagaaaccatttttaacaattatgcctttttgggtaaccatgaaatttgtattagatgcttgcttgatattagttttaacacataaagttcagaacactatgtataacagtttagtctttcagtcagtggtatggatttgacaagaattgaactattttaatcatatcgaattggattatatgattttgtttctgttaaactcgagagtaatacgaaggcctatgttttacaaggtttggttggtctacttctgagctgttaagagtttcaaaatgatttatagtactttgtggttgccagtgataacagttcctttaacatggcataaagcctaggtgccttatttagctgttgatacccgataagtttgcgttgctttggtgtgttgaaagttaaaagttcactgttaggctggatcttattattaagattcacttttaaaatttaggaagcaatattgtaggcagatttactgcataggtttcacataaaggatagaacacgaacctagtgttgaaatattattttgggtttgcgataagtgtcttttgaattctgatgaaacttgtcttttgggtctatgccacttcttggttatcttttagttgtcaaccttctcacagagtaaggtttttatgtgtgaaatcatggacattaactggaattagctttcgttttgattgggcatttggtgttatttttataggtcctatttatgtgcttgaaagacggaaatgtttgattgtggtttgaagtcgcaatacttgagtggccaacgcgagaagtttgtaaggtactgaatctgatctttggtctttctaatggctgcactagtctgaatgttaagtaattagaatttatgtttaggctgtgttattttttttttcttttaatttatgaatttggctttttttgtttgacaatatacataatcatgagctgcagctggctaaaaattaacagttgtgtgcatgtggataactattaagaatagtattgtcagaaattttattaagtactgaaatgaacaaaggaaaatggtgacttttgtaactgtatacagttgaggaggcattttggcacaaatagatttcttattcataatagatttattgagaatgagatttcacttagctagtggtgagttcttgaagctgaactagtacttaatattcatgtaaaaagcttttatcttttgttgtcggggcattttagtttcgatgtgatgtctacttcttccttttctttgattaattgggttgaggttggggtttttttttcaagtgctggagctctagttttgagtattatatgaaaggggtctgatattgagtttgcttgcacaattcatttattttccagattagacgacttggactctagattatcatcaccgtctgatacaggagggagaaagtgtggatttaacattgacggaataggtggttctcgacatgctagggatacaacgcctagatcatttaaaaaaggaatgataaagggttctgaaggactcaagtccatcggtcgatttgcacgtgcagtgttccccgaagatcttaaagtttcggacaaaaagatatttgatcctcaagaccaatttctcttgctgtggaatagattatttgtgatatcatgtattctggcagtatttgtggacccgttgttcttttatcttccagttataaatagttcatcacactgtcttggtattgatagaaaattagcgatcacagcgacaacattgcgaacaattgttgatgcattctttcttattcacatagctctccagttccgaacagcttatattgctccttcatctcgggtatttggacgaggtgaacttgtgatagattctgcacaaatagctaagcgatacttacggggctatttcattgtcgattttttagctgttctacccttaccacaggtttgagaatcgtatctgtttttatgggcccattttgctcttagttcttgccttttattgttcattttatatctaaactatccgttttctgtgttttgcctcagagttttgtatgtgttcttgcatttaaattaaaaaacaatatttcttgctggttttagagcccaaagtttattgtaattttttgttcatatctgattatcaagttgaatattctaatataagaaccaagacaagtttttttctctgaaatagtttcgtatacaggcttctctgttgacattttcaggaatgaggactctattttgttgtcttgatatgacctttaacaaattcagcctataatcatttcctgaaaaaaaggaagagtgttttttccaatatttatgaggtcaagtagaatccatatcaccatcgtcatcataaaatttccccaccttttctgataatctccagtcgtacattgttgtacactgtaaagttctaaattgatcgaaaattttgaaaagagtcacaagattcaatttctgtagattttttattaaagaactactgtagcagttaagttttttagctgaaagaactacctgtacttgcatttgtacaggcatctgaaatatgttatcaataacacgaacacatatcgaattttatttgtctagtaaagaagtttctgtcatttctgcaggtatgcttgcttagttcttattacttgattttacattacttagctagctgtcatcatctatgccaagtacctatattttctgtaaaattatatttctttcagttgtactcgtattgttttcctagctaaatagtaatcggtgtatggaggagtttctgccaacctaactctgtggatctttcaactattattttcttgaaac

SEQ ID NO: 94604 - DNA, 964 bp, Cannabis sativa
  modified_base (552)..(565): a, c, t, g, unknown or other
  modified_base (773)..(774): a, c, t, g, unknown or other
gaggctgcacgtgcagccctcgagaggctgctagtacgccctttgtgcgcgggaaggagtagttgcagcctccttaactgagaaatctcggtcagctgcaaggtgtatgcgcactgctccgtgtttgaagaacggacacatttagacaaaaaaatgtctgagatctgcgtgcacaacctcatcttgtctgaaggtctgtgcgtgcggtgcaccaaatttcgacaccattgaaccccgattttcaaactttcataactttttcaatttttatcagaattgagttctgtaaaaacctaaattacttaatttttcataaggaatccagataaattattttcagaacgaaaataaaattattttcataaaacaatgtcataattcatatacattcatcatataacacataaatcaacatgaacacatccaaatcaacacacaaacaatattcatcgttttaaatccatatttcacgaaagtaaactattaccatggctctgaggccagctgttgggaatattttactagggtcaagatttactaacaagtatgttnnnnnnnnnnnnnnaatatgaattctctaaaataataaaaaataaacacacaagggtttaagaaaaccttacattgattgctgtggaatataatgactccttccgttcaagatctcaagcccttgattcctttctgtagcagaggattatcaaggtcttaacctggatctctttctctccttcgggtttggttaccaacatcttactcactatgattgagtnnttgacttgctatgtgtgggcacggtactcattcattataggttttgaaagtgaagaacaatgagggaggtgaaatctctatagaaggagagtatcatgttgacattagtttgatgagtgagagtatcatgttgcttttatagtgtttcaactagggcttagggttgaattatattgattaaaaaagaata

SEQ ID NO: 94605 - DNA, 540 bp, Cannabis sativa
gtctcaaaagaaggcctactgaccgaacaaacatataaaaaatatagagagaaggcaatcaaacagcgggagtcctaggctcttgattaggatcaattgggtctaaaggagccgaggatcattggtctgggcggaaggagcatcatcattctagtcggtaggagaagtggaagtggtcgcctcaaggttctcattggtcgcctgagccatgcagtaatcaagaaacatgtctttggaagtgccaaggtaatcaaaatttcctttgggattggccttctagaagtcataaaaaatctcgagaccaggtgtctctaaggtatccactttcctcccgagcttctccaccttggacttttggctcttaacctttgcctcaagttcctcttccctggtcttcttgtccttggcctcatcctccaacctatgaagaagagtctggagaccctctctctcagctttgagactagtaatttcctgagacaaagaaagattgtctgcctcaagctgcgcggttgatggcgctgttgggttttatgccct

SEQ ID NO: 94606 - DNA, 595 bp, Cannabis sativa
atttacatagtttatgtgacatttaaattctgtaattgatgcaatttatatgttaattaatttatgcaagtagataatttatgatttaggaccttaatgatttgagaagagttagagttacttttatcatctgtcatcacttaaaggaagagaattaataatttacattaacaattgtgtaattaaaataacatgattcatattcctaagcattcatctatagtcaatttgtattgttattttattgtctttttttttggtactgttgtcccagtacaacatgatttgataaatatttattatacaaatgtatgatcatatctattttcaatttaatataaaatttcatatatttaaatatatacgagattaaattattatcattttatcaaaaataaaaatctgtgttagttgctgttattggtagtagttagatttgtatgaaaatttgtatatgtttgcaagcaagtgattgaccccttattgtattagtatatataccttatagctaaagaaagtaataaaatttagggtttttttttttgttaattagaagaaactatctaaggcaactctcagctttgtaaaaaatttg

SEQ ID NO: 94607 - DNA, 1118 bp, Cannabis sativa
  modified_base (472)..(479): a, c, t, g, unknown or other
aaattattcgaaatttttcaaaaatttacagggataatgtaagcataacaaacacccacgttaaaaaaatttgaaaaaaaatattccgatatatgttttcgaacgtgaaagttgactaagagattataacaaaggttgacggtagtatttcctctatttataattaattaacaaattgttaactttgctttaatagttaaaataatttaggtgtacctttcaaaatgatacgttatttgtctttaaaatatatataatatttagatacatatatgctgttacaaatttagttttagtgataataaatattatcactaaaaatatatttaatcacaacaaattgtaatttttatgactaatatctttaaccatgtacaaattttttaatcacaatataagaataaataataatttataattagtcataattttttttacttttaactacaaaaaatcttatttttagtcacannnnnnnntgtgactaaaagtgaaaaaaattgtgactaattataaattattgttcctaagttgtgattgaaaggtctgtagcaaaaagtattagttacaaaaattacaatttgttgtgactaaatgtatttttagtcacaatagttgttgtgactaaaactaaattagtgacaacttgtatctaaagattatgttttagtcacaagtaagattttgttgtgactaaaagtcacatttaattacaaaaaaattatatcgatcgtgactaaaaagttataactaaagatagtttttattgtagtgtttaatcatccattttattgtcaatcatatataataacaatgtatcaaacatatgatcataaaataaatatgtgaaccaaacaagtaataataatataattcccatatttttattgataataaagttcaagattacattaaaatagagttttaattaaacacaagacccaacatatttattcataatgttacctccaataagagtattttattatgttttattttgagcttattatagcatattattattatcttctagtatactttagaaaatacagagaatttaatatatcatttaaataataacatattttatgaggccaggaatgtgagtattgataata

SEQ ID NO: 94608 - DNA, 829 bp, Cannabis sativa
cttcaagaattgcagcggaatgaagctttgttctgcgttcttgatcgattacctagctctgatttgtggaaaaattacgactaaatgtgcataatcaaataaaaaaaaaactctaaataatcaaaaataattagcaatgacaagattatcaaatcaaaaacaacaatcggatgaaaatataggtgaatagagtaatgaaaaccaaaaaacagtaaatgcagaaattaaagaattttaacaccaggatatatattgggttcaagttcgatagatcgatgtgatctatggctctactccagttttggaacactactgaaatccttctttattgattaagcaagaatatgtacaatacaatcgagacaagattctctgttgagttctcactaagtgtttcaactctcacacttacacccaagaatctttttcatctacagaagattgttcttacgaaattcaaacccaatctctcttttctctgcacctctctctctacctctcaatattttctctctcaaactctcaatctcatttttctgagttctttatctcgtgtctcaaaataacaaagtcaaggtggtatttataggcttaggatcatcatgatcctaaagtcggtggctgcaagaagcgaggttgttaagttagttataaataactaacttaacaaactcctcatagagcgaagtctccatgtcagcttaagtactcgacccttcaggaacatatatgagcttccaaactcacagactatccggctctaccatcccaagagtgacaactagccagctggaatctcttttcaggggagggctagttatcctgaaga

SEQ ID NO: 94609 - DNA, 639 bp, Cannabis sativa
tatataatttcttttaaaaagcaaattaataaaaattaatttaagttggatatatacttttttttttttgagttgtaaatataatgacattttaaaaaatttcaattttaacgtaacatgagcctatccgctgtctggtaaaccttctaatgggccaggttttttacatgggctaaaatttctggcccatatttagagtccatggccacgttccacctttataaagctcaggtttaactcaaaccctagctctcagtgaagagaaaacctcagcccgcgtgcgcagctcatttctgattcaatgggtacctttcctatcttcttctacgtctccttaaaccctaatctgagtttgattgtgatatgtgattatagcttgtaattctacgttctagtgtatatagttttgttgggagtatatgttttaagtgctgctattcatgtttttttttctgcttttctagagatatatgtttgctctgtttaaatagttgggttttataaaatttgttttgttacggattgaaccagaaggtagcagaaaataatgggtgatgagctctgttgttttcatttatttatttcaaaatggaaaaaaaaagttggaacagtcaattttttgtgcatcggagtgttttt

SEQ ID NO: 94610 - DNA, 675 bp, Cannabis sativa
gattttattctgtcttcttcgatctcgaaggcttgaatggcatatcaaagtgttatcatccccatttttcactcaagagaccttggctttctgctgtagcatggataataagtcactatgaacctttaaaaattgatgtcgagcctctaattcgtcctggtgcagcagcaagttttggggttccatttgcagcttattttgacacatagccagcacttctttggcctttacttcagcaacatgaagctcagaaaaaccttgcttcacaaaatattattcagccattagtgtaactgaaatacaagtagaggagttggaactgaaatactgggggggaaaccattgtacaagataattggacaagtgggaaacccaatgatggtggattcggttactaaagaaagagacaagttaacctttcctagagttcttgtcgaagtttcaatgaaccaagagttcccagacactattgagtttgaagatgagtatggaagtaatgtagaagttgcaatcaagtatgaatggaaacctgcacctctcccttatatttctgggatgtatagatttagttcatgcactaaggaatgaacaacctgcacctctcactaaggaaaattccaatgatgagtaaaggaaatttgagaggtgggctcgttcaaatcgcatgagtctaat

SEQ ID NO: 94611 - DNA, 846 bp, Cannabis sativa
ttcttgtcccaaaaaccaaatggaatggaacttggagaacttgtattgatttttctgatatgaataaggcatgtccaaaggattccttccctatgccaaggattgaccagttggtggatacaactgctggacacgagcttatgttgttcatggatgcatactctgggtataacaagatataaatgcatgtcccagatcaggaacatacaaggttcgtaaccaacatggtactttattgttataaagtcatgccatttgggttgaaaaatgctggggcaacatgtcaacgacttgtgaatgaaatgtttgcaaatcaaattgaaagaaacatggaagtatacgtcgacgatatgttggtgaagccggtaaagagtggaaatcatattatagacctcacagagtgctttgaaatattaagaaagtacaatatgaagcttaactcgaaaaagtattcctttggagtttcctcaggaaagtttatgcgattcatagtcaacgcaaggggtattgaagcaaaccctgagaaaataaaggctttgatagatatgctatcaccaaccaaacaaaaggaagttcagaccttaaaaggaagaatggcggcatttaacagattcattttgaagtcaactgataagtgtctaccatttttcaatgtattacaaggcaacaagagattcgaattgacagaagaatgcaaggattcctttatgagcataagaagtcatttgtcgacacctccgattttggcaaaaccagtaactggacacactactcctctacctggctgtctcaaaaaatgcaattagtgcagcaatagtgtgagaagatggaaagcaccagcaacct

SEQ ID NO: 94612 - DNA, 604 bp, Cannabis sativa
cattcaaaagtctagacagaatttccgtcgcccaaatgaacaagtagggagacataggatcaccctaacgaaggccacaagagggtgaaatcttaccaacttgaccctcattaaggcataaattaagagatgtagtagtgatacactggaaaatccaaccttaaaatttttgcggcacccaaaaccccgcaagcacttggtctatgaaattccagcttagtttgtcataagctttcataagatcaaattttaaggcgaagcaaccttctttgcctttcttccggttgaaggagtgaaagatttcttggatgattgcattattatcctgaatattcctttatggaacaaaagcagcctgggtagggcaaataagggatggcagcagcgatttaattctattggcaatgattttatagatgaccttgtacattacattacacagggagatcggtttataatcattagttcttttcggattttggattttgggaataagaacaatgtttgttgcgttgacgcctttgtgcataattcccatcctgaagaaatctgagactgcttcacagaaatctacacccacagtatcccagtagtgcttgaagaa

SEQ ID NO: 94613 - DNA, 594 bp, Cannabis sativa
tgggggacttttactcttttggaattcagacctggatgtaactataagtaattattctactaatcatatccactgttttatctcgtctgttgttttttctagtttcaattttactgctttttatggtgctcctaaccctgtgaatcgtatccacacttgaagaatcctctctaggattggtttgccatgcatctctctcccttggcttatcatgggtgactttaataactttctaacttggaacgacaaaacaaatggcaatagtagaaatggtgattaaaattcttttcaacaatttctggataatttccaattagaggtatcaaaccctttgggaccccgtatgacttggacaaataacaaccagggccataggaacactcacgaacggttggactgggctgttagcaattctctttggcacatgacccaccctagtagcactcttaaccagcttgacttttttggttctaatcatagggaaatccaaatcctttcacatatcccaccccagtcttcgaacctggacacttagactagaaggttcctcttagaaaatgtttggctcactgagccaacctggaatgatgtttt

SEQ ID NO: 94614 - DNA, 512 bp, Cannabis sativa
acttgggcatgattagcatttatggtctaactttagggggagtgttaaaatattagctataaattagctaaaaaataaggtcaattgtaattatttcttttcttattttctctactttcctattttagtttctccttggttgtataaatatatgccatttacatgaataatgcatacaattaatttaccattttctataattatttagctaggtataaataatatttcttgttattgttataactaaccctatcgagagcatattaaatcttacatcgaatatttttttcttcttctttgtttgttctttgtatctggattttcttgcaggaactccattagatatgacttttggttctatacaagattgaagctaagatgaaattactaaagagagttgtcttaattgctcatatttgaaaggagttcagattaagagattgttgaaaggatttcaacaataacacaaatggatcttgtgtttaataaagggatttaggtttagggtaatt

SEQ ID NO: 94615 - DNA, 556 bp, Cannabis sativa
  modified_base (187)..(199): a, c, t, g, unknown or other
ttccataagatcttattaaatgtcgtgaaccctcgtttctcagtcctttaatcacatgataatatagaagaaaacagatgatgaattgcacttcatatcatatgtatactatacatgactttgtagatcttattacaactatttcaatatgcaaaccattgacctgatttcaaaaaaaaaaaaaaannnnnnnnnnnnnaaataaaataaaataaaaaacaatgaccatatcccaataacacttgctgaggggtatgatatttaatgaaagatttcattgtgttaaggagagtaagtaatccttcctttccaaaaaacaaaaaacaagagagtaagccaaatatagctattacaagtaagaaataaatcaatataataaacgaataataatacccaaaataagttgtaataatacatcctgatcttaaagttagaataatattttataaaatataataaaatatatttacttattattttttggctaattataatttttacaacctgaactttgacatgtaccaaatcatgccacttgaacttttaaagtcgttaa

SEQ ID NO: 94616 - DNA, 2322 bp, Cannabis sativa
gattggaaattttattctagtcaggagatttcgtttagaatcttgttattttggaaggacaagagggtgaaagtgaatgttttatttgaggataagcagctagttcattgcaaaatcaaaatggttggttttaaagaggagtttttcctcacagcggtttatgggaagaatcagatgagtgagaggaaggacctatgggacaaattggagggaattggtcacttgaatgagccttggattatccttgggaatttcaatgccatgtttagctacaaagataggtgtggtgggaggaaaatcaaggatatagagatccaagatagcagaaactggcttgctcagggtcaggttgaagagcttaaatcttcaggttctttctttacttggtccaacaaacatgaagaggggagtttagtctactcgaaattggatagagtttttgctaacgatgttgatgcttttccgaacgttgaagccagctttagatggggagctatatcagatcatagttattgtctcgttaagcacattacaatcagtaatagaggtctcaggccgttccgcttctgtaactactagacctctaaagcagactataaggtgaatgttttaagaacttagagaaagaggagtaccacagaccttaaaagtctttatcagcaattatttaggattaagcatgttcttaaaaattgatatatttccaagaatgaagatctgagcaagagttacaaagacgctaaagaagcttatagcaaagctcaagagcttgcggcaaatgatcctcttagtgatgttgcagcaagggggaaaggaaactctatgaggcttttttggagactcaaaaacagtatttcagctatcttcgacagaattcaaaggtgaattgggttagatatggggatgaaaacacaaagtacttttgtgctatcatggaaaagagaagggttgagaataaaatttgttcctttagtgctaatggggagattattgatgattacgatcgggtcattgaccactttctcactcattttcgtagctatatggggaggaaaagtacaacgactagaagactagatttggaatgccttgacaacggaaacaaactgaatctcttgcaacaagtgagactaactcaacctttcactaaaaaggatgcgaaattggccctgtttggaattcactcttcaaaaagtccaggcccgaacggttttggggctggcttctttaaagatctttgggctgacctgggagatgagatctctacgacagttttgggtttctttcagtttggtcatcttccaaaggaggtgaatgagactgccatatctcttgttcccaagtctgagaacccccaaaatgctagtgactacagacctatcgcctgttgtaataccatatacaaatgcatctctgagatgatctgttcaaggctatcagaagttcttcccgatcttatacatgacaatcaaggtgccttcattaaacataggcttcttgctcataatattctgatcttgcaggatttgttgaaagggtatacccgaaagaacttatctccaaggtgtatcttaaagattgacttaagcaaaacatatgacacagtggactggaactttgttgctgatcttttaaaagggctttgctttccatccaagttcattctgtggattcaaagttgtcttcatggagctacttactctcttatgttgaatggaagagtccagggctcttttaaaggagagaagggtcttcgtcaaggagatcccatgtctccgctcctctttgtgctcataatggaatatttgactagattactcatccagaagacgaaggagaagggatttggtttccatcctctatgtaaatctctacaccttgtcaacttgtgttttgcggatgatctaattatcttttgcaggggtaatgagaaatctgttcatcttgttaacgaggctttccaaccgtttagtgaagctacaggtttaatggccaacaaaaccaagtccacggtgtactttggaagaattcagaatgatggcaaagaaaagctcctgagcatccttcaaatggatgagggaagctttcccctcaaataccttggagtttatcttcggccaactaagtggagggttacaaattgtgaaataattttagacaaagtccataaacacttgcacaattgggctagcaggaatctctcatttgcaggtagagcttagttgatccattcggtcctccttggagttcgaaactactggatgaatctatttatgctacccctaaaggtgactgttgccattgataaaagttgtagggact

SEQ ID NO: 94617 - DNA, 887 bp, Cannabis sativa
aaaaaaaaaaacagagcaccataactatacaacaacgactcaattacgttaactttacaaatctctctacctctcttctctacctccactccgaacaagtaactcctcatacaactcccattagacttgctttaatgtaggaatgatgatttaagtttactcacaatttttttttttaattttaatcacaaatttaattgttactaaatgttttttttttgttagtgtatattaacttaaatacactttaccatgacaaaaaatacatatttttaatgaatatttatagcttacaataaaaaaattattgttaagactttcacccctccctcatctcatctctttcatagattttttttttccttcattctttaaatttacattgttaaagatgagcacattagttcttttttttaaaaaaaaaaatatatatatatggtaatttaataattagagactataagtaatgttttttaataacattattttatttcgaagaacaaagtgaattgtaataattacaatatatattagcatagatctgcatattttattatgaaaaaaatatatacttttaattaatatttatagctttttttgataatatatcatactatttattgtttatatttcatgtatctttaatttaataattattttaaattatatagtaataaatttcgaaataactaatacaattatatatattagctcaatatgtaattttaatttatctttattaattatgttttttatattaaatatctttactatacattaatatatgcttatgtaaatttaatataatatttattaaaataatattaatatattttaaatcaattgatacttaaaatttttctttaaaatatataaaaaaaatcgta

SEQ ID NO: 94618 - DNA, 1503 bp, Cannabis sativa
ctggtgatcttgagccaagaataaaaatactcaacatgaaattattatctttcatacaaagtcatgggggagattgtagtttgccagcacaacaaactacatcttgtacgattgactctaatttccaaaaggattaaacccatcggcaaccaatcccaaatgtacatttctagggtctctcacaaaattaagatatctagcgtcaaactctttccatgcagacctatccacagggtgacacataaccccaacttcttttgatctcccaatatgatgccatatcatctttttggttgtatgccttaagctgtacattctttttaaacgaagagtcaatggaaaataatgtatcaccttacgcgggaccttttgtccttgagtattaggattagtccatctgctaattccacacaccggacataaatttttcaaagcatgttctttgtaaaataaacagcaatcatgataacacacatgaatggactgatttattgagcttctttttagcttcgtagtgggtttcaagaatcgtattcccttttggaaatgcaaatttcaacaaactcagtagttgatcaaatatgttgttcgatattccaccagcaattttcaaatgcatcaacttagctaagaagttgagagaagatatccaattgcaacatggatacaactctgcttcaatatctttaaacaacttgtcataatactcgcccatacggtttccatcaacgccaaccatattttcatcacaggatggagtaaagacatcatcgatgacgtcatgcatctcatctacatcattctcatcgactaccgcatcagctatgttaacttcctcttcttcgtggaaaatctattgctcgtaactagtttgaaaattctaacgcaatatgtgtatccacgcacatccactagactgcgtcgtttgagattgacgcatttcacacaaggacatttgattttaccgttgttcagccattaataaaaaggttaagatacctctccagtaagtaggattagtgcgatctcgtaataatatccaactcttatcgatcgtgatctatgtgaaaatatcgagatggttaatttttattgtctttaaaaaaaaaattaaaattaaatgtattatgaagagttttaacttttttttataattattatttttttctaaaatataaatgttactactctattaataaaattaaagatttattcatttaatctataaaaaatattttaattaattaattaaaatattcaattattaatttgtaaacttatttttatttttatttcaaattttaaatttactttttttttttaactattttttttccctacaattattaatttttctaaaatgtaaatgttattgctctattttaaaaattaatgatttactcatttgatctatacaaatattttaattaattaatttgtaaaattattttttatttctatttcaaatttcaaatttgtttttttaactattttttttataat

SEQ ID NO: 94619 - DNA, 7099 bp, Cannabis sativa
gaaagataaatcaatcaatcagatagcacatattacatcttaaaactaggagatctatttattagtgcacatcaaacaaagcaattcttgaaaacaattttagatagatttgtgagcggtagaatactcatgcgtgtttgagagtgttaccttttcagaatcaaggcctaattccttcgaaagattctccttcacatctctagatggaagttcattctcggcaaaaacttcacgaagcctctggtgtagtacaaaagtatgtatttaattagtacaagaaaatagagctctaatcaaaacttttgtggggaagatagactacctcaacagcgatccgaggaattctgaaaaatgacctcctaatttgtgcttcaggagggagttgcccttccacttcctcaacatcaacatctgaatttactttctcactttcaaaaagtgtcataagggtactagcagcatcagactctttcgctcttcgctttcttttggaaggaccccaatcttcatcttcactaatttgctcacatggaggagcatctttcccaaacatttccttttacaagcaaaataatctcattaaatctattactgaagtttggaaatactaaagctaatatttttatcacatattgctcaaggatccatgcataatctctttcttttactttgaaaacaaatagatactaaagtttaaatactcacatcatataactttctataatcaacatctcttctctgcctgcggccacatactatgccaccatctgattcgtctgatccaacactaccatcagtagaaaattcaccctcccacacatggtcatcagtatcttcaccactaatgctgctgctattttcttttctctctgggtcataattttcatctccagaatcatctgaaggccattccacatctggatgaagtgatgcatttgcatcttcaggcaaagcagcttcctcctcaaaaacatccttcacagaaaataactcaactatttgactactggtaaaaagagaactacatttaagaactaaaaccagtttcagaatgactaacctcccaactattattcatggaaaaatatgtcccgagatgagcattaactgcttctagaatttccattctacactcgcaaaatctgcaaaaccatccttgatctcccggtggaactgtaatttttccgtcaatatagtcaattattaacctatcttattgattagaaaccaaatcaaatttacaagacagtggttaataaacttactactctcagtgtccaatggaggatcaagacatttctgatgaaaagcagaattgcatgttccatcacagagtataatatcattatcaggaaaagcttcacgtaacttacactttgcacaaaatatctaggcatttcaaagacaaaaacatgaatatagaagttatacaacatactttagagtaatacaaagtacttaaaaggaatttaataaccaggttttcctgagccaagttcataaagatgtagcacatctctacactagatgaaaattcaaaatacaaaaagaactagagcgataagaagcaattacatgttcatggtaaacagatccatcaggagccataacagaatcttcgatacttcctaccgaactaagggaatccaattgtctaatggcatctcgaataccaagcttatacttcaaaatctgtttcttcgccctttgaagttcattttctggcttaatcttttctcgactgtagcaaaaatttaaaattaaaaacatcaaacaaacaagtaaccacattgaaaacatttggcttaatcttttctcgacttgcaaaaattaaaattaaaaacatcaaacaagtaaacacattgaagttgaaacaaaacaccaaaagtttatgctcattcatcaactgattctacaccgcaagttatacaagagttgcacaacattatcaaaatatagtaagataattcaatgcaaattggccatacattgtcccaatgataatatacatgtagaccagttaagtatcctcagcacacacatacatgttaagtaactttaaattgtcaacattaaagtgaaaggctgttgtatgattcataaattgttcaaacttaaaagaagataataacagatagcctcattagacatcttcaaaacagcttatattttttataatacttgagctatcaaaaatgcaccagcaaaacggtttttaaacaatagacataatagaggttatctttcacatacctctgtcctttccagccttcaccagaataagcatcaataaggttctgctccagtttcatttggttcaagagataccttgttctcctctgtaatcgagaagcttcatctaactcttcatttctagccttcttccttttctgtctcctcctcctcttctcattgtttggttcaatcttttcatattgacacttcaataaagagtgtttctttgaagacttagtaccacgcattctggaatctagtaagtattcaccctgaaaattataacagaaataatatctacttatatatattaatgaaagagaaaacaaaatcactaaatcagagacttcaggaactatgtccttctcggcaaactatttggaaagaaaaaaaaagcagtaattccaactccagctaaaaagatttttttttcctgggaattcgggaaactactaacaaaaatgtgataattgatgttgcattgataaaagaatatttttcagagattttagttcagaggcaataaacttaagtaaactgttctccagaaaaacaaataaggcctattagagctgctctaagcatgaagagatcactcgagaattccactatactagctaaaaaacagaaaagcttgatcttttacaataacccagaaatctaaaaagacaaccatttcaagtaattctgatcactgaaattgaaatcatactgatacccaaatgaaaattttgcaagattaagccaaaatcaaagcttggaatcaaatgtaaatagaagataaaagactgacccaggaaagaaacgaaacagtggaagagtgggggacgatctatgaattgatactaaatagaagcaatgggagggtatatatacatggaagaagaggcatttgctgtgattgatgatgggatttcaaaatttgaatttgaaattttctctttatgagatttcttgtagtcagtggaaggcttcaccggtgatgctactttcgaagcgccacccaaacccaacggtctctctctctctctcttaagtctccagttccttccgtctaccaatctagttcgtctcaaactaccactttcttgcattaccagcacacttttgttttcattttccaatttttttttcccttagttatgtttttttttttttttcctgtacttatattctatgagtgaaagatatttataatattctaaattaaaaaaaatattaaaatatttctttaaatagagtcttctaagttctaacgaattaaaaatcatcttgctttttatttttatttcattttattaaagataaaagtacatcaataaattataaacccaatcctttgtaaaaaaaaacaataaacccaatctatttagtaagaaaaaaaagaaagttgtcataaatataaagtaaaaccatcaatataaagtaaaaccgtatttaagaatactctattcaagaataatctctaatttattataaaaaattaaagtctaagttataaataagaataacctctaaatttaaattagttatatattttctaagtcccgtattaacaaagtatacatctatgctctatataagaataattacattttaataaaatatatacatatattttataaatttattttcgcaaaattaataattttatttcaaattataatacatgtataaataatatatttactctaaaataattttattatgatatagtactcatgattgtttattgttattattgttatattgatattttttggtatttaatttttattttctagtataactctatttagttataacctcttaattagaatataattttcttagtcccaattgtattcttgaatagaggttctactgtatatagcacaaaaaatattatataaaataattaatattcacacactaattagtaattatacataatgagtataaagacacaaaaatttcaaaggaaattgcattgtatattttattttatttgttttaatttttacctttaatttcataatttttaacatatacctacttttatagatgatgttcctattatatcccttagattaatgtaaatcatatgtacacttaagtggagggtaaagatatattaggcaatttactcataaaagtgggtagattttaataaaataaaatatgagggtatttttggttaatgaatataaaaaagaggtattcctcaattcatctcaaaatttcacatactatttatatttatataagactaggaaatagaccgcgcttcgcgtgcggcggttaaataattatataaatattaattgaacaataaaattagtatcaaataattttaaatttatttttgtgtattttttaaaaaatatatgcttatttaaaaaaaaaaatctatatagaaaactctaaataataaaaaaattatcacacaacttcttatataaataagaaaatcagacaattttttttaaaaaaaatatacattattgtgaagaattaaaaactaaatatttcttacacaaaatagagatctaaaacagaaaaaagataataaatatgtagaaaattcatcatctctttccgaacaactctaaagcttcgaacagtgagtaagttcttcatctctttccttttttatgtttgaatatttgattttctgggtttccattgtagaaaattcgatagttcttgaacttgttctaggaaaacctagaaaatttaggtttaggaatatgagattttgattatgttcatccatgtgacgtgattgtgatcgcattctgattttgatccacgatattcggtttcacttgcccattgggggtttagtaaaaattaacccttaattcgaagttttgaatttctgggttataaacctaatatcatgcaaaatcttcttttttaatcattcaatcggacctagtcggtatattcaatttgtttttgttcgatatcccgaccatactcatcttgtgtcctatcttttgtagatgaaccctggtgagctttagggaggagaacatcatactcaccaggaccctcttcaacttttgtacgagggtcaacctcgtctttgtgccagtctatcctcatcaagtgacggtctttccaaatcaagctttgaggattgggagataagcagcgaacatacaccttcttcagaactcgaggtgcaacaccatttttatcctgaccagatcccaggtgaaggcttcggacgtttcatctgggagctcatgaaggggtggagacaatatttgtcgtccaactggacatatattgtccgcccagatatagttgacactatacccgtaggctgcccaagttctgctgttgtaggtacgcctatagccactttcgatgtgaccgttgccaggcacactaatcaaactccagccagggatagaatgatggcgcacacgaaacagacggttcgtagatcaaccttaactgctcctcacgtggctcgagttgccacaatgtcgagcgctgaacaagttcagcttgctgctaaggaggaagacaatgagggggatgtcgaagtccaagaggtggaggatcagggcgaggcccgtcctgaaactccatctaaagtcgaggaagagggagtttctcgaggatcgcccttttggggcttcaacgaggaagcgaaacccatgtccaaggccgatgaagtcttggtagagggtgaagactatgttactgaggaatacactgaggctattcctcagagaaggcaaagagtcgtaggagctcggtgggtttctcctccatctatagtaacccaagccaagatgaagaatttggagaagcacgactatttgggaaatgtcgaatgcttcttcccctttccaagtcactaggcaactagtccaaagtaggggttttgtgcctggtcgggcgctcataccaagcagggtgcaattctgcctttgcttccgtacttcaagaggattgcagactactaccacctctgcctgacccaattcactccgaagggcatcaaatatttatccgccctgttcatcctttatgcctcgcaaggatggggcgacccatccccagacgacactaactagcttttcagcctgaagtcaactcccaagcagagcaagtcggggtatttttacttctctcaattggatgagaagtggctgaagggcactatggacaccgatgtcaacaaaataggacattttgtggacgagcattacttcgtccagggcatggataccgtccacactcggttatggcagattccctcatactgccgccctcctttcatattgagactcagggagagggcacaaaaaattcttcaactaccagaagctgctcggaacatcactttgttggccactaaggccgactatgtcaagtacaaactcttcccaaaggactttgtaccgaggcccgtgaaggagaagaagaaaaaggcaaaaccaagtcgagctggtgggatcgagcaggagaaaaagctcattcaactcaagcatggggcaaagttgaagggagacaatagagccaagtagtatgctcaataatattcagagcaggagaggtcgagcaagaagaagaaaaaggttctcccaaccgaccaagcaccagcagaacacactatcaggattagggaacctgatatgcatgctcgcccatctgcccagtggaaggaaaagggaaagtcgtcttggtagagcaggaggacttttcagacgatgatgtcccgtcagtgcttgttcgggaaaatgcccctggccgcgtgcagggtatttttaacttgcacttacttttttttatactatgcttttacatcatatttgcttctaactgcgtcgttttgttcgtgcagaaatgtctcaaaaggtac

SEQ ID NO: 94620 - DNA, 1452 bp, Cannabis sativa
tatatttgatataaatttagtaaatgattaattaagttggtcaggtggaattatctaaaattagggcctactacccaatccataagcaaaaaataatatttttcatttaagaatataaatatattttagtaatttttataaatataatattttttatcataaagagctaaatatttttttttaatctcaggatcgatcatgtacaaacttttcacttctattttgtttaatggattttaaatccaactttcctattacatgaaccctccaatttatgtgtctattcaaataaataaataaataaataaataaaaataaaattaaaatggtcttttttttttaacaaattattttagttgtacttatattttgctgactctaatgaacaaaagagacacgtggtaacttattagttaagaaaagtacaattagttaaaccatatactaataaatataaattattaataaaagaccccctaagatccaaaccaactaataaaacacacaactttttccataaataaaataaacaaaccaaacataaaatataacacaagaacaccgacagtgtccatagatatttatcatttatttcaataaaaaatagtttatccaaatagaatgaagggcaatttggtaaattcacaacaatgggttatgagtatgaccatcttagattgacacgtacaaaaaaaactagtaaagaaagaaagtgtttttctcccaaaaccaggggtactattactcctctctttttcattaaccactagtttcatctcaaactaggggaaaaaaacaacaaaatacaactcttattttattttaattaattaaaaaaaccacacaaaaataaataaataaaaaatcttatttttatttcctacactaaaatggcccctggttttgcctttcattaattcctagtttataaatatgtcatctttcattcccaccctccaccaaaaaaaagtgataaaatttcatttggggttgttctaaattggccaaaaatggaagttgaacaaggaagaagtgaagttagacatgttaagagaagagttgggtatgtgaaaaaagggattttgaagaagaaaaagaggatggtgatgatgaagacaccaaattgtggcccaaattgtgaatatttgagtactcttcaacaattgtttgtttcttgtttgagagtttttaaagggccaaatactattcctttgccttctcatgttaacatcctctctcaaattcttggtatgtattatataaatatacatgttttgataatatatatatgtatgaataattttgaatcttgttgtgatatatatgttttcatttttgttgttttattgtttatctattttggtgtgtagtttatggtgggggtaaagtaattagatctaatatttagaaattatgagatttgtcaccattgattttatatttattttttga

SEQ ID NO: 94621 - DNA, 608 bp, Cannabis sativa
taccatgtaaatttcccttataaataatattatttggtatgaagtgagcctgagtcctagcagttatatttcgatcaaaatactacttacccaaattgtgagcaataaaattaaaagatcaaagaaccttaaaaaaattacatcctaaaaaagagttcattggactcctaataattttctacctcgggtttaaccggtttaattccattttggcatatttaattgacaaaattattttattatatatttatatattttggctgagttgttttgtaatttatcatatatatcttttatcgatttatttatatatttcggctgagttgttttatgcttacacttgtataaatggtacgtcctttctaaagcattagcaaagtaaaattgaattgaatgtatcggttatacatcggattggtccaatattgatagtggaaaagatgtcataaatttactgttatgtcttttctaagtcgatctcacttagttgattttaggtcaattgatctcaatcctaagatggttaggttctaacttaattgtattgaatgggttctttgacttgtttgttaccaccttacctataggactatcccatacttacatct

SEQ ID NO: 94622 - DNA, 653 bp, Cannabis sativa
tgccagaagtgatcaaccaaatcctgccgtagacaatcttttagaatcttgcaaagaacttactagaaactgtgttggatcaacacaaatcttttctgaacgtcaaactgaactagttttgacaatttaatgacccaaaaacatgaacattttgcttatcattttgtatataaataaattgaatcgtaaaaaaaaaaaacattactaggaggcttgttcgtttggggtgatgaaaacaatacatttttttaaaaaaataaaaaaaaaaacaataaatttggatgtttattagaataaaaatgagcaaaaggagcattattgatgcatgagtggcattttgataaatggtggaattgttttgataagtgttttggaaaatagtctgtgtctaatatcggacgactaggtctctggaattttcgatcagttgtcaaaaatttctgaccatcttggaaaatattgatagggtgtgatggcattcaataataaattaataataaggttaattaagatttttaccctctaatctaactttaacatgtactaaattatgttctttaaatttttctaggcgttaaaaatttccttgtattgagattgttagatttaaggatttttatttaattttattcaattttactatttcagtgatt

SEQ ID NO: 94623 - DNA, 1018 bp, Cannabis sativa
attttgttgaggacgaccaacacaagaattattgattgaaattcccttggtaacgtaaaaggctgttaaattgagctctttagcattgtcacaacgaacaactttaatgttgactgaaaattaagtggcaatgagagaaaaaaattgaggaataatgaaagaacatcagatttagaagtgagcatgtatacccaagtatagcgagaaaaatcatcaatgatagttaaaaaatatcggtaaccttcaatactagtaacatgaaaaggaccccatatatcaaaatgtattaaattaaaagcagatgtggcaaaattattgttagatgtaaatggaactcacttttgtttggcaaagtgacatatagaacacataaaattgaaaggtttttcacaaaattgcaaacgattatttaagatagtagaaatgttcatagaaggatgaccaaggcgaaaatgccaggggtccttcaaattacatgtattgtttacaaaaaaaaaatatctgtagtaagaaaacgatgatcttgttcaaagaaaaacagttgtccaactttcttagttgtcccaatcgtagaagtcagggaggaatcctgaatcaaacattgatcaaaagtgaaagtgagtttattaacacaatgttcaagataagcattaacagaaaataaattgaatttgaattcaagaatatgcaagacattcgttaagacaagttggtcagaaattttaacggttccagatttgttgatatgaatctgatgaccattaggtaatgtaaccaagtcaacaacattatttttatttaaagatgtaaagcaatgaagagagtgacatatgtgatgagtagcgccactatctacaatccataagaaaataggaaaaaaattatcattactgaagacgttagaaaccacagaaaaatttttactagtggaaggagcgccttggatttgttgattgagtagtgagatcagctgttgactgagctgaggttgggaagagtcagcggcagagaaaaaggg

SEQ ID NO: 94624 - DNA, 586 bp, Cannabis sativa
tgagtttctaaaaatctcgataaaaagcaacaaaataaataattcaggtagtcttttttcgctaatatacctttattaaattatgtttagttttttttttttttttttgagtcaaattatgtttagttttaatttttatgtatctaaataattgttaatatatattttttaaaattttaaaatgactgtaaaaggtttaaattgatttttaaataaatataaaaattaaatgatctagaccaatcacagagtgacacgtagacaatgacctgacacttaacgactaggtgctcacgaaagttctaaaattctaacagaagatatttttactgcaaattttgtttacttaggtatcaatctacaaccgaaagttaaacttaagtatttttaccgtaaattattttttaatatatagatagatagatatatttattttatagtgtacaaaagaaaaaaatgtgggtagttttaataaataataattagcaattttatcccttgaactttttatactaccaagttgtgtcctctaagttatacgctttgttaataatacctatcgaaatagggtaaatagcggtataag

SEQ ID NO: 94625 - DNA, 510 bp, Cannabis sativa
gtggtcggccatgaagaggggaagcgagattttttgtcaacaatgcattttcaacaataatatgtcaaaaccaagtgaaaaaagccaccaagtggtatacaaaccacttggccgaccgctgccataaaaaatggcagtgctcttcaattttgatgggcactgccacaagggaatggtagaggttgacccttgcataaggaaatgggtttcattggccaagttatattttcaacatctatgtataaaatacaagtgagaaaatttacccaaggctttatgaagcccttatccgaccacagccataaggagtgacagtgcccatcagcccatcaattttgatgggtactgccacaatggagttgcaatggtcggctactacacaaggaaagaaatttcattgtccaagttttattttcaacattcatgtatcaaatacaagtgagaaacaccacccatggcttcccacaagccatggccgaccactgccaatgttcggctccaactggtggt

SEQ ID NO: 94626 - DNA, 731 bp, Cannabis sativa
aaaaaaaatattttcttttatataatgtgtttatttatgttttatggatctggataatacaaaacattagtataaatgaggtatctattctttgtgtaagtgttatagtattggctatcaatgtataatatatgattacgattgaagtgtgtagaaattaatagcactttgttcccaaaatgtaactatatatggtcattacctgtgtaacgagtgcatacagaggaagagtgaagtagctgcaaacgatctggacagtcaccctgtataagtaaatatatattaattattatttaaaaaaatttcaaaacttaatttcaaaaacaaaataataaaatatcagaactaatttttagtttaaactatattataaatatttcactaaaccattttaatatatttaagaataaatagtagtgtcagtacttaaaattttgaatttgtaaacaatagaaacataataattcttttagtagcataagtacttaatatttgtgaaattataactttttttttagtttgggaagtacaaatactgttattttcttacagaacataaacaattaagattttaaattattgagtttagaccgaaacatgtaacattatttaattccaaatttttttattattaaattaaaaattgaatcaatattgataaaattaaaaaaatatatataattttacaaatattaaatattaaaaaatcattaaatttatactttttacat

SEQ ID NO: 94627 - DNA, 903 bp, Cannabis sativa
atgtacagctggagagggttccattccattgtcctcactccctttctgcctcttttgcttgtttatcacaactccaatggtgtctgaccatcaaataacaagggtgaggatgagaaaaccatatcaatattcatatactgttctacttgtacacatgatactcacaaaaacaacaaatgaaaaaacaaactgataaattaaattaaaatgcatgcattatgcttcataaacacattaatctaattaaacactaacaattggagagggagagagagaaagacatataaactcacatagaaacttcaattacattatctctcttcaagctttggacaattcttaataacagaattcttcacttttctgaagttgtcgggaattgatgtcaaaacggggcagtctcttatatagataaactcaagtgaaggaaggttatcaatctcttccagtaatgatgtcaaattgggacagtctcttatatagatagacctaagggaaggaaggttatcaatatgttctatagatttctttccttttcttttcagattataacatatttttagattgtgcttattattattattattattattaaggctttctcaggtattgcaaattaggatgtattaatttgattttaatgcaatacaactttctgttttccaaataaataaataatataggtaaactgtacacaacacaacacaatgataatttatataatatttttgcattttattaaagaaaaaaggaaatacataacgctataggacttacaccacatacatacgtacgtaaaccacatacacgcattcatgtataacattattataattattcattacacttatatctaccattatgcattgacattatttttaatatttcatatatatatatata

SEQ ID NO: 94628 - DNA, 921 bp, Cannabis sativa
aacccccaaccgacggcatagatatatatacattctatacctacggtttttaccaaaaaaccgcctctaaatgttaatgcagatactttcaccccttttttataaattgggttgaaaaaagggaagctgaaggcttacattgtagtagtggaagcatttcagtgtaaggagaacagacgttcttttgtcgacgaagatgttgttaaatttcataatgaacattttagcaatgtttttaggatctctttcccaagtaccatcatccattcgtagctcttgaatgaagtttcttcttcttgtgataacagttgttgccataaaaaatttagtgcagctatcaccctgttgcagccatttaactcttgacttttgcctccagaaaatctcttctctggcaagagcctcactcaatttgtttctagctccagtcagctcctctgtattcacattgtctctattttttaattgctgcagcgaaaatctagcttcactcacttggtgtccaatcattttgaaatggactttgttccacttggatagatgatcccttgttttcttcagtttaagatagaagttgaccattggattttggtggagcttatccttccaagcatttttgatgacccaaaaaactttcaggtctcttccctacattaattcgtacttgaactacgtttttctataattaacaccacccttcgtgtcgaggagaataggctgatggtcagaagtagcagcgctaaggacttgtgttatggcactcgggtacatcatcctccaatgtatcgaagccaacactttgtcaacgctttgtcacgacatgtacaatcatcatcagcagttagctcgtttcacggttcagtaagcctttattgctttagtagttattttattcagttatgaaaaagaaaagcctgttag

SEQ ID NO: 94629 - DNA, 553 bp, Cannabis sativa
atatttaataactatactcttataattaatatatcatttatcttataattgtaatttatatattctctaatatattatctattaattacttacttttatgatataaatcccaataatcttccacttgcactaaaaataagtgttgcttattctataactcttacagatgcaacatctcatttgactattcaggctaagtcgtatgaacgagacatccacataatgtagtaccagatctcgtagaccaccacattatcattggataaatatacagaattagattctagtatatttagtttattcatccttttatttccttcaggtttactttttttgattaatcatttaatattctcaatattaaatatatgtgtttatccaaaattttattttaaaactgattaatctagaatcctctattagccacatctatttagttctattaattaagataattaataaactcaatagatcccatggctaatcaagtcgaacgtatagaatgaaccttttcatttcatatcaatcgttgatcacttgtcataactaattg

SEQ ID NO: 94630 - DNA, 533 bp, Cannabis sativa
gtttgtttcaggatcttatgacgacaaagattattggtaaaggatatgaatctggtggcttgtatgttcttgacccacttccaccaacctttattgcttgttcgagtgttatttttgcttttgaggctcatttccgtttgggtcatccatcccttcctttgcttaagaaactttgtccccaaaatagtaacctgtcttcattagattgtgagtcatgatagtttgccaaacatcatcgtattagtttaagtcctcgagtaaattcatacccaaaataacatcaaaatcttcgaaattcaactctatcagatcaactgacaactcccttccttccacaactgctggtaaagatcgaacccacctgctggagataactaactctccagtgggtagtaaagctccaaagcctcttgaaagtacatcactaggcctattcaaatccttaattatcctacttaaaatataagaatgcatcgcaccagaatcaatcagaacagtcaataaagtaccagcaatagaaagctgacctgtca

SEQ ID NO: 94631 - DNA, 591 bp, Cannabis sativa
ccctctattctctactaattcaagcgaaaaatattaatatgaaggataatttgtagtcaaactctctaaactttgaagtttagaacgatcaatcccctagacttgaaaaattagaattgaactccccaatctccacaatggttttgctttgtactccttccattagtttttggatattaaatgtcaaatagaccgtcactatgtccatgtggcataatttcattagtctacaacatttgaaggaggaccgcaaatgagctcggggtttgggttcctgggtttcggaccattgacgctcgcggtggaggaaactcgtcgtcgttgagctgagaatgccacaccaagagaaggagagactgaatgagagggggagagggatgagttagggttttcaaaagaggaagaaagaagaaagaggaacaggaaagaaaaaaaaaagagaaaaaatagttttttaatttttttttttctaattttgaagtttttaaatattttttaattattaatattaggtggactaataaaattttgtcaagtgtacatttgcatacataatggcaatttactttgacacttaacagattaaataga

SEQ ID NO: 94632 - DNA, 2216 bp, Cannabis sativa
tggtcaatttattccccctttaagaccgaatgactttcagatcggactttgtccaaacgctccttgcatctaatgatgcgacctagatgttcactcctctcagataacaatctaacatatctcttgtaaggatcctctcaagggcttttagagtccgaggatgaaatacaaacaaagtcggtcccaagaggtatttttcagaactcattgaaaacttaaggtggaatcacatgacaccctcacctaagaggtagaagagaggatattaattctgctaagcaaagaaagttgaggcagcctgcaatttgactctctagtcatgtggaagaaaagagttgcacacataagaaataaataaaccatcaacaactttaacaagaaaaggaacacttattttgaagtgctgaagaagaacatataagatgcaaagttcgctaaatagagagtgggaagcctacaacagaaagtaaaggaatttgaaaaagtcattcgatcgaagccttaagtgactgatggttacatagcccatgggtgagcctcactcgaccaagagagactcaaatatttctcggcataaagtgactaatgtcactcaacccaagagaaacaaatgtcacgcagctcgagagcaatcatggtcattcagacccatagtgactaatttcactcggcctaagcatgactaatgtcactcagctcgagagtgacaaagatcactcggccccatagtaactaatgtcacttggctcaagagtgactaatgtaactcgtccccatggtgactaatgtcactcggtccccaaagtgactaaagtcactcagatgtaggaggaaaaatattattcttaagtaatcaacaaagaaaaaaagaagaagaaaaatagagaaaaaaggctaaggcctgattttaacctgggacctcttgataaggaggattaaaattcaccactagactaaggaaggagttgtgaagtgaagatgagaaaggaggaacctcctatatatactaactgtatttttgaagtgcgtgtctaggaagaagtccaaaaactacctaaaggacaccatagtaactagtccacaagaacacttaaaagaattcttgttgactatgggggcaagtgttaaccccaaaaattagcactcgtaatttctaaggttagctaaccgaggcgtgaaagatggtgtgacgaatgtcactcaaccatggcctccccaaaagtcactcactcatgaccttcccaaggtcacttggccacggccttcctgaagccacttgaccatgctcccttaagtgtcactcgaccatgacattcttaatgtcacttggccatggcattgtcaaggtcactacgcaagggcaccctataatttcactcaaccatggcattctcaatttcactcgaccatgacattttcatggtcacttggaaagagcaccctcaaatgtcacttggccataaaaatgtcagtcgaccatgaaatcctcaaggtcactcggcaaggaaaccctcaaatgtcactcagccatgacattttcaatgtcactcagtaagagcaccctcaaatgtcactcagcaatgacgttctcaatgtcactcaactctgatattttcaaggtcacttgaccatggctttcttaaggtaactcaaccatggcctgaaaaaacttagttgaattttcccaagcaagaggagagtgaaatgactacgatacaatcacaaggacaaggcatgtatgcgaggagactacggccacgcctcctacaaactctgaaagtaaggaggtacgagtagtgggagcatcattcctgcatacttgatgccctaaccactaggactctgcaaccaccactcttgcaaaccgggactatctgacaccagacaaaggtgcaaagtgcaagggcacctctagcacctgagatttatagcttgaaagtgacaatttatctccttgggtccaatatgtatctcaagccagtagagcctataaatgcctcctccctcagatgtgagagggagttggaaaattattcttgcattcaacttattgagagcaatataaattttttattttctctctactttgagatagtcacttacattcatgcttcatctattcttaagttataagttttaagttaagtttaattttctagccaacaagttagttgatgagctccacactcaatagaattacatcaaccaaataatct

SEQ ID NO: 94633 - DNA, 708 bp, Cannabis sativa
  modified_base (461)..(462): a, c, t, g, unknown or other
gagagagagagagggttgaagaaagagaaagagttatgtgttttttttttctaatttttgaataatagaaagtattagggtattatctaactaatataggatatattcagattatataaaagctaaataaaactcactaaagacaaatgatcaaatggccaaaaagatcattttacccctcactaaccaaaaagcttctaatttacttaggggtattttggtcaattctaaaatctcaactatttccaacattcccaatgtctaaatataatgccccgctatactaaaaatactaaaatgtaattctaatagccaaacgccgcgttccgatgttgtcgggcacaaaacatacaaaaacataaatttccttatatggcatataaaatacattctgaattcagataaatctccataaaataataatttataattaatattctaatttcataattaaaccctanntatctgctaattttcaaattaaagttaatcggtctttacagttttgctaccaagcgagctttgaacctttctattgaaccatcaaggtaatatttgatgcgatacacctatttatttcctatgacatgttgacctgatggcagaggaactacaatccaggtatgatttttctctaatgcatcaattgttgggttttatgccctaaataaaactctgtttcaatgtaatccagattattctatatca

SEQ ID NO: 94634 - DNA, 2552 bp, Cannabis sativa
tttctctgtgtgaagtctgaaatagtgttggggtgcgctaaagtgcgcctcatttagcacccaggagaagagaaagcgaggttttaaaaattagaccttgaattttgtatatttacgattttgccactatgaggatagtttttgtcgtattgaatttgtattggtaatggtatgtattattatgtaatgtatgcttattatttctggtctgaacagagatagtgcgggttgctgtcttgatgacgtcatcttttgcaagagattttactggcttcgcagacttacttttgataaaacgacgacgtatagttctgctttttcttctactttttcactgcaatcacagtagtagtgttgttggaaacaaattaattttacatgtgaattattcctactaaacaatttcctcatactaaaacaaaattatgtgagttatttttactttctctatttttagctaaaatagttgaaaaaaattaaaatagaatcattgttggtttaaatatattttttagttaattattttaataatattttataatttaaattgagtaaatagcggtataaatgcttaaagttttatgtttgtaagcgtcataaatttaatgtttatttttagcggcataagtatccaatgtttgtaaaactataatttttctctaattttatcagtacagattctgttattgtcttaaacagtgtacatataaggtctaaatttttgatcattgggtctaaatagaaatatgtaatatcagttacttccgaatgttcttttaataaattcaaaacaggtatgtactgacgaaactagaaaaaaaatacagttttacaaacattggatacttatgccgctaaaaataaacattaggtttatgccgctaaaaattacagttgtcctaactgtgtaactaactttaaccattgtactagcattgagcttgagctatataaggctcacttattgattaatcaatacaatgaattctttctgcatcatcttctttctctccttacgctatactctattttgtaatatggtatcagagccacgatcttcgcgagctcaatctcgttttctatgtcttcttgattgttgttgatgtttatggctcgtggtggaaccaatactcaaagctcagccaatcaaggagatgaatcacaaactgtaaataggttctttgtgttagaacctaatgatcgaccacttggtgaagatcctcgaagtccttactacatctctaatggtgatctgtttgttgttagtcttgttcacaagattttgactggttgcgaaaattacaattcctggaagaggtccaagatagtggctcttgcagcaagaaacaagattaaatttattgatgaccgattgcctgaaccaaaagttgataatgttatctatgatgtgtggttttgatgcaataacttggtgatttcatggattttacatgcaatttcaagtgaaattactgacagtgtgatgtatttggacaatgcggctaagatttagatggagcttcaagaaagatatcaccagaaaaatgcaccaagggtattcgaggctaaacgatctatgcaggctcttgttcagggattgaactcagtcactacatacttcactcgtttgtagtctttctgggatttgatttaagaatttagaccataacctatttgtacttgtggtgctatgaaaaccattcaagagtatcaagatgaggatcgtgttcttgaactcatgattggtctgaatgaatcttacagtggtgcttgatctcagatcttgatgcaagatccattccctaacatcaacaaagtttttgcctaagttatttatgaagaaagacgaagaggaattactaccaatcacaatgaaaatgataaggctgctcctcccatgtcaactaattctggtcagtttgttggaagtgattagcctgataagccaaaaaatggatgccatcactgtggtattcaaggacatatcatggccaagtgttatcgattgcatgggtatccatcaagacacaaactgtatggtaaatttctcaacaaaaatgcaccaagcactgacaaagctcttgctgcaaatctttctgatgctcaaaagaatgggaacactaatggagatgacaaaaggtgttgagcaagattctatggccacctttgcttagtgtcaaaggctgatgaacatgctgtctcagaaaagtggggaataactaagcaatatgcaagctaattaaccttctgtgtcacaattttctggtaaaatcttttccaaaccttcttctactgggattctcgaaactggtgatacttaccatgtgtgtcataatttgtccttatttcaaaatacatatgctaattcaagtatttcttgtgtcaatttgcctaatgttgcattggaacaattattctttccttggattttattcttaaagatatgatgtatgtgctagattttcatcttaatttgatttttgttacatctttacttaaaccaagagtctgtgtcatcacattctattctgaccattgtgttattcaggaca

SEQ ID NO: 94635 - DNA, 511 bp, Cannabis sativa
ggtaaaataaatatccaacagtctgtctgtcgacacttgtaaaacgtgtcacaaccatcttgattagtgactttcttgagttgtggctctcaatgaaagcaccaaaatgttgactcaaaaatctggactagacttttaagccacacccgctcactagatttgtgagaatgaaaagtttgttaagtaattaataagagacacacaataatttatcgttcaccactatatcgcgatagtaatggggctacttctacttcgagtttttatttctcacgagatagtaataacagcaatagactaagtatcagaaacagagagaaagtttagagagagaagctctgaccttgcaggtagttttctgcttagttttctcaaagtcaatacaaatgctgctatttgttctctgggcaattgtagttgcttaggtatggtgatttatgatcagtttggaattgttataggttcatcaaattagcattttggatggttgttttgttgggttttatgccct

SEQ ID NO: 94636 - DNA, 817 bp, Cannabis sativa
ataaactattagatataatgaaataagtattttagttttctttttgctttttcatgtcatgattcaaaaataattagctcttgcccacaactgaacaagattaattagttagccgcaatacatatatgtaagttgtgttttgcactaggataaataatattagttgatcatgttatgtgaaattatatctatatatattaatttccccattaatctagttattgcttgatagtgctatatatatatatatatattaatattaaatttaaatggcaactaattaagttttaatagtaaaatatccattacatgcgcagtacttggattggaaaactatacatattgacatatgtaatgaaaccatgagataacaatatcgtattataattaagaaagtgtaaaaggaataataaaccagaaaaaaaataaatgaaaaatcaaatatgaataagcagaagcacaatatcataaaatcattttctatctcaaaacgatatacttaattcgatgcaacaacctcatggcatgcacttgattttcaagattcggtggtcaccagtaattaacttgatggcggactctcatataatacactcacactaaagttatataaaagaacccttataatatatatatatatattgatatatatagtacctaattactaaaacattaaataaaataaattaacaagctcacggatgatgataaacactggttattaggaaattaactagattgactttgtatgtattgattgagtttgaattgtatagattaattgaaagcaaagtacctacagtagattactaaggca

SEQ ID NO: 94637 - DNA, 1352 bp, Cannabis sativa
  modified_base (789)..(796): a, c, t, g, unknown or other
  modified_base (1223)..(1223): a, c, t, g, unknown or other
ttactcttacactcgttagtgttcggttaaagtctcaccctacacatctcaaaaattgtgaaattttacgaggatgaagcccagagtgttgtgcatcaattttctaagtgacacgttgtgagataaagtagttttcaggcactaacaataattttaatccaaatagtgaaatcacacatttgtaatagtggtacccctttgtgaaatgtggcccggacccatcgtagaattttttgccactagtcacattgaatttgtactactacgacatgaatatgatgattggattcgagttaaattttgttaaaatggccccctaattaaaaaatttaaaatattcttcttttcaaggtatattttaacaagttttttccatcttcttacactcgttagtgttctgctaaaatctcaccttacacatctcaaaaaatcatgaaacttttcaaggacgaaacaaagactattgtgcatcacttttctattgtacacgttgagatgtaaactagttttcatgcaccaacaatcatattaatcgaaatagtgaaaatcttacaattctagtagtggtacccctttttgaaatgtggccacgccccattcgaaatatttttctccactagtcacaatgaattcttactactaagacgtgaatatgaagattggattcgcgttaaatttggttaaaatggatccctaatttaaaaatttaaaatattcttctcttcagggtaaattttaacaagttttttcgttacgcttacactcgttagtgttctgttaaaatctcannnnnnnnatctcgaaaaatcatgaaatttcataaggatgaagccaagacagttatgcatcacttttctatgggacacgttgagagataaaatagctttcatgcaataacaatcattttaatgaaaatagtgaaaatctcacatttttgatagtggtaccccattgtgaaatgtggcccggacccatctcaaaatattttttgccacgagtcacaatgaattcttactactaggtcgtgaatataaagattggattcttgttaaatttggttaaaatctcccctaattaaaaaatttgaatatatccttctttttaaagttttttcttactcttgcactcgttagttttctcttcaaatctcaccctacaaatctcgaaaaatcatgaaatttcataagcacaaagccaagaccattgtgcatcacttttctgtnagttatattaagagaaaaagtagttttcaagcaattttaatcattctaattgaaatagtgaaaatcttacatttccgatagtggtacccctttgtgaaatgtggcctggacccatctcgaaatattttt

SEQ ID NO: 94638 - DNA, 625 bp, Cannabis sativa
caaacaaagtcatttctggcacaccaaatgacccagctgaccatagccacctcctccaactcaccatctcttccacgacactgcagcaccaacaaccagttgctgaagttaacatctatgtcgctgcgaacatctacacttgtcctattccaacaagctcgagcataaacacacccaactaaagcatgaaaaatagtttcatctgaagtgagacacaaggaagaaaacaaaagaaattacattaaaaataatattttacctgaaacgacatgtcgtatatacacgccctagcgtatgacaaaaatttggcagccagtgccaaccacaggggttgaagttgaactcatttcggtactgcgacgctctcttgattgatcttctctttctctctcgctcgccccacaccttaacccttcaccaatcatggctttcatcctcaacaaaactgctgttggctctcaattgcggtctcactttcaggttctctctctctcttgctggttctaaatctttcctttcaacattcagggagcaagaaacgatgccctttccctctcgcgtcgccaatttcatgtagaaccaggaaagcgcaaactagctgtgagatctctctctctctctctct

SEQ ID NO: 94639 - DNA, 555 bp, Cannabis sativa
gtttatatattataactatatttttacttggactcgaaatcaggatccccaagacacacacacacccacctatgaccacttaagctagcctgaagtggtttttaatttctatttattagttactatctcctcatacttatttttttgggagataattaattatctcataaaatgaaagttgtaacctttttcttaatttgagtagttgagtatacatatctatatataagtctacatatagcacccataaaaaagtgtataacagtgtatgttagttatttaagactatttgtaaatttttaaaaaattttaaatcaatttaccatgtcgaaaataaaatttacatactttattgcacgtacgattatttttcttatacgcatagtaaataactagtataaaccttatttttagtactataaactatctagaagtttttgaaaattcacaagtgattttaaatagttacaatatatatgattataaaaataaaataaaattaaaaaattctcttaaatactgaaacagataaaaaatctactagaacaaccgttt

SEQ ID NO: 94640 - DNA, 922 bp, Cannabis sativa
gcgaagccacctaggatctgttttctgttgagttctggttgtatttatttgtattttttctcttcatctgtaaaactgtaataataaaggttacagtgaggtctaattttaacatccctgaacaagtccttgattatgatcctcaagcttatgttactcaatccatttcaaactttggagatgatggagggtggtatgccgacactggtgctaccaatcatattgtttttaatatggaaagtcttgatttagctgtgacttattctagtcaagaatttgtggcagtaggcaatggtaagaagttggtaaagcaattctttcttctccttcttctaatctgttggttttgtggtaccaaatcaggtacgcagcaaaaaataatttatgattatcatcgtaccacatcctcaagatcaccacatgtatgtatattaaatctgaaataaatagttactacatgtatgtatattaaatctgaaataaatagtcaaaaagaataatttatctctcgaagaaaatcagggtatcattatttcttttcgtaagttgtatcctcgggatggtgatgaagaacacacactgtgatcttctgaaccttctaccacacacaagaattagtgtgggctaataggataaattgtacattgagttcttatttttgtctcaatacatgagcaagaattctatgagtgatatgatgataatgaaaaaggtttaatctcattaactttttttaggctttctcaaaacttatacgtatataggttttaggtttatacagtatattaaaaataaaaccaatggaaatttaattaaaataaacatttgaattcaaaataataaaataatcatatttaattatttgaataaatatttataactaaatctgttataaatatttatcgcttataactgattgagg

SEQ ID NO: 94641 - DNA, 554 bp, Cannabis sativa
ttaatattaaatttataataacaattttatcctttaaaatatgtcttacaaaataactgtcatatactatagtttaactcaaaaaaataatttacttaatttaagtatttcgattacattttttgattaagtaaaaaagataaatcactattattctatttctaagcagttttagtaaataacatattaaaaatattgattctgattattttttatttattctgttacattttttattattttattctaattctgaatactgtgtagtaaatgtgctattagtacagatcagatgcactataaataaaatagtgtagataaaacacattcctaatattctatttattagtattcaagacaaagatattttttccaaaaaacaaaagaaataataaaataaaattcttatggattttattcttttcgggaaggagatgtttagtggatttttttctttttggagagggaatgtttgaataatggatttttaacatttgattattatctacaatattaaattttgcaagggaatatttaatgaattttattctttt

SEQ ID NO: 94642 - DNA, 894 bp, Cannabis sativa
tgaaatgtatgtggaatttaaaactattgtttgacactattggtgagggacgccataggtcactatgtacaagatcgaggacattggcagctttactattagaattttcaaaaggaagagcatgcgatttaccaaattgacaagcatcacagaaatgtatcatttcattcttggaaattttaacttgacaagagtttaaaactcaactcaagactcttggtgatgggtggcctaatctcctatgccacacatcacctttagacactaaagactcatctattttagactgattggtactggtttttgtcttaacaacaacaccagagaacctgttacaattggctttatttgactcgatctgacttaagctttggacagtggttttggactgaggtgcttgaagttggtagaggccatccttaagcatcccttgaagaagaaccttccttgtttgcttgtccttcacaacacaataatcagagtaaaattccattagcacatcattgtcacgggtgagtttagatacactcaacaaatttttagcaatctcaggaactaataacatttcctttaacagaatttgttgtcctgaatgagtaaataaaatgccatttccaagatgagagatagttagttgagtaccattacccactgtgactttctccttaccaccatagtcatgtttgtgtgtcattgatgcagagtctgaagtgatatggttgctggctctactgttagcaaaccatgcttcactctccagcagttcaggtgtggcaacaaaggctgagggattgttcttgtgttgtgtgctgttatttgggtctgaacccatgtattgctcatcaaaacgattatagaaaatggctacaaagtggccatacttgccacagactt

SEQ ID NO: 94643 - DNA, 914 bp, Cannabis sativa
  modified_base (77)..(78): a, c, t, g, unknown or other
  modified_base (335)..(350): a, c, t, g, unknown or other
  modified_base (453)..(460): a, c, t, g, unknown or other
  modified_base (489)..(491): a, c, t, g, unknown or other
ctcttccgatctatagtctaattttagaattataattggttaattaaaactaattaactgagtctgcaagtagtatnntctcaactagtgaggggaccatgtgcctatgtaattgagcttccaataagtatatctagaatttactaagtaaattccctaacttattaactcctccttacgccactatagattcaaaattggactgttaattatatagaagggtctaagcgtaacaagatatagatacgttatgattatccattgtttcaatcctaatagtcaaagatcctctatagatgatctacattaaataccgttctacccttcaatgtatnnnnnnnnnnnnnnnnttagctacctataaataatattccatgaaactaatataattactgaaatgaggcctcaataatttatctctatcaagccaagcttgaaggaaattatcgtttnnnnnnnnaatacttatagaagctataaattccatannnatgattagcgctcccactcaattacactatcatgttcccatgatgtaagtatccgctagaaccatcggttagctttcacgaacaatgtgaagaacataaataatacagttgagttgaatccaaccatatcaagattaagatccatacacctaagatcaaccaatcatattgacttagaaagatataacgataagtttatgacatcttatctaagatcaatatcgatccaatccaatgtatactccatagtaaattttgccaatgccctagaaaggacatttgacttatccaaggtgtaagtatacctcatcgctgacaatcaggtcactctgaatctagtgtactgacaaatcatgggaattaaactttttaatatataatcatgattatattccactatgctaacgacactataatcatgaa

SEQ ID NO: 94644 - DNA, 960 bp, Cannabis sativa
ctaagtggagctagtttggaaagacagtgttggggtgaggtagctaaaattgcctgctacttggtaaataggtgtcattctactagaattgattttgtgaaacctcaacagaggtggactaaaagagctcctaactatgatcacctgaaggtgtttgaatgttcttcctatgagcacataaggtaggacaagcaacaaccaagagccatgaaatgcctatttctaggctaccttgatggagtgaaaggctatacgctttgatgtattgtactaggctttcaaagatgcatcattaatagagatgtcattttaatgaaaatgaaatgtctatgaaattatagaagaaaacatacactcaatgtgaggacagcaatagaagggcttagattcaactaaacaatggcacaactaaaaatgaaatgagaataaatgaatatacatccactaaaccttccacaactcaaggcggacttgagacatatcaactagccagagatagagaaagaagagagatttaccctcatgatagattgggctttgctaaactagctgactacactgggtttgcattatctgtggcagatgagattgatattgcagaaccaaaatcctacaaggaagctataaatagcagagatggtgtaaagtggctctttgcaattcaagaagaaatgacatccttgatcaagaacaagacctagatcattgtaaagaagccaccaagatagaaacttgtaggctacaatggattatgaaggtaaaggaatgcattctagaaattgaagataaaagtaacaaagcaatgttagcttctaaaggatttactctgagagagggtgtagactacaatgaatttttctcaccaatggataaacaagcttccataagagatataatggttaaagctgcaaggtgtgaatatgattgaagagaaaacctaatgagacaacctgaaggttt

SEQ ID NO: 94645 - DNA, 672 bp, Cannabis sativa
  modified_base (32)..(34): a, c, t, g, unknown or other
aagcgtgaataaatattttttttttcttttannntttttttttttttatgtaatatgatttttatcttctgaattatgacttttgtaagaaatttcctcttgatttttttttagttgcaaaaattccaccgaactatgtaaatagttgcaaatatccctgttatgctcatattttaggaagcaatatggtcacaacatgtatacaagaggtggaaaatgaactagctcgaatattaaagaattaaatacgttgtatattgcctcaaaaaatattagtcacagttattaattcaagtgtttccttagctgactaaggataagtcaaaataatagctcactggtagactatcgagatcaataacaaccatcttgaaaataacagagcacaagaaaaataacacagagactttgttggtcgaacaaggcagtataaaaaaatttgacctaagaagcataaaatggtacaatttgaagggcatacttataagctcataaaagaattattcaaaatgtcatcataaatgatcaatgggagaaggatgttcaaatatatatctcatatgtgtcgtcttgccaccttgccaccgtacaatgcgagacgatacaaaataagtgcatcctaataagaaatgcaaaaatgcaaagacaaaatgagtcattaaaaagaacatg

SEQ ID NO: 94646 - DNA, 808 bp, Cannabis sativa
taaaaattttaaaaactattttaaactttaaaaactattttttgttctcatttctaaaaacaattttttaatacaaaaaacagaaaacaataccaaacatggtcttagagtctcacgttgcaacaaaaggtaaaagtaataatggtggttttgtatattctcatatttgtttagtttatatcaatgccggatcaacgatacgatgatcatagaagaacctcagactttatgagagagtacattttcccaggcggatgtctaccttcattaagtagagtaacatctgccatggctgcttcttcaagactctggtataatatatatttacaggtcatattgattttgttatgtgtacttatttttcattaggactaattactgatgtttattgaaagtacagtgtggagcacatagaaaatattggaatacactactaccaaacactgaggacatggaggaaaagtttcctcgagaagcaaaggttagtggatataattgtgtaatgaaatttagcattgtatatgataggagttttttgttgggacattaatttgagtttgttttaaagtgaaatcttggctcttggatttgatgacaagttcattagaatgtgggagtactattttgattatgctgcttcagctttcaagtctcgaactttcggcgattaccaggtacaatggatttttttttgctctatcatatacaatgtaaagtattattgagaagattggttcgtttggtacgccgtattatattgtattttattgtatagtattatattaaattcaatataatacaatacaat

SEQ ID NO: 94647 - DNA, 526 bp, Cannabis sativa
gtgatagttgaaataaataattagtttagttttttaaatattatattaataattaattttctaaattaaaatttgaaaaacatttaaagtacaaaaatagttacagtacacatacgtttgaatgaaatcttattaaaaagaattaatttatatacctactatatataaaataaaaatatgtacagaaatagctaactaattattggacaaatcaaaataataaattttaaaataaaaaagtctaagaataacaattatcacctattaatgtgataaaatatttaaacaatattatatattaactcatcatattattttaaatttaaattaatttttaattacaaaaaaaaaatgttcaatacgatcttttcaataaaaaaaataattaatgaacatatacataaatttgttaattagcttattacttagcttatatattatttgctcttttatagctcactagcattgtattttttagcagctaaaatatttgtagtgacataatatacattaaacatattaattt

SEQ ID NO: 94648 - DNA, 530 bp, Cannabis sativa
cctaagggaaaagaagatgtaatcttttattgaaagaactacggtgatgaccttccaaccaaaacacctttaacaaggtcaacaaactcttttaaataaaactggacttaattaattaaaagcatagccaaataaccatctatattggtaaaataaaatatgaaactaggcatgaaaactttgagaagctaaagcctcaaaaataaaaatactaaatctcgtttggccaacatatataattagattcaagagaagacgtgcagctatggtacggatggtcgtggctcccttgagtttcctacaactaaaatatatatacacttttgtatcatttctacaattagtatacacatagtatacatgataaacttaattacagataaattttattacacaatatatgagttcctcctatagtaaaacaaataatattagggatttttacacttcttggtgcctttttttgcctttttttttttactttttttgtcaatactcggttattgaaacttttatacaagttttatttt

SEQ ID NO: 94649 - DNA, 1128 bp, Cannabis sativa
  modified_base (218)..(219): a, c, t, g, unknown or other
tttttatttttttcaaatcaaattttatatgtatattttttaaaaatatgaatttgaaaaaaaaaaattaaaaaaaaccaatatagctaaaaatataaattttatgtaaaataaaataattaaagtggagtacatttataagttttccaagtgcaaatagaactcctcaaatacctaatatctttattttttgtttattattcttttttttttaaaannaaaaaaaagaaaaaagaaaaaaccaaaattgtaattttttacctaaaactccaattagcttgaaccggcatgactcattttttatcttcaaagatgtaagtaaccgttgtaattgttgttcatggcattcattagactcaaattggtaattgtaaagaccctattaactttaccattaaatctaattgttttgtacatctatattgatttgattttacttttgtttattagtcaaagcataaaaataatggtttatccaaaagactaggaaaaatgaacatctctaacccaatcattgaactaaaaagttacacaaaaatacaatcataaaagaaccccaaaataacaacagttgaaaaccaaaacaatcaaaacaagttagaatgaagaacagagaacaaatctcagttgtccatttaagaaaccacctaagaattttgccacatcaaattattaataacagtgttcaatgtatcaaaattaataaactagaaaaaaacagtacaaaatattcccaacattgttaacagaacaaaaatatacacacaacaaacataataaatgcaaagttaagataaaaaaagtttaataatcacaaaaacagctcttaaagaacttttagtttttatatcttcaatattatcaataagagtttttctttatacaattattaagaacaataaaagagaaaaatgaattataattaataatcaaaattagcatttaactaaaacattacaccaccaatttgatactctcatcaaattcccaccaccacagtgcagagaacaaaacccttttgaaaattcatctcattctcattgctatctctgcaaaaacaataatcaatgtaccaaattgttagctttaatggctaagaaaaactaattatgcatatatatatatata

SEQ ID NO: 94650 - DNA, 1261 bp, Cannabis sativa
  modified_base (915)..(918): a, c, t, g, unknown or other
ctccgaggttcctgtagctcccttcgtcatttagtcgtcgttaaaagatcaccgcagtaaaaaatattgggtcagatttagttgtatccaagatccattgagtaaaacgactttcaaaaatgtattctattcgtaaagatcttttagatctcgtcgatagtttctgcaagcttcgccgtcgactgtagacgaccactgtccacggtggaactccggttagctcggggacaagagtgtggctggagatgggggtgggtcgaggtcggggtatggctggaggaagaagacaaaatcaggtggtttggttggagaaagaaaaggatgtgggggtggtgggggtggactactggaggtagaagatgaaaagaaaaagaaaaaaaaaaagagaaaaatatatattttaatatttcttaatttttaattattttttattgaaattattatttggactaataatggttcaacacgtagcaattataaataacttaacggatccgttaaatttaagactaacggacttacaaaaagtgtgaccttgaggtcgattgccgttatttttcaagtttggggactaatctgtaacaaagtgaatattttggagacttttaccataaattgtcctatattatatatggagaatgtttagataattacattaaatatgtaaccatgatagttacttagttgttggatcattattaaactataaaattaatttagaaattagttaaatttattttattttctttaaaaaaatataataaaaatatttctaaatattaattattaaaaaatattattaaatatttaaattaaaaaataaatttattttataattaattttaattatataattaattataattaatttaagtttaaaaatagaatttttacctcactcatatatatatatannnntatatatatatatataatataacacaaatgttttcaagaagatgcgtttgtgcttcaattgaagtgctatgatatttatacattaataataactaatgattcgctcacattcttttatactctaagaagcattaaatatcattttagttcatgttaatcaaatcttaaactaaaatattttcgagaattttatttaggcctaaaaatttataaaaatattttattttaataattttattttatataaggtatatatccttaatttatactatttttttttttttttatatatatattcttaaaaaaatatgcttatcaaataaaaagaaattaaaaaattata

SEQ ID NO: 94651 - DNA, 564 bp, Cannabis sativa
cgataagcagatttgatagagaatgtgccattgtgctccgggagccaaagccatgaatccggggaggggatgcttggaagcgtgatattaagaattcttttggcgtcatcatgatcaaaccatctccgaatcaaagcctcattccaatggttgtgatggataaagttctccactaaactgataccatcggtagcattcaaacggggttgtggttggagaactccatttggaacccaggggtggaaccaaattgaggtggttttgccatcaccaattctccgacatagccctttggataagaggcatctggaacttaaaattgctttccacagtgtggaatccgcagcactagcttggagatccatgaactcgcgattgaggatgtatttatcattaacaactctactccataggctattgctgtccgttagagccttccaagcccatttcatgaggaaggcaacattgattgactcggttgagcgaaaccccagtcctccacatgtcttggggcggcacaggacatcccaggcaatagtgtgcattactcgtctccctggctga

SEQ ID NO: 94652 - DNA, 523 bp, Cannabis sativa
  modified_base (52)..(54): a, c, t, g, unknown or other
ttccttaaatgttctccattccagtactgtggtactagaatgagttgcattnnntcgtcatacttacctaatttgtatgctccaaaattaagaactttgaccacttggtatggttcttcccagttgggtactagtacacctaatgtgatgtctttggtgtttaggaatacccttcttaggaccatgtctcccataaagaatttccgagctttcacttatttgttgaaataccgagctactttttggtgatgagcaatcaactttgagtttgaagttgctcgtttttcttcgatttcatcaagtgattctgcaaggagtatgttattggtaccttgatcgtacgtcaatcttctgtgggaaggtggttcgagttcgacgggcagcatagcttcctacccgtacgccatcgcaaatggtgtctgatccgttgctgttttctccgtggtacggtatgaccatagaactttggggagttcttctggccagtttcctttggtatcttcgagttttttcttcagtgtat

SEQ ID NO: 94653 - DNA, 584 bp, Cannabis sativa
tggtaggggttgggattggggtctgaggccaagtctggctctgggttctggtgctggtctgcgtccaagtctgaggttgagggtcgaggttgttggggggttttatgccgtaactaaaatctaattctaatgtaatcttatttacttatcaatagaagatcaaagatcattttttgctattgtacattgcgtggttcacatgttactttcatgattatttaattaatatataaattttttctaaattctaaacatatagttattcacaattgtagtgttgtcaccacaatgaaaaataatcatgattatatgcttcaattagtcttattattaattaggattttaaagtattttcaattagttttagctgtgttttgtgcaattttacgcttttgattattaatattttcaagtttagcattggagaagataaagcgaattcagaaaaaaaattgtaaaaagaattaattaaatgaacttttattgctagagcaccgagaaaataattcaagaaagaaatctaaaagatctggtgcgattggagcttctaatgttggaagattggaatgtgtggagtagcccct

SEQ ID NO: 94654 - DNA, 921 bp, Cannabis sativa
tctatttttagcacatgggtaagtctagaacctttttcttagtgggatatatgttggagaaaaataaaatactgaatttgagcggggttatagattttgaccattttactcgtagactttaaaatgcctaagtttaagattaaggggtatttttagtaatttttagtggaggctttggtggctgcatgagagaatggaagttgtccatttgatttattttcaacctttagttaactcattttgaggaaattaggaaaaaaataaaaggaaaataaaaatcgaaggaaaaataagaaaaaaaaaaactcatcctcttttctctttctttgagcaccaccaaaccaggaggagccagccaccttcatcaccatatttttgggttttagcttggattcaaggtgtaattggtgtaggtaagctctaaacactctttgtttatgaatttctcgatgttttagttggttttgacttatgattttagagattaggggctgttagggtttgattgggttatggttcagtttttaagtttaatttaagttgaaagtagtttcttgcagctggtttggttgttttgggtaatggatgcacaactcaagcttggttcatccatggtatattttgtatttgtgcatttttctgtgtgctgttgattggaatatattgtgtatgctcattttaggtgttttggaaagttttgtggcatttggacaagttttgagcaagttttgagttgtttggggaaacctggtgcaaatcggtcaaccagtttgccaggacctgtaaaaccagttaaccagttttggcagattccccgaacaactcgttttctcaattcatgtgcacttcagtaccttagttgggtgtttccctacctcctaggatattgtagtccctattagtaataacagaaccttaagt

SEQ ID NO: 94655 - DNA, 529 bp, Cannabis sativa
tgctcttgataaaggtttatttaacggagcatggctcaacttgttcccaaaggctgttttgttctcctctcaaacttgcaactctgaccataggcctctatgtctctttattgatggtatgggggaaaaattcaaaagaagcttcaagttttaagatagttggacccgggatgagaggagcaagctggtggttgatagcgcctggaaatcggtgtgttatccttgggctcccgctagagttttcaagaagattggtgcaactagggttgctctcttgcattggagtagatcccagtttggtaaagttgataacttaattaaagagctggaaggtaaactcagcgccatccagggactgacagtgggatcaagagattgggatgctgagtgcgaaattcggcgtgctctcaatgaggcctacgctcggaaagagttgcactggaagcagcgggccaggatttcctggctaaaggaaggggatagatgttcgaaattcttcttcctttcggctgcaatcagagggagacgg

SEQ ID NO: 94656 - DNA, 625 bp, Cannabis sativa
gatggtagtgatgatggtggagctggattggcatcgaccactggcggaggagggacggtggtggtagcagtagctcgtgttcttgccattgatgagttcttgaagctgtaacggggttcttggaacttcacgttgtttcatctgataccatattaggagaattgaattgaaaactgaattgatttcattaattggtgagaaaagtgtacaaaggcaatgatacaatatatatagagtggtaacgtcgtttaagactaactaccaacaataataattaacttcctataactaataactaacataacaaacataaccactaatctaataccatctgacaccaaacaagagtacaaggtgcaagaccactacttacaacttttaactagcaaaccatggatgtcaccatgccccctcggactactagtgtacttttaggccatcagagcctataaatacccttttctcaaaggaaaattttattttctatacttacatatacctaatatttttttctctaaacacataacatttaatatttgtgggataggacacattttagaatattcctaaaataccctcatttacattaccgcctcccctctatcttcttctctctttgttataa

SEQ ID NO: 94657 - DNA, 601 bp, Cannabis sativa
  modified_base (98)..(105): a, c, t, g, unknown or other
aacaaggaaaatggcaactaataaccgaataaaagaggtaagatttcgaaaatgaatgcaaagcaatcttaccataaaaggaaaaattattttgtcannnnnnnngccaaaaaaggactttacataaacgaatgtcccataacacataacaataatataccataaatttaaattaatatatcactctttttagtttttttcccccttaatataccatagcacataaaaaaaaagataaatcctaatgcaaaataaatatactaaaaacttaaaaattattattctatttttagtttttttttcttctttatttccttcatgatatacaatatattatatcacatataaatgatatagcacagaacaatacgaatatacaacaactttaaactaatttactattaaattattattttttctttccatgatatataatagcatacaaaaatcatatatcacaagcccaaacagatataccatagtgaaaacaaaaaacttaaagtgaatattccacaagttttttttttatttctttcatgatgtactatataccccaataaaatataacttgttaattctatttttggcatatttaattgac

SEQ ID NO: 94658 - DNA, 5859 bp, Cannabis sativa
  modified_base (45)..(49): a, c, t, g, unknown or other
tttctgatctttattagtaaatcggattatattgaaatgagtttnnnnnagggcacaaaacccaacagttgaatccttgggaggagccaagtacttttttaacttccatagatgatgcatcaagaaaggtgtaggtctatatgctaaagacgaaagactaggtatttggatttttttccaacaatttcatgctattgtaaaaagagaaaatgggaagcagttaaagtgtctcaaaacagacaatggagacggatacacttctcatgagtttagaaatcattgctctaaacatgggatttgtcatgaatagacggtacctggaactcctctagataatggtgtagcagaatgaacaaatcgcacaataatagaaagggtcagacgcatgatgagattatccaagttaccaaagccattttggggagcagcagtacagactagatttatcttattaacaatctccatcagttcctttgaagtttgatgttcttgaaagagtatggacaaagaaagatgtgtcatattcatatttgaagatgtttggatgcaaggcatttgtgcgcatgccaaaggaacaatggtccaaaattgatgataaagcagtttcatgtatctttatcggttatggagatgaagaattggggtataggctttaagatcctattaaaaaggtcataagaatcagagacgtggtctttaacgaagatcaaacaattgaaggcttgagagaagaaaagagtacaccagaaaaggctaaaactaagttgattcctccagaacaacaatgttcagacaatgaattgcaagaagttgttgagataacccatggtgatgatagtgatgttgaagaagatgtattgacacaagaagatatcattcaggtggagaagtaccagcaaccagatgagaaatctcatagaaggtcagctagagtactaattccatacaaaagatatccacagtcagagtatatccttttaattaaaaagggggagccaaagaactaccaggaagcatcggctcataaaaatgaagataagtggatatattctatggatgaggagatgaattcccttacgaagaacaacatacatatgagttggtgaaacttccaaaaggtaggaaggctctgaggaataaataggtctttagattaaaggatgatggacatggaaacctgacaaagtacgaagcctgattagttcttaagggtttcgatgaaatatttttgccagtggtgaaaatgtcatcaatcggaataatctttggactagcaacaagtctagatctcgagattgagcatatggatgtaagggctacatttcttcatcgagatttagaagaggaaatttatatgtagcaacctgaaggttttaaggagaaaggaaaagagcatcttgtctgtagattgcgtaagattttttatgtatggtttaaaataggatctacgataatggtataagaagtttgattcattcatggttgatcgaagttataagagattagttgtagattcacgtgtctacatcaagaaatttcctaatgataaatttgtcatcttattactatacgtcgatgacatgttaatagtcggctaggatggtaagatgataaattagctgaagaaagaactatcatgagtcttcgagatgaaagacttggggatagccaaacaaatcctaggaatggaaatcatccatgatagaccttcttgaaggttatgtttgtcacaagagaactatgttgaacgaatacttgagaggttcagcatggaagatgcaaatccaatttctttgacacttggtggacagttcagactcattaagaagtcatgtccatcattgaaagaagaaaataggacgatgttggctattccttaatcttcagtggttggaagcttgatgtatgcaatggtttgtacaagactagatattacttatgcagcgggagtcgtaagtcgtttccttacacatccaagcaaacaatattgcgaagctataaaaatgatattcagatatctaagagggacatcaaaaatgtgcctaagcttcaggaaaggagaaccaatcttggaaggatatgcagatgcagatatggccagtgagcttgacggtagaaagtctacatctgggtatatgtttacatttgcagggggagctgtgtatggcactctatgttgcaaaaatatgttgctttatctaccacagaagcagggtatattgctcttacagaagctggaaaagaagtgttatggctaaagaattttttccaagaatttgatttgaggcaagaaaggtacgtgattccttgcgacagtcaaaatacaattgacctaagcaagaatgttacttaccactatagaacaaagtacattgatgatagatatcattagactcgtgacacacttgaaaagaagctattccaagtgcagaaaattcctacaaacaagaatgcaacagatgtgctaccaaaggtgattcattggcataagcttgagttgtattccaagcttgctgggaagagttctcaatgatgaaaacataagaccaattcttcctcatgggttgaaaaaagggaagaattgatgagtaatggttgatttacaaccatgtaaaaatgtggttatgtttttcaaccatgtgaaaattactatggtaattttttgaattaagggatatgcatatattcatctatgcatttaatgcaagattgattttttatgtattgttcatacatccaaggaggcctataaataaatttccatccctttcatttgttcatcccatcacaactatcacaagttattccacgagtgaagagtgaggctcttgagaaaaaaatagagagaatacctcttagtgagagaaatctaagagagagagagagaaaaagagagttcctacaaaattgtaagataaattttgtagagagaaagtgagattaccacactattataagtgtgaaagttttgagtgtattcctcaattatttgtcaaaacttgagagtgtaatattgtgtatctattattactgatatagtggaaggttgatcgtgaattttatttactacaagataattttttggcaatcatttattgcattaattattattggtaaagtactatctatattggtttatatccaaaaaattttaatatgctctatgattatagttgtgaccgatctttcacttcaaaaaggaatttcggagtctccattatatttttccacaaatattaatcctcaagggaattgaaatactttctattattcccaatatctccattatcactacaaaaaattttacttttaggcacaacaaaatttgtgattaaaagtaaaaaacttgtgactaattataaattatcatttttatgttgtgactaaaacatttgtgtttaaaggtattagtcacaaaaattataatttattgtgactaaataaattaatgacaacttgtacctaaaaactatgttttagtcataagtaatttttattgtgactaaaattaatattaagtcacaaaaaaaattatgttgtcactaaaaatttaactaaaagtagttgtattttcatagtgcatcttcatcctccttaaatttactgtcattttcactctgcaaccttcgtactctcttttcttccaacctcaaacatagtcttaggttcccccacacatatataaatatgtatacatttcatatgattctttgttgacacatttttctatcacatttcttagaagattttggcatttagcaagtcccgaaaattcataaacaatttttaaatattatagttcttattttattttccttaggctgcgcctccagacttttttttttctggatttgtttctaatatatgtctccctcagtctctaattaagttgactgggtctaaattagactgactaaaataaggagaaaatgtaatattagattagcgcaccgcccactccattactaacaaaaaaaacttcttctagcttgttcacgtgggatgtagtgccagaaagtgcttagttcatgggatttggaagtatatagatatttattatatataactatatgtatgagttgattaattaacgtttatattatacatctttatagcattttattttccaaatccatctctccaatgcaattatatgtcaaatcatataaatataatgaaaaggaaattaaataagacaagaacaactataaagtgatcagttaaaaaaaagattctttgattagcctttgtttaatatggaatcatttccaagtcaatatatggtaacattaatttcttctcatcaaatcttgctttgtgtggatttgttatctgtacttgtgcacaatcattgaaaatctacgtaccaaggaaatcttatatttaaagtgtaaatatatattatttgttttataattttctttttaacaatgaataattcattcaaaatcatgagagaataatacatttctaataaatagagatgaatcctatatccaaataagttgtccatcatcctaattaaaagtatacgtagctgtttaattgaaatttctgaatatctagataagtaattaaaaatttaaataagtactacaatataagtttttagatgcaatttttttcggcaaattaataaaattttaataaaaatacctatcgagtcagttattttataataatcaactccgtatgttataattttttttaattttaatgaaaaaattctaggaagtaagttattttgtaataactgactctgtaggtgattttttaattttaaagaaaaacacatatggtttcggttattttgtaataaaccacgccatatgtctttatataaccctttctagctagcgtctttttcaaactctgaaataaccagcagcccttcttcctctcaaaccacgaaattctcgcccaaccacccctttcttcccccaattttttcatttttcatctgttttcacctattttttgttttaattttgcatttttcatacccgaagatatatccttttaatatttttacaatttttaataattaattaatctattattagtaaactagtttataaaaaaaattacacatgtggcgtccctatagattagggcattacaaaggtggtaaaattccaatctttaagaacactagaaactaggaggattttttctttcacacttttcaaattcaaaattgttaggatttatgcctaaaaggaagtatttaatggataatatattagagaatatatgaaatataaaatattataaataaatatattaattatagaaatataattaataaatattagaaaattcctactcataaagagagtgtatgaccttgtaaggaaatgcaagagaattaaagcatactttatgaatagaataagtcggtagtatattaaagtatgtaacatttaatacaaaattatcaagtatggtttattaaacactatactttagcagcatgtgattttattcgaatcaggaatagacattttgttagaaataataaatagattacaatggaagaataaaataagatgaataaaagacgaagacaattacaactctaaataaaatattataagggcaatatattaaataaagagttacaatcccaaagcacaaaacaaaaataaaagaaaaaaaatacaactcaaaaaactcaaagatacaagtaaatgtaaactatataaaagcatatatatataatagagtatatatatgatatatatataatagatgatatatagtagagatataaataatttatatagagagtgcatatatagtatgtatataatatacataatactacagaagaggtttcaatggttacatttttattgt

SEQ ID NO: 94659 - DNA, 555 bp, Cannabis sativa
  modified_base (522)..(530): a, c, t, g, unknown or other
aatttatatattcaattgtaatttgttaaggatatgaaacaagggtaagtgttgtaaatttttatctttgttatacctaatttttgaccaagacttacaaatgttgaataagttaaggcatcctacttgagggtcctatggcacctctagaagactcgaaaacattggtcaaccatttagtattgggactcacacacccaagtgtgcccaaactatgatttatgggtctgcgcgagcgttttcaccttagagacctcaattcgacaaagaaaccatcaaagacttgactcatttaggcataaaaaggcttgagcttgaacataaagtcaaaattacacaagtatgccatgcaaaagggcatatgcgaccactgccacatgaagatggcatcgctctctttccttttggggagcactgccacaagaagatagtagagtattatcaagatctgagcctagatgtccttctctcctttgggtttggttactactgtcttacgcattatgattgagtacttgactnnnnnnnnntgggcatggcactctatcactaagg

SEQ ID NO: 94660 - DNA, 678 bp, Cannabis sativa
tcattttaacttgttttgattgttgttattttggggttcttttatgattatatttttgtgaaactttttagttcaatgattgggttagagatttacctgtgctcccaagagttcttccatatctaaaaatattgtttaggaacgagattgctttggaggaatcgaatgatattcacgaattatgattacattctttcgcaatctcattatagttttagctattaactctttttttattattatttcccatatggaagttgagaaagaaactagcagttattttttttctcacacttgtgtaatttggtgtctttataatcaagagttaataatcatgcatcttactttatttaataatgccattgccctcgtcatacgttcagccacaccattttggctttgatgtgttgtgttattgttttatgttttttttatctatttttgcaccaagaatcaaatccctattttaaaaactttgtcagcaacttaccaatttgtttttcaataagatttttctgtttattaaatttagcaaagcaagtattcttatgtttgagtgagatctttctgtagtcgttcactattgacagagagtagccacaaaaatgctaattcaaacatgtacacgagggatggctgcacgtagtgaccttaagttcagaaaacagacaagagctg

SEQ ID NO: 94661 - DNA, 604 bp, Cannabis sativa
  modified_base (577)..(577): a, c, t, g, unknown or other
tttttttttttttttgaaaaggcttaagcaacttatttattgctagaatatatagccaataaaaccatgcataaaatttatggcttatgaaatatagtaataatgctcatttgatcatgctagctttatataatcgtcaattggtggtgcctgctgcctaataagtttattaatttttttttcttttcatgaaagaataaagaattagaacaaattctcctcaacttattattttggaatagtacaaatgtctattgaattgaactttctcaaaattaaagtgacatgaatggggtccctgtattttatttatttattttttgtggcttatgagacttattactccacttatttattcgattatgagtgccacaattcaaagttttaggttttaaactgcaattttgataaaaatgcaagacccatttgtgttaatacccttataaaatatcacacatatatatgggacatttgatagtgtgcacttcccaaacaaatagatctattaatacactttgaaattccgtattttaatattcccagtttaattatttgattaagtgattaattaaatgcngaataatgaaactggtactgaaagcag

SEQ ID NO: 94662 - DNA, 692 bp, Cannabis sativa
gatatccttcctaccaatcacaacctttttaaacagaaaaccctccattctccacattgctgacgatgtcactatcatgatgagaccctagatcacgctcttttcagatgccccgctgtccaggaggtatgggaattaactagtattcatgattttattactaaaaatattttcactaacttgtttggatttattacaccttgctgccactttgtttactgctagaaattatcacttctttgtatgcttgttgtggaagatttggaactgcaggaatagttggctacatgctggtttctcttcatctctagctcaggttctgcatgagctaacagactacatcgaccaataccaaagctgcaacaaaaaggtttccactattagacagcttcaagatgtttcgttgttgtccaatggaagtgtaccatctgctcctacttacaccatacagctttcagtagatgctgctcaagatacacaactcaacaaaatgggttttggtatgtccattcaaacaaacacatgggaggttcttttaaatttggcaatgccatggcgtggaattaacacacttttgttaatggaagcacaagccttacactttgctctttcttggtgtcatgcgcattccctttatccggatagtattgtttcggattgcaaggttttagtggattatatttgtaataatg

SEQ ID NO: 94663 - DNA, 4287 bp, Cannabis sativa
ttttaccaaaaatgaagttgctgtcataatatctatgcatattttattattcgttcattcattcattcttaaagcttctagctttcttcctcatctcatctcatttcattcaaaccacactttcgtgttcatctattctgatatcaacgacaacctttgtgactcttagttttgactagtagttagattacagattactgtttcctcctaaccatacagttttttgaactttgattgatatagttgttttcttctatatggaccaagaagctgattacgtaattggggttgaaattgggaagtaatttagagtttctgggaaatgggttattcttaattttagctgtaaatgaatacccgttaaccgaattgcgtgattttacataatgattattgtggatttcaagctgcgttgatcgtaactcgtaaagggccgctcatggggagttttctgggtggcttcgtattgcctctgcttcttttgacaggtatcctttgttgcacctgttatttaaagtattgcacttcgattttgtttcctattttacattaacattctttgattttgttaatgttggcatctgaagtggaaatttagagtagaagtatagtgcattgttgtttagaggcgtaaactaagttctttgatcaataaaattgacgacttgtgttttctatttcagtatgaatgagctagattttatttgttcagaacatacgttttacttttcattgatttgtttaattttgagttggtggcgttaaaactttctagcgctggatttttcataaatggacaatagctttacaatgtagcatttggctatggttttggtgtaaagtgtttgtttttgagatccgcatcttttttacttgataaactctggactgtctatcatatctcagttttcttgtttatgtttaattatatggtgtagttatgcgttgttaattaaataaacttatgattataacattttcctttttaaatttcatttaggtgctttaatcaactggagcttgatctcttttgttgatttgatagcctttcttctcattcagttcaatgctcgaaaaattggtaagttgtgcattttctaacatgaatgatctgcatatgataacatgcaaccgtatacttttatagcgtttcttcttaatcgtttccatactgtttttattatgtggttcgggttgaggataaaggtacgttctcatgatagggaatggaaatattgcgtaaatgtattaggttgctgctttttttcttaacaagagtgtgggtttccgtttaagagaatttgtttcgtaagactctgtcattgcaactggttaggtttataattttataaccttataatgtcatgttaatggaatctttatcaagggcactagttgcacatcttaaatttgaccctggcttttggtatgaattttttaattgcttgttaatttgaagaaatgctttataacttattgttttactatggtttattacattgttttttccctttctagagaatagataatttttggattagttattatcatgcttatactttcttatgcatcaaggtttaggtctgatttatgtagaacttattggctgctggtgccatattatttgcagcaattctgttagttttgtcattacttactaaccttgtgttggtttgttataggatttcgaaggaggttcttattgttatggcccgtcatcattttttcatcacttgctgttctttctgaggtgatatatgttgttattagcactattaagggaaatgagtggagtatagcaaatgcttgttggggaaagctggtcggattcatgatgtgagaatatagttttctcttaacatattatattaatccattatgcctcagtacgttttggaatatttacacatcctgttttgcatgcatttgcagaatccaatcatggaaatctccaatgatttatattatagctgtgcagctttcagctgtagttgttgcattgcttgatttgcatggaagcaaatttggttcgttttcaaggcgtaattcctgttggagtcatttcttgtcagcaattgaacacttaggtttgtaagttggttttttttttctttcttttgtatgtatatgtgaaatgacgctttcaaatatcatattagtcacccccttgttgctagtggttatcactttttttccccctattccataaccattaatttaatttggaatcattttattttttcccacaccaaaggttctcatattagggttgcttcctgctttctattgcctgcaattcagctggttgtggggattagccatccctcatgggtttccctaccatttttcattggaagttgtgttggtcttgtgaattggtctttgacaagcaattttctaggacttttcaggtaatttattgtgattttactcttcactttgtatttttctttttcttcttctttcttttaattgacatttgttctgttaatattttaaggtggtggaggcctttacaactgtatgcaggcttcaacatcctcttattatatgtgtatcagctgcctgtcaagtttccaagcttgttaaattggtcagctgatttcattggtttattcaagattacagcagattctgagtggcctgaaatttgttcaagcttttctctcgttattttttatatcacggtatgtttagctaggctattgtttttctggcaggcttaattttaccattttgtttgcttgatagctcttatttttttctctatgagttctggttttatgatgatagatgtgttttcacaacaatttcatttttttttttggaaaaagagacaaaggccacatattgagaggcagagccctcacttgcggaggaggaaagccgtagttacaaacacccacaaaactgtacaaaattagcatagaaacaaatgaatttcaaacagaatactgctaactaggccctggtgacatggcagtgccagtgtgattggagtgcttgaaagagctaattattagttagctggttgagggaatattcaagtagctggttgagagaagaagttggctaaagaggaatttgattgattcacttgtaggagagacccagctctcaaattttttggattcagtaccagtgcctagattttccttcacatttcttatttcgtatcttattttatttccttgcacccattataagcttgattcgtagttacctttgtttttaatgaaataaagaagcatatttgggaatggttagtttcttgttgaggtgactgatgagattaaaacttggtcctgttatgcttggtttcctgattatgtgtacactagtaatgcaaaggaatatagcaataacttgggatgaaaatcttatttatctctaaagtagtcaatctgatgaacacttgccaagttaggtaatgttagatcctgactatatctgtttgcctacatgtttgtttttcttgtgtttttccttttattttccttttctatgtattattaataataaagtcgtttcacttggtcaactgcttgcatgcttattttttcttgtattcttaggatttttgatgaatttcccccctctaattgtagctctcttatctcaaatctgatttggaagaaatggacttcattatgtctatgggagaaagtaacttggcagagcaacttcttccttcaaagcattcattttttattcgtcaacataggtattttggaagttggattaatttatttgtttattggtcttgatcatcatgctttattagtattattttttggactaatcttgtcatgggttattggtggagcattctagattttgtagttacaccataatctaagtaaactaataaaaaagttatattaaggaaacaataaacttttccggggatcatttgtaaatatcttccatccataatacattgccaatgacatagatgttattaaagattgtctagatgtttttaaattggttttccttccttagaaacatatagactttctcctttaggtgtcttcttcttcaattcccacttctcataaatcgcatacttcagttagtggaaggaaggtaggaatatttagaggttgtgttagaaggatgtagactctgggtatccttatgtacctttgatatatcttctaaatcactgcaaattttgggtctgggtttctccattaataagagggttagagtctgtggtaggtggctgttttagctacttacttgctcatctggtttcagaggaactggagagtgaagaaaaat

SEQ ID NO: 94664 - DNA, 597 bp, Cannabis sativa
tctctatctcactatctgaggctaacttggctaagcagtctgcatgagcattcttttctcgtgggattcactccaccttatattccttaaactcttggagcaattccttgacgattgatacgtaagtagccatcttttctccccgggtctaatattctcctgacacctggttgaccaccagttgtgaatcaataaaaaacatccactctattggctcctaaagccttggtcaatctcaatcctcctattaaggcttcatactcaacttcgttgctagaggccgggaacgtgaactgcagggcagcttagagtcgtatcctgtcaggtgagatcattattatcctagcactagacccgctttcattggacgccccatcaacgtataccttccacgcgggcgtatcttgagttggcatactggcgttggcctctgtctcattgcactccacaatgaagtctgccaatgcctggcccttaatcgagatgtgtggaatgtactgtatgtcgaactggcttaattccatggcccacttgaggagccttcctgaggccttaggcttttgtaaaacttgccaaaacgggtgatttgtgaacacc

SEQ ID NO: 94665 - DNA, 874 bp, Cannabis sativa
tgctatcattggagatgctctaaggcccattctctgacaagcaacataaaaaacaataggaatggggattttttttttgccctcctcaattttttatgaattaattattttgtatatacatttttaagtattttatttttttttatcaaagagagaagttttcattaatcacttgaacaaaaataacaagcaccaagacaataaggctaaccgtccctgcctcatgttctcaacaagctaaaaattttaagtaaatacacttaatcactaatactcatttttctcttaacatagctgtgccatctaaagcagtttttttttatttcagcaactaaactagcagctgaatgagagaagtgctcaaatatacacatgtttatgttcctctaaatctcataaactgcagcagccagaacgaagttagaaactgcagcaacaaggcctttccctttgttgttcaaccactccgtccagccattgtacctgctaggccaagggacagctccaagccaacaaattagctggtcataaacttgagaagacagcttgcttaagaaaaaaaatgacagtagcttgggcaattcaagttttcaacaaagctattaagtttgggaagatgatctcaggtttaggaccctgccattttaacataacaatggatatattgatccgtttcagcaacaacaacaacttgaacaaacacttttctccacaaaatcaacaacctcctctccgtaacttcactagagtaataattccagccatgaaacctagcttggaaataaattataacaaaataatataattaatcttaattaaagttttataagaaaataaattatcaattacttttaggttacaagttatttattat

SEQ ID NO: 94666 - DNA, 534 bp, Cannabis sativa
tttttttttttttggttattatccaaacaaaagagaggaaatagacctcagtcctcgccagcatagcaaaactttaataaactgagaatgtgtgtgtttatgttttctaatatccaaatcattcaaactttttcctccatttccatagcaaaacttaatcctacctaaagtaatctttgaacatttttacatttctagagttcatctataactatgctaccctacaaaccattttgacctcattcccaattgaaaacaaacacattggctcagattagagaaaagaacaaattcgtagcccaaaaagtagagaaaaagcaaaagaaaaattactaaaacacaacgaaactaacaaagcaaaataagtaaaaaagtttgcatagggttcgaaatcacccatagggttcgatttcggaggtgggagggaaagagagggaaagagagagacttacggaggtgggagaggagacttacgccggtggagcagaggagaccttcagaccttcaaagcttcagagcaaaatcgcgcgcata

SEQ ID NO: 94667 - DNA, 928 bp, Cannabis sativa
aaaaaaaaaaaatctatttttttatttttaattatttttcttgcatataattttgaaatatttaaaaaaaaatatgggaaggggtggccaccaccggccccttagttaatattatatgatgtaattgaattgcaccccattacaaataaaaaacctacattttcaggttcttgggggtctaaggtgggaccaaaaacaaaaactaattgagtgagataataattaataattgaggaaagtgttaattaatacaatataattcgggttaggaactaatcttcataatataattaaataatttatttcattttgtgtgttgatttgaatgatatactacttgtctgctttcatatctaaaagcaacaatttgtgattagttggacacataaattagcaagtgttttggtcaattttataacacgtgattatatataaacccaaacggaaataaccttttgtaaataaataaataaataaataaataaaaaagaaaaaacttaccaatatcaatggtttgtaaaaataataatatagggtaagtttatagttacttgatttttatctaatttgatattttagaaaaaagaattagtttattttttttataatggtataagttgtaattatttaaggttactaataaatttttaaaaaatttcaaatagcttaaaatgttaaaaataattttcaaatattttattacacgagtaatattttttatacgcgtaaaaatcaattatttgaatcttattttcgatgctgtaaactattcataattttaaaaaaaattacaagtactcataaataactttaacttacacatcatgaaaaaaaaaaaaaaacaattaaactaaaaaattatagtaaatgtataaaaagtgtaccaaaacacttaagggtgtcgtagtgattgttcaatattatgtaa

SEQ ID NO: 94668 - DNA, 979 bp, Cannabis sativa
ccttcctaaattcactccatacccgccccaatacgcgtttaaattaaaacaggacgggacaggaattactcgacggaggaaggattcttatcaggtacccattacatatatatttttgaaaaaaaaaatgacatctcaaagagaattttaaaaaaaaataatcataaaaaaggattcttatcgggtacccattacatatagtatgtagggtaaataccattttgggccctgtgttttgtaaaagttaccaattgaaccctctgttttgttaaatgacaaaatgaacactttgttttgttaaatggtaaaaataagatcctaagctcaattttcaataattttatttttctaatacaatcaactttaagataatttttaacaggaacagatacagaaaatgtaactagttttatcataacatctctaaatcaaattattagtaagttttatttttacaaacaatcgattcagggtcctatttgtacaattttacaaatacagggtctattttatcatttaacaaacacagagggtccaattggtaacttttacaaaatataggttcctaaatggtatttactctagtatgtatagtaaatggagttagcaaatacaaaattggtaattgaaaataaataattaagtatcatttttgtaaaaatgttttgtgtaattattaatatgcaatactgtagacattttcatgaaaactgaaatgtctcattactataatcaataaaaaacctaaaacatgaaattattttaattgtagtagttatgatttaaaaacttaaatttatacatataacatatcggggcgagttcgcggcggatatctattccccacccctgccctgtttccgattcgagtatgaacatttaaacccacacccactctcgcctccaaaagtcgaaccccgctcccactccattaggagcagatacccgcagggacccaaacccacaggcataattgcca

SEQ ID NO: 94669 - DNA, 620 bp, Cannabis sativa
actgagaaaagggaggcgatatatctgaacccaaaagcttgtaaatatcatatcttcctttgtgacattttgcagaacacctggtgtgtacagaatgataaggtgattctgaaaatgccatggctctttattgagtaccctgcgtttgtcgccttcacagccgaaggagatgtggaaaatatcagagttgtagtctgtaataatggcagggaatcttcctttccaatggctagacatttgttcatagaaatggggcttgtaaatggtgtttccggttagaacacgggctaggagaacatgaggagatcgtgatgtgggttgatgagaagggaaatcaggcaggttaacaatggaactttcttcctcagtgagtgaaagtgtggagttgagatcagttgagagaggttccatggtgacggagaaggtagggaagaaagggagtgggaggaagacaccgtgaggagtggttgttgtggaaggaatcgataagaggtggtgggcgggagtagttacagaggcagaatttcaaaaaagtccggtgaagtagcagttgtaattgatcagatgaaaagagaaaaacagttggagcataacggcaacagacccatcagggcacataa

SEQ ID NO: 94670 - DNA, 847 bp, Cannabis sativa
tataaacgcaaaaatccatattgtgttcataaaatgggttcttttaagtatttttataataatatatcaattattctcaaagacaattggctaatattattgacagtagatactcaaaactccaatgcatctctctctctctctctctctcaatgtcaatccaaacccagaaagaaacttaacacaggtttattctcactatgactgtcactgcaaattttatgtgacgttaaagcaattaggattggacagcttatatataatatagcatacaggcaccagtggtccttctatacgtgagtatctattggtccaactaaatatcggatcctatataatttaatataataacttttaagaagtattgctagccaattacaacgcaacatgtcgagaaggtgctaggtaccactagtccctaatagcactgttctagcacctaaatgagagccacgtaatcacttagctcttttccgtgggtaacacgtctaaaatattttggacagatttgtctcagaatcacggtaagaaatttcaaccgtcacccgtttacaaacaccgttagttattacaaaatgttcaattttacccgcattattatcaggtaaataacaattaattaacataacttccttcagttttttttaatttaattagttaattaataacaacattctcttctctcctaatttggtctcgtcgtcgtttgtccctcttatttttatagtccccactaggggtgttcaacaaaatttataaaccgcccaacccgaataaaccgcccaaaccaaaccgaataaaccgacaaaaaatacaacccgagataatacaatgaaaatccaaaccg

SEQ ID NO: 94671 - DNA, 594 bp, Cannabis sativa
atcaccattactatctattggccttgtagtcttggtatttttccttgctgttatatatcactagctccaattacttctttcttcttgtttctcatcatatcctgtcattttatgcaaagatctattacgtgactttaaactgttcttcccacaacttcttaatgaatataaatttgaacaaacggattctcagtgacttgtttctgtctagtgaatgtttattaatttgttctcttgctggaaacttcagggtgcaattcttcttatttgctacagctatagtggttcaggtatgtgttttggtctccttcttaatatcattgtggaaaatgaatttaataaacaactttgttgttttctttaaatcatacaaaatcctgtcagaaacagataagaggcttcttttatcctctcttgtattgagctctatcatcatggtagcgatggaagaaaactagggagaaaaatatttttcctttctctgctagctttatttatatatttttattctagaatagaattcaagccactttaaaatattcgagattggaaaaaatattttctgattgttttacatcatttgaaagtttttct

SEQ ID NO: 94672 - DNA, 519 bp, Cannabis sativa
agtgtttgaggaatatttcagctctttgttcacctctcatggtcctcctgatgaggttctaaatatgatgttggattcggttcaacctagggtaactaatgagctcaatgatctgttaatgagaccttttgctgaagctgatgttcgaattgcactgtttcaaatgcatccagctaagagcccgggtaaggatggtatgaatgctggtttttatcaaaaaaaaattggacattgttggaactgatgtgtgtaaggcttatttgggttttattgatgggtcggcctctgcttcttctatcaatgaaactattattactttgattcctaaggtcaaatctcctaccctcactagtgaattttggccaatcagcctctgtaatgtgttgtataaaataattagtaagatgattactaatcgactgcgggaggttctggggaatgttatttcagaggagcaaagtgcattcataccggggcgcttgataactgataatgcaatgattggttttgagtgtctca

SEQ ID NO: 94673 - DNA, 909 bp, Cannabis sativa
  modified_base (678)..(682): a, c, t, g, unknown or other
gagtggatgagtcgcatagaaagcattttgcacatgctaagggtgaatgggaatgacctagtgaagtgtgcatcatacatgctgaggaaagacgctcgaatctggtgggagtaggtggaacaaacaaaggatgtaaataccatgaactgggatgattttaaaagggtctttaatgagaaatattataactcagcagttctagcagcaaaggttgatgaatttattggattagcccaagggagccttactgttacagagtatgcacgaaaatttgatagactaccaaaattcgctccagattttgtacctactgatagagtgcgagcacatcgatttgtggaaggcctgaaaccaatgatttctcaagatttagagattgtgtcaaggggtcaattcaattatgctcaagttgtcgaaatggctcttacggctgagcgaagtgaaaacaaaatttggaaggaaaatgctactagtagggaatctaagaaaggtggagccaattctaataaccacaaaagaaggggacaagatcagcccggacagtcaagtcaagacaagaggtacaaaactgataacgaccaccgatctaatggaaacaatggatgccacgttccagaatgtcctaaatgtaccaaacatcatcgcgaagagtgtagggcaaatgcatgttacaaatgnnnnnaagaaggtcatattaaacgtaattgtccattgtggggacaaacagagaacaaagaagattcaaagcaagacgataaatatgttccaacgagggtcttcgctgtcaaagaagcagggcagagtgatgaaaagtgctgaggtataagacattgagtcttcgctttcaaaaaaaaaatcgagtagaatttcgggacgaaatttctttttaggaggggataattgtaatat

SEQ ID NO: 94674 - DNA, 777 bp, Cannabis sativa
ctctccaagctttcttcttcgagccagtatttcagtgaaaagaggccaaagtttccaatcaggtggcttctcaatagcaagagcattcaagctaacccgagaatcagaaaacacagcaaaattgttccagattctttcttcagcccaacacagcgccatatttaaggcttccatctccgcaccagtagcatctgcctgtgatcctttaaaatatttcccttcccaaataccactgtcgtagtcaatggcgacgaacgcaccacctgactttccatttttaaaggctccatctgctattataacttttgaggtataaggtaccttaccctcaacaatcgagttcttcaaagagcctacattgtgttcatttctattcttgtaaaggctttcaaccatctcagaatgcctacttttgacctcagctaggatcacttccagatttatggaaacatcaacccctctgttcagcatgtttcttcaaagccaaataatctccataacagaagccaaccaaattaaaggcccatccatctttgctgctttcagaatggtgatgataccagaggcaaattcggtcagatcagaccctacaacttgctcagagtggatgggaataggggccccaaaccagattgctctggctagtgtgcatctgccaaacaggtgcaaaggagtctccatactattattacaaaagaagcatccagttccagtatcacccccgtatttgcttcgagtaggcaatgcatccgctatagccctccacagaatcatact

SEQ ID NO: 94675 - DNA, 848 bp, Cannabis sativa
acaaatctccgctacctcgctttgcttctccttacccaccctagcacccaactgttggaaccaactagaatagtaatccccaacatcattcaaaccaataccaacagtatcacaagccaaacattgagaagcaaacgtcaaaaaggacaatgcctttgtactgggacatgcttcaaactaagtcaatacattgtcagaagacacaagtacaagcacgctatataaaatccttcaccttgggaggaatttttagttgccacaaattgcgccaaaacccagaatttggatcatcacttcgcccctttaaacattgtagcaacttatacacactcttcagcatatagaaaccttaagcctctcttactccaatgaaaacaatcattcgtgacctcatcaattaaagaaatactcaaaataagctgcctatctcgctcatcaaacaaatcatgaatcacatcctcatcccatcgcttaacatcaacttgaaacaagctccgcaccaccttaccagccagccctagatgacgagaaacaacatacgactccacctcatggcaaccaaggagcctccaaaatagaggcatgcgacccatcaccaatccgaagacaaggcctagatgtaacaagaaattcaatcttccaaatactcctccaaacaaaattaggattatcacgaagctctacaacaagaaacgaaccattggagaaatacctagctttaaaaaaaatgacccactaatgaatattcaacacccttgcttcccaagcaaggaaagattaaaatctcgtagattatgaaagctcatatctccttgattttcatgataagtcatacgatccccactcat

SEQ ID NO: 94676 - DNA, 960 bp, Cannabis sativa
atcctaaaggttactttgtgcgcaactcgatttctctctgttttggtgtctctttgacttgtctactcatgcgatgcagattcgagatctccattcgaagtcccatggtcaagatttgaactactgtcacctctctctctctcttttatgtgtaggtggatggcgttcaacaaagcttcgtattcaggggttctgtgtcaacaaagcttgcggcttcgtgttcgtggttgtttgattttgtgtataactggtttcaaattttatttgtttgatagaaattgattttggtgtttgtatttctttttaactggtttgggggtttgtatttagcccataaaatgagattgatttgtaattttttgtccaaaatgtttatagacactattaattcttatgaaaaaatactttttttttttctattttttttgtaaatctaattttttttttaaagttatatatgtttttaataattattgagtaataatattagtaaagaattaataattttaaaaatattttatttataaattaaaatataattttaacaaaaagaaataatatataaatttttttattctaaaaaatttaaaatcctactttcacatccattaatggtggactagaaacatttttctagtccaacaatgttggactaaaaaataccacttttatgtcccttgatattatgtccaacacaaaaatagacttgaaatacttttctagtccaactttaatggacttttgtcaaatttctaaaaatggtgatctatagaatagagaaaaattttcaagaaaataaagctgaaacttcaagtctaaattcaactatgttctgatccgatttttgaaaaagtccaaacacaaaagtttaagattttttttttagctttccaacgtatcttgaaaaatctaattaggagtttatatgtgaatgttatgcatattttactgagaatgtca

SEQ ID NO: 94677 - DNA, 525 bp, Cannabis sativa
aaataacacttgatatcaacacttaaaactcagaaaataagaaataaaatgaaagttataactaaaacccagttacaaaatacatttctaaaaaaaaaaaattgctcattttctaaacatgaatagtctagattgaacacgagcccaactctaaatccccgttaaatgcgaagccccgtcaaaggtctagatcaccccaaacttttttcgtccacctgcatatacacacagaaacatagaacagaggatgactactaatttaaatttacaaaactcttcacattcatatcaatataaaataaaagggtaaggagtttctaataaatgataacaacaatcctgtatattttactcttacagcatccaaatcacaagtatgcacattatcataagttctcacctcaaaaaagatcagcaatgtttaaccttcctgcataaaattaagataatacttaacacatacaaccaactatatatatgaatctgataattctgaatatatatttctataaggcatttatgttg

SEQ ID NO: 94678 - DNA, 557 bp, Cannabis sativa
  modified_base (333)..(351): a, c, t, g, unknown or other
tgaaaccctagatgcccaggttggttttcggggtgcaggttcgtgtaattttagctctcagagcttggatttaattgctctatgtattcatggtacaaaatactaaaagttagtgagttggaatcaagttatcgaagtttgaacttcgctcctgaagcttccaaagtcaacctggacgcagggctagggacccctcccaagtcgactactagaattcaggtctactcaactctgtgatgtgatctttcttgtcacgtgtgaaacattgatatccacatcatcaagaaaaattttcgagctaacaactataacgaacaccaccataaaaaaaannnnnnnnnnnnnnnnnnnaagatttatattttaaaaaataaacaacaaataacccgccttgtttagattatctctaacatatcttccaaaaaaaaattagtacagaaatacctattataaataatagtaataataataattttacttttatttgtccactcctattctacaatctattaaagatagaaattagtttgtttgggcgttcttataattttcaagaa

SEQ ID NO: 94679 - DNA, 535 bp, Cannabis sativa
  modified_base (41)..(54): a, c, t, g, unknown or other
tgcagtatgaaacttattaaaaaacacagtaaaaaagtaannnnnnnnnnnnnncagtatttttgtaaaaaaattacaaaatttagtatatcatgtaataatattgtgatttattacaaattaaatgatgtttttaaattaaagatattcaaaatcgaaagtacatgttgtaattgcaaatacgttctatgatccatctagagtcatatatattgacagtgacaaatgtctataaaaattaaaaaaaaaaaaaaaggaaaataaaatcactaacatattaattttggggaccatagagaaagctactcttttttattttttatttatttattttttttttttgagaaaaaaagaaaatgtagtgcaaaactcttccccgtcctttcagtcattttaataattacgggaattacgtgttacttataggagttttatacctcagttttccttaattgagttatcagtaatcactttaatgattcccatcacacatgacattaactacaacaatctaaccttcagagggcaaagtctt

SEQ ID NO: 94680 - DNA, 4103 bp, Cannabis sativa
aacaatctcaatagttcaagaaatatttttaacgactttaaaaattcagggtataatttgatacatatcaaagttgaaggcaaaaaaattatatatctgatcttttagatgatcattaactcaaatatttagattacataactaggaactcaatttcaagaataagtttttgttaatgttcgataatacaacaccaagttgataataaataaatattctcaattaaaatctctgtatggaaaaacatggagaatagataactttatgtatgttataatcttgtttattgggcacaatcaaggggaacaataaattactattatgtagtatacaagtcaatgaaagcttgtatgaaattatattataatatttgtataaatattccaaaaactacaacttgctttgatcccatgagcttgttggatctaacttctgaataataataataaaaaagaaaagaaaagtttaatcaaagtacttctaaagtcataaaatgagagaaacaaagacacaaaacagtgagacagctggccttatgaaatttttaaattacagttactttgcattaactacttctttcaaagtcagacacttatatttgactccataaccgtctgaaatccaaaacttcaatcagagagataagaatgggcaaagccatagccacaccattattaacaactcagaaacactcataaaaaaaatcctataaaacacagtaagggaatgacaatccaaagatgtctctttgttggggctcccattttcatactcatttttcatcttccatggctgcagtttgcatttggttatggctcggttgggccgattgcggctgcatttggcgaaaaagggttcttctgcgccattgatgctagtgggaagcaagacatcatatgctgggataaggaaaacaagtcctcatcatcaacaacatacttcaattctcttccagccatggtttcgctttcgggtggtgaagaattcatgtgtggcattacgtccaactcttccaaggcttattgctggaacttggaaacgaattcagcaatggatcttgtccctgaagcttataaaagcacctcttattctgtaatggcggctggaaaagaccatgtatgtggtattaaaggatactactatgaaaaaaatgaagtgggcaatgttgattgttggcagtatattaaaaaaagagataatagttcaaatgtatatgctatatctaatactcttttttatgacccttcaattattaatgatttacttttaagaagtgttgtttctggggaaggcttcagttgtggtgttgctaaagatggtggtgtcatttgttggggacctaaatctggtaatttggggtcgtccccaggtgatcttatgtccttggctgcaggtaggaactctgtttgtggaatcacagctatgagtggtgaagtcaaatgctggggtgaggctactgagtttgattctcctcctgttggggctcgatttatgagcttatcagttggagctaaacactactgtgggatatttgaggacgatcatagtgtccaatgttggggaagtattcaatccccattgtctgttccgaagggatatggatttatggcaattgcttcttcagatttcaccacttgtggggttagagaggttgacttggttcttgattgttggggtgttcatggtcaatccaagcaagattacaccccaccattgcagttgtgtagcccgggagtttgctctccgggctcgtgtgcttcagggaaatttgcattcaatgctagtgttgtcttgaatgaagcaggtttgactagtttatgtgctagaaatgatgtcaaaatttgcttgccttgtggaacaaattgctctcaaggcctttttccttctagcatttgtactgagaatgctaatagagtatgcactgcttgttcactttgccagaacagttcttgttgggatatatgtaacatttcttcttcatctttttccgggattcgagaccaagatagacaagaattcatgaagaaattagtgatcatcattggttcattagtctcgggctctttactaattctgatttgctggtgtcttttaagccgaataagcagatcaaagaatcaagaaaaaggtagaagctgttgctttttgtgtgcaggaaagcaggcggtagaggctgaccctgaaactaattcacaaacatctgtttctgtacaaacctgcattgcaacaacacaagtgtttcggctttccgagctcaaagatgctactcatggattcaaggagtataatgagttaggcagaggaaactttggttttgtctacaaagctgttctctctgatggcaaccaagtagctgtcaagagggctaatgcagccaccataattcacacaaacacaaaggaattcgaagcagaactcgaaatactatgcaacatgaggcacagcaatattgtaaacttgttgggatattgtgcagagatgggggaacgattacttgtttatgagtatatgcctcatggcaccctatatgatcatctccatggagagctttcacctcttgattggaatttaaggttgaaaatcacattgcaggctgcgaaaggcctcgagtaccttcacaaacaagccaagccacctattgttcatggtgacatgacaacttctaacatccttcttgatgcagaatggggtgcaaggatttcagattttgggctgctaagtactactactactgagaaggaccaaaatgtaaacatggaaagtgatgtttacaattttgggattgttttgcttgagattttaagtggaaggaaagcttatgacagggattgtagccctgcaggaattgttaattgggctttgccattaataaaaagagggaaagcagcagccactgttgacaagaatgtggctcttccaagaaatgttgaaccattgcttaagcttgcagacatagctgagcttgcactaaaggaaattcccgccgagcggccgagcatatctgaggttgtgtctttgttggatcagactatgaaatgtggaatgacaatgtaaaaaacatgcattactctctagcaatttaagtaccaatatgacaatctttgaatgtgtacatttcattttactcttaactccaagaaagttgaggatgttacaattgtttcatagaaagccttttagttactcatttataatttttttttacacactacctaattcttttttataaaaacaaataattttttacaaaatttcgtgaaagccttagcaccatgtacagtattgttgtgaaaacaacttaaaaacaactatttatatttttgtaaaaaaactaaaattcaaatttataaaagtgttcaaaaagaaaaaaaaaaagagtagattcatattttttaagatttttccatttataatacataacacttattcggacccattcccttaggaccatataagctattatgttgatatgatgatcaattggtgtctcaaatagttccctttttcataggaaattcttaataaaattgtcaatttttgggttttttttttttacgaaatattgaattttgggcaaaaatttataattttactggcatataattttttttacaaaaataatatttttttttataatacaatcttaaaacaataaaagaaaacaattaatagcaacagtagaacaactaaaaaacaaatgttgaacaacagtgaaaacttaatacagtatacagtataaaacttacacagtacttttgaaaaaaattctaccctacaataaaaattaaaaattttagtatagcttacttaataaaatctttttatcattattattatttttgttatttgcaatgttctttttcagctcaatagcagaaacagaaagtgtttacaaaaatacgatgacaacccctatgaacatttatacaacctgaaatttataccacatagaaagtgttgccttcttctctcgtagatcgtagggcacccaaataaacatatcaacccaggcacttgaaaatcgccattagtagaggtgactccacttgaaggcacatctagatcaacaatagtaaattaacaacaatcaatagtttatttaa

SEQ ID NO: 94681 - DNA, 1499 bp, Cannabis sativa
  modified_base (654)..(666): a, c, t, g, unknown or other
cacaagtgcagacatctacactttgcgaattagattagattggattaattatttatgaacacccgtgcataaaagtgacttatctcatcaatatactattgtgatggtagaattttcaatgaaagtttacatttttttacaaaaaaaaaccatgcgtaaaacatgtccctaccctaccagagaatttttctataatatttacaaaacttatggaatctttatattggggagagtaattataagtccatgtattaaaatatatgatattatctttttacgattattttatttttacattttaaaataattttctctttttatatttttatgaaaatttacatagtaactcacgtaacaattgacgaattaacttaaattataattaaaattcacgtagcaactcacataaaaattactagaacaaccaccagaataatatttccaaactgtaattttttttaaaacaaaaaatacagaataattctcctttttcctaaaacaataaatttatttaaaacaaatgtaattagttaaaaaaatattactcgtataatatttgagtggatgtattattattttcacatagaatatatataaaacaaactacattgtatactcactttattttatttgttttaatttttatttttattnnnnnnnnnnnnnagatatatccacttttatagatgatgtctcaattagatcctttaaattaatgtaaattttaaaatatattggacaacccattcaaaaaaaattaatatattttaataaaatttaatataaaatatttttaattaatagataaaaaaaattactttttaatctctacatgttgacatcaaactttcttttataattatcaagaaacgtgatgacgcataaatatatagctcatgagtcatgacatcatcaataatattaatatgagctaattaattaagtactaatataaatatattttattatctaacatgtgagaatagtcggtgcatactttgttatcaactactcctttacttaattatattatttatatatgttaatttaattacttaaacaatttcaacttgacaatttgtactaacttgaaaattgttaaaaagtaatattgatgctaagcatttttttaaggtgttgttaatatgttattgatgtaattaaatattaaatttcatataatttaaaaaaaaataaattttaaaaaatatgactaatcaattatataacgtgacctataagtactaatgatgtttaataacaatactactttgcattttgaaattgtccaataaactatattgttaattggttgttgaatctggttaattaatgaaggttggaatgcatgatatgaattctcttacgtcgtgtaaatttaataattataattaaaggcatagaccaacatttataatattattataaatgtgttacatacatatatgagtagtattaaagaaagatgaataacttgtatactgtttttttaacttttt

SEQ ID NO: 94682 - DNA, 1401 bp, Cannabis sativa
aaataaataaataaataaaaacagatctcataaacacaaactcaaacattagaactccagtaaaacactaaaactcaaaccttaaaaacacacaataaaatttgaaccgagaacttaatacacacatcagaataataattaaaccattaatgagaatttatgctactattttttgaatttcgatatttgttagcaacaatttaatattttaagtatttatgtcacaaattttttaatagtaaagttaaaattttaatataattttactaagtaatcattattaatcaaaatacacaatttattttttatatataatttaaaataccttatatatccaccgcgaagcgcgagatatttactagtgtatatataaaggagaagtatgaggcagtgagatggcattttaaaattactcaaaaattatttttctcttctctccttaattatctcaattttaatattttattaaagcataaatctacaaattgattcaattgaagcttcataattgggggagccaacatctcttgtttgctagtagagtggattgattcaattggtgttgttaggcatccgttttattggatgagtatttttatgctcctacagaaattagtcaaggatgttgataaactatgcagggactttttgtggggtgtgaaagataatactagtaagatgaacttagccctgtgggatcttgtttgcaagcctaagaactaaggaggattggaattccgtgaaggagctaagtggaacaaaacttcgattactcgatatatatggactgtttttaggaagcaagattcatttgagttaaatggatcaatgccctctacttaaaacaccaagacttttaagttatcaataagaaagggggtgtgagttggtattgacgtaaacttaatcttagagatatttttacacgagatacaatcctggatgctggaaaatgggttagatttcaaataagcaagctttacaattcctttctcattccttatgctaacattgatattgtaaagtgatttggtgtagattatcaacactaaaacaaatatttatttttttgcaaacctctcataataacttattaatgagggatcacttgataacaagaggtatcactattatttctacattttgcccaaagtgtaattttggatatgactgtcatgcttgtattttctttcaatgcccattctccgagcaactcatgtatgttggtaatgccatttggccatagtcttaacgcattggtactgcggtcaaaagtcaaaagagatcgtaacttgcttcataatgttgttgcgattatttgtacggtagcattatttagttgaactaaaacacttgtatttttgagaaaaaatatttgtgatctctctctctctctctctc

SEQ ID NO: 94683 - DNA, 611 bp, Cannabis sativa
ctttttcttctaatatctcttaatataaaactttttttcattcgaaaacaaatactcatcagtactcaggaggacaaaatggtttctctacaaaagtaaatgctagatacttattaatgcaaagagactcacgagtacttattcaaccgtaggttcacatgtttcacactctttcctttctaagtggaaaacaaaaatttgtcagaaacaagccaagaaactatagaggaattaacagacaagcaaacctttaacaaaggacttaatgtgaaacagtagttctactataactagccctcacacaaatattgtcgcaattgactttgcgtaagagcttggtgagcaattgtgcgacacactaagagtgttataattaaaattgagtgtaattcggaataataattactaaatttgatgtatttgtttaaccaaataattacacaataataatgcaattagaggtaattgaggaagtctcaattatactctccaattcttatagcagccacgagaattggctgagtaattacaaaatgctattattttttaaataaatatttattacacaaatattatttttatgtgtccttactaactcatttgataaacga

SEQ ID NO: 94684 - DNA, 657 bp, Cannabis sativa
ggaactctattgcacgatagagtaccgtcgaaattaaacacccaaaaccgactactgctcgaaaatataaatatgtattatagtagtatataaatatatcgtataatttttcaaagtgaaaaaagatatttttcttccactgttcagtcgcattttataggcaatgcattgaaagtagtaacgggaagaaatatgttactagaagggaacgttagaacagatcgtgggaacgatgcacaaaatcaagaaacctttgtttacttcggctcggcacggcacggcacggtcagtcggacggacggcagcgacggcgcgagcgtgtgagtcctcacccatgcgcacaaaactgggtactccttggggcccaaacccatatctcaaacttgcactagttatacacttcaaatgaaatgtttctatcccatgtgaactcttactcacacactttatttttgtaatatttcacaaggttccaacatgatggtataacaatgattgtgcaataggatttcaataatttagtattatttattattattattttttttggtgaaaatagaaaaagttcaagtgatactgtcgattatttttaggatttcaataatattgtttgatagtttttggatgcttccgatagtttagctgaactttggctct

SEQ ID NO: 94685 - DNA, 542 bp, Cannabis sativa
aatggcccaagctgcccaatgcttaggctgaccctgtctataacgatattgacatataagaaggtgctaaatattactaatactttttaacatttctctaaaataaattatcatagcttaaagtaaaaatttacgctcaagatattaatagataccgaattttttttattatcattattttatcaaagttcttttttaatttaaaattttattcaattcgaccttaccaatattagaaatatcaaaatagagattatactttgaataaatacgatcagcatataaacgagacgctctagccatatagtgagcaaattttaatttgaatcacaattttaaaaataaaacaatatttttaatcatagggtaaatttcattttggacccttgatttgcaaaaattataaattggaccccctattttattaaatgacaaaatagatcctatatatatatatttttgacgcggtgatcaaaatcacacatgattaataacgcgacaatccataatcggcggctgcacctcctcgaaccagaatagct

SEQ ID NO: 94686 - DNA, 516 bp, Cannabis sativa
agtaatatgagagagagagagagagaggagaagaagaagagtgtgggctttaggtaagagaaagtaaagagagaaacttatatttgaagaaacttatgcctctaaaaaattttatatgtccgtctttctttattttaccaatttcaactttatcgctttatttatattacctacaatactacttttcaaagaaacttatgctcatatcttgtaaaaagtgtgatttggtatagtgtaataacttaagatataagtcttccattactaggccttttacaacttcgcgagcagagcctatatcttctgtattttcatcatgcgcttgccccatcttttattttatcttcattttttttacaaaatcgaagataaaattaagtttttgttgagtgaaaaccaaaaactgatgaaacaagactatacaaatgtgtatattcactttttctctatataaaaatcgaagataaatgatatatttgttgggttttgtgcccctaaataaaatccagttcaata

SEQ ID NO: 94687 - DNA, 635 bp, Cannabis sativa
  modified_base (156)..(159): a, c, t, g, unknown or other
  modified_base (595)..(598): a, c, t, g, unknown or other
cttgaatcaccattgtcacctatacataatacacatatatattgttaaattcatgatcagatcaaagctaagttatatgctaatttttagaattgtaaagtcttcatctcaaaactgataatagaaaagtagcctatgttgagaatcatggggttnnnnctcaaaaccaattggcaatgagtagagtagtccatgttcttatatatggctcaattctctatcatttattcaggacaatgtccacaatagcctctatatatgcagcttattttaaacatacctttatatatatgtattatacccaaaatacccttacataagggagtcccatggcgagtataatgaagtgacaaggataaaattggtaaagtgtttaaaaaaaaaaagtaaaaataatagactttaaaaaagaaagtaaaaataaaaaaaggacaatataaaaagagtatagagtaatttcccctaaaataaattaggagtctgctgggcctaggtggtgcaggtctggtctaacttacaccaggatcgacacaactaatttgttttttttaaaaaaaaccagttgtgcctagcaccttctcgacatgttacgttnnnnttggctagcgatactctttaaaaactattacattaaa

SEQ ID NO: 94688 - DNA, 811 bp, Cannabis sativa
agtatttatatacaatgaaatagagctaaaagaccaatctaccctcctaactaactaacagaattaacggtctaagaactgacgatagttaaattttatagctaagtttctttgttttattgagattttacttattaagtgatacttatatcaattttattttttcggtagtttttgtaagttgtttctctgatcagttgtctaaagggtatttcatattcatattcatattcatattcatatttatcttgatctttcctttttggtaatagatcattgtgttgtaatatgctaaggtgtttggtagaggatccttccatagcaaatttattatctaaacttttagttattcttaatttatcttcgtttatcatgaattctatgatagtaaatatgtattctactcaaattattttcaatgaaacgtgttatatatgtatatttatgagccttttcatgtaagcttgttgcctgatattttaacgatcattaaaatatttagtgctgatttgtaacaaaattttgtggcatttatttcaggtttaatgagaattttgagggtgtcgtgttggcttatgaattcagcatttcaaagaagagcttaaaaacttgaaatgggattctccataaccagatatgcttttacgtttgtttactgaaatctagctcttcaccacttctatttttgtttgagacagaaaatgaaagaaaagttgttgcagcattctccaaaaccagtgataatgtttggtaattttgtcaacttttttggtttatcgtaatctaatcatatatagaatattaaccaatg

SEQ ID NO: 94689 - DNA, 953 bp, Cannabis sativa
tttcagccctgttgatcaataaaataaaacaaattttataatatattataattttatgtattaaaaacatgtaaagggtaagtacaaaaaaaaaaaggaaagtggcaggaaggtattagtaatggcaagggcctattattttgtaggaaaatttacatctaaatactttttattataaataattactaatatattatgcatagtttaatatacccactttttcatattaaataatttaaataaccacatttaaaatttaattactatattattggacacatttatttaggaatatgttatatttacatataaatattgtaaaacaactactttttggtatccaactaaaataaaaataataccatataatttttgtacaaaaaatattaatctatacttaatagtatctaaactaaaataataatttgtttaaaaaaagtaaaacacgcttagctaacctactatttttttaaggaggtaacatactaattggtatctaaatgtatatatattatatgtatattatgctaaaaaatgcatgtaagaaattaaatttaatataaattgtaagtaatgtaataattgaatgaaaaaaaaatgttagatttcaataaaacataataaaaataaaactatgattaataaaaaattattattttctctctttttagttaactattaaagttgttccttttctcaaagaatcaatatgtatcaatgaaatatataaaaggaaaaatttataataaaatcgtataaaaaattttagtttttttaatttatttaaggaaagttgtaatgattgtaataaattttttttaaaaaaaagtttatttttatttacataaactatattagtcatatataattattattgttagattatgagaattttaatattttttatagtaatttaattcagtttttattttttatgaattttaaattcagat

SEQ ID NO: 94690 - DNA, 651 bp, Cannabis sativa
  modified_base (293)..(296): a, c, t, g, unknown or other
tatatatttttaaaaaaatttaaataatttattgtaccgaaaataaagtttaaataattacttaccattcgtataagaaaaattatcgcatgagtaacaaaaaaatataaattttaaaatttacagttaatattaaataactacaatacatgcgataaaataattctttttcttaagtatcgaaataaatagaagaactatattatatgggtgtgtttgtcaacacttttttaatcagttttttgtttttaaaagtagaaaagtgaaaatattttttaaaatcatgttctatnnnnctgtttttacttttcaatttttaaattaagaatctaaattttaaaaacaaaaaaaatcacttttaaaatttttttaaacagtatttttcttaatcaatattttggactccgaccccagcctaaatcttaggacccggactctggcgccggcctcagtcctggactcggactacggccccggccccaaacccgaacctggacctgacttaaataaaatagaaaataaaaataaaattgaaagttatagaacacacttttgtattagtttttaaaattgtaaaacaaaagtagttatagaacacatttttattttttaaaaacaaaattttaaaaacacaaattttacttttgtttt

SEQ ID NO: 94691 - DNA, 1801 bp, Cannabis sativa
caggtttcaaagaggttgttatgaaaattcaccacaagctcctcaagattaggattaaaggtttgaaaaaatgcaagcccaaattaatcaacaagatgaagagatccagaggctgagataacaagttcctcctgatatgcctcctcagcaagtgcctaccgctttggtcccagtggtgcagtaaataagttttttctggtaaccgcatatgtcatgaaagttgagtagtggctcataggaattcagtgagttttgaatttcatgggtgtcgttgagaatgactgagttacttgtgccaccttcaagttttaggaagacgcactagtgtggtgggagatggtgtctctcagccaggacatcactacgatgacttgggaagcatttaaggatttatttaatgctaagtattataatgagttttttgcaacgctaaaagaaaagagttcacttaattggttcaagggaaggcatgttttcaatgtggcatggttaggtatctcaagaaagactgtccttttatgaaataggaagagcagaaataagagggaaaatgcatacatgcttaggtgtttaccattatgcaagcagatgttgcagccagtctttcggtgataacaggtcagattcttgtcaacaactcctactatattgtattgcttgactctagggctacacattcatatgagacattgagggtaattaataatttggatatgccttgtgattttaattagatagggtttcaaaccctactacctagcagagaactggttatctctaaaaggtagattaggtctgtgctagttagaattgagaatagggagttaagtgtcaatctagtggagttggagttaacagagttccatactataatttggatggattttttgtccaagtatttggccaatattgattgtaaacggaaaatggtaacttttcagtcggagggtgaaaatccatttctatatgtcgagtccgttcaaggttctcggatcctggccattttagtttcaaaggctaaagatttattaagcaatgaatgtgtaggatttttagcagttgttttttacttcaatatacccaaaacagttaggctgaggatgtcaaggtagtaagagaatatctcgaggtctttctcgaggagttaccgagattgccgccacaggaagaaatagatttcttaattgacttggcaccaggggcagagcctgtttcaaaggcatcttataggatggctctagcagaactcgaggagctaaaaatacaacttcatgggatgctggatcatgggtttacccgacccagtgtatcgccctggggagctccaattttatttgtgagaaagaaagatgggtctctttgcatgtgtattcattatcggaagttgaataacctgaaaatcaaaaacaagtatccattatctataatcgataacttgtttgatcaacttcagggtaagacggtgttctctaagattgaactgcattcaggttatcatcagttgagaatttgagaagaagacatctcgaagatggcatttcggactagatatggccactatgaatttttggtaatgtcttttgggttgacaaattctctggtggcttttatggatctcatgaatagagtgttcaaggattttctcaataagtgtgttataatgcttatcgatgacatccttatacactctcaaataaaagtggagcacgagcaacatctttggatggttttacaacgacttagagatcataaattgtatgtgtaatgtccccgcttcaagcctccattgggtccttacacc

SEQ ID NO: 94692 - DNA, 592 bp, Cannabis sativa
aaacgttactggtaactttttagtcgcaacaaaagtattttatcacttttattaaaaacataatgtagatataagtttttactaatttaattttagtaagaataattgtatgaaaataataaattttaatttttgtgactaatactcttagttagaattattttttaatgataacataaaattataatttatgtttaattagtcattattttttcacactaaaattatatatattttttttttggtagttttttcagtttaattgggttgtttgccttaatatattcaagtgccctttataattagtactccaaaaaaagaaaaaaaaatattttaatcaaattgaactttttatacatttatgtcaatgcatgcatgtacgtacgtgtgtatatgcagaaaggcatgtgatatagattaatactactagctagctaggaacacctttttttttagaaaaaagaataggtgtatagctagctaggtacatttaagaatcgcactcttaaatgttaatcacttatatattttttaaatatttaaatattattaattaaatatcgggtcctacataataaattgcagttactgg

SEQ ID NO: 94693 - DNA, 648 bp, Cannabis sativa
cctgaacctacacctagactcaaaagcagactaggacctagacctagacccaaacaaagacccgaacctataccccgtgacttgaaagtggaatcggaaccagaaacggacagggacgcaggaacaagactgggactaggatgtggacaaaagccaaaaatgtaactcaagaaggacccaaactcagacataaccccagacccggactcgaaacaaaacccagagtgggactcgggacccgaacccaaacctaaactcaaacccaaacatggaattggacttgagacctagaactggaccatagcttgtcaaccagacctagacccaaacttggaacccaaactgcgaccccgggacctgaatcgaaaccagaccaagacttgtgatgagatccagatcttaactcaagatatgggaaccagggtttgacaagacccatagtcggtgtttggatcttggattcggactaggacctgaactaggaccaggacccgaacccagaaccgaacctaacacccaaaactggaacctaaacaagaactacactaggaccgtgacaaggaccggcacccgaacccagaactagacatggaccctgccccgaatccaaacaaagatcaaaaaccgagctcgggcccggacccagtc

SEQ ID NO: 94694 - DNA, 519 bp, Cannabis sativa
  modified_base (478)..(478): a, c, t, g, unknown or other
ctaactattgcttgttacttatgagtagtgtttcttcaaatgtttaaatttaagagattttttaaatattttggggatgtttttgccaaaataagaattttctcaaaattttagaacaatatggattttatgaatcaaagttttaaaatctaaatttttatagtcccaagccattcccttagccgagtagagccaccatataagagttggtccgatagaaacgatgcggtgaaagagtttgtagagtggcttgggcccatgaccttttttagatgaggagcttttatacaagatactaaatttaaaaataattacataagccaccattttttgtaaaatatttaatttattactttgtaagaatgtttttttatatttatacgatttttcaaaaaataacacgaaaacaatataaaatcaacaagaaaactacatcaaattaatatgaaaaaaaatatcaaaataacaacaaaaaatnacatacatataacaaaaaatcaacaacaaattaacaagatt

SEQ ID NO: 94695 - DNA, 1235 bp, Cannabis sativa
tcataaccctacttgacagagactctaaagtaaagcacaagaataccaaagaaaatctctagggcaaacaataagagagtagtttaaactttaaagaataaactaataaaagagtttaatcaaagccggccataaaagaacattttgtttttgttaatgaaacaccttaattatgctccaaaacttaggttatctaatcatttaataaaagcataaacaatgcataagataactatagccacaagtgtatattgactgaatattataatgagcttcaagaattattaactacacttcatttttttgtgtactaaatctcactttccgaaacccaactcataaaagaaagccaagaaataaattacaaacataaaattgagagtattacaaaaagaaaggagcaactaaaaactcagtagtcaaaatattacaagagaaaagtgaattgaaaaagggttttttctgtgaaattaattagccattaaaagactcatcaatttcaatcttgattttctcatcattatcaaacttatctggctttggtggagcttgaggaaccggtgccctcggtggtcctctgcctttgttcttgttccgaggcctcgcctatatattttttttttaaaaaaaaaattaataagtgaatgaaactgaaactcataatttggagaattaagaagaaagaagaacactcacattgccaaaagagtgattgaaacgctttcctctttcagttttcttatctcctctgccacaatacactgaaggagaagagtaaaattagggcagaacaaaagaaagttgaagaagtagaattagttaagcgattttcatgtacctgttgggactggtggaggagtagtggtaatggcggagagtgaaatcggagctttggaagaaggaaacgaggtggctagggattctgattgagagaatgaaatccgagagttgatgagggggagtgattgagaggggattggaagagctcccagtaagagcgacgccatggctggagctctgagctgtagagtggataagatattggggggaagattttgccaacgtttttggtttactgcttatatttttcctttggtttcattttcactatttgaagtatttgggcctccttaccttttaggcccaatacgtctagcccaccactatgaatccactacgaggcgtgttagctaccagcattgggcttttcttatatattaagcttattggacctg

SEQ ID NO: 94696 - DNA, 755 bp, Cannabis sativa
  modified_base (716)..(717): a, c, t, g, unknown or other
ctatttgcccactatgtggactattcagatattttatggtattgatggatgcatctactagatggtcacatgtttgcttactatctactcgtaatgtaggattttcaagattgcttgatcaaataattcaattacgagcacaattcctagactatgcaatcaagacaatccgtcttgataatgcttgtgagtttacatcacaggctttcaatgattattgtatgtcaataggaataaatgtagaacatcctctttctcatgtacatacacaaaaaggtctagtagaatcattcattaaatgtctccagttaatagcaagatcattatttatgagaacaaaactcccaatttcagcttgtggacatgctattttacatgttgcagcacttgtacacattaggccaacatcatatcactagttctccccattataattggcttttggttaggagccaaatatttcccatctaagaatctttggttgtaaagtatatgttccgattgctccaccacaacaaacaaagatacatccttaaaggaggctgaaaatatatgttgggtatgaatctctgtctataattaaatctcaaactcacaactggagatatatttacaacacgttttgttgattgtcattttgatgagacaaattttacaactttagggggaggggaaaagaaccagctggaaaaagaaattatatggaatgcacaatnnttatctcaatttgatcctcgtacaaatcaatgtgaact

SEQ ID NO: 94697 - DNA, 509 bp, Cannabis sativa
caacattgaaagatagagctcttttgtaattgaatatgctgactttagcatcacagataataaatctgaaggctgagactaactaatataaataaatacacacacacacacatatatatataaacatgttttaaatctgaataagtacactaaaagctaccttaaggatagagttagttcacaagaaaagacaacagaatctcaaaatgtattcttcctctaattatttcgaataaaaagcaacacaattgaatagaaactcagcatgagaatttattaaattaaattccttattgaatttaaaagtaattaagaaaattcaaaagaaaaagtttgtcttttcatgaaaagtatggtaccaatggaaagttgagcacatttcgggtgccaaaacattagatcgatcataccatcaattcaacaaaaattgaaaacaaaacacagcaccatgaatcattaggttttaaaaacgcaccaaataaaacaaattggcgagattcccagagcca

SEQ ID NO: 94698 - DNA, 771 bp, Cannabis sativa
  modified_base (739)..(746): a, c, t, g, unknown or other
ttatagggatttctttgataacttacgatgtaaaagctaaattcgctaagtgttggtcgctctgtgcgggttgctgatcgctttgcttcaggcatgcgtatgaggcatcatgtgatgccacgtaaaagtacaaaaattgggataacaattttatataatagtaaatacataatacaaaaaaaagttaaagtgacatttataatttttttataaaattagtaatcgattctattaactaatcacataataccaaaattattaatagaatcgatcataaaacttaaattacatgtatatcttaaactaaatataaactaattacatatgcaaaagttaacaacaatcataaaacttgttactcatgtattataatcaaagtagtaacctcgtacttattctataatcaaaggcttcacaaattcggtccactcatcacgtacggcattgatctcctcgttacaataggtaatgtctgacttaaactgtaaaacaaaagataacaaatattaatcattacattaaaagtataattaaaataaaaactaaataaagaagagttattcatgtttacatgattttaaaaaaaaaaaaacttgtaggattaacaactgtcatgaaactctagataatcttcataacataataaccacattgtattccattcggctgttgtcgacacgtgtactggttgatttttattggacccttatttcgtgtactgttggattttatgccctannnnnnnntccatttcaatgtaatccattttat

SEQ ID NO: 94699 - DNA, 833 bp, Cannabis sativa
agactgattctttggtcgttgttcaggaaatccgagactcggttatcattccttctccttttggtcaacatgtggatgcttgtcgtactttgttggcctccttacctttagtcatgattaattttgttaaacattttgtaaacaaagttgcacattctcttgctcgtagctcttttttgtattcagatcgtattttaagcgagagtactgctcctgctaatcttctttctattgtaatagttgaaagttgatcttaaataaagtttaccatttctcttcaaaaaaatgaagaaacgattattttaaagaagattagtattattttcaaccactgatggaagaaggcaaagatggcctatagaatcatagattagcaaataagtaatcaaaaaacaataaatatattttcttattaagtaaaagatcactcttcgagatatcctttgtcttcagtgagcatgctcttcttcgaaatctcttcaagtgtaatcatgagtcttttagcccctttttgtttttccttgcaatttctacactattcttcgtgttgtggtggctcagtatttatggtcgttgacattcaactgcctctacttagggagtcgaggcttagatcgatattcatttccagagaaacttgaggcatgcgtggagcgacatttatgagatcctcacaagtttgattttatatcaaaaaaaatctaatcatgagccagttggattatattttaccaggacgcagatttagtaacaagtatgtttttaacatcctaaatatgaatttctaaaatgatgaaaattaaaaacatataatgtatgagaaaccttacatt

SEQ ID NO: 94700 - DNA, 972 bp, Cannabis sativa
gaggtatatttcaattaaatataaaattaaaggtaaatttaattaattgattagtaaaagtggtatttttcaacttacccctaacaacttatccttgaaaaaagtgggccgtgggttgcaattggtggagtccggcccaattaagtgctttaaaccctacacattcaaagagaagaacgtagtcaggactcaggagggttttgcccagaacctccttcaacagcccgcgcgtaactctttcctttcctgttcggagccgacaatggcgctctcagattcaacgaatcagtcgaacaaacccgaagatttggaccttctcaagtctgatatagcttctttcgcttcctcgctcggtctctcgtcctcagttccttcttcccagtcgggcttcaacgatgccgattttcgcaaaactggtcgtctccagactaataagcctcataagaaggagaaacaagctcctaatgctgcgaaatcgacgaacacccagaagccaccgcaccagaatttaaaacctaatgaaatccccaagcctaaaccccctgttctctcacttgaggacagcaatgtcaagcctttgggatttgagagattcaagaacatgcctaagctgccattgatgaaagctagtgggcttggagtatggtatatggatgcggaggaattggaatcgaaagtgatcgggaagggggcgaaagtggaagtgaggaacgtggaggactggaagaaagtagttgagaaaaagagagagcttgcagagagattgatggcccaatacgttaaagattacgagtcttcaagagggcagagtggggatattaagatgctaattgccacgcagaggtcagggactgccactgataaggtttccgcattctcagttctggttggggacaaccccatggcgaatttgaggtccattgatgctcttctgggtaatttttctcacttgcgtttatccaaatattgctt

SEQ ID NO: 94701 - DNA, 600 bp, Cannabis sativa
aggtttataattatgaaattgaagaaaaatataataaaattatagactgtatgatctaatctactgacaatttatataattacatatttaaatatatataatcaaaatctcaattagattatattatcaagctagctagacagatagaattaactgccttttctatttttttttaaaaaaaattaaagggagtatttctagcttaggcttgtaatagtaatgtaaactactaagccaatttgtattataataattatattacaaatatattgagtaattttaaagatatatatatatatatcttatatcattaatttggagaggaatataatccatttttttcttcacaaataatttaatttaattgaggtatatactatatataaataaaaagacaatataattagtagagagaattagaaaaataaacacattaattagggaatctgataattaactaaaagggacctctacctaatattatatagtgaagctagaataatgtaacgtatacaatcattactcaaatactttatgatatgatatgattattacaaaataatctttactataaatctatattttatttatattcctaaa

SEQ ID NO: 94702 - DNA, 501 bp, Cannabis sativa
tgtgaggttccataagattcaagctggtattaaaagagataatgcaaacgaaagataaaataaaggctaacttctctcagactgagttttagtaatttaatttttccatttttgcttagtgtaagaagtggcagtagctgatcaaggggaaatggaggtatcatttgatttgggacagattcattttgtgactgaccttgcttggaagacttctaacaagagacaggctgctccgttttggtagaatacaggattgttgtctgttgtgtaatacggctgttgaaaattattagagttagtctctcatttgctaatgtgtggaaataaattgtcatatataaatgaatgggctactcttcccattgccaattggttttaagatggaaccgcattcatcttatcctaaattccatcatggttttagagccgtttatgatccgttgtgagccgtaccgttggtccaaaaagaagagccacaaaaagaaccgtttgtgatccgtt

SEQ ID NO: 94703 - DNA, 922 bp, Cannabis sativa
tagtcacaaaaaaattatattgtaactaaaaaattgtcaataaaagtagcaattttttgtagtggctatttgaggacgttatagttttattgtctaaattttcgggagtagttttatctcttgtagtttccttacttctgtagctcatgatttgacaaagcaaattcttcggctactcaacgagctattccgattcaatgatgaatgtcaatatcttaaatttctttagtggttttaatcactatgtcaagaaaagaaaaagatgtatacattctatcgcagcttcttcggcttaataggaatcgcaaagaccaccaaagaataagttggagcttatacatataatttttaagatggttgtcatgtcaattgatgcccttctacgtaggacttacccaatagggcttacacaaattaagacctgttagttgttactcatttttaaggcctataggataaataatgttaccacataaggactcaaacttcaaaagacaaccaaaccaaaaactttatgcaaaacatcccaaccattataaccatatatatagtttttttttcatgatataaccatgttatagttaataaatggttaataattagaggctcttcttggccaattgtgtataatctatgagtctctctctatatatatgtatatatgagctcgtgaaaggcttgggtagagctcttttatatatatatatatatataatctgatcttatatgtactgatcggtaatgaattaaaatactaattaactgagaaaattgttacctattatattaagactcaacttattgtactgtaacttcttaatttgtatccttattcatgtgttaatcatttattattagtcaattttacatttatattaatgccatttttaacgttcgttcgtaatagatgaaattacactaa

SEQ ID NO: 94704 - DNA, 1235 bp, Cannabis sativa
tgaagacattaaaagttaaatatgcttagaaaaaaaaaattattgataacttctgtactaagattgccatcaatcaagtatggacatgaagcttcactctttttcccttgtttttatgctaaagcatcattcataacaagagattacggaaccataattatgaaatgccctatttatcacttatcggtaactaaattaggtgatcttcattggtgcccagatatcaacattgagcttcaattgagttcaaatattaatccaagttgcatttcagttttcaggttcaaatttaaatcctttgaatggtttcgagattggtaggccgttgaatccacactccacaacactaatctcataaacttccattttgtttcaattaatccaaaacagagtatggtgttttaatggtgtaatactaatgatctaacctttaaggatcagcaggagcgtcatggtactcttgatcttcctcctccggcaccggatgcagatcaacctgctgtaccgccgccttcgccacaggcccactgcccacaaaaacgttgccaacgctgtcatcagacccatccttgtcgtccgggtaccgtaccaccacaacaggacaaatgcaatggtgaacgcagtaatcgctaacgctaccgagccttcctttggctgtgcgcttagaggcgccgaaccctcggctccccatgattacggcgctgagccctagcctctcgacctccaagcagagccgctctttcaagtcgtggtccttcacaatgtggattttaaagggaatttctccttccaccaatggctgggccaagtcctgggctttcgtggtagtgaaaatgtcaaaatcgtcctcgagcttcctctgagactcttccgttgtggttgaggaagacgaagacgaaacgacttcgttttggttgttgctgttcggattaaggtcaatggagccccaatcagcaccgtagaggacgctcgtggggcgaacgtggaggaggatcaccgtgtctccgggccggaggtagttctggacggcccatcgaacggcgtaggcgctctcgtcgcttaaatcgactgcgattgcgatcttccgctgggagccagagattggggtcgagctcagaagaaggcgccgtggcgaggaagttgaggtcgggaccggacggtctggttcgggctggggtgtattcattgtggaaaattacgaaagtgagctttggggttggactggttttttgcaa

SEQ ID NO: 94705 - DNA, 676 bp, Cannabis sativa
gttcaggtagtttagccgccgaaatttgagttttggtggttaactgtcacaaacccaaaagtttggggggtttagccgccaatatccctaaatattatcttttgttacatcctacttgcttctatgtgtccgcccttgtttggttcattaaattatcagacaattttcacatgagaaatgctaaagggcatcggtggtgcttgataccctcttatgtgtcaatatcactatttatccatataatttaatataatagcctttaaggagtatcgctagccaatcgcaacgcgacatgtcgagaaggtgctaggcaccactgatcccttatagcaatgttctttttacaattgcctctaattgtgattcgtgaagtgagcaatggattttctgtcgagtatatattgtatattattggaattaagtattcttttttctaaaaaatgagggaaagaaaaagtagcagaaaggaatataaatatatttacattggaaagaagcgcctgtagaattaatatcaatcaataaataaaataactaatttcgtgtgtggtgtaagaagcaagagcatattgatgaatgttatggttagaaaaccttctagccattgcagagaacacaaagaagatgaaagaataaaagaacagaaagattggaaagacagagagaaagaacagag

SEQ ID NO: 94706 - DNA, 538 bp, Cannabis sativa
aactaaaaatgatattgaataaactattataaactaaagacataaatagaaatgtacaaataatatcattgtgagctgaagagattcacttagaaaaaaaaaaattagaaaaaaaagaagtaaaagtaaaagtaatgatgaaagtaaaaaatttaatataatttccaacaatataaaaaaaatctttgacaaataaaatgctaaattttattatttttactaataaaaaattatttatgtttggagaatttttttctttctttatttttactattttttatataaatttcctataacagatgtgtcaaaaatattatttttgaggtgatgtagaattttttttatttgtttttttaaattatttattggttgtttttaatttcaatcttatatttggagcactatttaatgtcggattaatttttatattaaactagagttgtaattaatttttttatttgttgttattgttcaactaagagaaaaataagtatatattttgttttcaagcgtacatatacttttgaattagtgagca

SEQ ID NO: 94707 - DNA, 658 bp, Cannabis sativa
ggttgccatggttgggcgagcatctgcgtgcattagggatcaatacgtgccaatcttagacctgactgagatttcttggtcttgtccgagtaatcccgcatgcatgcctcgcttatccacacgatccttgtccgagcaaggaccttacacgcagtcccatccgtgcccaccctgccaacagcctcctctgcccgcaaatctcaaaatttgcagccttccaagtgcgcgcctgcatgatccgtgcatgaaaattgcatggttatgattttcatcgaaattttgctaaaaacttacttttttaattatttcaaatgccaaattcccagaaattagcataaaatattgtatttttaatatttgaacctaaatattaatttaaaattaataatatttaattttgaatgatttgtaattttttcccctgaaattttaacaatacttattctgcctcctaaaatatatgacttgttaaaaattttccctaaactttaatatttataaaaatttagtccttctgtaaggtatcgtccaatgctgacgtgtctttataaaaaaactttgcgccctaaactttgaaaactatcaaatcgtgttccctaaaaataaaaatgagaaagattcaacatttttttaataaatcttaagaaattaatttaga

SEQ ID NO: 94708 - DNA, 680 bp, Cannabis sativa
atttgctggtgttgggaacctgccacctctgttgacagtagagacaccacgaccattagtaaaagtaggcaatccataattgttacctgtgaaagctccacgatttgagtatccacggcctccaccacgagatgtggatagaggagaaggagcacgattatagtttgagagtctggtgcttcgatttggatagttctggtaagcaacattgacctcagaagactgatcaagatcaaccgttgcaagattagcacttagatcaaaatcttgatcaagatctgtcttctctatccgagactcagaggcaagcaaatagggcttcgatttctgcaacagagtattcttcaattctagtgttagaagagatgatgaaagtgtcatactcactaggtaatcctttgaaaattgcagcaatatgattcctaggacttagaatttctccaacagacgcaagaagatcaacatgctgcttaactttcagaagatagtcattgagatacattgatcctttttgaagcttctgcaacttggttcgaaattccaagatcttggaagaaacttgcaatgtaaagtgcttttcaagtgcattccagatttgtcgttcgtgcagtctggcatcccaccatgcgtgtaaggaggctttcggtcattgatgatagcaaccaactcactagaagttg

SEQ ID NO: 94709 - DNA, 1242 bp, Cannabis sativa
tagtgtatatatttgtttattccgcatgttatatatacatatttatttcagtttatacatataaatgtctaacggttggtatcagagcggattatatatctctcccttaattttttttagtttcatatatatatatatatacatttacggagttctttatttttaatataaattatatatatttttttatatatacttttatattatataatcccgattatatatatatattcatattcaatttattttttatatatacatatatatattcatcttcatatttacgttcatatatacattatatacattcatttataccgtataatatatatatttttagatatacactttcatattatattcattcattcattgatttctttccatataatcaattatcatattgtattatatatttttatgatattttatatggtttaatgtgtatatgcaagtatatatgtatacatatacgtatacagtatcggtttttgttgttatatatattttatatatatacattttcttttcatttacatatatatatatattcatatttatatatatacacacttttatattcatatttcataatctatatgtttatatatatacacattcatatttatatttatatactgtgtatatacatataatttcatgtatatatgtttatatataatactcaatgctttcatatttttattgcataaaattgtatgtaatactctcttccatacataggtgatgattttatgcagtatatacattgtatacgagtatatatatacatgaaagttttattttttggtatgtaatttttttttcgttttcattttcggtatttatttcgaatcctctatttattactatattcatataatattttagatcgattttatgaatgaaaagcatttaaaaacatctgaaaactgaaaaaattctcttaagaacacagtcggacccgaaagaatttttatgaaattaaagtctacattttacgtgtttttgatgcttgaaatcaatatggatctcttaatttatccatttagatcattttggaattggtttcatgaattttggtcgtcagtgtcgtttttcagggcagttttaaaggaaaattaagaaaaatttaagaaaattccgaaattttattattttgatttatttttggaattttattttatttccttatttttgttgatttagtcaattaaattacatttatttaaactttccatt

SEQ ID NO: 94710 - DNA, 672 bp, Cannabis sativa
  modified_base (217)..(227): a, c, t, g, unknown or other
gctctgcacacctccgtccaaaaattaccgttaagtgccacggtagactgtccacgtgtacacacttgtacacgtggcaaatttttagtggcccacctaatttttagtggtacgcactttgagacacactttgagacacactcttctcttctacctttcaaacacaaagctagagagttctaagatttgataattcctagaagtattttcacaaagnnnnnnnnnnntcatagagggggaaataatcttctggaacaaaggtgtagaaactttgttcaagcttttggtgatccccatctccacttcgggtgtttattcttcttttcttgttttgttctattctctagttttatattgttctcttgttctcctctaaacactcttatatatatatattagcatatatatttatatcttgactatatagtatactatacattatatatacatactatatacattctctatatacactctttgtatctctactatatatcatttattttatatatacattttatatcatatatatacacactattatatatatgcttttatatcgtttacatttagttgtatctttgagttttgagttgtaactcttttcttttatttgtattttgtgctttgggattgtaactctttatttaatatattgtccttgtaatattt

SEQ ID NO: 94711 - DNA, 664 bp, Cannabis sativa
gacgaaaaatccttgagagaaaagaaccctagttctatatcagaaaaatctgaataagattgactcgtggactatgcagaattaactgcaaaactatgtaaaaaaacttggtgtgatttttactttattattctttcttaaatttttgataatttttgtgctcacgaaaatagatttattatcgttaacgaaaatttgtgttaacataaatcatgtataatttttttctaataaatttaacacaaatttttattttattttttgccataatatttaaaatataatttatttttatttgataagtatattttttaagaatatgaaaagaaaaaaaatatattttatataaaataaaaataatctttataaatttttaaattgcaaaaaaaacttgtcttttcaaatttttgctataatataaatctatggtttattagaatgaagaatttagttgtactcattaatcaatcaatccatatatatagggaaaatataaagcagtaacatgacattctaaaatctctccaaatagctttatcccttttatccttaattctctcattttttttttaattttttattagctttataagatataaatgaattaattaattgaaaaaatatctatttaatttaaattttctcatttttatataatttatat

SEQ ID NO: 94712 - DNA, 1800 bp, Cannabis sativa
tccatgggagtagaagccggtttgacacctatatatcccgtgtccttgagtaattggatggtaaatggtcgttgagagaccgagatgccattttttgttcttccaacttcaagatcaaggaagaatcgaatggtgccaaggtctttaagtttgaacttgtcatgaagatatgttttaaaaaaggagatggcattgtcattgttgctagcaacaatgatgtcatccacatatatcaagatggcaagaaaaaaggtgttggttcgttttgtgaataaagagttatctgaaagggattgggaaaaaccatcagaaatgagggtttggctcaatttgctaaaccattgcctagaggcttgttttaggccgtagatgcttttattcaatttgcataccgtgttgggaggagccttgtaacctgggggaattttcatgtaaacttcctcatgaagatccccatggagaaaggcattgttgatgtccaattggtgaacgttccaattgttcatcgctgcaagggctaaaaaaattttgagagtgttgaatttagccacgggagcataagtttgagagtaatcaatgccatgtctttgagtaaagcccttggcaactaggcgagctttgaacctttcaacagccccactttcattatatttgactttgtacacccacttgcatccaatggctttatggccagggggtagtttagtgacaacccaagtatggtttttttcaagggcatcagtttctttgtccattgctaatagccaatgtttaaattgagatgcctcagcataagattgaggttcaatttgggaataggctgcaaggacagctgctcgaaaagtgggatgtaatttaatgtaggataggtattgctcaataggatgagcggttgaagaggcatggcagacatagtcttgcaagtgttttggcttgtttaatgctctgccagtccttgtggtatttatgggagatggtttaggaggtattgaaccatctgttgtgggatgtggggaagtaggtgctggtgtgagtccagcaggtggtggaacgtgtgtgatctgtgctgatgcatcaggtggtagtgcagcaggttgtggtgtgcaaccatctgctggggttgatgttgcatctgaatttgatgtgcaaccatcggctgggtgttgttttggaaccagggctggtgataaaacagctgctggaacatgtgttgttggtaaatctggtgttaaaaaaccagtgggagtgacacggggaagtgtaggtgacatgccaacagtgtggtgttgttgtgaaatggaatttttagtagaaaagggtaacaccacatcataggagcatgaatgtgttgagtgattggtttcatggtgggaaggacattatcagaaaggattttgttaacttcagatggggatgtgagtgaaaacaatggaaatattgtttcataaaaaatcacatctcgtgaagtgtagatttgtttactttcaatgtcaagaagggtataggctttcatgccttgagggtagccaatgaaaacggaggctcgacttcttggtgtgaatttatgccttttagagggaagggtagaaccataggctaaacacccaaaacttctaagatggtcatatttgggggttgtaccatgtaagagttgatatgaagtcaatcctttaagcatttttgagggagttctattcatgagataagtggcggtttgaactaggtatggccaatagaccagaggtagattggattggaatcctagtgcccgtgctatgtttaatatgtgttgatgtttcc

SEQ ID NO: 94713 - DNA, 626 bp, Cannabis sativa
tgttttccttttatttttttaaatatatatttttgggaaaagagtgcggcagttttcttcggtgttcgtgggctggtggttattcaaaatttgaaattgatttccttttttgctccactctcccatgtttatttaaaccatttttcttttgtcatttattctcaccacctacctgattcctatttctttgtttttctgcttctttgttcttctttctatctttcatattcaaatggccaagacaaagaacctagggcaatgaaaaaggatggagaatccgatcctgctccctcgaatgctcctcatgctggtgcaactgcatcaaacccaagagatttattacttcctcagcgtgaatctcagcctgtgaagcccaaaccgaaacgaatccccaaacaagttgcttgaaaatctgggcgaccccacagaccgtgcacttcatcgtcttcatcatcgaaggggtctcctcctagtgcaactacattgcctcctgctgcatcagtgaagggtgttgctgcatcaacaccaacaggtccctcctctcgtacccgtgcctagcaagcgtctctcgagaaggaacttcgcactaaatgaagccaacagaccagcttctcctgccaagaagc

SEQ ID NO: 94714 - DNA, 1235 bp, Cannabis sativa
atacatttccattttggcaaaaagccttttttttcttcattttttttggctgatttttatttttcaaattgatagctttctttcttcttttttctccccttttttgtataaatataaaaaaaaacaatgagaatcagaatcagaatctttcctttgcctttaaaaagtaaaattaatgctactatggtcaagtcattcttgattcacctctgcgagaggacaaaggtttttcatttcatataagcaatttctaataattatacataagtgattttgaagtttgattaaaaggatagaaaaataaaataagctgatagaatagaatctaaaattaattaaagaataatagaacatgtgaaaatattgtattgttcctcctggtaacagttagaaacttgtgtaggtttatttaatttatttttggaattaccaaaacaggaaaaaggaagagagttgctgactttgcttaaattgagtatatgacttttctagaatggatcatcacaattcacaaccatgccaaatgccagtttctatatataccaacaaaattataccaaaattagattgccacaaccttacgatgtgacacctcctcctttaaaatattcatctacaactttaccatatgaggccatagcctcagcatcactttaatcccttttttaattggttttttcaattatattaatatccccactatacttttttttttcttatttgcctttctaaatttatattttttctctacaaatattaccctattcagaaaaatctggttgagcatgtggaatatatacgattattattgttattattattattttattttttaaaaaaaagataaacttcatcaagaaaatttgttattacagaagaattcaaaaattgtgaacataaactagtaacataggtttctagtgtgtgggcaaacagtattcgctcatcgcagaatgatgttgtaagaaccaccaccaatagcagctaataaataatagatttctaataaaataaactgaaaactaaaattaatgtggagcttattaatccaactaattgtcacagtagaatcactattaataatgaagatactgaacccacattgatgcgcaagagtcaaacccaaacgaatggcaagtagctccaccacattagcagagaaatcacctaacacacatgatgaccatgccaatcaaaccataccctttgcatcccaatccgacaaagcccctcct

SEQ ID NO: 94715 - DNA, 625 bp, Cannabis sativa
  modified_base (588)..(593): a, c, t, g, unknown or other
atagtcattccaccaaaatagtggaaagatcattccattagaatgacattccattagaatgacattccaacattttaatatgtaaccaaataaaggaacggaataaaaattgtttcatttcctttccattccatttcattacctcaaccaaacgccaccttatagtaaactctctaattagattttttttttggtacacctcctctttgaaaattaagaaaagttttccaatttctttttcttcataactatggaggctgtagttatttacaaaattatttttaaaaatttgagtactttataatactaacagtaagatttaaatactttactacacatttaattattttttatacataaataattatttaaaccttatttcaatagtacatataaactttttgaaatttcttaaaaaattacaaatatacctcatataactataatatacatagttataataaaataaaattaaataacttatttaaatattaaaaagaaagaatgaaatataagcacatttttacggaatgtactataaatttattataggctaattagtaatttttttccctaaactttgacatnnnnnnaatcgtgccccctgaacttttttagctgttaa

SEQ ID NO: 94716 - DNA, 671 bp, Cannabis sativa
tttggctttggttttgttcaaagcagaacgacaaatcgttttggttaaacgatttgtcgtgtgggaagaaacgaccaattttctttgtcgtttggatcatttctcaaagtgaattttctgggacaattttgtccctgtcgttttgattaaatacttgagttggtgtagggcattcttggaatttcaacaagaaatcctacagattgttaggaatttggctttttggaagagcaaaatttggcttattgctcttgtgtgatgtttatatctcagctttgtatttttgattgagcaatatttacactagttagtagttaccctaattaacttgttatccttacctattttttccatacttttaattttgtttttgactttttctcataatatttattatatattttgaaaaatctatatttttgcacaaaagcatatataaacctataaaatttgttattttcttgctaattaatttccactaatccatctttttattttgatagcataaattaaagctcttttttttttattcacaacatcaacaagtggcaatagtactactactaataataataataaaaaagaaaatatcttattattgttgcatttatttttgtttatttattttaaagcaataaatatatatgtatataaaagatgaatattattat

SEQ ID NO: 94717 - DNA, 634 bp, Cannabis sativa
ctgtttgaacattgttttctatatggtaaattattctgaatttctcaaaattttgtaagatatcttaaatagttgtaatatacataaatataaagaaaaaaaattaaactgaaatattttctggatttcgaaactagtaaagagtgtatcaatacatcttttttaaggggtacattataaaattaccctattatatttggataatcaataaaaaaaaaaaaaactaattagaaattatgaatatttttttattattttcaaaaaaatagattaattataaataattttctaattctaaaagttaaaaatagcttataaaatgtatcctctaaaaaattcatgggacgagctcatgcataaattattaagattcggatgtggtttaatagatattcaaaaattatatgtttttatcgtcatcaaaatttaaaccttacttatgctatttcagtaaaaaaaaaaatgtagaaaaaaatattcatattaatacatttatagtatttaagtatgtaaattattgaaattttttttaagaaaatgaaattatttttttagtaataaaagtacctttcacttatatattgttcacctatgttttgttgcaaacttgcaatttagtacaaaaagtactttg

SEQ ID NO: 94718 - DNA, 710 bp, Cannabis sativa
ttctccgactccggcgacgacttccgtggtggattcggctccgtcactgcccacaacgtgatcggctttgggatcggcaatgaaatccatcccaacaccaccacccgtagatcgaccctcttctccgtctccggcaacgacgtccactgttggttcttctccggctccgtcttcatcggcgttcccctttttgtccatttgttttcttctccaccaacattccgattcattcgttgctgatgtgcgagcgaaccacatggaacaacttccatatccggcaccgtcttcaacacagccttcctctcaggcgatgtcctcagctgctgttttttctccgtctcttcatgaaatggtggtgcagcagcgatagtttccctgaagctatcgagtctagcaaacgctcgttggtgttctcttattgccctgtccatttcttcagccttgaaccttcgatggtacactgaaccttcgcacgtgaattgggaacggaatctgcgaagcagtaggcatttcagttcattccacgtttgaaaaggatgtctacgatcttcccagcagaaccaactcagagcttctcctccgagactatgaattgcagcgtctaatttttcagccggtgtcaactgctgcaaactgaagtgccattcaactgtgtacgcccattcatcggggtcatctccgatgtcgaacagcggcaattcaattttcga

SEQ ID NO: 94719 - DNA, 982 bp, Cannabis sativa
atatgaaatctaattagtttctacataaacttaaaaggtaattaaaaatgtaatttcaaacgatttagcaatttaaatatttaaatattttactagtatattatgtgagttttttttttcaactttattgtaacttattagtttattaaatagacttgaaggtaacataaatactgttataaaagaaaaataaaaaaagtaatataaaagtatttaaataacaaaacaatgtaatatatctaaaaattaacatagatttcaaagtaacaaaaatgtatataaagtaaatggtatataaaaatagtagcttattatattacatgataactcattagtttcaaaaataaactttaaggttacccaaatgtattttacatattaagataccaagatgtttacaaataagttttagaggtaactaaattgtatctcaaactatatgatatacaaataaagttttttttttaaaatgtaaaaggaactaattagtttcttatcagcattataagtaaccaaaaagttacttttgaaaacacaggaaatttttttttaaaaaaaaaaaacggaatttggaattatttttgtttcttttttgatgatgtgtcaaggtattattgtaattgagatttattaagggatttttgtaattagtttgtattttaagtatattattgaaaaaatccctaaaaataaagcaaataagcctcaccacatatgcagattttttctaaaagttaaaagatagtagtatttaatactaattagaagtaaccgtattacaataatataatgaagtattaaatcaacataattaaaattaataattattattactaactatttacaagacatcacatctatgcagtgcgagtacataacaaataaaatttgagcatcttacatttttattaatgatatattttttggtgtatttattatgatttctttgggtgaaattgaaagggtatggttgtactcagtc

SEQ ID NO: 94720 - DNA, 2185 bp, Cannabis sativa
cttgtctaccaccacgaaattgttctccagatcaatggccatgtctatcaaatcggcattccacatatttctgtattggcccgagttctttagtccctttcctttcttcttgaaacatcttgggctgactcccatggaagttggagaatttgcaggtcttcccctcttccttttttctgttgaagagatcacagtaatcgatgcctctttccttggccttccccgttttcttttctctttgcttccttcctccaagccaggagagaaactgctcttgcttgtgcttccaataggttcgccatcaatagtcaaattagggacagttagctcacagccagtagtcaataatggagttaagtctcccttaggaagcatgaagaagccatccgttgacttacgttttctgggccctgactcagcttcatagcatttaaaatcatcaatgtttagtattgggttaaatagagtgggctctctatggtatttatcaatagtgttgcttcctgttaataagttgaaggcccgattccagcattcattggaaggccaaagcagtggttgggcctgtgagcccataagagtgttggtttgttgatccatttccaatatgggctttttggaattggttgtctttaaatgagccttgctggagccccccttactctctctgggtgtgtttgaattttgtccttcttgcccttcagcgtgtggacttgtcatggccacctttggtatgggttcagtagtggtattcacgttaagaccgtttgtagccacttcgggtaaagatgcagggatataggtacccttgtgtgattcaggcctgcctccgttgttgttttccacctccactgcgttgctactctcctttttgtctgtctctgcttggctagacggttgtgtcactgtcgccaaaggaggggggtcaggaagaaccttttcgacaaccccagtggcagtattttcaaatggggtaacttctccaatccccggtagtaggaccgccgggtatcggttaataaccatttctttagtctccggtcggagctcaactacctcctccaccagtctccgcttacctgggtattgaatcctcaattctcgacattccgacgactcagctcgttggatgattctttgatttaaaagttggtttcttaccttcgggtctttcaatgcttgttgattcagaatccaatcattaaaccatttgggaagtggtgattggaatggagaactttccctcgactcttcatccatccatgtcccgaacataggaaaaaacgctccctcttcattcttgatgaccgttgggttcttgaaacagagcttgtgctcatgggtgagtaggccgcatttgaagcatatctttgggaggcgctcgtattggtattgtatccataggtccttaaggccagttcttcggaggtaaaatccagaaaatagcggtttcgtgagatccacagtagccctgaaacgcatcgtacccatgccaaaagaacctctcgcaaagttcttctcaatatgtttcggcagctcatatacattggagactttagcagcgagctcttgtagattggttttgttccaatagaacggtgggatactctttagtctgacccagatgggagtatgatcaaagttgacttccgagggtgttagccaagacggccaaggcatcagaactaacaggtatccacacaccagccacggccgtcttaacaaaacattgtctgcatcagtacttgactggaaagagaattgaagaatcccttctccacgatcttcccagctccattttttgacactactccaggcattctttaaagatccttggatggccttccttcccaacctggtattgcacatcagcttccctaggaggacgcgactatgctcctggggtaaatcaatctcccctgggtgcagggtacatgtgagttcatcggtggagacttggactgagtcctggaaaagatcacttaacgtcgggtcagccattattaatgttccaacactcaagacagaggtgcttcaagcacttagtaacaaagatgaattcaatggtaggctatgagtgattcataagcttccatacacttcgactgaagtagctcttctacagagagttttttttccaaaaattgataacgaagatcttttaagttaaaaaaaaaaaaaaaaa

SEQ ID NO: 94721 - DNA, 727 bp, Cannabis sativa
  modified_base (52)..(52): a, c, t, g, unknown or other
  modified_base (669)..(682): a, c, t, g, unknown or other
ttgtatattaatttttattttgaaaattgtcattctaatataactgtatttntggtttggtgttgctatattttttcaggttcgctaactctggcgacaaccaagataatgggaaggtattttttcaatgtggtggggtgctatttgaagacgttatagcttttttgtctaaagttccggacgcagttttgtcccgtgtggcttgcgattataattttccagcttatggtttggcaaaacatgcctttcggttagacgatgagctatcttggttcgaggaggttccatggccgattgtggtttgctgcattgtttaatcatatgtgactttgttcaccgcgtcaaaaaagaaataacttttttgttttaaaattttttaaacaacaaaaataaaagggaaatttgataaaatatacttacaaatttagaatattctttcaatatacatttaaataaatactctaaatattctccaaacaccctaaaatataaaattacccttataattcaaaaactctcttctcccactctctctatctaacttcccccctctctttctgttattcccaaccccaaacctttcaagccccgactgttcacgagctccgaccgaccaagacaactcacgaccaagacgactcacgattgtgtgacagtcagtagtcccgnnnnnnnnnnnnnnaaataccgggtaagctgtgcaatcccacatcgcctggggaaggtc

SEQ ID NO: 94722 - DNA, 886 bp, Cannabis sativa
tacattgctgaggaggctgcacagcctttggatgacagagagcccggagctagccaagctgaggtacctatggttgggcagcccatggatgactgagatgaggagagctcagacagtgcatctgaggttgaggaggtcattcctatcaggaggagacagtacaagacttgcactgttttctccaacaaccctttgggttcacatgatgatgtctggcagcctttaaatagccttggttgtcttatcaaggtcggagtggaccacattctagaggaggctgtagagccgtaagttgttgattatggagagcagcagaaccggtggatatctcccctatcctctatttctacccacaggcttcacaagatcaaggagagtgggttgatgggagatgtccagtgtgacagcctttgagagaccagcgaacatattagttggcattcaactagatggtctaatcagagtgccatatagagcagggagcagtgttgcccatgcattcttatttcaaagatatcgccatatactttagggtgtgtccaactcagatcaccccaaaaggtataaagtacctttcagtgatgttcattctttatgcggagttaggctggcctcatccccccgtctactaggattctactaggcctacccatcccccgtctacttctagaggcaagggcaatgttgatgtttgtgataacagttcagatgattcctcctccgaggatgatggtagttgatagtacaacctttttgctttttcttgcattaaatacttataacttgtattctgactttgttactttatttttacagatatggcatccagattgagagatcttgctgaagagcctttcagcaaagcttcttcaggtcgtcccaaggc

SEQ ID NO: 94723 - DNA, 650 bp, Cannabis sativa
tcaaaaatacttttccatataaagcttgaattgtttcccaacacagcaaataaacaatctccattagggtaataccgtgctttgataattctgccaaccaagctattttgaaatgttaccagcctacacccttgttttagtagcatgtctaaattaaatgcgcttatgaactttttctttaagaaaattcaacaaagtggttttattcaagcttattgtattaggaagtcaagataaaagctgccctctctagctttcattatccttttataaatatgtggtgtaaattttctttttaatacgcttgtttatatattaacctataaactttaggtagaaaatttatgaaataagtgattttaatgtatgtatgtataagcattgccaaaccaagtcatatcttatttcaaagtttgctagggacatcactataattgtctttggattgttttttgtgagatcttgttctgtggttactgtagttttcaaaggatcataaccaagtttgatactctacattgggaaatcattaaatctctcaacatgttgaaagcaaggatcccaaaaggagctcctagatctatgtttcttctattatgcctaaaaaaacactcaaaatatactgtagagaaaagccaatgccgataaaa

SEQ ID NO: 94724 - DNA, 624 bp, Cannabis sativa
  modified_base (46)..(49): a, c, t, g, unknown or other
tatctataaataattttcataatcaaacataattaactgctaattnnnnaattaaactaagcggtccttacaaattctgtctttaaaagtgtcgaaatctacaaataaattatgccttgtaaaatcaatctcttcaaaattatcattttccacgaaagtgtgctaaaaccgttccaaaatatttgaaacacgtaattagcattctaaagtgctaacgaattaaaatcacactaatcaacgatttaaataattaattcaaaaataacattaaggaaaaattacacaattaaatagaaaaaaatgcactttatcacactgacttttcaaatacttaatttagtccttttatttttttttttttttgtttcaaggtggcatgatactatttttttttttttttgattcaagcgtttatatattacatcatgcataatctgggactcgaacccaggacctccaacacacacgcaccccctatagccacttgagctagcctcaagtggtaggtggcatgatactatacgcatacatattattgcactaactaagactttgctaaaactattgataatatgcgttagtcttcttaattattctaccgtttgaaaaaacaaaaatgacaaa

SEQ ID NO: 94725 - DNA, 582 bp, Cannabis sativa
tcctttgtcaaaattaattaattataagttgttgcccatgcatatagctaggctgacgttagcttttgatgttttattctcttaattttaaccttctatcctattgggtatatttgtgtaagtgtaattctgacattttttaatttttttgacaatgtaattctgacattttttatattctcataatttaccaaatttgttactgcgatctacgaatatttgttttttagctatacatattatttgttaattgttactgaaaataattttgttttattctactttgaaaggttgtatatcggaattctctgcgttttcaattttttaaggaggcctatgagtaatgaattcaacaatagataaactctcaaattatgtgaaatatttaaatgttttattttttttttttataagaaaaattatataagtttttcattagttaaggggaaggaaattaatttatattttttttaaaataaaatggaaattactattaatagttaaattagataaaattcatcacataaaaatatagttcatagataccaagctctttaccataaaaagaaaaaaaaaaaaaaa

SEQ ID NO: 94726 - DNA, 674 bp, Cannabis sativa
tctcatcctggcttcttctgtgacttgtattggcgtcctttgggaagcccttatcctttgcggagcattcagcttcactcctcgagactgagagagattactgatcatggatgctccctgcgcccttgccttgcatgggacatattcttcatataggctcttttcaggagcttaagcagatccttgacgggagttaggattaaggatactaccggctgattaccatctaggcttcctggatttaagtccacgtgtcaagcttataattggacaacatatatcaagtacattttttctttatttttttttcccactcatactactctcattatttgctccatcgtcttcatctctatgccaaattaattttgtcttttttttcttttctaattcatattttatgattcaaagtaaaaatagtgttaattactttgcaagtgatctcaatgttttttcttaatattaattatcttttcagaataaatttttcactactacaaatatcaaaattcgcgacggtcctaaaaataatttttttttgagaccgtcgctaaaaacataaaagtaactatttgaaactgttgggaaaaatttagtattcccgacagtttaaaattgtagtaaacaaaataggtgacgtttttcaatagaatacaaatttttaggagagcctt

SEQ ID NO: 94727 - DNA, 1591 bp, Cannabis sativa
gactctccgtctcacaatcacaaaccagattagttaattccacctagctcggttgcttcactgttagactattcctcttggacaattacttttacaatattcacattatatatacttcgtggggcattttattaaaatgaagggggtagtcaaaaggaaaacatagaactggagattacgttgtttggtttgactgtagagttctgagaaagagtccttaccagctgtcttattcatatgttttatttacaactcaacctaataaagtaggaaatatccaaacacatttcaccctccaacaaacttccctacttgaaaacaaataaaactaattatttttatcttggttaataaaagaattttatcgaaatgatggaacttaaataaaaaacaaaaaaaaaataccaataatattggaaattttacttactttaagattagcttttataataaattaaaattattaattggagtttggttgagaggaataaatatataagaatgaaaatataaatagcactacaccaaaaatcttaaaaaaaattgtaactatagtaagaataagtgacatttgttagaatagattacatttttaagaaatgccactaaaatataaagtgtcactaaatattaataatagtgacatttagaagtgtcactaattgagaattttggtgtagttatagaataaaatgaaatttaaaatgtataaaaaaaattgataaaaatattattaaaatttttctttctcatcttgcattagaattatcattcattttattttaaaatggaatagtacattctaccaaaatgatagaaaagtcattctattggaatgatattttaatattttaaaatacaactaaacaaaagaatataataaaaatagtttattttcatttcattatctccaactaaatgatttaaaagtgattatgtaatactttttttaatgaattttttgtgttttttaattagaaaagttaaagtatttcaaatatgttctgtaaaagtgtgattaattttaaaaacaagaatcaaattattttctctaattttttatctttcacaaaaaaataaaacttaatttctttatttatatatatagttgagtgaagaaatatagagtgagaatagtgagaaacaaaaactagagagagaaacaagagagaaaatgtatgttgtcatggcttaacgataccaacaagcgattcatttttcttcatctcccgaattaaaagtttcacatttgctctagtttataaattttcagtccgatcaacttataaaatttgtttatatataaacttttgcaggatttggaccttggatccaacttacataaaaacaaaaaatgaaaaatgaaaaatttgtaaaatatatttttgttttttatttttaaaactaaaaatcaaaaatagttatagaataaatttttggcttttaaaatcaaatattatattttcactattgttacgttgatgagagagtgactaaaatataaatatgatgtaaaattaaaatgcgtagcaagtaattggtagacgaaatctgcaatatatattccatattagtttgatattacataata

SEQ ID NO: 94728 - DNA, 507 bp, Cannabis sativa
aaaaaaaaaaagtaattaactataaaattaattatttgaaaaaaaaagtatatataaaaatattgtcacataaaaattccatattaatatacttttaacataaataatcatgcaactctaaacaaaccaatattttgtaaagatttttagattaaagaaaaaataattagcaaaattgaaaatattgttgaaaaaaaatcctgatgatctcaaccctatgtagcaacaacggtaaattgataagtgtctacacaaaaatactacttaatatttacataacataatctaggattttctaccaaacctcgtggtataaacactctaaattaaaacttatactttggctctaaaacatataccatatttagagctcgtcgcaagctttgaaatggtataaagaacgtctaaaataggcacccaagtgaaaagttatggtcaaaatataatttttgatcttctcaaaaaataccaaaaatggttaaccgttttaaaacggttaaccgtttt

SEQ ID NO: 94729 - DNA, 524 bp, Cannabis sativa
gagaggaggacgaagatggagaagaggccgcttgttagggtaaaaacgatagaggagagtgaagagagagagagagaagaacatgtaaattgatcgtttttagggtttcgcttattgttttgttgtttgttgggccaatgggccgagtagtataacaagagaaaaaagacttttttctcatgggccaatgggccgagtagtataacaagagaaaaaagaaaggttgaagaatatcttttttttttatctatattaactaaatttacctccaaataagagtgttcattagatcacatccaatggatttggacccatccgatccaatccaattatttattggatattggatttcgccatccaatacaatccaattgaattgagtcatctgatccgatccgatccaatggacgtattggattggataagttcatccattggatgctttaactggttttttattggattggattggatccatctaatggatccaatggatgaatccaatccattttagccactattta

SEQ ID NO: 94730 - DNA, 787 bp, Cannabis sativa
acccgcatcgtgaaactaaaaatctgtaaaaatcgcaccacaaaaaatagtgcggtgtggtttttatagtttatgcggtttagactattactaaataattaagctatcacaaatacaacaaactttgagcaaaacttgtcaaaatactataaagcttgaaaataaatatgaaaaaaaaaaattaagtgtcaacaatacaataattaatggactttaagttaaacatttacatattgtacctaaataaatatgaaaataagtatttttataatgtgcggtgctgtgtggtttgaaccgcatattaacaatttaaaatgcaaaccgcactgcactgtgaggttaaggaaaaattcaaaccgcacgcaccgtaaagaattttaaactgtattttttttgtaatataatacagtgcaagcagtttgagcaatttaagcagtttgatgaacacactaactctttatactactcaaattatcattatattattattttacagtagaaaagatttattatttagcttttttattacgtactataatatatatacaatgtgaaaatttgacctttggagtgttatgtatacctaattgtcgtttatggcttatgttttcaatgataataataatgattgtttgagttgagttttacaaagtttggattttgatgtttgatgtaaatattatgttaaaatactctaaaatttatgcttctaaggaaacccttcatcttcgatctattcattcacttaacttttattatttataatattatcttccattaattatct

SEQ ID NO: 94731 - DNA, 552 bp, Cannabis sativa
cgaagtgagccagcttagatttaaaaagaagaagcaaagggaaaacaagaagtaagccctaaattctacattctacatatattaaaagaagtaataaatttactatccactcatacataccctatccaaaaagaagaagaagaagtaccttggtgatgtaaaaatgaagaaccagatttgggaaaatggtaaaaagggaaaaaaaagaaaaagaaaatcaaaggtagagaaactttttagaggatttgatttgataggtaatcccaaaagctgtgtaaagcaagaagagttagctggctgccaagctgaccaactcaatagtgagagaaggaaagaaataggagagagaaagtacagttccagagctttgattaagcagcagcagcaaaatctacaagagaaggttctgtccttttgcttcgaattttcaatttgtaatttttaatatttttggtataaataaaaataggatagtaatatgagtcttcattaataaaagtagtcaatggagaggtgagggtcttcgtctcccaaatagcaataataattact

SEQ ID NO: 94732 - DNA, 810 bp, Cannabis sativa
ttacaaaaatactgtcacacggtagaaataacttttatattgtcctggccctttttttttcttttatactgtgaacagtaaaaagagagaatgaggcctccttcttggcattatcattggtggcatctttggaagtagaatcaattttggcacaatcatcatcctttaaaacaccttcagcaacaacaccagcatcatcattcctcacatctccaactccaggctcaccctacccaagacaatctccagcatcatcgatatcgacgtcatcatcactaccatccccataatcatcatcaacaatatcatctcatttctcatcctcttcttcagcctcattctcttcttctaaaatagactcttcatcatcatcattttcagatatgcggagtgcattatcaaactgacttcccgtttgagtatgagcagcatcggaggactgaaaataaaccaaaattataattcacaagtaaataaaaaaaatatattaaaaaactataaaaacaatataaaaactaaaaaaaaaaaaaacataatgaatacctcaataagaatgtccaacttcttgttcatttcagcaaaagaattcataagaatctactgctggctgacaacagacatatcttttttcaattcctcatactcaacacaggtgacatgctcatgagcattcgatgaatatggacccataaattcagcttgaacaaaagacttgggaacaaactttgaatctagaacacgtgcgcctttcactttaactttaataaagtctaaagtcatgtcactcgggaaatagtcatcgaggttcaa

SEQ ID NO: 94733 - DNA, 792 bp, Cannabis sativa
gataccaagttgtaacgccctaacatatagggacaccacgtgtgtgactttataaactagtttaatactaatagattaattaattattaaaaatcgtgatgatattaaaaacttgactaaaataatacactaaaactggacatcataacgatattaaaaatgtgttatggggatccttattataaaaggtttacaaaaagactatatacgacaacaattcaaactcaaaatcgagatacacaacaaatacaacccaaaacaactcctgacaactcggcaaacaaggccgtggggtcaatatgtacattgttggagaatactgtcatctcatggctgctttaactttttcttgcccttacctgcaccacaaagtactcgtgagtcacaaggactcagcaagaaaagtaaaaaagaagatacattcaatatctagttatccaattcattattataaagcaactaaacaataatattcaaaaatgagtaatataatcattcatatgcatgggagtagaaataatcatatattgcattgcctaattaggcaagccgtgtcataatttaacatcatatataatatcactgcttcacctaatcaggtgagcccattccacaacctgacacaaatatatcacatcacttgatcagacaaacctgtactataaactgcttccacaagaaccggtggaccggttgggcaaggggataaaagtcacaatttccaaatttcacactcaccgaaatgctaccgaaacctatcctatgttgggaatattttaccaagatctagat

SEQ ID NO: 94734 - DNA, 704 bp, Cannabis sativa
tatgcttaagcttagaccatgaatcgtgttcatgttctccttgtagccgtccatttttattttggggcagtcagcaaaatggtatttttcttatccattttgtatataattatcaagaacaaagcataacataaaataaattatttccactaattatctttattttttaatcaaattattgcactaataatagtataccttatagtgcttgacactttaaaaagtgccacttagcatttttcatcccatctcagtacaatgtacaatcgaattcattgccaagtgtaacgtgcatcctaagatggcacattacaagctaagtggtgtccacaagttggctaagtggtagtcaaatggtggcgcatgttgtggtgcatgctgatagcatgttgatgcttagtttgtatgcagtggcattttcataaatatcttcaatattgtccgaaacgagacaggacttggtattcgccatttatttgggtctacaaataggatagtgcaatcggtttagcgaaactaggtgatttggtatatggttcttcccatatgtctacagagccgaaatcatttatgttcctcgtagaaggctaaaagctgaaaatgctatttaagggggtaccctgatgtcagctctccaccaccccttgcaccttggtgctaagtgagctactactagtcactgggactagtagggcgggcatatg

SEQ ID NO: 94735 - DNA, 512 bp, Cannabis sativa
aggcactaatattgacaaaactaattattgtcagtaccatcgaagtgatactcattcaacaacaaaatggcgtgcccttaaaaatatcattgaaaagatggtccaagacgaagatatccaaatagagtctcaatttcaaaaagcgcattgtgacattgtgtctttaactaaggacatgtcttccttttaaatgaggagaaaggttgtcactcgttgcaacctaaaaaagaaaatttgagcttaacaaaaaaagctaacgccaaaggaaaaaaagagcaagcaaaaagcgaatgctcaaaaaaaaaaaaaaatttgagcatagcaaaaaaaaaaaaaaagttaacgctcaagaaaaaaatagaacaagcaaaaagcgaatgctaaaaaaaaatagagcaagcaaaaagcgaatgctcaaaaaaaaaaaatagagcaagcaaaaagtgaatgctaaaaaaaattgagcacaaaaaaaacgcaaacgctcaaaaaaaaaaacataataagcaaag

SEQ ID NO: 94736 - DNA, 2179 bp, Cannabis sativa
ttaagtagaaacttcttacaaatgaagctagaacagtgaatgcagccatgttttcggctgtcatgatttgtctgctattatacaaaaaacataccattttatctgtcaattttttactgttttgtaggtaaagaaggagatcaagacaagcaggattggcgttacatcaaaagtaagcattcgtacactttgtattctcacttaaaagatgtaactatatgttgagtgatgagaatttatttctggtactttgtctgactatgtaacaattgcaaagattgtagaattgataaaccgtttaccagatggagttcggcctacagtttttgttagtgctacggctgttggttactatggtccgttcctatccccgaattcttatattctttttctttacttttgaagccacggataagagcatttgtatattccacatatttgagctgtttttcgagggttaaattgatgtttatctgcaaaatatagtgaaatttagttatgatttgcacattctagttgagaattactctccaatatatttgaactgaccatatgtttgttctgttctcatattcaggcactagtgaaacacaggtatttgatgaaaatagcccatcaggaaatgattacttggctgaggtaatcaaaggccaacttttttcgggttgaattaaaagaagctatcaatacaattctcacttcaattttgaatgtttttcaagagagtgggaagttctgttgtaaaatcttaacatgcaagtctttctaggtttgtagagaatgggaaggaactgctctcaaagtaaacaaggatgttaggttagctctaattcgaatcggtgttgttcttgggaaagatggcggtgctttaggtatgacactttcttttaacctaacttaaattactgttctttgatcaatgtagcaattaagacttgatctacaaaaacaaaatgtgctaattaaccttttctttcgaaaatcaggacatgtttttgctttgttatttacaaaattcgagaaataaacattataagacaaacttatttcatgtatctttgcagctaaaatgatccctctattcaagatgtttgccggcggacctttaggcaccggaaaccaatggtatactctcatcggtcacgacacttactcttccaattttgattgtcacatgaacacttgagatcaaacatggaatgtaatgtgattgatcagttcaaattggctttcaatgatctcaaaagattgactgtttcatagttgtgtaggttttcatggattcatctagatgacatagtgaacctaatttatgaagctctaaccaatccatcctataaaggtaaagggttcttactaaatcaatcagaatgattagtctttaaaacatttcaacaattgaaactgagttcttccaatctcaggagtgataaacggaacagcaccgaatcctgttcgcctatccgaaatgtgtagtcatctggggaatgcaatgggcagaccttcatggctgccagttcccgactttgcgctcaaagcagtcctcggggaaggcgctgctgtggtgaggatttcataacattttcaccttttcattcatttctttttctttaccatataatatacataccgaaaaagcttattcgattaaaatgcaggttcttgaaggacaaagggtggttccaactaaagccaaggagttgggattcaacttcaagtactcatatgtaaaagaagcactaaaagccattctttcatgaaacatacaaatattttactgaggcaatagtcatgttcttcattctttttgttatgagggttatctttgatattgatatcactagtggacaaatcaaagtgaggattttggtgtgtattagtagtagtaattagaaaatttaataatagcaagtctttgaaattagttcttgacgacaatttgacttgtaatattgctaaatttgaatacttttcttctaatgcaaataatttattttcggataatggttgggtttgttgtacaagaaatcaaatgagcaattgagtattaaataccatgtcaaacttttttttttaaggaaataccatgtcaaacttgattatataaaaaataaaataaataaaaggatgttgttgtaccttttaaccaaaaaagtgttttgtcacctatatttactat

SEQ ID NO: 94737 - DNA, 546 bp, Cannabis sativa
ttatttaactaagaaagttttatttttaaattatatgatatttgatacaatactttaattttttagttttcaaataattataaaaaatttaaaaacttattgttttatttaaaaaaatgaagttcggtttggtcggtttaaaccgaccagaccaaaccgtggattaaaacggtcggtttttttatatttttataatggtcggtcggttttcggattagaaccataaaaatcggaaaccgaattttgaattttttttgtgtaaaaaaccgaccaaaccgaccgttgctcacccctagtgtttatcatccatgtctttcgaaaactttttgttgtattgtaccttctaatttaggtcatcatttcgggtttatttgtcacttgttctatccagggccggccctgaaacaaaatgggccatagggaaaaaaaaaaatttagacgattatgttagaaaaaatgtggtatttttcaaaatcggtaaaaaaatgtataattttaaaagaggaaaaaaaaaaatttgaacccctggactgggtgggccctagg

SEQ ID NO: 94738 - DNA, 722 bp, Cannabis sativa
caatcttctgtaaatcttgttcttcgattatgcttccatttagcaaaaactcttcgccggatttaatggttttttcttggttatctccgactccggccagtccccaaatacgaagcagcgctgtttttttgtattttttactgttcacagtataaaagttaagttattgggcttgggcagtataaaagaaaagaaaacgggcttgggcaataaaaaagttgtatttgtcgtgtcccagtatatttgtaaagttttggtctaaaaacagtatatatgtaaatttccctattataattatttttatatgatacatatatcaaaattttttttttttttttttaattctgcttctccatctcaaaaaccccaagaagacctcaaaagaacctgagtagttcatccatgggtgaaaaatgagttgcgaaagcaaaaatctaagaatgacacgtagagtgtgagccattttcttataaaggataatcttcttctaaaggtattgctagtgattctattgaaaagataggaaggctaagggattcaaaaactcaaaagaacctgtgaaagaagcttatcaagctccaaaggtatttttgtgcatttcgtatttaggtgtttgttgacgcgagttgagatttctctttaacttacttaaaaaagataattaattaggcattatcattattcaaaatattagtctcatctacctctctctctctctctct

SEQ ID NO: 94739 - DNA, 868 bp, Cannabis sativa
tggcgatctctttcagctgagttgtactgaaagccccatagttgccgaaacagagcaacaccacggacttgggcggctgatcgttaagccacttcatgatctggtcatgatctgattgtctaccgttaaccttacccttaatatccaaaagtggaccaacggtataaagaggcggaattactccgtcggaaagtgattgaaccgcatgagtttctaactccagtactgtgttcactattatacccttggtcttccttatgttattgccttgagtactcatcatatcttccttgtccgtaaaagagtcaggtaaaacgttcatcggaactgggttaagatagcttggtatgtggtggtcgacatctgactcagaaccatcaagcttgtccgtattgctgttgaggtatagcaataaacccagaatggcggcgccgctggtgaagaataagtacgagggaacaccaagttcaacggcaacgtcgatgatttcggcgcagaaagtgtcgacgatcaatccggagaagtgattagaggatggggtggagaagcggttggctatgatatctttgatttgaggagcgtgactcttaatataaagaattgtgtagtttacaaaggagtctttcattaggtctcgtgagggaagttgtgaggattgaggttgaggaacacgaaggaactgaatgtggggattagaactgaccggcattggaataggactcatatcaaatgaagaatttatgagaagaaaagttacagaaaatcgatcatcttttcttagtaactcatgtgcaaactctactgacggagccaagtggctttttccgggcactggaatgaaaaccaactcgtttctcttcatcatttt

SEQ ID NO: 94740 - DNA, 924 bp, Cannabis sativa
gaaaatattctaaacataaattgtgagtttgtatataaatataagtaacttatccttaattttgctgctagttttctatctttcagtaacagcttaattagaagcccgaatactcaatttccttttgcagatattaacgttaatatatcaaactataaaatccataaatggagcttttatatttgttatacgtattggattgttgattccatagttttatttcatctaacataacattaaaaacttacgttagaaattggtagaggtagttttgccaggtttcgataattatgcattgaaatccaacaactgtatgaaatgtaaaggcttccttccaaaatagtccactaaacgacaaacttccccgcatgcccattcctctcgtcctctctcacccctacatatataatacattaattgttttacaagaaaaaagattctaattgttattataaaactgcaaagagagagagagagactcattcttcttcattatatgaagaaaattaagtaaaagaccacactgatatatacacaatgcatgttatttctactcatcctttgttatcacccctttatggaaaagagggttatggaatcattggtgatcattcgaagcgcatccaagatactctttcaaaggtttttattcataattattatatatatatatatataattgatgatcattttatcattttccattctaattaatctcattattgttataattaggtacttgaagagatgaaagagctatacgtaatagccattcccatgatcatggccggtcttttagtgtacggaaaatcactaatctcactgttcttcatgggcatgataggaaaagacgccttaaccggtggcagcctcgccatttgcgttgccaacatcaccggctactccgtcgtatcggggctagcc

SEQ ID NO: 94741 - DNA, 503 bp, Cannabis sativa
cacaaagacaagaaaaaaaaataacaatgatttaaaatgttttttttcttcaaaaaatgaaaaatactttttaaggggtaattgttatgcttatatttcaaaccataaatatgaacatgacacgtaaataattggacacgaaaatcatgaaaaaatcattaataaatgagttgccttgaggaaatagtaaatgacgagccatatctgtctcgcatacaacatatgggatttgacaatgggtttgagtcaatgattagaaaactttctttcctcgatctagagatgataaaaatagaagtcattccaggtataacagactgaagctataacgctggaaaggataaataatggattctttaagagcttacaactcgttgacccgcatgttcgtgagtatgttgaaaggataagagaaataagcaaagtgtaattaatcttagattctcaaaagattagtccaagagtcgtcgtgaaagaccatagcaaggacaaacatcttaact

SEQ ID NO: 94742 - DNA, 638 bp, Cannabis sativa
  modified_base (578)..(584): a, c, t, g, unknown or other
aacacaaccatgatatagtacctatacctagtcccactcggtataatggaaacaacaagaaagataatgtcaaattaaagttgcaaaatttactattaaagaaatttagacaattacttgtttgtccacttgtatatgtgcaagttaccaaagtgtagattttgataattagagtttctgcaaactcatcaaaaaagagctagtaagagctaataatagaaagaaagaaatctatttctcacaaatgctaaaagatgaaaagctaccattaatgttgtggctggttgttcttgcagcatatatattagacaattcattgactaaagaaaaaaagagcagatattttggtcaaacagaaaagtaaaagaaaattaaacaattatggcaaattgttagatgagttttattacaagaaccatggaataaaaaacttctctcttctaacttgaaatgatctaaacataaatcaattcatattttcatatgatattaagatcttgccaattcaaaattttctatctttatgcaaataatatcatactgatcagtttaaataaagagattttttctattatagnnnnnnnatagatgaaatttacatttatggctctaaaaaaggaaataaacaaaagtggaaa

SEQ ID NO: 94743 - DNA, 503 bp, Cannabis sativa
tcttgaaagcaaggaagtttgatcttgagaaagcaaagcatatgtgggctgaaatgcttcagtggagaagggaatttggtgcggacactatcagggaggtaattgcagctgacttcattttctgaatttgaagttattggaaagtgaagtgcctgtgggctaatttctatattcctttcaggagtttgacttcaaagagaagaatgaagttttgaagtattacccccatgggcatcacggtgtggataaggagggcagaccgatttatattgaaagattgggaaaagtggatcccaatagactaatgcaagttacaactatggaccggtatgtaaagtaccatgttaaggaatttgaggaaacttttgccacaaagtttccagcttgtactattgctgcaaagaaacacatagattcaagcactacaatattagatgttcaaggcgtggtatgttgcatataaccatttgtctgtgctactcatatttgctacaattgaacta

SEQ ID NO: 94744 - DNA, 1994 bp, Cannabis sativa
  modified_base (902)..(914): a, c, t, g, unknown or other
tagtagggagtttgatgtatgctgcgatttgtactagacctaacattgcttttgtagtcaatactcttgggagatatttatctgatcttgaccatgatagttgggttgcaaccaaaaaagtcgtgagatatttgcaaagaacgaagagttttatgcttgattataagcatgttgataatctctgagttgttggttattcatattcagatttggtggttgtgtgtataatttaaagtcaacttctggctatattttcactttggatggtgccactacttcttgaaaaagtgttaaatagactttaattacatcatctactatgtatgctgagtttgtcgcatgttacgtgacctatttacaatctttaatgattaacgaatttaaatttacaaatatgactagtttattctatttcctcttttatactaatctattgtaataataatattgttgtttttttttcaagaataatgatattagtagtgcttccaaacatatagaaataaagtatctcactgttggaaacttggtcaagaaaggagacattatgatagaatattataagaccaagttgatattagcagaacgtctaaccaaaggattaagcgtcttattgtttaataaacttgttgttgatatggacattttataatcttttgttcctttatgttagtaagagtttcttattctaatatttgagattacatttatatgtaattttcttgttgatgttgtgaactacttagtttgttttgtgagcaaataattttttattattggatgtttatacttcaattgtgttttattatattctcaagaatgattaaattgaaagcatgcaattcatatcttgttgtgttttagaattcatattaggatattaatgaaacatacatggtagnnnnnnnnnnnnntggtaaaatatttccaacaaaaaattatattaattaagtcaagaatcaagtctcagcctttgcacccaaagtcataaaatgtgtgaggcctgagaatcccccaataacttttattgaggaggatacaacacatgtccaatttcccataacaatccactggtcatcacagtaaaattctcaaataaaagaatagagggagtattggttgataatggcagcttaatcaacatcttatacaaagaaacattgaagaagatgggctagaaaatataaaattaaaatcatgtgttgtgaatttatgtgcattcacatgtgatagtaagagtgtgcataaatcaatttaatccaattacaattgaccgatccaatcacaacagatcaccaggcattgatatccaattatgatcgaatcggattggatgttatttttgaatatctaattggatcggatcagatgttggatggggtattaagaaatccaatacatctaatatccaatcaaactaattagtatttttatttagtttagataaataattagatattatattgatgtatttaaattatatatgtatatatgaaaattaaaaaaattaaaatttaacctttttttgttggtttgaatggattcaattcaatccaatgaatattagatataaaacactggatggatatgttctgatctaaaaaattctatgtctaaactactgaataaattttaactaatttaataaatatatatgaaatacatgcaatgaataaaattgatccaatccaacatccattggatgttgaatcaatcgaatgaatgaaattaattggatcggatcggatgataaaatctaacatcacatatataatttgatcagatttggacaggccaaaaaactgtgattctaaacgatgtgatgcatactccagagatgaggaagaatttggtctcgggctaccttcacaacaaggcggggttcgcacaaactataggagcttatttttttactttaactaaaaatgggatatttgtagggaaggggtatgcaactgagggaatgtttaaattgaatgttcaagtcaataaag

SEQ ID NO: 94745 - DNA, 719 bp, Cannabis sativa
gcaagaataaatggatcaaaagtagattcagacttgtgaaatgaatcatcaattaaaagagcaattttagactcgaataaagtgaatcaattttgattcaaaaattgtgaaaagataacaaaattagagaaacaattttgaaccttaataatcaaaatgttgaacgaaattgataagaattttgttaactttgatgtaatatttaggttaatctccttgaggagataactttaaaataatgggtaaaaataatcactttattttgtaagtggtgatgtgagtttgatatcttagttttgttgagaaaactaagaatctcaaatgatatttttctaataatgatctctaagaggcattttagaaaaataattaaattaaagttatttaaatagtggatattatttagataacaaatattggtgaaaagtgattcttataaaaaaaatttactttatgcttgaaatgtgggggtgagccacaaatttagttaaagtgtgttgagacattgttgattaatttatttaattttggattcaaattttaaatcaagtttagctatgtgcatatgtgaaaatattgacatatttggtgtcaaattttagtaaaaataatttcaagaaggaaattaaatttaagagaatttatagagacaaagtggttttctatattttaaaattaaaatattatcttgatagtgatatgcttggtatcaaaattat

SEQ ID NO: 94746 - DNA, 686 bp, Cannabis sativa
catgtactatattttacaatttgagtagtttttttagtagtttcaatgtgaattattataccatttttaattgcaatttaaattgttctgctaattgcaataaaattttttatataaaacttcataatattatttaaaatttattgttaataataattttagtttaattacgtaattctttttaatttataatgtgtaatgaatttaaatttaatttataatgattaaaaaaacaacaacaattttattatataattacatttaacataacataaatattcatgcataatttaaaattttaataatcgctctgttccctattaatacattgaaacgaagtgcggatgatcttataatcatcaaagaaaatcccatgttaaaaaattcttccaaattctaaatttcttaaattacattagtaaataaaaatagcatagggggcagatgaagccgctactcaaatttctttattaatgataaatcattcaacattttctcaatagcttcatcatcgtgtgcccttcctttggtctgcaatacattaaaatcatatacagatgtgaaaaatcttttgccttagttttcataaaaacaaaaaaaaaagaagagattggttttacgaatcctgttaagattagacaacatttactaatagaaaatgaaaaaaaaatagtttttttctaaaa

SEQ ID NO: 94747 - DNA, 930 bp, Cannabis sativa
ctggtaaaatatttccaacagacccaacctaatgttggtcccagtacacgaatgacacgttcgaggagaactcaacatgggtatggccaaaatcctggaatacgggatgaaggatctaatcgtggaggtgctcagcctatgggagagggcatttatgaaatggaaaacgatcaacttagacgccgcctggaggaggcacaatggtgaaacatttaatcagagcgtgatgcagccgcaactagagcgacacaggagaataatactcaaaatcaacctgaacttggagtgagaagaccacgagacagatctcgtggctcacgaaccaggagataggaaaatgctcaggaagaaaaaccttggaaaaatgagattcctcctgaaaatccaaatgatcagccagaaccctctcatagaaatgagaatgggaggcaaccagaaaccaacaaatgggaaattcttcatgaaaatgaggaggaccctggtacgcagccctaggaacgtaggtcaccggcaatgaatcaccagcgttcttttcgaacccatagagagagggctcataaaaactccaatgggggaaatacgacaaaccatgctcaggggggaagcacagggcgtgaagaagcaggtgtgacctcggggcgctcaaggacccacaatcgatcaactaaaggaggagagagtttttcgtgctaacgattgagaaagcacgagaaccagtaaatcttcaagtcactcgaggacgaggtcaatgagaaaaacgaggtccgtaagtaggacacagtctgtgcgtagaacgaggattgttagtaattactcccaactggacctgcgagagcacttgaatcagaaaaaacttgatctttgccaacaacttggcccaaagcaagaggatcccatccaattgcaaataaacgagttggaggataagtt

SEQ ID NO: 94748 - DNA, 1389 bp, Cannabis sativa
  modified_base (274)..(278): a, c, t, g, unknown or other
  modified_base (506)..(529): a, c, t, g, unknown or other
  modified_base (606)..(607): a, c, t, g, unknown or other
ttaattgagtctacaagcagtattatctcaactagtgtgggaccatgggccgatataatcaagcttccaataagcaggtctataatttatcaagtaaattctctaacatatttatttctccttgcgccactacagattcaaaattgcactcttaattgtatagaatgctctatatgttctaccatatagatacgctttgaattatccattgttataatccaaataattaatgatcctctatagatgatacttcaataaactaatataattactnnnnngagtactccaccatttatctctattaagctaagctcaaaggaaatcatcatttcacttatatgcatttatagaagctatagattttgtatctacgattagcactcccactcaattgaacaaccatgttcttaatttgtatgtcattagaagatctaattggtcaactttaacaaaaaaaaaaattgaataacataaataatgcaattaaactagaacctaaccatctnnnnnnnnnnnnnnnnnnnnnnnngatcaactaggtgatattaaattagatagatatcacggtaagtttattatatcttatcgaagttcaatatcagtccnntccaatgtatactccatacatcaattccaagcttactttaccaataccctggaaaggacatatcgcttatccaatgtgcaagtaaactacattgtagattatcatattagtgaaatcttgtgtgtagataaatcgaaggaatttttttagtcacataatcttgattactttctattgtgttgactacacaataattaagaatatcaatgtgacaacaatttagatgaatttataaatcaaacaaataatcacaaaataaacatgtgaaccaaatgatacattaaacaagtaatgaaataaatctgtttctttattgataaatgaatattcaagattacattgaaatataattttagttagcgcacaaaacacaacaaactcccacttgcactaacataaaacagtcagtacattttaattaatcctagagtgtctttgtacttttcaaatgcagtcactgtcaaaatcttggtgaatggaacagttaggttgtcttcagtatcaaccttttccactagtacgtcccctcttaccacatattctataatgatgtggtatttcctttcaatatgtttactcctcttatgccttcgaggctctttacgtgttggctatagcaccaatgttaagtaaaactagtggtttttctattctatgaacaacaccaagttctgttaagaactttcttagccaaacaagttccttagcagcctcaacgacagctatgtattcgatctccatggtagagttagatattatggatttcttgacacttcttcaaa

SEQ ID NO: 94749 - DNA, 790 bp, Cannabis sativa
ttattcgtatataattacgtatacctcaagtgtacgaaaataattgttgttttatcatttgtaattttttgtatttcgattttcatctttattgcctatatataagaataactatgtcaaggtaatagtactgatagtattgattattaaggtatatagaaataaaatatgaaaaatgctgtagatatattttcccgacttgctaccaattaatcttatcaatacttctaaatctaaagaaagccaaatcatacatcctcaggataaagcaatgttccaaccattcggtgaggtttgattaggggtaatgaaattaaataaaatacaagtgaaacaatttttatttcatttatttatttggtttaattttaaagtattggaatgtcatttttattctaactatattttcattcatttcaatcaaatataacttaatagagtgcttattatatgagtttgaatttggagagagtagatttagagggagaagacttagttagtatagctcaataggatttgatgttagttatcagctagttatgtctagttatgtcagttgttagttaagtagttactgttagtttgttgtaacagtttcgtgcttaatctttgtgtaatcaatgtgtataattattgatccatctactagaacagaaatacttttgctctctcttttctatcttcttgtttctctcgagccttgctctgtttttgtgtgctatgcacttttcttattctacatggtatcaagattttcttgacctgagtcaatgtcttcttcgacctccga

SEQ ID NO: 94750 - DNA, 709 bp, Cannabis sativa
gagaatcaaggttcgcttgaagagtcttttgtcgagaataggagtcagaagaagtgtcttcagccttcctagcctgttcaagggcttgttgagcttgcttaattctttcctgaaacccaaaaaaggctttgtgcttccaatttgaaagaaaggtagaacaagtggagtgctttagcaaaagatttgtcgaagggtcatcactagggatgtttgaagaccaagcttccaaaaggacatcattccaatgtggctctggaaaagaaaccgtttgtccttcttcctagcaaattgggaatgaggttttggattgatggagagttggatggctctatgatcagagccaaaaaaatcaaggtgatgtaaagtgctatttggatgctggcagtgccagatgctgttcccaacagcccaatcaaggcgctccagagtttttcgattgccatggctgttgttggtccaggttagacgagggccatttgggtgcagagcttgaaaatcaaatttgttcaaaaaagtgcggaagagaggggaggggccattgcctaaattactactagatttatcctcccaagttaaaaaatcattaaaaacgcctaacacacaccaaggaacagaaatgcaagataggccaatcctggataataattcccaagtatgagatctattagcaggattaggagcaccataaaaagcagtaaaattaaaacta

SEQ ID NO: 94751 - DNA, 647 bp, Cannabis sativa
atatggagattgtataatcatgtaaggttgtacaagagaattaagattatataatatgaataaaacaagtcgacggtgtattaaagtaaatggatctttaatagaattgttaagtatggtttactatgcattatatacgcaagtgtgtttgattttgattcagatcacatatgtggatagacatgtagtaaaagtgttgtgtataatttgattatacatgactggaccaatatgtatatctttcattaacttatcgtttattatgaaaaaattattcatatcataatatttatcattggtagatctgtctgagttatgagtattcatgaactcttgtttgtgttcattaggttttttgattcacttgttaaagtttctcagagaacgctaacggttggatccaaatttataataagttgtagattaaatattcacattgaattaatggtacataaggaattcaagagataatttaaattgtaaaataataattttgaccgactctaattatgaactaataactagaggacaaactacttataatgattatatcaatggactactagttagaattctgtaaataaaattctatattgtcaaagattacaattctataattatagtggaataataatagaattaataaa

SEQ ID NO: 94752 - DNA, 747 bp, Cannabis sativa
ccccatttactctttacattggctggaaatgtggaatgaaaagaattaataaatgatcataaaaataataaataataataatttaataagacctctaaaaaaaacaaattaatttaacaagaaagtaaacattgagttatgttcaccttgaaaataatcaacaacgagaatgttaatgaaataaattgggaaaattacattatctcaaaaaaaaaaaaaaattggaaaaattacataatgcattattttttttttttaatgcgttagtttatatttagccaaaaaaaaaaatgcattactttataaataagagaaattacataattcaaataaatattagcaagaatgaaaggtaaaagtaaataaatgacacgagaaatttgatggtggtgtggtcgcaagtagtaatgatctatttcactatagttttactaagagagacatgatttaattttccaaaaagaaaaagaaaaagatagacatgatttagagatcaaaaaattgattttttcaaagaaaatctaaaatgcataatgatccttaaagcactcaataatttttttaaaatatagaaactttaaaatttttaaaaaaatcgtactaaaaccacgttacaacagaatgttttaaatttttttattttaaaattaagtacaatagtcgctcttatgcggtgcttttaaatatttatttttatgagttactttagatattttatttttaaattatttattaattatattttat

SEQ ID NO: 94753 - DNA, 862 bp, Cannabis sativa
atattgtttttgtattgatttggaggtgttcatattggtttatgtgttaatttgatgattgaatgtgatttacgattccatgcacatgatactttcaatttttcagtcctttaattgatgatagccacagagtacattcgtgaccctggtaatcaccacgtgtcgtaaacttatctccgagagttggaaaaagactacaagctcccgcaacttgaagagtcctagaagcttgctggtaaatgttatcaatgtttctaaacaggtgacatgtagcatgagaaggaagagataatcccataatctcactaattataatcccttatcaaatcatagtcacaaaaagattcatggaaccaggaacaagtcaagactaagagataagcgaaagtctaccttgccttatcttcgcttcctggacacgaaagacatattaccactttaggactcggagtggtccaaactcagtgtctgcccaactgagagtcttgagactcggatgggtactcgaagggcctattgtggacgctaactgcccaagagtatcgcagatgtctaccttggatgcaatctgaatcgtccatagacggttatgctttttctagcatagaatcagatcttatcccctatgccagaatattgtagtgcgtgcacctcacacacctttctgccagatggttattccaagcctctacttttaaaggttgaaccttttggtgacacgagtccactatgtataatggtccctaattgtccagcttttgcaatgcacgagcacaattctttccaaggggtccaatagtcagctcactttttgcatgtattttaccccattagtgaactttttacagaaaccctaggcggg

SEQ ID NO: 94754 - DNA, 754 bp, Cannabis sativa
gtcgcacctgaccagggtgctagcctcgccatcgcatccatggcctaaacccttcggcgttgtcttccatgacctaaacctgtccatcttcaatattaaattggccactaaatgacctattccatgtaatcacacacatcactctagcagattggtcaatatgctctgttaaacacaacaaaaaaaaattaattcagattccaaacaaaaaaaaatgacacctttaatatcaaaatgcaaacttttttttacctcgattatcagcaaaactcgagtgatagtgaaatcgggttgcctcaagcatcttcgaaacctcatgggtactctcagaagctttcagaaaatgatcatcaagatcataaaatagcttaactaaattaatacgtttaccactcattctttttgcatcacctaaacttgaatctacttgcttaaccttcttcatactcttcccagcagcaacaacaacgtcaacaacattcggaggaggaggcggcggagtatccagaggaggttcatccaccgctacaacctccggcatgggttcctccaaatcgccccattctattcgaaccaatccattagccttcatctccagccagagcctattttccgtcggagaggcgagagagagatggaaaagattgagaacagctagggacgattaggctcatccacgcctggcggtgacaaacgctgaagccttgcttcagtatggagtcttcagacagcaaagaagaaacgagaagagaga

SEQ ID NO: 94755 - DNA, 986 bp, Cannabis sativa
ttatgcctaattccattgcattattattatagaaatattggtgtgtaatcactacaagaaatgtgacttttgccagcacatgtttttgtgctggcaaaagtttcgtactgcgctggtaaaatagaatttaattctgatgtgttggcaaaaggagttgacaaatcaacgttggtattaatacttttgttagcacaaaataaaaagcgttggcaaaaataacttttctcagcacgtaaatatgctgataaaagttaaattttagccactgtaaatatgcactgataaaactttaacttttttgccagcataatttgcaaaatgcgctgataaaaattacttttattagcgcagtagcgaactgtgctagtaaaaataatatttgttttatatcaaaaatcttcacatatacaaactaaaattatgattataatataatgtaataactctagtaaaatcatgaaccattataatattataaaaagttaataattatactaaaaaaacttaattaactatttataaaacgctactatataataatacaatgttagtcataataatatggcacctaatttagaattgttattatgatgatgatgatgatgcttgggtatgccataacaactggaccacattgtgtcatttaatgctcctatatatctttctatcccaaatctcagctgcttgctgtttcagattaaatgatgatatcactagctaattaattattgaaatcattaagagaagaacaaaagtaacaaacttttgtctttcgatctgctaattattgatgtgaaccttaaagtagtgtatatatatatatatagtcaaatgtacatgtaaattaattattattaaattgtatcatataatacagatataatatatatacaccattttcctttttcttttttttctggtcttttctctcaagataaaatatattttcataatgataccaaatcaagtttatgcttcctccctta

SEQ ID NO: 94756 - DNA, 4030 bp, Cannabis sativa
  modified_base (4002)..(4004): a, c, t, g, unknown or other
cgaaggaaggatgaataaggcacctaagtcgaagttgaagcgccaaagtcgaagccgaagttaactgaattcgaagccaaagtcagtggaggttgaagtcaaattatcgaagaagatattttttttacatagataattagacttaaaaaaagagcgtataaataattttaaaaagctaattaatagaatgttatttttgtaaaaaaaatttataacattggaagttttttttttttttttgagacaaaaacggaattacacactagcacccagaggcaaatctgctttcaaagaagcagctgcacaatcaagtatatacaatgtccacacatcagaaacatgaaacaaacggctccaatttgccaggcaatgagctacagtattacacttcctaggagtaaaaataaaagacagattatagaagcttttgcttgctaggatgcaatcctcaagtaaaataccccagtctgtgttgatgcgagtctgccctttcaaagctgtaataacagattgactagctgaagcaatgtaaaagttctgtagtgattttgttgcagcgagctttagagctaaacggatcgccaaagtttctgccaaaagcactgaaaggcagcctggaatgaattctgttgcagcagcaactaaagcacccaaatgatctagaatgatcacccctaaaccacatcctggttgcccatcaatgagagatgcatctgtattgatcatgaaagaacccaatgggggaggacaccatctaaccttgtcctttgaaagcttcgaaattgagtctttttgggcagaagcaaggtgtaactccaacatctccatggcccaaggaatccaaatgctatcttcaatgtccttattttgaaaaatacacatttattcctacggaaccaaattagccaagtaataccaataaagaatataaactcttctttagaaagcttccccttcatcaccattagaaagtctggggcatgccttaaggaagaagggaataggtgtatgaacccgaaatgcttccaaacattgtgtaacttggggcaattccataaagcatggcaaacatcctacacgtgactcttacaccggttacaagttatattcatggacatacctcgcttgattaactctgttttgaccggtagccaattgtggaacacacgccaaatgaagattttcattttaggagtaagtcgagaccccaaaacaaccttccaccaagctctattggctgaattatcagaacattctgcaatattacggtccctaaaccgcagcttgtaaccactagccacagtgtaatgaccattagtagtaaggctccaaccgattgtatcattcctctcttttgaaggagtaatccctaacacccaaggaatgtcttccttatgaaaccagctagcaatctcttcagttttccattccccttcatcggttattatagtctgaattgtcacttcagtaggaacttgaacctttgtacgaagagtaaaaggagctcctctagggatccaagggtcctcatttattctaactgatttgccattcccaataacccaatgatagcctttaagtagcaactctcttccccataataatcccctccaaatattagatccgaaatgacccaacttggcctcaaaaaaattgttgttggggaagtaaagagctttcaagaccctagctaaaagacaatcgggattggtcactattttccatccttgttttgccaaaagcgcttggttaaagtcctctaaagctctaaagcccatacccccattctctttgagtttacacattttttcccaacttccccaatgtattttatgagtctttgaattcgctccccaccaaaaccgagcaatcatgctttctatgtcatgaagaatgcctttagaaatacggaagcaactcatgacatagcaaggtaaagcttgaatcacggccttgattaagatctcctttcccgcttgagagaaaagccccattttccaaccttggagcttagcttccaccttatcacgaatctttccaaagacctcctttttattttttcctacaaatgtcggcatgcccaaatactttgtgtgattcttcacaaggtccaccccaagaaaggcagccaatgaatttgccatgtcatctttaatcttccctcccacacaaagatcagatttttctaaattaatagtctgacccgatatagaagcatagcaatccaaaacttgttttagagctttactttcctcgaagttggcattcaaaaagacaaggctatcgtccgaaaagaggaggtgggatagattatgctccatgctaccaaaacgcaacccatgtattttcccggctctctctgtctcatgcaataaacaagttaagccttcagaacataataaaaagagaaaaggtgaaagggggtcgccttgccataaccccctttcgggtgtaaaatgaccatgaattgaaccatttattaaaattgaaaatgacacagaacggacacagttcattaccttagagatccaagtctcatcatagccgaggcaagccatcatggtttccaagaagttccattccaccctatcgtaggcttttgacatgtcaagcttgagggtcattttttttccattgccaaatctcccttttctcatgcaatggagactttcgaaaccaagaatagcattttcatgtatgattcggccactaatgaaagcgctttgattagaggatattgcattattgagagtaggcttcattcggttagcgaggcatttcgacaccactttgtgcaccacattacataaactaatgggccggaattcagacattcttattggttgtttggtcttagggataaggcaaataatagtctcattaatgcttctacaatcggcttggttatttaggatatcaagacaggctgcagtaacttcattacccactaaatcccaatgtttttggaagaacaaacccggcagaccatcccttccaggagctttcaatggatgaatttggaacatggcagatttgacatcttgttcatcaaagggttcgagaagtaatctattctcctcactattgattcagttgggaacgcaaccaacaaggatatctcttagctcaactccgtggtttgactttgagaatagctttttaaagtaactaactgcaatttcagaaattttttccaaactagactaccaatgaagccgatcatcatagaggccctcaatagtgttttttcttcttctttgagaagctttgtagtggaaaaatttggtgtttctatccccgtgttttagccaaagtgcccgactcctttgcttccaatacatctcctttttttcttccacacaattgagatcattctccaacttcttcatggtaagccaatcggattgacattaagatttagacagccactcaatcttatcttttagctctttacttctcttgttgaggtcttgtttttgccttctattccacccatgaagcttctccccacagccttgtaagagaaatttgagatttgataaagggttggctgaaatggtattactccacaccttttagataatctcttgacactctttgttatccgcccacgcttgctcatagtgaaaccgagagcctcttgaacacctacccccatgaactaacttactgagttaagtcgttataaccaaaggcctatgatctgaatttctccaatccaatagtttaaccgagttcatcttgaatttatccatccatttcgagtaacaaaaaactctatcgagcttttcaaacaccaggttagctactcttccattgcaccaagtgaaacttcctccctcagaaggaatttccttcaagaaacagtccgaaatggctttcctgaacttatacattaggtaggtcgatttagcatttccccctttcttctcggaattctttgtaatctcattgaaatcgccaccaaaaacccaagcacctttatgttgggttttatgcccnnnataaaactctttacaatctgattagt

SEQ ID NO: 94757 - DNA, 536 bp, Cannabis sativa
aggagtcaaagctttctcatgtcattgtggaatcggatagccttataactgttcaagctttctggagctcggtgaatactgattctcctttcggttgttgcattgctgaatgcaagagaataattttagatttgaatcatgtttatttacgttttgttaaacgttctgctaatcgtgtggctcatggtcttgctcgagtctcatggttatatgctgagcgtagttattcggaggacatgactgttttgaataacattagtgatgtaattgcgcaagaattgttttaaataaagttatcaagcttttattcaaaaaaataaataaataattgttacacatcaaatcaaaagaaaacaagattggaacaaaaacttgatcatcatagtatttacacgtaagaaagattaaatgttatactaaaccacataggagcattaaacaagttttcaatatcaggttaagagttgcaaaatcatattttgtaatttattttgcaattaatgattaatatatagtggtgtttggtattatttttt

SEQ ID NO: 94758 - DNA, 800 bp, Cannabis sativa
ttcgtcttgggcccatatattttaagggccggccctgatcctaagtaatattatctaacatgtgtgacacattattgtagttcatacaattagttttagtaaccaagaatgttcaattctaactagtcattataattttattcgatactataattattttacatatataataatttaaaatgtaaaaaaaaaaaatagtcatgaaagatatactaagtaatataaattatatttcataactaattagtgatgaataaaataactcttgttataaatattttatggatacttgaatatctttttatggttttaagataatagctatttatgctcattaatcttaaattattaaagcataagtgactcatttatttaattattataaggataatatttgacatgtaattcttttgactcatttattattttaaaattatgataaatatatatatatatagtaattatgtaaaatgagtaatacattttttttttatgatttactcaaatcatattgtaaagtagtctggatattactaatacgtcatatataattataaaagatagtgtataaatttacatttttataatatattttagcgagtaacttgtgactcatttttataatttacttaaatcatattgtaaaattaaattaaatcattcagtcactgatacattatatatattcataaaagataatacattgcatatatataacgagtaattcacgattcatttacttacttaaatcatatcataaaattaaattgtattagtcaatcgctattacattatatata

SEQ ID NO: 94759 - DNA, 630 bp, Cannabis sativa
atttaattgggatttaattatgcaggaaatgataagtttgcccttgtatgtttgaaaatgtgggaattggccctaggggcattttggtcttttgacctttacttactatgtttgacaaaattgatttttgaggataaggaaaagagaattctggtttgctacccctctcactcgaaccctctctctctctaaccctctctaatttttaaaagttgattatggaaagagattacttgattttgacttgattgagcttggattcttggtgtatttgtgctcaatcctagcttgagatttgaggtaatcctttcaattgtgaatctagttgtatctactaaattttttgatagttagtaatgcatgattttggtgttgatgaagatgataagtataggttgcatgaggtgtggttcttttgctaatttaagtgaattttgcttgaatggtgtgtgggttgtttaagctctagatggaattctagggtttcttccttaagttgaattcaattgtttgatgatgattgttgctggaaaaatatttggataagttgaaattatgctcaagtttaaagagcttgagatttgtgagtttaactatgattttgagatgtttttgcaatctgaattttta

SEQ ID NO: 94760 - DNA, 589 bp, Cannabis sativa
  modified_base (288)..(294): a, c, t, g, unknown or other
ttaataagtaaatctaattatatataaatgggttttatttagggcacaaaacccaacagttaatgaaacatacttgttagtaaatctagatcctcataaaatatttccaacatatgtcaccttctgttagcccaatttcctggaattcaaattataaaagtatgataattaagcttccattgtctactagcactaaggaaactcttttgttggcaatcttggcttctatgaccaacgggtcgttgtgagggaaaggacatgtctagctgttggaatatattttaccannnnnnngatttactaacaagtatgtttatttacatgctaaatattaatttctaaaataatggaattcaaacacatataaagtttgagtaaccttaccttgattgtagtggaatataatgactcctcccactcaaatctctaacccttgttcctttctgtcacagagtattatcaagatctgggcccaattctctttcaggtgtttggattcttcttagtcttacacactatgattgagtattagacttgctatgggtgggcatgttgggaatattttgccaggatctagatttactaacaa

SEQ ID NO: 94761 - DNA, 641 bp, Cannabis sativa
ggcaattgtgtagtagacaaaagtttggtattctcttctctcttaacatgttcttgactaagaagaaggaaattgaaaaaaaaaaattgttgatggagttgtacagggagaggaatctcatcttgggaaccccttttagttccatcgaagtaagaagttaaacttcgaattcctttggaagaaactcttaagtcaagtggagggttggagaatgaaactcagctaaagattccattgccaatgaagctcaaactttgatttgtgatggggaagagtattgatgtatggtttcaaccgtagatttcatggcttgactacaaaagactttagagttttgatggaatatgtcatacatagggtcccttctatgcgaaccgtggctggcttaatttacttctcttcaaagaagtaggacactcaatttttgatttatgtttttggaaaggagttaggcgagaaaattagttaaattcttattatctcagagttgcaacatgatactttgatttggaagggatgtatgaatgaaaggtttttagccaagggaacaaagcaataggttttcagagaggaaagcaatgtggattctgatatggggcaggagtattcatcctagacttagcatgttcctttggagagca

SEQ ID NO: 94762 - DNA, 550 bp, Cannabis sativa
  modified_base (177)..(181): a, c, t, g, unknown or other
cttaaattctaagagtattaaaaaaataaaaagaaaaagataaataaaaataataaaaaaaaaaaagaactaaaacataatataaactatcatactaagtaaaagttaaataaagaatgaaataaaaattaaaggaaataaatttttttttatcaagaaatcatttttgataaggannnnnggataaaaccgcaaccttagagcatactttgaatttcttggaattttttttttaaaaatatatatatatttaacacaacataaaaaaaatattcacaagaaaataaaaaaaaaataattactaacctcttgattgtagatttcactaagcttttaaaaaaaaaaattacatccccggcaacagcgccaaaatttgatgtacgcctaaaatgtgacttccactagcgatagttgtagtatagatcgggcgctcgattccacaaggaggtgatcatggacaaaaacgttagtagaaaaatagaaacaaaaggttaataaatagtgataatagtaacaaatgattttgtgatttttgatttgataataaata

SEQ ID NO: 94763 - DNA, 893 bp, Cannabis sativa
cacattgagtaactctaaaactatatagtgacaattcaacgcgtgtcactaatgatggtgactagaaagacaattttttgtgacacttcacacgcacccttttacattcattttctgtgcgtcactataggtgtatagagtcaggttttgtcagactgaaaaggtaacagccacacgcatgaagtgtcactatatcttttttttttcttttttctttactctttattattatttttagaggtatagtgacacacaaaaagtaccactacattaaaaaaaattctaaaaaaaataatataattttctcaaaataatttttataatttatttttaaaaaattaataatttttttaattaggaagtaatatcatatttttatattttttttatttattctaaaccaaaacaatacactatattttacaaatactatattttaataatactagttttctaagttatatctaaaaaaacatattcaggtgattgtattatttttttttattttgatattaaaagtgaaaataggagtgaaattttttaaaaatcattttaataatttattcttagtttaataaattgtacaacaaattaaaaaaattataatttatatttttacaagttaatctatacattggtaaaattaaataaaattgttaagtataagtcaatataaaatattttacaaataaattacaggtccaaaatgtacaaatatattcaataatttctagatctatacaaaaaaccaacaaaaacattaatctggaaaaacacaaatctaaaaactagttgagcaagtgaaaaacacaacatagactaatcaaagaagagaaaataaaatcaaccagcagcacattaactaaaatatcgaaaccaaactcaagcccagt

SEQ ID NO: 94764 - DNA, 3689 bp, Cannabis sativa
  modified_base (3493)..(3499): a, c, t, g, unknown or other
aatgggctggggcagtaaaaaagttgtttttgccgtgtcccagtatttttgtaaagttttggtccaaaaacagtatatatgtaaatttcccaatataattagagtattatttactacattaaaagggctaagatgaaaactaacaatattaacaatattacacgaagtcttaatatccctaagaactagacccacaagagtaacaaaatggagatattgagcttaagtattaaacttctacaataagattcaataggaatattgttgctccaaaaaggttgcattagtaattacatatgaattgttaatagtcttgacaaatagttattaattatacatacaaataatatttttaataattattatttatgataaaaaaaaattaataattatactcattttttattggggttatgagaattagaaagtataatttaaacctctcaattgcatctaattacacaattattgtataattatatagtcaaacaaacatatcaaattatataattacctttaattaaacaaaaatccaattccactttaatttttcaaatgcttaagtaaatttgtaagtaatttatgattagatcctccgagttaacaaagattctcttggaattattagagatttaatgcgagtagaaaaaataataatgagttaaagtagattaagatgttcaacatcttaagaaataatttgtactcttaattgcagataaatatctaagtggtaataactcgaattatattttcgaacttctataaatattcggtgtaattctatgattgaattcaatgtgtaagcagttgagttgaccatgttatattcatggttgtaaggcttctaagccaatgaagtagtattaaactttcagttcatataagaaaaaagaactatgagcttgaataaccaacaaggtccaacatcactgatgtaaaaaatctgaatttaattacacagaactgccttaaaatcaaatttctggttccacctttagctatatgttccaccaccagaaagagatgttttcaactaatttagtctaaaaccattcaccagaaatccttacatgaacattttccatttctaaagtggtgatatcgaacgcggtctctaacaactatgtctcggttatatatctgcgaaatgagcttggtagcagaatggcagtcctcacagaccctcaagtttttcactattcttattgttgttccaggagttgtgttaaggagaccaaaagccatggcaagcttttcactgtggtactgaagctcagtttctttctcttcttctgagatatcaaacaaaacttgggtagtatttggcgaataaccttcgattcgaagcttctctatgatcttttccaacatcaagtaaatgtccttcatttgtgggtgagacccatcacccattttgaattcatgaactgtaccatccaagtcaatcatgctaattccaggaatagtctttatacctctttgcttcatcaattttctcacattttcaacatctttccattttcctgtctgtgcatagatatttgacaataatgcataccgaccactgttatgtggctctagttcaagcaacattttcccaattctctcacccaattcaacatctccatgtatcttgcaagcacctaatagcgccccgaaaacagctgcattcggtctcatgggcattgagcttattaagtcctctgcatctgcaagtaaccctgctctacccaaaagatcaacaatgcacccataatgctctacttctggttcaaaaccatacaatcttttcatagagctgaaaatcctaatacctttatctaccaagcctgcatgagcacaagtgtttaaaatgttcactaatgtaatcttatctggtttaaactttttccactgcatcttagagaatagctcaaaggcatcatctgccctaccatgcatagcaagcccaccaatcatggcattccaagtaaaagtttctttgtgtttcatcttttcgaaaacatcccatgccaaatcaagccggccacatttagcatacatatccaacagggcagtccctaatacagcatccaaccgaattgaattcctttcgacataagcatgaatccaccttccttgatcaaatgctccaacattggcacaagcagctaacacactcgataacataaactttcccggcttaatttcctctctttgcatcaaatagaaaacttccaaggcttccttgaaatacccttcttttacataaccatcaataatagctgtccaagatatttcatctctctcactcattccatcaaaaaactcccttgcagcatctaccatcccacacctagcaaaaccacttatcattgcattccaagaaccaacatttcttcttggcattgcctcaaacgcttccttagccgcttcaacattaccaaatttcaaacaaccatcaatcattgcattccaacagataacatccgaatccccagcctcatgaagcatccgccgagcctcatccacatatccaaaagaggcatacatctgaatcccggcactctttacgtgcccatcactgctaaactgatgtttcacaacatgggcatggacttgaacaccttctttcgccgcctgcaccaaattgcaggccttgaaaaccgcaggaaaggtgaacttattaggcctacaattcgcggccaccatttgacagtacaacaacacaaccaacaatggctcattgttctgaagacaccctttaatcaaaatattccacaagaaaacatttggctttggcacttgatcgaacaccttgagtgcaatgtctaagttcttgaaataaggatttacatagcatttcaccaaggttcctgctacgtaatggtcctgaaaatggcctgattttaaaactagagcatgggcttgccttaagtgatgtaaagaatttatacattttgtgtttaagatagataagattgttttctgagaaagatgggatgtgggcgtggaggtttctgtactgaagccctctggtttgaactgataaggaagatttgtggtggtggtggtggcagttatggtgcttaggctcatcttgttttttctttcaactactaatataattgaaatatttgtattatccagacataaatattagagaactaggtgtcgtttttttttttaggaaaattcaacaatgcacccctttaaaatgagtatattgatacacccttatctgttttagcatccgaaataattttttggtcaaattttttcttatagtcatgtacgttatagttatttaagacatcatgcaaaattttaagaaattcgaaaaaatttaacatgccgaaaactacgttcaaatagcgtattgcactcgtgactattttattttatacgcatgtaaaatagactgtttgaacattgttttctatattataaattattccgaatttttcgaaattttgtaggatatcttaaatagatataacgtacatgaatnnnnnnnaaattagactaaaaaattcttctaaatgccgaaacaagttaagggtgcatcagtacatccattttaaaagtgtgcattatagaatcaccccgttttttagggtgattctacaatgcacccccttaaaatggatgtattgatgcaccctctacttgtttcggcatccagaaaaattttttagtctaatttt

SEQ ID NO: 94765 - DNA, 818 bp, Cannabis sativa
agtgtcagcaccaaccatcttctgtcgcacgcctcgctaatggaatagataaaattatgtccacatccattggtaaaaaatctgttgaagcttccccacatcctaagtaccagatggaagaataaattcactcacatgacaatcatcatttgtcctcctcgtgattggctgaaacgacattggacgcgggagccatggctccttgaaagccctaacttttgttccattgccaatggacctccaaagcccgcatttaagtagctccaatccccatatcaaactcgaccaaagatggaagaaccaaccttttctgtggcctcaaggataaagcaatttaggaaatatttatgtttcaaaattcgagcaggcaatgaatttggatatagaaataacctccatacttacttagccaaaatagcttgattaaagagttgaaaatcccaaaatccaagcacactcatcgccttaggctaacataatgcttcccatttcacccaaggaatcttcctttgatcaccagatgaaccctacaagaattgtctcacaatagtctttaattttttacaagttattgctaggagcttaaagaactcatcatataagttggaatatcttgaagaatagattcggtaagtacttctcgcctgccagctgaagagaaattctgctttcctccctggacacatttcctaacattcttacagataccctcaaatacccgctttttatttctaccaatcaccgtaggtaatctagtacttgtcatgagtagcaactgatgtcaaccccaatactctcaaaaccccatcttggtccac

SEQ ID NO: 94766 - DNA, 574 bp, Cannabis sativa
taaagtgctagtgcaagtgttccttcttagatcacaaaaatcaaaaagaaaagaaaaacatcattaattacaaaaatctctctggaagtaggacgctggatctggaagagattttctagttgattgaaggaaaccctctgaaagtgggactctgccccaagtgtggtattctttcagtggctaaactcttcctaagtatgggattctgtacttagcatggatttaatccaatctctattttttctttttcctcccttggagtttttcctttaacaaggttctacgagttgaaatcatcaaaccaggctcttcaaaaacatgtgattttgcccctatatagaatattttgcaagttttctgcactactcatcgacagtgattcatctcacttatgatcataaagtgagctcatgcttgagcaccaatcacacaagaaataacccactacaccgaagtagtggtctatctcagtcataacagataccttcagccaggggcggagccaggataaaaaattagggggggccaaactatattacaaatttaggtgataaatattttagaaatactttat

SEQ ID NO: 94767 - DNA, 613 bp, Cannabis sativa
atataaattatatgatttataaataaaaatatataaatatacataaaaaaaaaatcctcttaatcgggttggttgcgttagttcgggttgattgggcaggttggtattattttcaacccgcccaatttaaagattgggcaggttatattttcgtcaggttttttggtttgcatttttcgtcgggttatcgcggtttaatttgggcgagttattcagattgggcggtttataaaaatttatatacaaaccctataatgtaagggagtctacttcttcctttggtattagtagcgagcattggattttacctattgaaaatatgattaagatcaatgtggatgcttgtgttgttagtaggactaatagttttgggattggttgggtagcgcgtaataatgaaggaaatgtcattgaagttagggctaaacatcaggcgggttgatcgggtttcgggttaaaaaaattatacccgaacccgactcgtgaaatggtttgggttcgcaggtttcgggctcaggggtttgcaggtttgcgggttcgggttcaacccagtcaacccattaattttttttaaaaaaataaaataaatttttatgtggttttttctatatat

SEQ ID NO: 94768 - DNA, 515 bp, Cannabis sativa
aaaaaaaaaagaaaaacaaacttttgaaacaccattttctgcgtacaccataatttttgctcgtatttcttttaaatcttctagttttctaacccataacacatatacactatatataaaaattaatttattttaggatatgcgattttttcagggtttttagagaacgacggtcggctaatggcgacaattttaaggcttttgacattgtcttttaacttgcattgaggtatacatcactttaatttatgccttttaagcttatattacatcttttagggtgtatgatttagggtttggatatcgtggtggtggttgggaaatccactgtaatttttgaaaaattaatgatggtgctcaaaaatatggtagttttaaacagtggtgattaaaaaaataatattgtacatttaaggatttttattttaggatttcgtaagtttgggactcgacggtggtgttaagggtggcctcaatttagggtataaatatcatttttttaaataaaagaaata

SEQ ID NO: 94769 - DNA, 4088 bp, Cannabis sativa
  modified_base (3774)..(3778): a, c, t, g, unknown or other
gggtactaaggcatatcacacggacaaatgtaaatagatcaaatttaaggaagttaaaaactatataattcgaacatagtgtaaattgttcaaacaaaaagaaaaccttaaaaagaaaaaaagcttgggaacgggccataaatgtctccccttaagaaaaaaaaaaagagataaattgtcttaaagtggggggaaggactgaatatgtaaaaaaaatgatgataatggtgataacaaaggagataaacaagtgattcaattagcccaaggtggaagacgaggacccctgcgctcctctagcactgcaaccagcctcttcttcttctcccagaagcgagcaagaacttcttcaggcttgggataacagttgaggctaaggttctgaccattggtttgccagaccatgaagaccccgtcatcaaagcgcttcttatagtgttggcaagtgactggagccaggagagcatctctcttcgccttggtcacctccttctgagcctcctctttgaatatactaagcccctttacttcaaaagttaggttggttgtcgtttgcaaattcgcttggtgcagctcttccacagacttcaacttggcagtcaattcctacactgcctccttagaatcccgcagctcccgcctcgctgtggccacggccgcatccctggccttcaacgcctcatccttggcctttaaagcctcatccttagccctcgccgcctcctagtggctccgctcagtaagggtcgctttctgttgggcttcctcctggatagctcttttctatgcctccaagtctcgaagactcttcatggcctcctccatgcccccaaattcggacatggtgtacccatgatcaatgagagtcttcaaaaggcgaccagtctccgcagcaatctgacaacataaaagaaaaaatatatgcataaggaatacatgatgtcgggcaccaaaaagaaaagaagcctgcaggtaccgctaaataggtagaaacttaccgcgatcatggcagcactcacgtcttcgatttggtagacaggattagtagaagcacaggccgcgtatctcttcatgggaagctggaccaggccggcggcaaaatggctcattaattctgaagcgaagggagccagggtggatccaatgaagcgattgaaccagtcagtcaagggatccaaatttagatcccaaacgttcccgacatactcactgcaagtaaaactttcctgggcctccctcaagatcttcttcaaggcttcaaactcagcgttccccttggtgtactccgccgtggcataattatgcttggcgatccggagttgggttctttcctcatcagcgagaatgggtgttaggacaatactcggaggaacagtatactcatccacctcgaacgggatctctgaatcatagctgggagccgaagtgtctactctccagggcttcttggccacctgagtctccaccattttccccttgcacttcaagtctaaaggagggagaatttcaccttcctcttgttctacctcctcgtcctcgttgattaaaatgacttggtctaagagaaggctggaagaagacctcctgggagtcaccatcgggtcttgggcctgaggcagagctgggtcaggactgtaggtttgggcgagagcatccaggagctcatccattagcttcgctgcttaaagacacaaatagattaaagcattagaatattatcgagaagtcatgcatgcaagaacaaagcagtaaaactaatcttacgttgacgatctaattctaccctagcaaaatcatgcattaaaaggctagtgtcgtcgtccccaagaaagcagtccgaggggaggacccaactagaagataaataggctgaatgatccaaagggataggtgcgggaggaccggaccccatccgggaccggcctaaaaagagacctaggttggaaaaataaaaacccttggcatgatcaccccatcaaaaagggggcatcctaaacctatggagacgttcatcaaactctattggcctatagctagaataatcttgaacagaaggaatgtgatgaacattagtggggacttaccagatctggaggtactggcatcaggagccctagtgttgggaactgggaacaaaagcttcggccgacaggtcgcctgctctttaccggctttaatctgaagaaccctctcggcggcggcttgggctttgatgtaagccaattcttgttccctcctgaagaggtgcttcttataccggtcctccgtggaagcaatgatgtctgctcgaagctccttctcggagtcgggattgtgaacgttgggacaaagaaccttgggcagattgaaatcatccactgactggctttctgtgatcaactttgccctcctgcagtgtgcagttgtgaccaagtccccaacattaaacccctccttgtcgtacgtggaaaagaccttggcgtgttgaaggaaaagttgtgtgggggtggtgcagtgcatcggcggtaccctgacccactcggtaagtagctccgggcgcttgatggcttggaagccgcacaagaagaaaaatcggtgatagtattccttaacattttttttggaagttagaaggaaccggaccctcattagcaggatgggcttggagtgtgaaaaaattgtctttaagtttatctcccttcttggggacagatacaagttcgtaaaaatataaaatttcagccgggctagaataagcccagcctctggcaacataaaaaataaataagtctgaaagcaggcaatatgcttgggggataagttggtaaggcgcaatgccaacgaaaactaagaaattgatgaagtaatcctgaagcggaagcattgccccagacatgagatgaggctggctccaagctccgaagccaccgtagttagagttaggcgtctcctcatctctaggaagacggtgaaagacttcggaagcaaaaggcttgatcccggccacagtgacgatcttctccagttggtgggcgcatgttagagttgaacgcaactcatcaacctcccagccggtagatcggcaagtatatttctctcttcttccagggtggccagagtgttagattttttgctcgaggatttcgctccggtagtagggacagacatgtcttgagattagtaagattctcaaaaaagagaaatccaacagttagcccccaaaccaaaccctagcataaaaggagggaatgggggtcccctaaccgctggaaagaggcccctctggatgtctgccagaaatgaaaaatccaaggattctcctaggcaaacattggaagcaaatatcccaaaggtagcgaaagcaggagaaaaagatcaaaaaaagagagaaggacttaagtataaaaaccatttcatactctcaacaatctcaaagcaaaataggttgtctggtcaaataaaaagtagagcacagacgaaaaagatacgcagtacgacggtcttcaccaaaatcatctcatcatagaaatcaaatgcaactaaaaactttaccaaaaactctgtcctaacatacaagtgaacaagtaaagtaaaatgtacccaggaaaacttacgtaaaggtcaagaactgggaagtgataatgattgacagtaaagtacaaactggcagcgacgaagaaacagcaataagaaatctatggtgtctggaattttctcagaggttcttaggttgaaatggcgaaatagtgaaagtaacccaatgtcgaaacaatgctggcttttatagaccagaannnnngcaaggcagctgtgatcagacaccatcatacggtgagaatcgaaattgattcgcattctacgaatccaacaggtgagattaatgggtgtcagggcagttgaaaatgtttgagtactattctgacactcgaattaaatgcgccagtttttcaatggacgggaagcaaatcgttgcctgcaaaaggaaattgatattaatgatggccatcataaatgcagcccacgcgcctaaggcccgtgccgttatatcaccaagctaaccagaggcatcaagcaagcctcacttacccttcactaaatgaggcttgggg

SEQ ID NO: 94770 - DNA, 802 bp, Cannabis sativa
tttggagatcgaaattaggcgcagtttgaatgaagccagagctaaaaaagcactttactggaagcaacgggctagaatttcttggcttaaggaaggtgataaatgctccaaatttttcttcctctctgccgccataagaggaagaaggaatgccattgaatgtattctggataaaaataatgaatggattaatgagagaaaattgatcggccaggaattcatggatttttttagcagcatcttttctggttctgactgcaacaggcagatcgattgtgatcatttgtttaaagagaggatttcttctgagcatcaagctgctgttgtttgctgcccgtcccgtgaagagatcagaagaaccctgttcgccatgaacaatcataaggcccctggccctgatggaatgtccgtgcttttcttcaaacactactgggattctgttggtgaagacttttgtgatgcagtggaagactttttcgtcaatggcagaatgcataagggtgtaaacgcgacgaatgttgttctcatccctaaaatgcagaacccgaagagaccgaatcactttagacccatctctctttgcaatgtgctttataaggttatttcaaagatcatcgcaaacagactaaaacctatccttccaactcttatttgtccaactcaagctgcgtttgttcctggtaggaatatccaagataacaatggtctggttcaagaaattattcattccttcaacaagaagaaaggtaaagaaggcttttttgctatcaagatcgaccttgttaaagcctacgatagggtg

SEQ ID NO: 94771 - DNA, 567 bp, Cannabis sativa
tttttttttttttttttatgatacaaattattttttaagattaaacaaaatgttgaatttttctcatttttatttagaagtgggtacaatgtgatagttgttaaaatttaaggagaaaaattgttaatatacaaagatatgtctgcatttaaataaaataatgagatgcaacttaacacaacaactgcatttctataaatgtaaaagtttagggaaaacttttaacaagtcgtatatttttggagcaccataaggtagtgttgaaagttcacagaaaaaaaattactaattattcttcttttaaatttaaacatgcggccataatttcctataaattggagactcatttagatatttttacaagtcattcattctaatcactagactttctctctaaaattatggttctcaaacattagactctacactccaagtctactcttgtaaagcatttggcttcgtgataataaaagctcaactgaacgtacctctattaccaacttacagggaataagtgaaaaacaataaatctgatttccattgtctctacttagcactcatttcttt

SEQ ID NO: 94772 - DNA, 843 bp, Cannabis sativa
ttagggcataaaatccaacaagttaaaccaggtatgaatgaaaatgaattgcctaggtacaaggcaaggttggttgcaaaaggttttagtcaaaaagaatgaatagatttcaataaaatctttgctcctgcagtaaaatataaaaccattagaatcatgttatctcttgtatttgatctagaattattagaacaaatagatgttaccactgctttcttaaatggtaacttggaggagacaatatacatggagcaaccagagagatttgaagttaagaagggtcaggattaggtttgtttactcaaaaagtcactgtatgcattgaagcaggctccaagacagtagaataaaaagttttgactccttcatgatttcacaaggatttgtaaaaagcatgcatgacacatgcttgtattacaagggtacaagaattgaacaagctgaatatctactcttatatgttgatgatatgctattgatcaacaaggacaaaagaaaaattgatgagttgaaaaaggttttaagttcagaatttgacatgaaagacttaggggctgctaaaaggattcttggaatcaatataaaaagaaacaaagaaggataagaattatgcttatgtcaaaatgagtatcagaataagctcattgataagtttgggattagaggtgcaaaaccagcaacaatacctttatttggacagttcaagtcacatcaaaacagagacctaaaacagaaaaagagaagaaagaaatggagaaaattctctactctaatgcaataggtgttgggattaattttactaggatcttagatctactcccaagtatgttgatttaacaacct

SEQ ID NO: 94773 - DNA, 3827 bp, Cannabis sativa
cattaacattgcgtctaacataaggaagagatgcaccgaaaaattagaccataaaacttatataaaccagaattagtagataatctgatttttatattatagatctcattcttacatattttttttttttggtagaattagtagataatcttgaccactataaaccagctgtaaggatttgagctggatttccttaatataatttcgccaaatcataatataatctaatactagtaatcattttctagggagcggccttattaatctattatttaagtaggaatttgagggaatttgaacccttgatgacatcctttattcttgcacaaataactccctaaacatgattttccttttctttttcttgcacaaaaaacatgtctaatgaaatcatgatataatattttaattttaaattaaaacataacgaaaaatttaaatttattgcataatcgtattggttgtttggtcatatattgccatcacattaataccattaaaacacaaaataataaattaaatattaaaatgaaaaaaaaaacattgttaataaagaaagaaatagataggaaaagttagagagagagattttttttttgaaatggagagagagagattgagtgaataaaaaaggtgtgtactgtgtaattagtggggtaaaatttgtgagggattttcagttttagagattttgagttacagtcaaactgtatatcatatttatatgattgcagctggcaagagctggctctcataagactaaaccccaatccactccatttctctctgtctctcttaggtgtctccttctctctctctctctctctctctatcctagttctcaggtcctttttctttttcttcttctctttgtcccaatgtgcctggttttaaagaacaagtgtttcaattcaaattagggttttatagtctcataggtgaacaaatccaaaagcgatcagtggaaaaaaagaaaagaaatgagtgcttcaaggttcattaagtgtgtcacggtgggtgatggtgccgtcggcaagacttgcatgcttatctcttataccagcaacactttccctacggtaaagaaaacaagactaatttttcttctcctgtttctttattgggttctgtttgtatcccgggaaaaagtggaaatgtgagagataaaagaaagaaagaaatgttggggttttgctttcttaagtttttctggagatgggtttctcagtttggattggttttatgaggtttagtgttttgtgcttgtggattcttttcttggttttcatgtgtaattttctctctcgtgtttttcatcttccattcatgtttgttgctttcattttttcggtgctatgtctttctatctttttcatgtttcgatttgttgctaaatttggtgtgagtgaatgcatcaatgtgttttgctgggccacttttcaagtgttgggattttactcttgtccctctaccgagtgaaggactcaaggacttttaatgtaccgagtaaagcatttttgttttagacataacaaaaggaacacaactttctatcaaatcaaaacctgtaaagctatttatgtcctttgcagctgcagggtgtgaagtgaattcttgttgttttgcttaacctaagtaaattagtgttgagactgtaagtatttatatgtattaatacttgctcagtcacttaattgtgtctgatcattcattctcaaacacaaaatggtttgtatttagacattaggacagaactttcttcttctttttcttgtgtattgtttcgtttcactccttctgtgccttgtagaaaatcctaatttgttgttgttgtgaaaaaggttttgcaatataactatctttacttttctcctgataatgatatgttttgaaacaggattatgtgccaaccgtgtttgataatttcagcgcaaatgtggttgtggatgggagcactgttaatttgggactgtgggacactgctggtaagcttagaactgttactccctgctatatagtgttccactgcttcatcatttggagtctgatgatttagaattataaaacagggcaggaagactataacagattaagacctttgagctaccgaggtgcagatgttttcctgcttgctttctctcttataagcaaggccagctatgaaaatgttgccaagaaagtgagatttccatatggattttttttttgtcttgtaacatatgattttatgatgtattaattatattttccccctgttttatattgtagtggattcctgaattgaggcattatgcacctggtgtacccataattcttgttgggactaagcttggttagattctccactccttttcttttcccttctttatcaggttatatttgtatgtgctttttaattgtttcatactgtactagttaccgtttctcatatgagagatgctctcttagattaggtttctgcctccctatggttgattgtgtcaaatagtcctttacaatttgatttatactaaaaaaatcttatggtaggttaatgggcatcacttcttgtaaacttttacctatttgtttggacataatcagattcaagtttgaatataatataagcgtattcgtttgtatccaaaagcaggggtttgtggtctttcacacaaccttttttgtgaaacttgcatgcttgaaattctagtgtttgtaataagaatgatataaagatgaagtctttgcaattcttggtttgcgtgatgccaatatcagtgttgggccacagttggtgttaatttctctcagttcatctctaagttaatatgccctgatatggaatccatatcaattacttcttaagttagtttgtcacttttatacatctctccttcttctattccacaaaacaatgttgactgttagttttaatgggagacttttttgcttattctagatcttcgggatgacaagcagttctttgttgatcaccctggagccgtgcccattaccacagcccaggtaacatccagtggattttcagttcataactttgacctcagtttaattttcttttctactcaactgtttagaggggggaaaggagtacctgatttttttttcttcttgttttgtttttctcttgtagggggaggaactgaggaagctgataggtgccccggtttacattgagtgtagctcaaaaacacagcaggtacattaagagtcctattcaccattaaagtggtaaattggcatagttctttgttgaagggatttatgtaatgtttgctttttgactgcagaatgtaaaagcagtattcgatgcggccatcaaagttgttctccagccacctaaacagaagaagaagaagagaaagacacagaaggcttgctccatattgtgattatgaaaaaagtgactgtatgttgggaggaaagtggtgaccagttaaccctttaaaccgattatagtctttctcggtcagtattgcatctcataaatttttctcacctgtcgaatgcgacgatctgtggctcacagttttcaacaggcagaactaggaaaactctctttaatgcaaccaaatgttcacatcatctgatttgtatattaatgaatcaaaattgtgttggttctttttgggggttatagatattcctaatatatcttaccctctatgaaatactgaacttttttcctagcgtaggcaaacttatagtcatgttctgtaacctcatttttagtacacttacaactcttaaggatcctttttctcttatgttatgattatggatatctcatgtttgaagcaccttagctaatatcaattacacaataagtt

SEQ ID NO: 94774 - DNA, 714 bp, Cannabis sativa
tttttttttttttaattatgaaaaatataaatatttttataaatataaaaaaatgaaaaaacaaaattataaagtacgaattaaaatttatgaatttgatttttttttatttatactaatacgaactattgttttcataaaaccaaaccaatatactatgttgtttttatgtcagtttacaactgtacatttacatgtaatttttatactgttttcattaagctccataagaatatcattctaaaaataactaaacatgatttctcaaaatataacaataaaaaaaaaatcattttaggcactttattaaaaatttatttacaaagtatctaaaatgattattttttttactgaaaatatatttttttcacacttttaggtactataacttattttttttatggattttatttataactagaatgtttacggaaaaacacttaaaaaacaatatagtacaaatgtgaaagcaaccaacaaaaatgtaaaaaatattattttcataacatgcaaacaacaaaaataatattgttgagtgctgtaattaattaatttcttatcaacgctattagtaactaaaaaattactttaaataatataagaaaataaaaaaaaaaataaaaacaaaaacaaaaacatcataaacatcaaatttagctgacgtggcatgtaagtaaacgtagtaatttcattattgtaaattaaatgcaaata

SEQ ID NO: 94775 - DNA, 703 bp, Cannabis sativa
  modified_base (353)..(369): a, c, t, g, unknown or other
tggattgttcttattgctggttcaatctgttgtgaaagataatctgaagaagtggaatcactttctctatccttttcaactgagcctgaagtagtaggtttataagaggaatcattctcaatatcttcaactttcttttcacccttatcggcattactggagaaggacttccatgcaagtgacaatgtttgttcttaagtacgcaattcagcgtccaacttttctatgtcagacgagttccaattgttaacaacaaattggttaaactcatgtgataagctgttgagaacaaaatgaactccttactctctatataaaacaattcccagcatagctgctttctggaatttcannnnnnnnnnnnnnnnntgtgaagtgatactctgaccaggagtcatcttcacactttggagttcattcttaagggcatatactagatgaggattggggtgtgggttgtacattttgacactacaaatatcaataaataaaaataagttattggttcaattaaattcatacacaagttcagaaaataacaagtaaagcaaatatgtttgtaaaaatacaaaaaattcaacatactaattaatttccaaggtttctaacatagtgaaatatagtgtctcgataggcgagagtcaaagataatattagttgaatagagtagtcagctcatctaaaatagacaccattctagcaa

SEQ ID NO: 94776 - DNA, 751 bp, Cannabis sativa
agagtttgtcagtgtctttctcaatgaaaaacaggcaagtttttaatacttctccaacaattttttctgttttaatgtggcattgtgcccatcttgaaatttttatcttccatagtattgaattataaagtttgacagaatctaaaattggtgaaacaacaggctgatgtggtgttagaaaagagattttcatgggtttattataattgtttttccaagtacacagacttaacatctgtttgatgtatttacatatgtttctgcatgtgcacttataacaagggaaagacatagacaagtgacctctgtctttttttgtttgttaaaagacggtaaaagagaaaggtacagagaaacaagtgtttatgagaaggatatttcattcagcatttttgaaagtctacactacatagttgattctataaagatggaaagttctatagaaagctatgaaaaaacttccgaaaaaacctggtcataatttcctagaagaaataagtttgaatgatataatatatcattttaattttacttgagcctagcaaatgtttccattatttataaccttcaagcatacattttatattaagagctgttgttttttatcctgtgtggggctataattttatgttttgtttatgtttgctacggtattcctccaccataagtgaggctcttaataaatttgatgggggggcagtctaggacagtggcctctttctctttgttaaataatattcttatattaaga

SEQ ID NO: 94777 - DNA, 742 bp, Cannabis sativa
ggttagctcaagtagccataggggcttgggaggatatgtgtgtggagggtgctgagatcgaatctcaagttgtgcaatgtaaggtatataattaatgcttcaataaaaaaaatattcaaaataatcaaagatgagtatgttatagtgttgtaaatatgagttgtgttttttgccatggtacgagcacgaccagacacaaaaaaatatgagtttgagcataacacgacacaatgctataaattagcacgacacaatctataaattggcatgacacaacacgaaaaatatgttcttaatcttaagtacaacacagttgaaaaacttaaaaggcatgacacgtaagtaagaatagactagcgcgaaatgccacaatataaaacattaaaaaaccttgtaatttaattattataataataatatgtatatttgttcgaatgctaaaaggtaactaaagtaagagatttataagaaaaacgtcatggtcactacaccacacactcggcgataaagttatcaatatttgaaagcttaattttggcaaaaataaattacaccaaattggtgagttttgtcattaaaaataaattaaaaagaatataagtacaacaaactaaaatattagtgcatgttttgcatcatagctaaaaactgttttttgtttttaaaaacagaaaattattttttgaaaacaatttggcttgtttggccttgttttttaaaaacagatttcagaaaacaaagt

SEQ ID NO: 94778 - DNA, 510 bp, Cannabis sativa
gagcatctgattttgttggcacaaaacatgctttattccattttccaattccagcttccattattttacgctcctacattacattcaacaacaagcaatattagttaagaatatcatttttttctcatattggtagcaacatttctatttttcatataatttcatgtgttggccgatacaataaatatgtatagtttaatctatgtatttttgcaatttcgtgttacaataaatatgtatagtttgatatttatgtctccctaaattttagaattgagtatgttaattgtagatatatatattttgacatttataccctaaatttatatattttacttttctacattcttgtaaataaaatttttggatcccctactcatttcttgcacactaagttactagtattatacatgaatatatataaaataaatttttacacatacttaaaatgacatatattttttactatttttgtttttttttacgtattagtaattagaaaacaatata

SEQ ID NO: 94779 - DNA, 861 bp, Cannabis sativa
tacatcattacgcaccttccacaatgcccaaagagtcatggccgcttcaatactctcaacctcattccatttcgacaaaccttcctcaaaccagctcctaaaaagcattgcagaaggagctacaatcggcaccttagcctgctgccagcataacttcgcgaaattacaccgcaccagcacatggagagcggtctcaggagcagccgaacaaaagggacacaggctatcaacttgcacatgtcttaaagccaagagaaatctcgttggaaggcagttcgcactcacccgccagaggaaattaagtacctttgggggtaccttgagattccacaatctcttccacatatcagtagatacattaagattgatatgtccatgagcctgttgttgatgcctataggcgctcttcaccgaaaacatgcccttgctatccttcacccagtaccaaacatcttccctaccagctgttgtaagaggaatacgccacaccagctcttgatctcgatcatttagcacttctgaaatgacttcatgatcccattcaagtttatcaatttgcatcagcacatttaccatcttcccttgaaggctcgggctagaggtttcgatatacgggttaacatcatccataagccaaggctcatgaagtatactaacccgagacccatcaccaatcaaacgcctgacaccagcacgaaccaatccttgagcctccaacacactacgccaaatgtaactcgggttactacctaatgcagcagtaagaaagttaccagaggagaagtacctagctttaaagacttttgtagctagagtatcctcacaagacaacagcctccacccttgtttggcaagtaagga

SEQ ID NO: 94780 - DNA, 574 bp, Cannabis sativa
actaatttccaccaacccatcaactgtacatttttcacaatatcactataaaaaaaaatattatttttaatcacaacaaatttattataattaaaagtaaaaaaaattataattaattatacatcatcatttttatattaatgtaactaaaaaatttgtggctaaacaagcatattaatcacaaaaattataatttattgtgactaaatatatttttaattataatagttgttgtaaataaaactaaattagaaacaacttgtatctaattaaatactatgctgtaatcacaaataactttttgttatgatttaaagttacatttagttacaaaaaatttatattgtaactcaaaacttataatcacttcaaaattatttttttacagtgatatataaatataatgtgtgcactatatttataatatagagcattgctaatgtatgtatatatgaatgaacttttagtagacttgcatccaattatgagtgctggtgatgagattgagagaaagctaaagaaaaaatcatcaatattcaacttctttatataataagttaaaactaattgatat

SEQ ID NO: 94781 - DNA, 727 bp, Cannabis sativa
acatagttactaatactccaaacagaaatagttccctttagcgtgttgatcaccgtctcagaatcactctctattatcacaaacaaatgcttcccacgggtcgctgatcctagggctaacaaacaggccacaacttctccaatgagaggattagagaagttgagaatgttgctagccacccacaaaatagactccttatcgatctctcggcaatgtcaccacacattgagtcactaccgaccataacgtcacagttaattttgacacaatcgtccgtcgaggggaccaaacaggaggcgtaaacatcaccagcgtttgaaaaaatactccaccaaaggactttgtggcattctaagattctagaatttcaaagtttattccaaagagcgggagcaacaatggtgaaggtgctcttgtcaaggcctgagcaagacatgcagttgagcatggaaacattccaattcccactgctactttctcccaacccttggagcacccgtttataggatggagatgaaagtcttgacaatgaatcacccatggatcatcccaaatgtttgtatctttcccatttgatatgagcttacaggctcctttaagaatttctttagacttcacaatattcttttagaaccacgaatctaaattcttgtacgaacacttcaagaaaggtctaccttgtgacagtcagtagtcccgtgattcgtaaggagaaataccgggtaag

SEQ ID NO: 94782 - DNA, 620 bp, Cannabis sativa
attgagagccttcgtgaaaaaagctcagggaaaaccctcctttttttgaagaaaaaccatctccttcatggctgagaacctagaagatgttaatacaccacatgaggaaactcatcaccgttcagggaaagatcccatgggcaccaggaggtctttcgatccaaagtccagacgaacaacccactctaggaggactcaacctcagggtggccctagcactcggacaactcattcccggaggacccaacctgacgttggtctcagtacgcaaacaacacgcttgaggagaactcaacgtgagaatggccaaaatcctagaactagggatgaggggcccattcgtggaggtactcagcctatgggagaaggcacttatgaaacggaaaatttccgccttagacaccgcctggaggaggcacagtggcagaacaccgagttagaatgtgatgcatcatagctagggcaccgcaggggactaacactcaaagtcaacataaacctggagtgagaagaccacgaggcaggcctcgtgcctcacgaaccaggagataggaaaatgccctggaagaacaacccagggaaatgagatacctcctaaaaatcagaatgatcagccagaa

SEQ ID NO: 94783 - DNA, 691 bp, Cannabis sativa
catgccactcagggggggtactaaagcataccacacggacaggtgaaaaacaagccgaaagtaaaatatcctgaccctaaatgcaggtccgaaagaaaaaataggcatcgaaaaaagatcatgtatataaaaatcctggccctgaggacaggtaaaaaaaaatatatatatacaaagagcccggggacaggccttaatcattgtctccccttagaaaataaggcagttattaagataaagattatcttaaataaaaggaaaatagttgtaaataaataaaaaaaaaataacaaaaagcttgatgaagtgagatggattcaaaaggcctaatcaatgcgaggaggaaggcgaggaccaatacgcgcctcgagcatggcgtcaagtttcttcttcttctcccgaaatatagcaatcatctctgcaggtttggggtagaagtcgagcttgatgttctggtcatttgtcgaccagaccacgtaggaactcctctagtaagaccctcttcaaggcctccacctcagcatgcccccgggtatactcgtcaagggcgtagttatattttgctatctgaagatcctgcctctcctaatctccggggaacggagttaaaacaatgccaagaggcactgcatactcttccgcctcgggggggatcccggagtcatgactcggggccagagtgtccaccctc

SEQ ID NO: 94784 - DNA, 615 bp, Cannabis sativa
aaaaaaaatagaactttaaaatttatgaatatgtaaaataatataatatgtaaatatataatgaaacacaacgtgctttgcacgtagttgccgcctagtatatatagataaatctgcaaaaaattctaaagtatcacaaaaattagcagatttatatattttaatttactctatcatctatgataatatttttatcttactaaaattttaatgatacaataaatcaaaattctaaaaagaaaaataatgataataaaaaaactatcaaatctatattaacctatagctaaaataatttctatttatgtatttatttatttttttttggctataattattaagtgtatagtggtgggcgcttgtagttgtttaaacaattttattttaaaaatattaatactaaaaatagaagtttggttgatgttgaagttgaactcaagttctcaactaataagaacataaaccttacccttctttaggttgccactatgctgggcctaatttgactatgtataatgttaattttgataaaatatagtagttaaataatgatgtcttaaaattttcaataggcccctaaaaagtgtgggtcctaggcacgggcctagcccgcct

SEQ ID NO: 94785 - DNA, 1165 bp, Cannabis sativa
  modified_base (735)..(750): a, c, t, g, unknown or other
aaaaaattaaaaaattatatgtacgaataatattttaatgtaaagaaaatagtaatttaaaaagtctaatacatataatacaattatatttcaaaacttaggtgacgtttggttagaggcagggccggccctgagcacaggcgggctaggcctgtgcctagggcccacctagctcaggggcccaaaaaaaatttatcccattttaaaattatatatttttttaattaatttttaaaaataccatatttttttctaagtgagggcccaaaaatattttttttcctatggcccactaaatttcaaggtcggccctggttagaggtaatgaaatggaatggaaaggaaacaattttgattccattcatttgtttggttacatttaaagtattggaattactttaaatgctctttctaccattttggtagaatgctattccattttaaaaaggaaggaaagagcattccaatgtaacaagagaaaaaatttaataatttttttatcaatttttttatgcattttaaattttttgcatcaaatgtatattctattcttatatacaattttttttacatacaatttaaaataaaattaaacatttctttatactttttttcttttgaatttattatttattattgtatttattttaatttattgttggagacataaaataattataatttgttttattttgatgctagtacttatgtgaatttttttttcataaatattannnnnnnnnnnnnnnnaaagtaaccaatctaaaataaccagtccaatccacatttttacaaattggattggattaaatttgagctattgtgcggatttgattggatccataaaataaaatccgcacttagtacagatcggatacactatgagtacataaaatagtgcggatttgattggatgtacacgcctagttaaagtacttatgctaaaaaaaactcttttgagttaattagttttaatagttttttcacgaagagtttcataagaatgtaaatggaaagcagaagggaaagagccacctaggacccagcccagtagaaccgatggtccaatgggcatgagcagcaaaagccaccacactactctaccaggttgaccaatgtacagcaccgcatcccaaaggctatgaccatcatgtacttctcaatt

SEQ ID NO: 94786 - DNA, 765 bp, Cannabis sativa
caactgctgatcaagaccctaatttataaaaaatttaaaaaagaagcctccaagaccaaaaaaattagatgatggacaacaattttctctactccaagctggaatacgaacctcctttctagaatgaactccagcaagaaggggccactagcctttaggacttttagaagagggttcaaaagtacatcaacttagaagaagcgcaaataacaacctttggaggatattattcgaccgacggactagggtatatgccaggaacacagtttttgggagcttccctcccagttacaccacaggcaagtagagtacaattttttgcaagaccacggtatactcaaaacattgctcttcctctagctcaatctagttttggggtaccagggagtaatccaactcccgaagcgaatgcacaataccctgctcaattttccccacaggctacacatttggcaggtgcccccaaaacctcctggagtaaaagatcctcaaaagggagcactcgaatggaggataagaggcaaagaagaggttacaccccctagtttacacaatatacatacgtcatagatacccaagaacgagtatacttttctaccaggtaaaatactcattatcaaaggcatcctcctctgtatcgagttagctctaggagaaaccataaggaaaggtgtgagtaccacaacaacatttgtcacaccaccaatgagtgtaaaaatctaaaagacgaaattgagagtttaattagattaggccacttgtatg

SEQ ID NO: 94787 - DNA, 1533 bp, Cannabis sativa
ttttttaaaaaaaaagtatatgtactacaggttcctcaactaattatataaattgcaccaataatattaatctcatataaaatatatataaaaaagaaaaaatgcaattacaattatcaagatatataatgaagtttaattatggtcacctataagaaagaaccatatagcaatacttatataaatttaatttgctacattgcaaaattataattaaagacaaaaaattataaaaagtttaattacatagaataaaataaatttccattctttctaaataaatatatttagttacatttgtagattatatgttttaatattttattctgcctcaacttgaatgaaatcctagccagtaatttaactgatatacttaaagtttttttttatcaatgtgtacgtaatattattattagcataatttaatggcgagacatgcatgcatgcagagttccatgtgagaagaaaggaggaataaggttcaccataaatggacactcctacttcaacttggtcctcataacaaacgttgggggtgccggtgaggtacaatcggtggcgataaaagggtcgaggacgggttgggttccgatgtcaagaaattggggtcagaattggcaaagcaattcctatctcaatggtcaaaaactctcatttaaggtcacagggagtgatggaagtactatcacatgcaatgacgtggcaccagctgattggcaatttggccaaacttttgagggtcctcaattttaattagatcaaaattattaagactttattatcttatatatatatatttaccccatgtttgatgaaattgtttttgagtgtaaaagtttaaacaatattgtagaaagagagagagagagagagagttagatgtggtttggttaaatgtctttggtttgatattaaaaggggttttaaattttgaaaacctacttttattgattagagacaaaagggatatttaagaagtttagaaagaagaaaaaggtcccaacttttttggtatgtaaaaaagaaaaaggtggggctaatagtaagtattattattactacctgtccagatttatggcatttgggctaggttgttctctatttttaatattccatttagtttttttggtggtggggtggggggagagtaatgatgaattagagttgtgtaattataattaattaccaattaatgtatatgtaaaaaaaatgagcattacttaattaaagtaagctctctttggtgggtttatattccttttctctacctaataattaaatcgtgagaataaatagttttcacctttatttaatttagtcaagggtttcaaaatatacaagcccttaagaacaatttggtgagaaaaataaatggtaaatgaatattgttattggaaaccaacagtaatactcagcacattacaattgattaacgatattctctaaaaaaaaaagtaatatgaaactcaatacttaattacactaatagcggtataacatcaagaaagatgctaggcaccagtattgtctttt

SEQ ID NO: 94788 - DNA, 593 bp, Cannabis sativa
agagatcgatgactataataaatcctaattaatttagattgaatcatacaaattagttttgactaaatatattttttttttgagcactcttactaataatagacacttaagtggtgtttgattgaatgtaataaaatattgaaataaaattgatggagtgaccttttcaatttccataattttagtaaaatgactattccattattaaatagaaggaaacatcattataatgcaacatgaaaaaatatatatataataatttttttatgaatttttttgtgcattttacatttgattttattctattcctatttctattctcattctcattcatattcatatgttttcattcctctcaacaaaatgtacgtaatggaataaaattgaatcaatttttattctattcatttctttagctgtattttagaatgttggatatgtcattctaatagaataattattttttataattttagtagaatgattatttcaattagaaatagaaggaaagtctattctaataaaaaataagagaaagcttaattaaatttttatcaatttcttttatccatttaaaattacattctatttta

SEQ ID NO: 94789 - DNA, 960 bp, Cannabis sativa
ggatgagagataaaaatagagagtaatttaggtgatactttatttggtttattgtaataatgaatagttttattatattgtttgtttttttcttttaacttttgtaatataatgattacataccaatatcaatgtaatcttcattacaattacactctattacacgaaaaaaaaaaaaatattttaataaaaatataataaaaaaagtaaaagtttatattacctttttttaaaaaatattttataattttatattaaaagcaataaggttattttagtcaatacatattttattttattatatttttatgtcaaaccaaacacaataattcagattacaattaatgttcattctaagtacaaatcaaatattgtaatcaattcttattaccattcttattccattatattatcattactattatcattaccattacattacatcaaaccaaacaccactttatctcttatttgataactgagaaagaatgaggaagaagagagataaagggaaacattcttctttgaaaccttacaaacttatttcttcaaatttagaaagattgtaaaaaaaaaaaaaaagatacaattaataaaatataataattaacgttaaagaataatagatttttattttaaaatgataattttataattttactaattaggttttttttccatggtttctacatggcacctaatatatacaaaaaaaggattaacaattttctccatccctcttattctttgtcctctccaatctctctatcgatcctactctccctccctcccaccaaacatagtctaagggctcatttggtacgtcgtattttaatgtattgtagtatattgtgttggattgtgttgtattgtattgtattgtattgtagtagtattatttaatacaatacaatgtttagtattgacttgtattaattgaccccaaattttttgtaaata

SEQ ID NO: 94790 - DNA, 813 bp, Cannabis sativa
aaatattccaaggataataataatcatgtgaattcatcatgatagtatattatgcatatgatcatgtgcttgtattcttctaattatttccaaatttcgttttattaatataaatattatgaggaataatatatctattataattacacttcaaatatttatttatcattatttctttctttaggatcatcttcaacttctccaattgccactcttgaatctcatgttgtagctagaggccatgactcttgcttagggcttgatcttatgcaagagaattgggtacaatttagtttgtgtcaaaagaacgctaaaaaaaatatcactgagtcaccaaaaaaagttgtgattaaattaaaaaaatattattaaagttacagtaaatagtaacataagtaattaaaattttaagtttaagcggtataaatttaatatttatttttaacggtaaaagtactaaatatttataaatttataattttcctccaattttgtcagtacagattttgttttaaatttattaaaaaaatgtttagaagtaacttatcctacatatattatttctgtttagatctaatgatttagagtttaggtcttatacgtaccttgtttaagacaattaaaaagtctctactgacgaaattaaagaaaaaatattttgaggaggagggtaatatcggtttttataatagtgaaaattccatatatatcaaaataaatgtatatataaatataggacatgcctgagtggtcctgtatttttttttaaaaaaaaaaaagtggtaagggaaatataatattttttgtgcccaa

SEQ ID NO: 94791 - DNA, 1070 bp, Cannabis sativa
tattaattattaaattatttatcaatacgtagctagcattatttacaacatatattaagtaccatgtatatacattaacgcatgatatattcgtttaaaatattttctagctactttgtatattatatatatagaaaataaaaacgttataatttatcacttgtatacatatttgaaacagtgaatttatatatatatatactattgccatgggagcttcaaataaaaaaaattatatatatataaatatatatatatgggtacacgagaaagaattttttaatgacctcacagaatcgaaatggtgatgaatacgaatcaagaaaatgtcactgcttgcgattaacaaatagcagcacaaacgaagtttgttaaatttgttgactgggtaaaaattaaattcaggatatatacacacatatataagaacagtcaggtagcagtctgtatcaaaatacaaattttgatgtgatctagagacaagaggaaaaaaaagagaagaaattatatatcaattaataaaataaattatgtaattttttgaataatattggtttatatatatagttttttttttttttgaacaagaagattttcattacttaaatggcatcttcgaaagaaagaccagatcaatatactgtacaacttaagggataacacccttttaatcatagaagtttaaatatagtttttgaaagccatgcaaataaagattgtgcggaatgatgatgatgagtacagaagtagtacatattatttatttagttttgaattttgatgatgatgattcaattatattttcttctacttacacatttatttaattgaagtgaagaaagtgtgagtaaatatattgaccaaattaaaggaaattaaaggaaatactggaacttgattagtttccagttaagctataggtacttagctgtcgatcctattcctattataccgacttggtcaattaatgtcttaaaaacttattagtgctcccttttgacttctcgaccatccatattgacacatactctatatattttagttaatccacctctctctctctctctctc

SEQ ID NO: 94792 - DNA, 904 bp, Cannabis sativa
taaaaagctcacttcttcttctctttaattttcaaaaatgcagaggctattttctcttgaattttttcatcaaaaattgtgctccttagtgttgagaacttcccacacattttaaagcaatacccaacatactgagaaagactatgtagtccaattgtcatcagaaggagaatccaaattcatatcttgatcatactctgcaacaaaaaagatcaaggaatttagaggtctgaacggaaggagtcatgatggttatgaatgctacgtatccactaaagctcatctttatcactttataaaatgtggtcaaatgaccacaaatcagcatcaatagagactaagggcataaaagtcattcccattataacacaaccacataaatataaggaaaattttatttacacctaaaaatctataaagactccttaatttaataatttttattttatataaaatttatatttttaatagtactaagtcttttttaactttcttcctttaattcataatcttaaaaaatatacctatcaaattaaaataaatcatattttaaatattatgaccaaaaaattaaattataaaattataaaaaaatttcttagaaaaaataaaatatatatatatatacatgatttagaaaaaaaatataaaaataaaattaaaataagtattaaaattaatataaaataatgtaaggaattttttttttaaaaaaaatatgagtaacttttaaaaattatttaagtatttatttaataatagggtgtaattattattttatggagaatatataatcacatatatttataattatccatactacataatttcacatatttggaccccgaactctgtctaaaccaaaatactagattgtgactacaccgcactaacttgtcaaaaa

SEQ ID NO: 94793 - DNA, 755 bp, Cannabis sativa
ggagagttaattttgcaaccttctgaagtggcgacaataattgatactacacaaaatttgaatgtaaatcaggctgatgaaaatgttgtggatggtgacgttgatgacgtaatagacgacgaagttgacgagttgctaattgatcgatgtgaagatgatattgtttctgaaaatgatgagtgtgatagtgactattagtttacttatgtgattaatttgtttgaaataatattataagtgatgaatttgatgacgttaattgtattttaaactataaatatttttcttgcaacctttatttatactaatttagtcatacaactttgcttttaaagagtcataatgtcagccgatgtagcttcttctcatgggggagacggtgacggctttgatccacttgatcctagtagggtgccctcaacctgcgaggcagcaccaccgcccaaaaggaaaggtcgtggtgctgctactaatataccgctagaggaacgcagacgtaagaacgaggggccattgccgcttacgcttgatcctgcaacaggaaaagtagttggcttggagaaccaagctttcatccggcagttgggtttcgaagagagcacattattgccagggaactacttggatttttgtgatgtacctcaacatcacaaggaacgagttgttcagagaatgaaggtaataaattgatggacataataaattttattcagaaataattaaactaagtaataatttaattcttcaaatgtagt

SEQ ID NO: 94794 - DNA, 647 bp, Cannabis sativa
acatttagatcagattattattaaattttattttaacaaaaaattagttcagggtcctatttgtaccattttaaaaaagacagagtctatttagtcatttaacaaaacagagagtccaattagtaacttttgcaaaacacaaagtccaaaatggtatttacccaattttacaatctatatataatagccctaaatataatctcataaagcaaaacaatacccaaatccactggtggatggagaatatgtaaaggggcaaaatataaaacaattaatatttggggagacaaattgataaacttgtatgtaattttctttttacataattaatatatataaatctataaaaataaaacatttaaggagggctgtataaaatcataagaataatattggattaaactaaattttacattaattatagaatcaaaatcataattagagtttcatctacaatataacaactaagaaaattagtcatgtggagcagaaaatatatgagtcctgctttttgacacaacacgagtttaggaggcacgagcacaacttaatatgaaaaaaatataggcttaacatgacacgtcatgttactgcagattggcacgatgttatacgaaaaaatgggcattaacacgacatgagaaatc

SEQ ID NO: 94795 - DNA, 917 bp, Cannabis sativa
catcagacccgacagagccattacagacgatacatccatcaccgctgagagatgattttgatgaggatgatgtgtatccagaagattgggaacttaacatagatgtggttccttgtactcctacaaacgccattgtggtaacccttggtgatacagaatctcaagatgtgcaacaattggacgggccacctgctagggtggacttctccagggttaggagaaaatagaagtcggttttcttgaaggactacacagaggggaagaagaaacaacgacatgggcccgttgaagtagacactgtgaaaccggcagactcacggctgttaaattttttccagaagtggataacttacgtgagggacaacacccgtcctagggatgttcacactggcctagtcaatcgatcctggttggtcaaattaatggtgcggagaaggctgtgctgtaagttatttcttaactgaataaatttattgtatttttaaatttttgtgcgagtttacaatgatttatatgcgattagtttgcaatattatcaacataatgcgattattgtgcgacttctgtgcgatttcatgcaatttatgcacttcttttatttatgtattatttgtgcgacttctgtgcgatgtatatgtgacttttgtgcgattaatgaaactgttttttgatttctcttgtgcgatttcatgcgagttttgtgcgacatatatgcgatatctgtctaacttttttcttttggaaatacagcaaattgatgtcacggcacacttattgagaagaagacaaaacttctatctagaagtgtacactcgaaaatgtgtagttttggacacatctactccataaatattctccatatattggaattattatgaaggtgacaagagcaagatgaaatgggatgaggccgttat

SEQ ID NO: 94796 - DNA, 939 bp, Cannabis sativa
tttgaatatgcagtagaacatttttaatgtaaattcactggtagaacatttttaatgattggcagagaattgtaaataaatacaattgttttaagttctcgagtctgagctcaatactttctctgaccttgtcaacaaccttgtcctgtgcagagacatatttatggcttccaagaaaagaacattcaaatatttgcagacaacagtagtttagcagtaaattctttttatgtaaaatcttggttggagttgctgtcgcgaacacctcgagtggctccgttcctcccaaagaatgatccgtttatcttggcgttgaaaaaggtttactgtcttttcatatagtttatgcgttatattcttttgtgttctgttcatttagtttatgttgttgcaatggacaatgtagaatcatttctgtgtaatattttcaattattaacaaggtttaaatacttagctgatccaaacaaacaaaaatggaaagattttacaccttgatttctaagcactaaagctaatatacacatatgcacacacgatagggtgaacttaaatgtggaaccaagtaattttttccatatatttctaaagttttgaatttgtgtttttcaaatactgctatttatttttgtaaattatcagatattagcagttatttgcaattctacctaatgtcattctatctttgttcggcttcttttttcagtgggtgttttcacacactgttttcttgtattttttttttaaaacttttctacacattacaaatgaaattctaattttttttatataattataattatatcataaagcaaatattcaaataataattggaagattttcttttctgtttgtcttgttattttttctttttgctctagaaaattatactctcttgtggtcttatcaagtaaccaaactaggttttgttatatctctt

SEQ ID NO: 94797 - DNA, 637 bp, Cannabis sativa
tcctttccatctaatactaacgtttttgttgtttgtgctcatattaatcctgttctgcttttttgttaaaaatggtcaaaatttgtctgcatttttggaatttgaaataggttaacagaacctaatttttatgccaattgaagtggcaatgtggtactatctcagataccagtaattgatactatgtggctcaactttgtaactaactggaatctaaataatctggggtggtgattattactgtgtgtgttcaaattcagtgaagatatctgtgcttttcattttgtaatgtcattttatgtgttcttgctaagcattgattttgcatatgcctattagactataaaagttagcagtaacttgagatgatatgttgcatgatagtctgatattgttgaatgattgtgaagttactgcctacgctatttattttctgggatacttattgtagacagtcacttttgaactaccaaatttctcaaatgaacaatgcttagatatctatagaactataatgaagatacacaagaacaatgaatagtttagccagatctattgtacttgacaaattgtagcttaattcataccatccaataaccaatgtacagtacccagtttgtggcagaccttccgagaa

SEQ ID NO: 94798 - DNA, 597 bp, Cannabis sativa
actcaaaatatcattatcttttattttacaagatatatggtctaaaattatattaactctaatacaaaaccgcgcgaagcgcggatatgttacctagtttaaatataaagtaaattaaattttttgagtttcttttattataatactatattaattttgtaatagattgtaattgtaaattgtcatactattggagtgtttttagaaataagagtgccaaaaataatataaaaaagagataaaataaaatattatatttttacatgatgtgaagatttttagcatcttaatgaatgctactattggagatgctataatatcgatgttagtgcaactcaatatcgagtctcacttattttgaattaatttttctaaaaaaataattttgttgtttattttaaaaatattgttttattttattttaccaattgtaaagaaaattaaaacaaaccaagcaacatttattatttttttcattaccattatcattacacatacatatttctttaaaatttatattcttctaactccctatttatttcgatatttaggaaaaagtctaatttattttttccttcataatattaatagtgtact

SEQ ID NO: 94799 - DNA, 522 bp, Cannabis sativa
tcctcattagcagcttcaaaaacgtaagtgcagtacctgttatgagtgaagtaattgtttaaccggccaatgaatgaaacagaattcctcctctccgatctcggatcagctagtgaacgaggtaagaaagccaaaaaaggccgatatagagagagagatggcgttacggagagagagccaaaaagttatgctatgacttaggacgaaagtctaataaatatgacttcggtttttcttgctaaaccacaattgggctaactcaaacattacaaatgggcttttttttttttttttctattttgggctaacaaaaaagataaacatttataatttatactaccattaatttcaaaaatactattttaaaaaaaaaggggcaatttttactaatataccaaattaacatattaatcttacacttaccgaaaaaaacaaaaatatcatatatatgtatatccctaccgaaatttaggaaaaaaattcctactgaaccataaaaaattggatcaacccgtgcgtatc

SEQ ID NO: 94800 - DNA, 862 bp, Cannabis sativa
  modified_base (286)..(297): a, c, t, g, unknown or other
gattacccacatcaatcggtttcttttacagatcaagcttatgtgggactaatgctcaaagattcaatggcgggagttatttcgatcctatattcatatagtgaataggttcatttattccacatgttatatacacatacatgtgtttcagtttatacaaataaatgtttagcagttagtatcaaagcggattatatatctctgccgtgatttattttgagttttgtttatttatacatatattcgttcggattcttcatcaataatataaaattatatatatatnnnnnnnnnnnnatatacttttatattatataatctgattatatatatatacattcatactcaatttttttatatacatatatatattcatattcatattcatcttcatatatatatattatatatgtatacgatcgcttcttaatctatatatagtttatatatatttatattcatataattttgatcatatatatatatattttaattcaatctacgtatattcatatgtatatatttatattttaattttgtttaaatatattatatatatatacgtaagcattgttgtatatatatacgtatatatatttttttatatatgtttatatattatatacgattaatatatgcttttattgcataaaaattgtatgtgatactctctttcatacatttatgatattttatgtagtatatactttatatacgtgtatatataaacaggaaaaattagaatttttggtgcgttggttgttttatttcatttttctttttcggtatttatttcgaattctatatacatcactatattcatatagtattatagattgatctaaacatgtgaaaaatcatt

SEQ ID NO: 94801 - DNA, 521 bp, Cannabis sativa
tttctaatgtccctatcattgcctaatgaagcagccgataagtaagaaacctagcagcattttcaaatgagagtaataactctttcttaaaaaacagtaattaccataccttacttttgacattctatgccgtacaattgacttttcttaccttattccaaattgaggtgtagggccaacttgaatggaatggtgctcaacgatctcgggcccaatgtcacatcaacgacaacttgatatataactaaattaaacttgaaataggctctaaactcaaaactggacaaatccctatcgataatatacagaaacctaggtattggaaaaacaccccaaacgacatcttcagaaaatggggtttcccactggtttaaactgttaaccgtttccacagtaccctatagaaatggttaactgtttcccactacagaaatagccaaaccttagtttttatgtcaaaactatcacaaaactcctccaaacctaatcaaactttccagatcaatataatatcatatata

SEQ ID NO: 94802 - DNA, 2074 bp, Cannabis sativa
agattgttaaagaagatctgaaaactgacattgaatataataaaacttaaatgagaaattataaaaacatacaaggcgtagatattcatcagtattttatggacataagaagctctttatctcgtgggatcacttacttctacactttgtggttttcccttcaacttagccagctttcgctcaaaagagttgccatgcatctataaagaccggaaatttaagtcaaaattaatctgatggtatgatcccatattaaaaaattatggtttctgttcagcaatattgtttagtcagcatggattagaacctacctagagccgagggagggtttaagcccactctcaaatttcagaacagatcatataaaattagaaatagaaacaataaataattgttagaaaacataatttatataggtgtttattcattacttagtagacctggttttgaatttaattctcttgagctatattttttatttttatttatatataaatctactcttttcttttaaaaaaaaactacaaaatattaacattaagtattcaaattacaaaaaacttttttattaatttatgttaatgaattatgtgtaattatatttaatctataattaacacaacctcccacataaaaaaaaactaaaagtaaaatcataaaacctcgtattattatttagatactaaaatttgttctaatttatataataattttattcgagatttatgtaaaaaaaaggcaatatatataatttaagtttgaaattattattacaaattttagttaacccaccctaaaattatatcagcaactgattagaactatagtaaacatttcaagtgagaaaatagtttcacatcaaaggatgatttgaattgatttttgacaaaattcttcaatgaatttatcagcgattatgtataaagtattgtacggtagctgtacaataaagtagtaaaattgtcatcttatgaggtgctgtaaaatgtgtactcaaattctagaagggaggtgcacttacattttgcttcgagaaatcccattcaaagaaacgagtgaagaatgttggttctttcccttcagtaacaacataaaaaggagtatccacagatagcccttcagcaagtacatctgtctcgagaaatttctgcagttccacgtaaaaggatgaaaggaaaaaggtttagaaaacaaacaagggtcaagaccacaagtgtgatgagtatcaacattagaattgacagttcacctggcccaacattagagcttgttgctttgattttacttttgaatggcatccaatccaaatatacaactcgttgtggcagtccagcgctaaaacatcttcagtagttaaatcatcctgtgtaaaattgaatatctctttcgcctgaaatattataaaaaccatactatataagaagattacatagtgattccaatagagataaacaccattagaatttcacaagacacaagcttaactgtaaacttcttgtgttgaaagtgtattccatgtacttgaaagtaaatcaactactgaactacaaacactgtatctgaaagtgtaccttgaaatcacctgaatgaggaaatttgatcaagcagccaagaaccacagtccgcaattagacatgctttacagcttgaatgattcacaacaaaagaagaccacattatcttttaagacaactgtagaagaatggactcttttcctaccttcagtaatgtttaacaaaagtaaacgtggatcttctacatgtccttttatttcttttccttttgcatactctgtctttccacccagtgctgtccaaaagatatcaggttcactcccttccctcactgatatcggttgccatgttggctgccattgaaaaagttagaagcttgaacaagaaatttgaaagaagtctgcagaagtaaaaacaagttacatttatgaactccaacattctgtgtaaaatatcatggtccctggtcaaagaaagattcccaatccaagtgaatacagttgttccagaattcagaatgtaacaataagatgaattcagagaacttgatacctgcaaaa

SEQ ID NO: 94803 - DNA, 524 bp, Cannabis sativa
cctgtccccgccccgtttaacattggggacaaaaaataatccctgtccccaccctgttctccatttagacaagaaatcccctcccccattaggagggggggtcctcgtggggcccatctctatgggaaaaatgtgcatccctagttaagtttcatgtcaaattgtctatgtatatagtgtactctacacatggataatgaaattatttaaacattataaaaattattttgaattacaaaaaatatttatttactttttcttactaaataaataaaacattaaaaattaaaaataaaaatagaaccctaaaatcctaactcttctttcttggaaaatttcactctttctcgatcacctttgtcgatccttaacgttgctttctctttgccttacctttgcctacctagaggaaacataggcggtgagacagccaaagtccaatggcacctaggctaaacccagacggaccttcgatttgatataatatactctaacatcgtattgggaataaccaatgtgagctg

SEQ ID NO: 94804 - DNA, 564 bp, Cannabis sativa
  modified_base (527)..(534): a, c, t, g, unknown or other
aaggtaaacaaaattattatcacaccttgttgagatcttttatctcttagatctccttaaaagaggtacttctaaaatagtctctatttgttgatcatcgttttgaataacatcttccacaactgtatttctccgataataggtccctcatcaataataggtcgttcatcaataataggaccctcgtcatctttgatatcaggagcaatacattcatcagcaatgggagcgttatcaactagagtaggaataagactgctattattatcatctcttgaaaacgatatagaaataaaaattctcttagatgactcccccatttcaagagatgttgaaagaatattttcaacaacatcaaattccaaaaatttagcagtctgagattcaacaatttgcgtaccacaagtagcacagtaaaagcgagagccttttgagtgcattggataaccaatgaaataacaacgcactattctcagatctaacattttcaaattaggatcataaatccttacttcagctggacaacnnnnnnnncgaagatgattcagactaggctttctccca

SEQ ID NO: 94805 - DNA, 1027 bp, Cannabis sativa
aattttaatcaaaatggactctgccttatgttctgaatattatttattttaaaattacacataaaaaaatcttaaaataaaactaatatttacgtatcatttaaaaaattttaaatatgatgtacacttatttacttttataaaacaaatcattcaaataataatataaatttagttaccaaaataataaaaaaaaaaaaaacaaaaccttaaataaaactaacaatagctaattatttattctacctagtatactaatatgtgcttagcacaaattgatacttattaccattttttctcaagtccaaatataagattgagccatttttttgaactaaatttgctattaattttgcaagaatgtctaaattatccaaattcttattaccgccatagcttcctctgcgaaagctataaaaacacatcatcagaaaaccgtcattctctaccgccatggatcaatctcagcgacagcaacagcctaggccccctccttttcccccgccatctcaaagcggaggcgactcttcttctggacttctgacactatttgtaggactcatcttcattttcgccatggtaagttggtaaccgctttagttccttacttcgctttctttttcacaatgcgttgtttcagctaactcgtagcttttcttggtctccatttgctttagctttctcacattgcatatatacgattcatcgattccattttggttttgtaatgtatctgtatcgttaaagtctttttcatgttttttttattccctaatttctcgttttattgattatgtccattttgttaagattttagggtttattgatttctttctgctccttattccttcaatctcgtcgctttatgttgtggtttagaatctagattgggatgcattgcttttaatttcgtctcatggatctgatcttttgttgtttcctttgtgatcatttgtcttctattgatctcattttaatcttccattagctcatttactattttaaatgaagtgtctgcatgtcaagc

SEQ ID NO: 94806 - DNA, 592 bp, Cannabis sativa
tctctctctctctctgtgtgtgtgaatatcgttctcttgagatgacgccgaagctagggacgacgctgagccttggacatcagaggttaaaaaatattgtgctcatataaattataggatagtctttcttctcttcatctaaatggtataaaagttctttttctttttagttttcttattttgtattttttttttcttctaggatagtgacttttcatatcaaaggcaagaactttcaatgtcattataaggatgtttttattgatttcattttttaaattgagttgtttagattaattaattttatttatgattactaaaaatttattgatgtatatatagatatttagctttgtttctatgtcagtataattgttgaaattttcttgattggaataatcattcaattcaaaggaaaacttttggtgaaattattttgttataattatttattgatacttgtgtaaaaaattatttttttctttatatcaatgattattatggtctaaaatttgggtgaaagcatagatgtataacattggcagaaataaatgaatttcaatttctgtaattttttttaataaaaaaataa

SEQ ID NO: 94807 - DNA, 538 bp, Cannabis sativa
tcttccagtggacagtcaaccaccctgccacaccagatcgcagaaggaggttccttggtctccaccttgtgttaatgggtacaaattaaatgtggacgctgcaacaaattcagaggataaaaaactaggtgttggagctgttctacgtgatcataatggtatagtcattgctgccctttcaaaaattgcacaaggtagttttcgatcagacgaaatggaagcaaaagctctttttcatgctctcaattgggcttcgcaatcacaacttccaattacgcacattgagactgatgctttgagagtatctgcagcactgaattcaatttctgctgatctatcatgtttttcggatatcattacggatgttcgttgtctattatcttttttccctaatgttttagtttcccatgttaaaagatctgctaatcaagcagctcatggattagctaaatttgctttagggctagatgaagacatgtcttggataggagagattccctatcctattttctcagttgttgtaaatgatttcaattta

SEQ ID NO: 94808 - DNA, 670 bp, Cannabis sativa
ataaaatccaataaaaatataatttatatatactatattttttattatataaataagtataaataattttttaatatatataaatgtaattggattggattgctttttaatcagattttgagattgacatttaataactgatcaaatttaattagaattcaatttttagcatatttaattcaaagctaattgtaatttgatatctaattttttataattaggttggattggatcatgcaattggatttaattgaatgttgtccacccctaattgcaattatatatataaattaaaatatgtaaatatatttttaatcatctatatgcgtgaagaattatccaattaacgtattacgtacattaattttttcacgtggtgaagacccaatctatagaaagccaattctgcatgcataagatactattaattataatatatagaactcggatggtatacatgcatatagaataacatacgtatcaattaggaaactgattcattaattaataaatgctataaaaacttaaaaaaaaaaaaaaggcaagaaaaacataaagaatacaataaagtgatgggtcattttgaaaattaatgtaaaaaataatataggtgataatatatatgtatatatgtatagtggattgcgatattatagagcatgcctgctga

SEQ ID NO: 94809 - DNA, 774 bp, Cannabis sativa
aaaagaaaaagaaaaaaaaaattgccacgtgtactcttgtgtgcacgcatgcagtccatcgttgcacttaactgagagttttggatggaagtgtaaagggaaaaatagaatgtgagtttggtatgttttgccatcaataaatcagtttttgtggttaagtgttaaaaaatttaaagctaggtggtttagccgccaatatccctagcttctatttatatgaaccatgcatgtggctcagactaactaggcccaatatgtgttaagtatgagattttactcgctaatcgattgattacaaatacaaaggagtatattttgcacttggtcccaaccattttcagtccaacaagaatggtagatgttaggtttatttttgtgttgttttagagcctgttttagtgtgcgtttttagtgttattatgttttaatgtttggatttacgctttttttttattattttctttgaatttgaagtgttagaagaagaaattttactttttagtgaaaatggtatttttcgggtttcatagtgataaaaatgaccaaattttgtaaaaaagaatctcaagattagatttcttcgcttagagcatttcaaaggattaaaaattcaagttttcaaatttttgcatcaagagtcgtgaacttctctcaagagtcacggcactccaatcgttacagagaaaattttgaaagtcaccaccttccgttgaaagttggagctcttgaataaaataaaacaaaaatatcaatatttctgtaaaaaaaaaaaaa

SEQ ID NO: 94810 - DNA, 678 bp, Cannabis sativa
gcttctttcttgattatctcctccattctaacaccctgagagggaagcactgtagcaagtcaaacaatgttagtccaagcacagaagttggaaaagtttaaaaactaacaaaactcaacgtaaattgttagaaaatctaggagtgggaagcttaactaaagagatggcaccctgctggtaggaaacctagaggaaaaaaaccaatattcccagaggtcaggggtgcgatttgtttggcaaacagggcagtaggagtctgggaatttatctaattggaggaaccccaccttggacctatcggtcctcgtatgattggccttgacactaatagaagtaaaggatctcctctagggaaggaacttctagtgtgttgattttgcaaaacatgtaccacccagccaagagcctatatgatgaaggaatcaactggaagggtgcaatcctaatttttgcaatcaagttcgcgaagtagtttcttaagggaaggtgagcacgactggaaacatgagaccaactccatgtagtgaacccatcgacaccaatggatgcagattctccaaggacggaaagcctgtgccacatcagcccatggacattaggaggccaaaaacctctcagtacacttgcaacataccataagattgaaagcaattagctttctagtctatttcccacaca

SEQ ID NO: 94811 - DNA, 533 bp, Cannabis sativa
tcgacaccaagtgattggttagtgtgttcataatcttcattgatgtgtcatgggtccttaaatagaacatctcaaccttatttagttctctctggtcttggtcaaaatcccttaagtttgacttttttatttctcaaaaagtagtgtatgtatgacaaatatttagaagtaaattcaaatgtaaacacaaatgtgacatagcaaaatagatgccaaaatgagacaaactattgaaaagcatcaaaacaagctgaagctacaaaattttaattattattcccattagatttgatcaatatgcagttgttgtttttttccattcttaaatatatttatttccttataatgcttttcattttcatttttctaaagtccacttttgggatcttatattacatatacatctaatgtcttcatcataatttgttgactacacaaaggtaaacaatacatttgaatttgatcatgttcatgatctataagtcaaaatattcatgagacaacttcaatataaataggtttgttttgtaaac

SEQ ID NO: 94812 - DNA, 2712 bp, Cannabis sativa
  modified_base (174)..(183): a, c, t, g, unknown or other
attagcaaccctaactaagttaaaatgttaatgaggaattatattattatataatttaatatgtggaattagtatgatttattgcattttaagatcctattggtgtatcaggggcctattcgtaattttaacccgagaagggtaaaatcataattttataatatattgtgtttnnnnnnnnnnttattatatagtatgtttattctatctttttgtaggtgaatttgaaaagtcggcacggtgtagtcacaatcgagttttttgggtcgaactgtgctcgaggcccaaaatatattttctgaatttagttatggcttatatgaattaaatgagaaaatgcaatttatctgatatttgtatgtgagtagaaatgataaatttaccccttttacgtgtttatgcctatatgtgtgctttaggggcaatttggtcaattgaccaaataattcattttcaacaaaaatcagattttagccaaaatagaaatcattttctgggttttgacaccccaaaaagcctctctctgtcaccctctccatttttgtgttttcaaattaattttggaagaaaagtttagatttcgggtgtggttctgtgcttgatcttgcttggagcttgaggaacttgaggcaatgatctttattctctttttcttgtttgaatttctagatttaagaggtcatcaatggtgttcatggtgttcttggtgtttttgatgattgtgagtgcatgttgttgtgaattaagagaaaagtggtggttttggttttattgtgttagtagttgtttatacttaatgcatctagattattattgaaggtttttgaataaaatattgaggttgaatttctagaaaaatagcttgaatttctggatttatatttggactaccaaagtttgatgattattgtgctatgttgatcattttataacatgctttttggtatttgtaaatttgttgttttgagcttttatggagctcaattgatctccaatgtcagattgatttagtgttgattagagtttgagtttatgtattgtttaagatgagttttggtatgagtttgactgttttttgaaggcatgaaaaattggagattttgggttttctggggctgtcgccgcggcgagctcaaccaggttgtggccgccacggcgagggctttggtagccgcagtaagggctctgtttttccaatttttggtttcttgtttttgccataacttttgactcagaactgtgttttggacattcttggtaccgttggaagctcattttgtgctctgtgtgttaatctgtaattggagttcacttatttataggtgtgaaagtgaatttgggattaaccctatttgtgaaatcccaggaatgtgtgactaggattactgacgcttgctcagaacactcgaggatttgaaatctccacatacttggattaccaggtaagacagtaaacaagcacaaagagattagtgcagtggcgctcatatatgtatttaagtgtatgttatgtgagaaactgagattagggttattactcaaatttagcggttatgtgatctagagttgttactctagaatttaagtgagtatgaatgcaatattatactatatatgttgatataaagaaatatgcagttaaggcataattaggttagactcggtaatcagaaccgagacaaaccattctaaggccttatcgtaaatagacgtagtgtaacacgtaggtctatgtcaaataaacaataggtacagtggcatcaatacttaagtgattttaattgatattcatattaatgttcatattgtcttgttgggctttggctcacaggtgctctattgtgtaggaaagggtaagtcaattgttgatcagccatgaggtcaagggcttttgcgatgcattgtacatgtttaggccaacctaaaccatgggggttgggtctaccaggggaaaatattgtaatctctacttttaccgcttaggttggcgtgtactaatgacttgtaatattttaaaaatgtttttacgggatcccaaaataaaatgtgaacttttggatggtttgtaaagttgattaattacaagttgttatttttttatattgtattttaaaagtttaatttccactattggctctagtagattctggtttagcggaattagatatgtttagcagcagtttgtggcatttttttagttaggatgttacaatttggtatcagaacgccaaggtttttaaacttcttataaaccggctgaacatgtacaattatcttcaaagacaagctcgactcgtggtgcagtaagtattgagagtaaatgcttaactgcttttgtgattacttgatataaattaatgaaaattacttgatataaattgatctaaaattaattttaaactttaatcacatttttaaaataaattttggaatttaaacatttaaaataaatacatttcaaaagttagagtaaaataaaatatattttgaaaattactctaattattcaagttaatttgaaaaattttcaactcaaatataattttttataaattaagtgtattaaaatagaaaaaataattaaatatcttgaataaaatcaacttaaatattaattctagtttaatatataagaaaaatattctaattgagcttggtctaaaattaattataaattaattttcaacttaaaaatatttttctatttaatta

SEQ ID NO: 94813 - DNA, 514 bp, Cannabis sativa
aaaagttaagaaaatagtatatggagtaatttcccaaaaatatatatgtatatataaaaattaatattaaaaattttatttcaatatttagatgggatggacccaattcaatataacatatactaaatttaaaatattagatgaatgagatccgattaaataaatactaaactatcccataatctaacatttaagtggcatttgaatgagaggaatgaaaacataaaaataacaatgagaatgataatttgaatgaaatgaaatttaaaatgtataaaaaattgataaaaaaattattaatttttttctccttatgcattacaatagtttttcctttcatttcaaaatgaaataaaaagattatttcgttaaaatgacatatgattctaatattttaatctgcaactaaataaatgaatggaaggaagattgtttcttttccatttcattctatttcattaccacttaggttgcgtttggttggaggtaatgaaatggaatggaatggaaagga

SEQ ID NO: 94814 - DNA, 636 bp, Cannabis sativa
cctgttaatgaccaaaccaatccataagcaccacctgtgcctccgcagaatctgggagataatacgaggcttaacaatgttaatccacctactgacgggcagtagattttcctcgaaatacaaaccattatacttcgtcaggaagatgagttgcgtcggttcaggcaactggcccaggcagctcctgttgcataagtgttaccactagctcctgttctagtggtgggtaaccttggatttgtactgccacaccgagactcaatttttgagcattttgtcaagctacagcctccgacgttcttaggaggtactaacatcattaaagtagaggcatccaattataagagaagctccctaccatttcgataccttggcatcccaatctgttcaaggaagatatctagagctgaatgttagtgtttgttagaaaaaaatgactagcagaatccgaagttggagtacaaggaatctatcttacatgggtagggtcacattgatcaactcagttttgcttgccataaacacatattgggctcagattttcattttgcccaagaaactcttgaaagatattgaagcaacttgtaggtcctttctttggaagagtactcaagagggatccggacctggtctagt

SEQ ID NO: 94815 - DNA, 1519 bp, Cannabis sativa
  modified_base (29)..(29): a, c, t, g, unknown or other
  modified_base (1437)..(1439): a, c, t, g, unknown or other
taaaaaagagggtaaaaataaaagagganaatataaaaagggtatagagtttactttcctctttaataaactgagcttgtgattgatggtgtagtttttttatttaaaagattattttctttttttttcctaaaaaaagaaaaaataaataaataaagtagttgagagacgactcaaaaaaatctatgaagctttattatatataaatagttgaataatttattaaatttttatataaaattacagttaaaaaaaattaacaatataaaagaattttaatgaaagactagaagtacaaattagtaaaactgataaaatataaaataataatataaaggaaatatagatattattactacctgatctctttttattaaaacaaaaatagactacactttgagtatttgtttaagaacattatagttaaaatttatatgaaaaaaaaatataattatatcttaaataatgtactatttcaataaaaaaaaataattaatatgtataaatattaaattttagctttttatttttataagtatggtaaatatataatttcatgcatcataattttatttactacctactactacttgtgcaattaacaattaaataactctttcaattttttatgtatcatttgatttataggatgtcgtctcacctttgtttaaactttcttttatatttatttctatatatatatttattttttttataagcaaatgcataaataaaataattaaatcgaactaattaattctttaaagatgagcgataaaaaaatattatttagacttatatatattcataattattttatgattacgtttacataatttttaaaattagtatttaaaataattatttatagcaagtgagaaatactggaagtgtaaaatatatatgaaaaatattaaaaaatattcttcaaagatcattaaaataagaataataattaaatttttaaataaatgataaataaaataactaaaccaaattaatatatcatcaaacaaattaaacttatctttgttttaaagataagaactataaaactatcactcatacttatttaagtatatgtgtaaaaaatatgtattgtatttatttaaaaaaatactcaaaattaaatttatcatttacaaaaattataactaattgagcaagattaaatttattaatcactcatataaaaattaataatattaattttggcgcaattcaagtaaaagttcaatcatctatgtataacttaaaaatataacacccacaatagtttataaactatgtgggacttttttcaaaagaagaaatctcacactattaaaagtataaaaataaattaaaaatgtaaaaaataagaaaaaagatataatacaataaaaaatttatgtgatgccacctcatatttatttaaacattcctttatatatatannnatatatatatatattgatgtatagagtacaattaagcatattaataaatgtacatcaattgtattttatgtcaaatatta

SEQ ID NO: 94816 - DNA, 646 bp, Cannabis sativa
gaataaccctttgagtaatcaagaaaaagttaaattattggagaaattaagatagtgacattgaagaataaccctttgagtaatcaagactaccaaaatcaaacgatattatgttttttataataaagattcagagaaacaagaactatgctcaactttcatctccacaaacattaatgcctaggatggatctgctaatagctctttctttacaatttgttaaacagttgccaagaattagaaactacaaaaatgagtcaataaaaatcatataagccagcattttgtatctacaaatgaatttcacattttgaagaaggtatattcttgacattctgataagcctaagacttatattgtgtatcacaaaattattaaatgaaatacttagtcttaaagcatctccaatggggatgctttacactcacacacatataccaatagattattcaatcaaatcggtgcggtaagctgcagacatggtgcccaagaaacaagcagaaaacggttattcttccatggttttggaggaagattgtgaagctctggaagttgcagtttctggaatgagaggatctcttcatgattcaatacaagagataacgcggaaaatacatcaaataattacaaaaatctcttcaagaaa

SEQ ID NO: 94817 - DNA, 661 bp, Cannabis sativa
cagttaaagaagtaggcgagattgcgtcaaaaaaattctttggttgaaaacgatagctcgtcgtccctatatgaatctttattttgaatctacgattagggtgtttttgatcatgagttgtactattattgttattagtattattattatttgtggtggtattggtgagaggcagcagagtatcatttttgattttatcatcacaatgatgatgatgatgatcatcttctctcgatctcttcatttttcactaattctcttctttacaacaaataattgaaaatggaaatgaaataatgtttacaaatgcacttctcatttgttctataaatagttagctaaaatcaatccttgtcgtggtaggagtagagttaaaatttaaaaataaaaatgaaaatcattcaaatatatatatcttttcaatatatatattacatagtacaacactaatcaagtctgccaggtttcttaaaattttaaacaatgtataaatagtcaacattaattttgaaaaacaaaattaagaaaacataatttcaataattataaatttgtaacgagattcctttattttgaaaagtttattgcgtgaagttaatggaagtgttacttaaaagaaaaacaaaatctatttctttagccctaaccgatttactaaaat

SEQ ID NO: 94818 - DNA, 647 bp, Cannabis sativa
tatatatatatataatatttatagggaaacactaatatatagcaaacgagtgttactttgctcctatattgatatgtttttatttcgagaatttgaaaaaatcataacaccatttctttatatatataactgcaaataaatttatattattataaaaacatagtttaagaaagtcaatcgcagctttatatatattaaacaaacacacaatgaactaactgtacatgttttttcgatcatagcttaaattactcaatattttctataaattatataatcgtaataagagtgttataatgtatacccttagataaaaaaaaaaattataatttctacttaattattagaactttgatagttattatccaattggatctgcctagtcacttactaaaaataattattacttattactttattttttaacatttatttgtattaatttttttatcttattttttataactatttaaaaagtaatatatattattagtttttactttaataagtattaataatatattttttcaataatatttaaaatatatttaatgtgtgtgtattttttttcaaaatatggaatagaagggaagcaatatttaaaaaaaaaatgagagtatgaaaacatactgaattcacatcaaata

SEQ ID NO: 94819 - DNA, 507 bp, Cannabis sativa
aaaagatgtatttttcaacttatcccttttatattgtcatcttttatttttaccctcttttttatagtctttcatttctacttcttctttcaaaaaatctaccaattttgcccttgtcattattctcctctcctttagaatttgctgaaacatatctccactgctcaaaaaatactactcccatagagttcttcaaagtttagtttctaaataatatactgataatattattaaaagagttgagttgaccattgaaccagattaaagcaacaacaaattaaatatatatatataagcttatagctaaccttattagctattggttctaccacaccagttacagaagagtaataattgcaattattttcatcagctgcaaattcttaagttatctcgtttcgaagcttccaacaaatatattttctctaatttatacaagataagagaagttcatcaacaaagtacccacttcaagcaaaggtctcaactagggctgaacatcgggtg

SEQ ID NO: 94820 - DNA, 774 bp, Cannabis sativa
caagcaacctggcccacccgtttgtttccagtaacccaattgtcattgcagtccatgatacccattatagagttcttcttctttcgagtatttgctttcctatggaagtacttcgtgtttcgatccccttcttttagccaaatagcgcgactctgttgcttccaaaaattttcttctttatcaagaagaatattatttttcctctcaagctctttaaggtgccgccaatctgttgaagccgtgctcaatgaaaggctggctattttatcttccatctccttgagtttcaaggtcatttctttcttttttgccttgttccagtgattgagagcattcccacattcggttagtttcttcttcagctcataagccgtggtactacttgtccttctattccaattttctgtcacaatctgagaacatttttcttcttcagcccaagcactctcaaaatggaacctagaatgccacctagatccagtcacatcctcatttgtttgatacaaacactgaaggaggagaggacaatcgtccgaattcactctttcgagatggaaaactttggcagcagggaagatatgaaaccactccgaattaccacacactcgatcaagtctctcaaaaatgaggttatgttgccttccgttacaccaagtgtagcaactaccctcaaagtcaacttccttcaaattgcttccatcaagtgcttttcggaaattcgtaataagatgacccggttttggttgtcctcccatcttctcttttcttctcaaa

SEQ ID NO: 94821 - DNA, 901 bp, Cannabis sativa
  modified_base (684)..(685): a, c, t, g, unknown or other
aagaaaatactagtaacaaaatcatgatcacttatcagtataaaagaacaataatatcctcatagttatgtagtcaccgaatagatagatttaatgagtcaataaaatatcaaaataatatctacaatccatcatttctcatttctaactagtacataactaatttaaatcattcagaccattcattcaaccttaaatacagaatcagtttttagtggaaagtttgataaataaaataagactaaactaataatgactttcttcttcaacggtaccatcctcatccactagcatcaaactgagttcctataataggagaaaatagagggtaagcttataaagtctagtagaaaaaacaactaatataaaaggacccttggtttaataaaagattcttgcatggttggttttttaaaatgaattatctcatcaccattatcaaaatatataatcaaaatagagagagaccacaaataatcacaaaatcaagtgtcaaatgaatattacaccgtccactagacccctagctctcaataccaatcatagaaaatgatatccaaaaacaaggtagtcgcacctagggctgagcatcggtcggtttgatcagtttttttacaaatgaaaattcgaatttcagttttcggtttggattggttcaatctgaaaaccgaccgaccaatccannaacatccttaaaaccgaccaatgtgaaccgcggtttggtcggttaaaaccgacaaaactgatttttttttttttgtgtaaaatattgccattgtcaaggctaccaatcacatagaataccctctaaaagaacgccatgttcgaagtgagtgtttttttaatgcattttttaaaaaataagaaaagaaaatggtatggtttgatgattgtatatgta

SEQ ID NO: 94822 - DNA, 7653 bp, Cannabis sativa
  modified_base (916)..(916): a, c, t, g, unknown or other
tcagcaacctcgagatccttagtgagctcagtgatcttcttctgagcggcaaacagtttcttgttcgcttcacccaactccaaccgaatagctccaacttcttccctggcttcttcagcatccttcctagccaagtccgcctccgcactcatggtgtcagacagagccgtgttcctggaagcagcagacttagcccgggagtaagtgtaggccaacctcagaccgacctgcataaggaaaaagctttagcatttgagctaagtatggaagattaaagggaagtatccaaaaagacttaccctggtgaactccttcaagactccgcccactagaaattccaaagaatagtcattgttagcaccagccagttgctcactgacctcaggaacaagtcggttcatgtaatgggccagtatctccttgcccttcttggcctctataagcactggaaaaggtggagtaacctatttaggatcactcctgaccagttcagacccaaccttcggtggtctagactccttggacctagcagctttgggggtagaggggtttgcagcagttagctgctcggaaagattaatgacatccccagtagtcctctttaccttaaaagaggacccctcaccgcccttagaattcttggccagaggagaggcgctagagcttccgcctattctcttcctcagagcgtcaagcatctgccaagacatgtctatacagaacgaaaaacaacatcattagaagaaacatatataaggcatgaaaatcaagaagctcaaaaacaagacaaagtaatatgcaaggtgactgcccaaaaaagactcagaagtccatcatcacctgacatcgatcttatttcagacataacagctttcccttttcggaacatgggaagggatggccgaacaggtgaaangggctcccttatgcgaatcgcatgttcaacaggcctgggcgaggacgggagtttcttcgtcttttttagtggagtcacctactcttccttagcctcatcttcaggattcaagggctcctgagcatactgattggccattgcacctcccttcaactcaactttgcgcttcagttgaatgagttcattctcctgatgagctcgttcggtccggccaccaccagatttcctcttcttccccgtcacagacttaggagtaaagtccttaggatagagcccgtacctcacaaggttatcctcggaggtcaactggataatattctggtcttccctaggaagctgggcaagttttgacctctatccccaagagcaagagtgaggggagggaagtgatatgtcagaatcttctggaacctagtgcgagtgatgcccgtgccatccaccatgaaatctggacctttttgcatggtcacgtagagatatggtcagaatcgacccctcctttatgacccatgcacttaacattgatccaagtatctaactgttcagtaaaagaggtagttgttggacaaggagcgcacctaagcgctcaaagatgagatcaaaaggctaacatccaatgacttcataatagagacattctatcccagtgggtatcaaacccagtactggtgccaaaacccaacaagaagtggagagtatgcatcgacttcaccaatctgaacaaagcatgtccaaaagagtgcttaccacttcccagaattgaccagcttgtagatgccacagctgggcatgaaatcctaactttcatggatgtgtattcaggttacaatcatataaagatgcatccactagatcaagagcacactagcttcatgacatacctaggcctttactactacaaagtcatgcccttcaggctaaacaatgcatgggccacatatcaaaggctagtgaacatgatgtttatagatctcatcggcctcaacatggaggtgtatgtggatgacatgcttgtcaagtccaaaatgggtgggggcacatgtaggacttatacgagtgcttcaaaatccttcactgctacaacatgaagctcagccccctcaaatgctctttcggtgtaagctcaggaaaattccttagcttcatagttaacgataggggagtaaaagaaaacccagacaagattcaagcctgtttacacatgaagtcccccacaacttttaaggaagtacagagcctaacagggcgcattgttgcattggtagatttgtgtccaagtctacaaacaaatgtgtacccttcttcaacattctcaaaggcaaccaaaaatttgaatagacagaggaattcaaaaatgcattctaggagttaaagaaacaattggccaaaccagctgtgttgtctaaacccctagacaatgaagagataggcgtgtaccttgtagtcacagaatacgctatgagtgatgtcttcacaagagaagaagtcagtgtgtagcaccttgtatactacatctgtaaatggctaatcgatgccgaaagtgagtactcagtcatggagaagctaacctacaacttgctcttggcttctagaaagctaaggcccgacttccaggaaatcctcataaaggtgtacaccatcaaccacttcgggagatgggctaaatgatgtaaaaacttgaagcattaggccgactactcaaatgggccattaagcttggccagtttgagatcacatagcaaccaagaatagctatagaaggtcaagcccttgcagactttgtggctgagtgcaccaactcaactcttgagatccctcaagactcaggagaaaagtaagacctaaagaaaaagaaattgcaagagtagcaacaaaatcccaaagaactaacatggaaactccatgttgatggaagctgcacggaccaattgtccagtgcaggcattgaccttacagcacctaggggtaccaactgcacggagcaatcaaatttagcttcaaagcctcaaacaatgaggctgaatatgaagccttaatagttggcctcaagctggcacataaagtaccagctaaccacctagacatattcaacgattcttagctggttgtgaatggtcctaggtgaataaacaactagaggtgataaaatgatagcttacttgagcaaaatcaaagactttctaagtcagctcaaaggctacacaattagacagatccctagagagcataatgctacaacagatgcacttccctatttggcaagtagcaccattgctgacaaagcaaacttggtgcccatacaattcctagaagaacccagcattattatcccaaaagaagtcaacatgttggatgacgctctaacatggatgacacctatcgcagcttacctcaaaattgaagcattggcaaaagacaaaaatgaaggaaacaaaccgagaagaaatgctgctaggtaccttatcctagataggacaatgtacatataagactattccatacctctcttaaggtgtgtcaccaaagccgaacctgaactactaatgatagaagttcatgaaggattctgtgacaaccatgttgcggcaaagcctatccaagaagatactctgacaagggtacttttggccaacaatgatcgaagactcaaaggactatgtcagaaaatttaacaagtgccagagattttttataatcccaaggactccacccaatgagcttgcgatgatgcagtatccttggccctttgcagtgtgggggataggcataattggtaaacacctaaagggaaaagaaggggtacactttgctgtcattgaagtagactacttcaccaaatggaaagaagctgaacccttggcaacaatcacctctaagaaggtccttgactttgttgtcaagaacatcatacgccaattcggacttccccaaaagattgtgttcgacaacggcaagcagtttgagagtgacatgttcactaatttatgcaatagacattgtgtcatcaggagcttctttgttgtggcccatcctcaagaaaatgggcaggtagaagctgtcaacaaaatccttaagtaaactttgaagaaattccttgaggaagtaaaaggaaactagcctgagttgctaatagatgtcctatggtctcataggactatcgagaagacggcctctccaaactccatttgctctagcttattgctacaaggcgatgttgcctttcaagctagtgccattgtgtcacaggaaaacaacctatgaccaacaaataaacaataccctgctagtagattcccttgacgaagtagaagaaaaaagagaacaagccaacctaaagttgcaagcctactagcaaaaggcagcaaggcatttcagcaaacaagtcaaaagtaggaaattcttcattggaaaacttggagctccaaaggctgtacataaacactaaagactcagcagcgagggtatgcaccaagttacagagataactagtaagggagcctacaagctaagaaggcacaacgagaacatggagttcgttctcctaccaagatcaggaatggacagcaccttcgcaaatactatcattaactagcttacataacactattccaaagtacctactcaacattagagtagaaaagccctagtacccagggcctttttatcgtggtctaccaccgttcttcaatggtagcctctgctttaccaagtaagcaggggtagccacttgacatctagaagctaaatcattataatgtaatcttttagattcaatttatgtatgttgcaaaacaataaataccaattaatgaatatataacaatgtttatattctatttattgtgtctaaaccacttactcgtacattaacttcttaaagttattcttttagttccacgtgccaactatggatagcaccctaagaaagaacccaagcaatgtcaatgaaacttggtgaatagaaagtaaccaagagacttgtttgcatgctcacttgaggggcacccatactgtacaaggcatctaactagcacaaagaacttatgcagagaaattttaacacttagaataagctactaaatttgcctataagttgtgtaggcatacttcggcttgacaaagtaaatctggacccttgcttgtgaaggccataagaaaataaataggattaaatatatccttcacacaatccatgataaaaaaaattcaatagggccaaataatagtagtgctcaaaaatagagggcctataggccaaagatatgaacatgaaggtcgtgggctaaaaataaagtagtgttctaaatgtaaaaggccacccaccataaaaagccacgggctatacggaacacgaaaatattttctatgttacgcaaacataatgttgaatcctactaatgaaaaaattgtccaaatgtttgtaggggcaagaagagctaaatctaaagacacgaggttgggatcaccagagtctaggttggccacctcctctacagttagctcaacaagcccctatcatgagtctctaacgatgacccctctcgataggcagcgatttggcctgcctccatccatctctcgaaaaatgcatttcaacgagccaacgttttttccacaaaagtctcactgccgatgtatggcagacttgctcggcagttacgcaacttgaactcataagtgggatcggaggagaggtcagcgtactcctcctttatggcctggtggccatcaagagtctccctcagtttctccttgtgctcatcaaggttagactttagccaagaggtgaaggcagcttgatcagtcttctttgtgttttaagcgccaagcgtagtctctaagccagaaagcattctctatctctctgtcaggaaagcctccagcttagatatggcattttccttcaccataagggaagcctccaagttcttcacctgttcccgaagaacatttgagcatcctcgagagccatcacatactgagctcaacttcattaaggcttgaaaacaaaacaaaacaacatcagtgtcaaagccataacactagcaagctagtccccctaggaatgctatggttggcaaacccctcatagcagcacctaagggcagccaaccacttggaacaagcctcatggtccaccagcctagcgccaaaacggtgaacagagcttaaagcacaacttacaaaacgatgatcccgaagaccgatagagtagagcctcttttacctgtagtcagcaagctctttcagatcctcatccatgagggagagatctctctttatgcacctttttgctaccttagtagacctctacccagcaaccaacccttatgctttaccgggcgtttgagtaccctagcctgcagcccgtatcatacgttgctgagctagtgtaggcccacgtagagtgggaggcagtgacaacctgacaacatctccaccatgggaattcctggccaccttggccttcactcgtcttgtgggctcatctaaaggactcccagtaagacctctcagcctggaagacatatttgcagaaagaaagtaacaaagttagaaagtaatcataaacagtcaatacaagataaaagcatggtgttatcaactattaaacaccatcatcatcagaagaggaacaatcagagtcctcaacaactgccttgcccttgtctctagatccaggcacgaggcgagtaggtctctcacaagcctggcctttaagcccaatatagagagaagcatcaccaattgcacccctgctggccaggcgccgatggtaggacctctccttcctctctagattatgtgtactgcgagataaaggtacctcatcatccaagtcacgagcttgcacaatctccaaggcatgcctcatctacagctagtgctcctacaactctaggagcaggaggatttaagctatacttttagaaattgggaacactggtcaaccagactatatttctttgctctgccgagaaagaccggatgtggtttcccctatcccttatttgcaaagtagtgatagagcgtctaaagaatggcactggccaaaattcgtagtacccaatcctacggagcacataggcaataaagtacttcttagtttacccaccgaccttcgacatggctgtgcaattattaccacccaacaattggagaccgatatcactgaaataaaaatccctagtcttgttttgcttcagtgaagacttcagatcaaagtagtattcgatctcatagggtgtaggatgaggccagcctagctccctatataagacgtacatttccgaaaagtacttgatgctttttggcgggagttgtgtccgacacatgcaaaaataagcaacgatttccagaaaatactgatgaagcggtaacactgccccatgcaaaatatggccctcaaaccacaccaagtaacctagagggagtcggttcgcccaataatttctacgaggaatctcacaatggacaccccttactaggccacgagcaagaatcttgctaaaggcctcattcgaaagagtggaagcgagagagacccaactgtctccctgtgatctcacatcgaatgtctccaactcaggagactgttcttagacatgatccagtccaagctctaaaggctcaccaagcctattcaggaggttatcgttggcatcattatgacccaaggaataatttgggaggacagaacaagtcttgtactgtaacgtccccgcttcaagcctcca

SEQ ID NO: 94823 - DNA, 2083 bp, Cannabis sativa
gacaatgtcaacttgggcgctgggcgaaacactaagtgcccaggttggctttcggtttgcgagtttgtgtaatttcagctcccagagcttggattaggttgctccatgtcttcatggtacataatattgaaagatagtaggttgaattcaagttattgaagtacgaacttccatctcggagatcccgaagtcaacttgggcccagggctagggtctcctgccagatcaattgttatgactaaggtctactcaacttcgtgatgtcatcattcatgacacgtgtcaaacattgatgtcctcgtcactaggaaaagtttttagattaacatttttccccaagtcaactttacacttgtatggagttgtcttgatgacgtgaaccgagtctatttcatttgaaactaccaaatgttaatcaattttgacattctttggcaattgcatatactcttcaagcatttccaattaaattaggactttggaactctttggcttagtccttggaaattttaaaaattaattaacaaagaaaaagatgaaaaacttatcttttacatttttatttaaaattttgaattttcttattttttttttcatggcattaggattaattagattagaatcttaatcctagtagtagatgtcattcggaattagaagaaaaaagaagagaaaagacttttgatcttttgcttttcatttatctttttcttttaattctctaattttttttttttttaattttaatagcattaggatttcatgttactttttaaattcagattcctatttgcataagaatttcaaaatctactaaaatagagaagggaaaatatataagtatatattttacttgtcatttacctcttcctcaaaatccttaaatttaaaagacttctattagatttaggattagaagattgaacataaataagagagttgtcaatcaaaatttctacacttctcaatttcattccacacgcctacacctttagagagcctttgaagtttcatcttcatcaagccttcaagcattcttcattccaaggtagaaaaaccttttcttttatttttgaaattggtgcttttttttgagaaatttcttcttctcctcctcctttgttgatcttactccaaggagttttagaatcctgaaaccctttgaatttttttaagaccttcaaaattctaaagcactctcttagtgtcttgaaaaatttcttcaaaattgcttgaactttctcaacccaattagaattgtcttgggctgtaagcaacttgtgttgtcgagctgtcgtggctaggatgaagagaagtagaaggttgcatgatgaatatgactcccatgtggcttagttcactagagataagctaactgtgcctaagtctaagaaattatgatggaaactaagcttctcaaagctgcaattgagagtgatgatccgagagatcgaggcttcaagctaatgccttacgcgatgattactcttcccaagactgtcatccaaaagccacgatacggtggtcccatgtcttccagaacacttgctacactggttggtcaagattctacatgaatgtgggtgctcacttaccctttcatccatggttcataaccatagctatttgtttggtgtctgcccacgagaaaaagccaaatgactataggattcttgccaccttcttcatattttaccgcctaagaaactggcctataccaactccccatgaaaaaaactttgtttgtgacttgaaaagaagtccaacccacatagaagaaggtttttaccacttccaccaatctagcccatacatagagaatattaccaaaggcaattgtggcctttaccaccaagagtactactatactctcattcttccgttaagagatataaccttccaaaaatctagccctttcaaaagacttgctcctttcattgacatgaagaggagagttgatgccatgttatttgagattgatgcatgggagagagatgggcaatctctatttggtactaaaaatctcaagaaagttaggttgattatgtcctgtcaacgggtgcatgtgttggaattttatgcc

SEQ ID NO: 94824 - DNA, 581 bp, Cannabis sativa
aaaaattctaaaattatatattatttttatttgttaaaaaacttaaggttttttttttcaaaaaaaaagttaaatatttgacaaaaattaaatagtacaaaaatatgtgaagataaataaaattgattttggaacaaataaaatatatatataacctataaattgaacacatagttttaattatttaaatacattaaaataaagagttataaaaaaatactttttataggaaaaaatatttaaatgattttttataattattttaaacttgataaagattgaaaaatataaaaatataatttgcactcactgaaaaaaaaaaatataactaattagataaaattaagttcattaatcacccacatagaaaataaattatgctaactttgtgacaaataaaaaaaaaagaatatttatctatttaatgtaaaattatatcatccacaataatttttaaataatgtgagacttttgtgaaatgactctcatattactaaaagcataaaaaatgtagaaaaatgataaaataaagatatatttaacaaaattaataatggaaaataaaaaattctaaaaatata

SEQ ID NO: 94825 - DNA, 665 bp, Cannabis sativa
aaagtggtcatatatgaccaatttttataactttgcatttaggggaaaaaattatagggtaatgtaagcatattaattcaaatttccctttccaaaatatattactatagaaagatatttttttgtttttttttttctttattttatttttaaaattttgatagaaagataattttttatttttgatgaatgtaataaataaccgcgtcacatcacaatagtatttctttaaaaaaatataaatatttttatattttattgtttaaaaagaaaattatactagaaatatattttttttaagatatgtgggttgcgtaaaaaaagtaacaatagaaagatattttttagatgtgtaatgagtttaaatttgaattataatttttttttaaaaaaatactttatgttatataaccacatgtaatataagataaaagataagaaatatgtgtaatgagttttaaatttaaattgtaatattttttttaaaaaaaaataaacaacattttctattttatactcacatttaatataatatagatatataaaaataattcaatagcgtttattttaaatcactacatcgttccgtaatgctgtcaagtttggctacaacttcataatttctgtcatgggaaaatgataggtaactatccaaactaaagaaa

SEQ ID NO: 94826 - DNA, 891 bp, Cannabis sativa
aagacgaaagctgaacaagagtgaacctgagctaggatgggattgtacatgtcatggcagcgcgacctggagtgtttggtctcaggacatctgaagttttcattttgtaatcattgtgcaacctgaatcatgtattttgtataacttataaaaaaagtttagaaacgggatatcgacttttataaataattatgtaaagtttataaagtttcttatttaatataaaagttttaatttgacacgatttttgagagagttctttgattatcaaagatagcaaggtaattgaaaaatcactgcagtgtgccttagcattagggcgttacaattttagtatctgagccgctaggtttgtctatcgaagctcgtcaagacatgtacaatcttcatcagagaaagctcggttcacgattcagtaagcctgtacttgtttagtattatatgtgattattaaagcatgttaggttgcatattagttataattatttattttaaatgtgttgtcttaaaatccataagagcggtgttaagtttttatgatcgctgtctgacctgcttagcttatgggttcgcaggctaagtcttattaatggacgcccagcaaaatacaagaagtcaaggtaatagggttgagaccagaggcggtcaaggaaatcaaattccccaaaatccctatggtcgcggccgaggccgtggcagagttcagggtggtcaacatgtgaatccacgacaagctcttctggattgggagcaaagattcgcggaaatgcaagatcataaattcccagaagatgaagaaattctgagactaaggcagcagggtcctcctacagtgcctccacagcaagctcaggccgttttagttcatgcggtgccagcagaacaacctgt

SEQ ID NO: 94827 - DNA, 709 bp, Cannabis sativa
tgcataaattattagagaggaaaagtgttttagatattggggtaaaaatacataagtatttttttctttcagatttatagtttatatatttgtgaatatttttatttgaatagaggtatatttgttagtttaattaaatatactaagtattagaattttatttttataaaattgtgtattgtttatgtttttgaaaatataagctatgtatattttggtttttcttttttttttttgtgaaatttaatttatttttagtgatatagtagtgtgcatagctaaaaagttatagaaaatgtccttagtatattttgaattcgaattttgatttaaaaagattcataaatttttttatagcattttaattttaatgttaatgtttaacttgttactagaaaaaataaacgtgatgtaatttaggcaaagaaattttttagtgtaagtttaattgtttagggaaaaaaagtttagcatagtttattataactttagtgtaatttaagtaatatttaattttaatttttaattttacaaagtttatttgatattagaataataaaaaattttgattttttgtgttgatatgtttgcaatgtggcaagttattttttacaagtctaatatgcttattcattaatagttttttttagaatgtgcatttatattgttaagtctttctttagagcaatactagacgatatttgaagtt

SEQ ID NO: 94828 - DNA, 903 bp, Cannabis sativa
taggacacacgtaccatttcaagtatccctgtatatagaaaaacctagaatcaagtcatacatgcatataactataagagtaaaatgtatatgtaagtacacatgcatgcatattttaatcaagtcatacatgcacatatatatatatatatatgtatatttagtataggtactatatatattatgattattaatgaagatgttatatatacaccattttgattgttttttttttcttttttcttgaataaaagatatttgagtctcgaaatattctcattattaatatgtagccagattcatttataacattaattcagctttatatctcaatttatatttgttttattattcgctgaattttatttaactaagaatcagactaattagcctataataataatctcattaattaacagcaaagatcaacgctttaagcaaataataataataataataataataaaagcagcagatagacgaaacgtacgtacaaattaattattggtcaacttcttccaaaacaaaggaataatagaagacgaagaaaagtagctaaaacagcatcagtctacgtccctacctagctatatatatctctgtatatatttacgggttattcatcattcatgtatatcattttgaataatcatgtatggtgtgtcttatatagtactataattggactgtcgatcaataattaatatataaattatttgtgtagtactggtccccaaattaaagttaatagttatttatcgctcatgaccttatcaatcaacatgctgatatatataatcaagatcaaatatattaaacgttggaagaagaagacacacatatttatatatataattctaataaggacaaaattatatgtatatatatggatatatgcaggtt

SEQ ID NO: 94829 - DNA, 557 bp, Cannabis sativa
atttaaactcaagatttattctatcaaaattgcccataataaatgtactttaaaaatgggttccattacctctaaaaattattaagatagtacattaatatcttcaaattcatttttcctcgctatcttttctaacatgatcatgatgatccttatttaaaagcctagtttaaagttatgtatagattatattatatatggtagtgataacgtgtaacgccctaactattaggcacgctacgctaatcaataataaaactctaattccttaaaaatgggattactagatagatatgcgcgagaaatttaaacttttatctaaaacagaatgaaaataaaacttgtaataactttaaactttacaaacaaaagtgacataattgggatcccacaaatattttacaaaatattacaagtccttttcactagccgacccaagcgggaaatccgagttacaaaagtacatcactggtagactccaacccgcttggtctagtgtggcctgaacatgtacaagaatcgccaagctcccacactcatggttgatcacaaaccga

SEQ ID NO: 94830 - DNA, 587 bp, Cannabis sativa
ttttgttcttattaatgtatttttttgtttattttgcagttaaaatattttttcttacaaaattttcacatttatgttgctaaaatttttctcctattgaaagttattcattgttggattttttttcattttctttgtagagagtgatgctaaagttgttgtcgattttgtcaattttttttctaagggtgtctgtaattgaaattatttttcttagacctattagatttttgttatctgtctttttgggtacatgtattctacatgtaatgtgaaattgtaaaaccgcaatacacgtgttagtaagataacagatgaaaaataagatttattggttataaaaattattcattttttaataatcaatgtatcatttgactctcaacaataaattggttattatattaaaaaaaaaagaccaattaattatgaagtttttacaccatatactgaaattttaaatatttttacttttttactgtggggcggaaattttgtcaaaattattgtgtaagttttatactgtgtattgtgttaagtttttactgtaacgattattttttaattgtttcactgttgttttaatt

SEQ ID NO: 94831 - DNA, 628 bp, Cannabis sativa
agatataaatttaaacctagtgcacataactaaaaataaatttctattatttttctcaaaaaaaaaacttacaataaatacataacaatacttttgtaatatttttatagttttttttaaacttacaataaaaatttctttctatttttatattattacatttattttgcttattgatctgtaatattttttaatgttatttttttaaaaaaaaatctttcacgtttaatattcttatactttatactcgttattctcacatttttcagactttaaacattaatttttttcaaaaaaaaaaagtttataagtgattttctttaatttataaaattttaatattattattttcatacatcttgctaacattttggaacttttaatttgcttaaaactttatataatatatttttttaaaaaaatacaattgtggtatagtttctccaaatgaaaaggtctctgcaaacatcatttttggaaagttgttcactcgcggttgtcagtcccgaaaggattcttgtggaatgatagtcgagtatggaaggatgttcccagatgactatcatgtccactctgggttcagtcttcaaaatagctagccctcccctagaaaggagttccagctggc

SEQ ID NO: 94832 - DNA, 701 bp, Cannabis sativa
tggtatttctaagctttgggcaatcaaaggcccaatatcagggattagttcattgttggcatcaaaactagcaaagtcaggccctgggaaatccaaaacttcagacccaattgagaagttaggtacagtaatttccatattgatcacgttttcaatggccacctcattctctgtactacccgcatttccaacattcccatacttttcgaaattacgcctcctgcacgtatcaatagtaccacgattgtcagtcgggtacgacattgtggctgttgtagtaagcatcttttttgccacgttacttcctggcttccccagagccgtcgactgtcctgcctgaagcagatgttcttttccttgttcagtgatactcgacgtggctgttttcctcttccatagaccttttcgagctttcctattgacttcccactccggtaccccctcattatcagtcaagagcatcgttcttccttttctagcatgattgaaacagttgctccacccagtctcacttttaatccatatcccatacattgggatggcgttgccagtagcaggaaacatcatagccgtcagagcctggcaaactttatcctaatgtgcaagcttaccacagttgaaacagaggtgtggtaacttctcatatttgaactggatccatgactctggtttgccatcagctttcaagaaaaaccctgtcg

SEQ ID NO: 94833 - DNA, 1082 bp, Cannabis sativa
  modified_base (677)..(680): a, c, t, g, unknown or other
ggccatggtggctccatgagaatcactttatagctcgacccatgagttcttgcgaaaattgcttcgccttggtgacagttttcgccttgagtccatgagagaactaacggaggctactcgacaagctcccatgaacattgacagaggtctcgaaactgaagccaaagtttcaccttcaacggcgatattatcactgatatcataatcattttggcttgttaataaatatctttaagcattgttgtgataatttcaatacgcaaagtaatagactcacaaagtgtgaggttggtcctacaaggattctagttaaatactttaaaattaaatctttacttctatttagtgaatttaaaattaagaaaaaagtaagattcaaaacactaaataaatagtgaaagtgcgaagaaaataaatcaaaaagaaattaacgatgattaaagttaggggtttcgatttcaattgtatctattgattatggcctaatatggttatcttccttttaccaaattctatgtaatagcaggtttactaaggtaatttataatcttctcagatacatgcaaattttctactcccgtgataaattaaacaagcaacatacattaaacacaaaaaccctacgagctatctaaaccatacaggtactctcgtcctatattgaaattcagttctannnnactataacataattgacactcacttctcagatctcgcatgaaaatcatagacagttaattggtaatcaggcaattaaaagtaattaagtaagaacgaagtagaatacatagaaattaagggaaaataaaatcatattagaaccataaaacaatgtcaaacaaatatccatctagaccctaattaagtgtttagctactcatgtttatggaagcgaaatcgtacatattaacttaagaaaagagaagaaaatagagaagaagagaatgttgaaaaccctctgacgaatgcctctagtattgaactcggtccctgaaattcgtactccttttttttcctttaatttccttctcaattgctaatcgaaatcaactgacgttcactcattatatagccattgaggg

SEQ ID NO: 94834 - DNA, 685 bp, Cannabis sativa
atgactacatttttacagtatttttggatagagatggggtaaatgtgaagccaagataacttattgttcatgaaaaaaagaaatggcaagctcctgcaccatcaaagttactaatcaatgtagatgtgacgattcgtactgaggatgggtgatgtatagggatggttataagagatcacacaagacatgctaaagcctctaaatgtatatttattgatcttctttactctcctctgattgctaagatacatggtataggggccaaagctcgttttcatgctgaaatgaatctccataatttgtgataaagcggttgatatgttgggtcatccactagaagagtggaccgaggagctgttgctttccaaagttgcacaagacatcttcaaagatgagattttttggaggttcactttagtccaagggataccaatatggtggctcatgtaattgcaagtaagggtgttcatcaaataatcaatccaatccaatccgcacgatccaatccaatgtgtgaatgtccgcactttgtagatttgattggattggaaattcgaaatctgcacaagtatgttgattgacatgtaaaagtaactaatcaaatccaatcaatacatatttatataaattttaaaaaaaatatatgtataactaatattttatgtaaaagaatagtaatttaaaa

SEQ ID NO: 94835 - DNA, 521 bp, Cannabis sativa
tttcctagtgaacaaggtgcctactctccatttaagcttttaaatcctacgtaaatatttttatttttttttccttcttttaaagtcttttctagtttaactgctaattgggcatttctatttctcttttctcgcaaagcttgagcctcggagtcctgaatcagaggaaatgaagaaaaaaggtagcctaatacaaactctttattgaagcagagttgagagtttaaggcttggtcagcacgtagttgcttcgtcaacaaaggctaatcaccgatttccaaatcatttacaacgtgagtggtaagggccaacgtcggacttctaaagaggctaaggagataatagctctctaccttgccaaaattatcacctaggctactaaggaggataagctcctagaagaaaatttgatgcttcactaccctaatccctacatggagggggaggagattttttaacggtttattgcagcgtacctaaaaaaatgtgccctaggagccaatactttcagaagaggtaac

SEQ ID NO: 94836 - DNA, 914 bp, Cannabis sativa
  modified_base (57)..(62): a, c, t, g, unknown or other
gaaactcctatttcaactagcgctacaactaatttagaaacccaaaccgtaaatttnnnnnnaaaaattaaaaaatagtatatggggtaattctttttttttttccaccaaatatccacattctaaaactcaagctctcaaaagatgaaaatggatacttattaatttttattaatttttttatatgaatattgtaagcataaaatttaaacagcacgcgaagcgcaaaaattgagtttactaaacactatataataaaacaataaaaatatctatataaatatataagaaaaaattgagtttttatccttaatttttctatctaatataagaaatctctcatttttacatcatatgggttgagattgttccaccggttgaaaaaaaaaattaaaaaaagttttttagcaaaaaaaaaaagataagtaaaagttgagtttgacttacatatttttatatgaatatattgttaatatgatgtgaaaagagatatttttaatttttttttttttttttttttgagtaagtagttaaattaagtgtagaaattcaaaattctcttttattatttgttattagattaaaatttgatgatttaatatagaaatttttacactaaaaatacaaaagactaactttattacatatatactacaacacggtgaaagcaacttttatacacttttgcttaagttttttacattttttacatttccctcttttttctcttctttttcctattattttatatttcttttcaatttgttttttttaaaaatatcaaccgccatagttaaacacttttccctccacgatccaactccattttccattttctttttgttcttcaaattttctttttcaactcccattaaccgaattccataactgttttctctctttttatttttctc

SEQ ID NO: 94837 - DNA, 827 bp, Cannabis sativa
gtattaaattgtctctcaacatagttgttgaagtgtttaaaaacatttgctatttctgatttggcagtaagaggaaaaattcaagaaaacttggtgaaatcatcaataaagcaaatatagtatttgaaaccctcgggtgaaagatgaagggatggtccctaaagatcggtatgcacgatttcaaatggaaaatgggtactgttgtgtgaagagtgaaatgaaaattggtgaagtttgccatattggcaagcatgacaaatggacatgtcagcagtagaaatattaagaaatttaagaactttattgagaacttgaatgttggggtggccaagtctattatgccacaaagatacaagtttggaattttttgtattacaaaagttgaaagtgcttgtagcagaattgctattacaagtaaaggcagaaacagcatttgcttgagacaaagaattgttctttgctgcagcagaggagttgtaatgctgaggagacatatttgcttgatgagtaaacttgggtgctagttggtaaagcccatctttaagggcaccctgaaggagagggatcttcgattgattgtccttgacaaaacacgaattaggagtgaattcaacagaaacattgttgtcattagtaaatttggaaatgctaatcaaattttttgtgatagctggaacatgaagtatgtttttgaggtaaagggattttcttgcaggaagtgtgctattaccaatgttatgtatagatagggaagaaccattacctacaacaatcttttctttgcctttgtaggtgtgttgctggtggagattactattgtcttgagt

SEQ ID NO: 94838 - DNA, 1306 bp, Cannabis sativa
tggtgtcacccaattagtctcattcgccactccatgttacacaacctggtcattattcagattcaattcagcaacagtacactgcttatcctccctgacccttttcccttccaaattctcattccgcttatcaaccttatcatctatactctctaatttttcagcagccaaattatcttcaacacctgctttttccttcttctaggctttttctcccacctccattttcttcttccaggtaacccttttctccttgttgcaattagcaacaatatgtcccaacataccacaagcagcacacttggatggcagccattcatattcaacggattgttcaactagtcttttatgcttattaatgaatcaaatggttttcagagggttatccgagatatccatgtcgacaaaaacacgagaaaacttgaccattgttctgttttgagtcaccttatcaaccatgattggttttcctatagtactaacaagagcacttaggttgttctttccccaatattgtagtcccaacccatttaatctcacccacacagggacagattttaccatacgtatcgaatctaggtctgtcgaccatggtcgtaacacaactggttttctatcaaactgaattacaccagattccatgactaaatctctttttgctttatctctaaaattcaccaaagtgaaccctgaatgcatccttacaattttttctatccctaggttcccccaaactctattaataaacccttcaaaaactttgaaaggaggattagcacctaaaactatacatactacagcattcttccagtaggaggcttcaatttctacttcttccaagtccaatttagcaacaatctgatctcctatttttaagggttccataaaattcaattgggtagaaggggacaatacctgattggatttgaacttgctccaaacatccttagcattggatcggaagtccaccttctctgcatcatcaggccaactcaacgatttaggggtaacctccgcctcttcgcgagttgcagaaacgacctgcacttcagtcgcagaacaaatctgctccaactccaacacttcgcaagggtcatgaaatacctcgtgaaccaaatcagaatcttggatcggagggagctcttccgtcacccctggacttcccggccgcaccaccactggctttcgaaccactcgtttcttcttcaccatgagagagaaacagaggtcacgcacgcctatgaattatattttaaatatttaaataacttagatatttttgtacaaatttgaatgttgcttaatt

SEQ ID NO: 94839 - DNA, 693 bp, Cannabis sativa
tcctttatctctcacatgaactctaacgaccactctctatcttctcaaagaaaccagatgaccactctttaccttctccaatagaatctgaaggctcctcctttcagattttggtcgagctccctcaatctcgagatctggtttgtatttaattttttaattttttattactttgagtataaatatgcctatttggttctatcgaaaaaattctgcttattaattttttttttttttgcttttttctatgtttagacctaagaaatataagggtggtggtggtgggagtgaggagatggggtggcgtggttttgtggtggtagtgtaattgtggccgcggtggtgggagagaggagttggggtggtcgtggttttggtggtagtggtgtaatggttgcagtggtggtgggagagagaaggagttcgggtggtgatggtgattgtaggtggtttcaatgttttaatagtagcagtggcagaagaagaagaagaaggattgggggaggggttctgggatctttcgagaagaaagagaaagaaatgaaaaagaaaaaaaaggaaaaaggaattttctaattttttatttttataaattgtttttttttttatttttaaaattaaaattatgtggaccactaaaatttttccacgtgtacttttgtgtacacataggcagtccaccgtggcacttaa

SEQ ID NO: 94840 - DNA, 742 bp, Cannabis sativa
tcaggggctgatgattttgtgcctgctgttctgtttctacggattctacaggcacctttactttaacagcagaggtcgctatgcaataccgcctaatcgccatgaaaatccttagtttgaatgctcgggaattgaggaacccaaacacattcaaacacttacgattgcttgctcaacaacaatcgccccatgtctaatttttcatggaaacaaagcttatttctaattcgtttactcgatttcataaaaatcttaattttaagaatggattagaggctccaaggatcggtctaagtggtggattaatcctcttatggaaagacaatgtgaatgtcaagctcttgaattatggttattcttttttcgactgctttatggcttttgaagatggcccaacttttcactttacagctttttatggtgcccctgctgcacaaaatagatttgctttgtgaacccttttaaaaagattggttgatgtctcacctctccaaccgtggctcgtaattggtgacttcaatgagatcttatccaatgcagataaagaaggtggtcccctccgaaatgaaagtctaatggcagacttttgtgcctctcttgaccactgccacttaaatgatacaccatatgatggtgatgcgtacacttggattaaaaattgaacagcagcagctactttaaatgagcgtcttgactagtgtgtcatcaataatctctgggataatgtctttgtggttccatg

SEQ ID NO: 94841 - DNA, 514 bp, Cannabis sativa
ccctaacattgtctaaattaagaatgaattcacattttaagaaaaattattaacacaaaatctccaaataaatttttgttttgtatattttatcacaaatagtaatatgaagttgcactttcgttcacatttatcactcttgtttgtttttatttattttataaagaaaacattacacaatctccatctccacttccttcttccaattttatttattcttcctatttaattgtttttgtaccaatcattgatcattatttcttctaaattttcattagaaaaaaataaagtatgaaggtagaaagatttaaatattgtgtgtactctgttttctttataaaataaataaaaacaagaaaaaaaaaattaaaaaaaacaagaagaagatgaaaagacaatacttagtattaacagagacgtaaacttaattaacatgatctcgttaaattaaatgatgtgtcaattatgcattcaaaaaaatgatgtgtcaattattaattggttgagacagagt

SEQ ID NO: 94842 - DNA, 591 bp, Cannabis sativa
tactcccgcaagatgttaaagcattcctctaaatatttgatgtggtctttggatttctttgacttaactagtaaatcgtcgatgtagacttccatatttttcctgattaaatcgtggaacatacggttgactagtctttgataagtagcacctgaattcttgagtccaaagggcattactttgtagcagtatagtccaatgtcaattcagaaactagtatgtttgtcatctggtgcgtgcatgctgacttggttgtagttggaataggtatccatgaatgtgaggagttcatggtcatatgccccatccaccagttgatcaatttgtggtagagggaaacaatctttagggcatgctttgtttacgtcagtgaagtcgatgcaagttcaccacttaccgttcgacttaggcactagaacaggtttagatacccaaatcaggtagaaatcttcccttatgaagttgttctcccacaatctttcaacttcttccttgagatctttggaatgctctttgtcaaggagccatagtttttgttatacaagtcgaaagattatttgtctttgttgagggcatgacagatgacttggg

SEQ ID NO: 94843 - DNA, 580 bp, Cannabis sativa
ttatgacacccacatagccaacggttttagaaaccgttgggaaatagtataaaagacagttataaaccgttgggaatagtcctttttgtagtagtgtgaatagcatattatggtacttgctacatttttttttagaataaataggatttgcccctctagactatgatagagttttgttcattgaacttttctttgttgtaaaattttttcttgaactatgaaagttgttgcgaataacctcctgcagatactttatgttcattttcttaagcaatttgttgatgtatcacagaacatgatgttaatatggctcattttcagtaaaaaaaataaatgcataaataacaatctaattatgaactatatgagaatatgtatatgcattcttaaaataaatatctgaatatttaatgccaataaattaaatttaaagtagcttaaagttgttaaatagacctgcggtaactatatctttaactatcatgactatataagtaaactaataaacatcccgcgcttcgctgcgggatatataaaatattttaaattatatataaaaaaaataaattgtgtattttaa

SEQ ID NO: 94844 - DNA, 1193 bp, Cannabis sativa
ttatttaataactaaggcctatcagaaagtcaccaagaaatgccttcaaccttgatgaccttggcgtgaaccctgatctcgactccctcgggtatgcccattgtctctgatgacagaatagtcttcattttactttcctcagtctctctccgatgacagaatagagaaactgagaaggaaacagcggctcctctcctctctcaatctgatcaaatgaatgaaaccctaataagtcataagttattctttccattcttatcaagttatttactttcacattcacccctattttatgtcaaaattattatggaaccctttacattatacaaaatatcatgagcattgctatggtcttaaaattggttagcaattctttataatttttattaaagtaaaatatgtgagattttgtattgaattgcactaataatgatattacacatcacaaggatgctaggcaccatgagtaccttttagtgtttctcaaaaaaacatatgattttctttcacacaagacaagaagttataacacaatcattccatttcattccaatcaaattgtaggtgacaatcacaaaactaaaataattgagtgtatcaatcaaaataagttaacctaccaaaaccaattaaacaccatttaatttcattcacctatgtttttatgcaaattctctcacaactcaaatgatctctaatgttgttatgtgaagtctctctcaactcagctgatctctctttcactcaaccacaacaaacaaaacaatgactattgagccttagaataattacacctttaggtttattgatatgaaagtgtcttacaagattgtgccaaatgaattagggtggaaacctatataaagccttcgatctagctcagctcagcaactaaattaactgacaggacaccagtctctaacccctaatcatgacattttaaataactctacatttggtagactaaacaatattacaaatctccacctattgtcttctataagtgcttggtcctatttaattatttattagtgaacttggaccattgttagattttataacaagtttgttatccaaaatttcaagagtccttaatccatgttccctggatgaccaatgtgaatttacatgaattaactgatagatgaacaatttgtttagctagacaatctaaaaaactcattttccatctt

SEQ ID NO: 94845 - DNA, 547 bp, Cannabis sativa
aaaccaaattacaggaactgtaaggttgtggtaagcaattgctttatccactattacttccttagttttcataaaacattatgcaacatctctttcttatataaaaaaaagatccttttaattttctgtggcaacttttccaacaattttaatacaaaatatgctatttttcaaaacattgtatatgaagtaataaattttagaattctaagagcctttgtaaatgtaaaaaaataaaaatttaacatttaaaattgaagcgccttattgtgtgggaattaccttcccatattaatagtggcaaagtaccattttaatgttgtgtcatcgacatacatattataataaaatatagcactgtaaagatatatgtatatatatatatatatattacaaagttatagataaataatttttgaagtagaaagtaaaataaaaatccctagatgaaaacaaattgagaggaagttttattattataattattattattattattttgatgaatcagttagaatttcatataatcattttaaaatttaatagc

SEQ ID NO: 94846 - DNA, 961 bp, Cannabis sativa
aggtatatagttttaggtatgaaaaatagaagatttagaaacaaaaacgagctaaaatggttaaaaaaattgttaaatggggatgatttttcgtggtgattggcggagagggtttggggtttctctggtttgggagaatctgcgttggctgatcaaatgaggaagatgaatggatgggctagggttataaacccttttggcgtcggttttttggaaataaccgacgccataggtcggttttttggaaataaccgacgccatagggtcctatggcgtcggttagttccaaataaccgacaccaaaagtggcgtccaaatcccgtctaaaaaatttcaaccttatggcgtcggttatttataattatgctgaaaaaagcgcctctaaaggcttgttttgtagttagcttcatcgacctgaacaacaccttcgttagggaagagatgaaatatctcactgttgggaagccaacatctcattcctggggaaaaaattatggtatttttgtaaaaaaatctatgaaattttatgtgaacaaaagagaaactaaaactgtatattttgagattttatgcgtatttttgataattataaattttggaacaccttagtaccaagcaatacaaaagaaatcaaaatcgcatgtcccaaattctctattccacacctgtcccaacaatagaaaactaacatctgtccttatatttattttatgttaactacaaaccttccgttagtttagaaactgttagtcaaaaaaacaattattatcattgcattgggaattgacatttgttctttttttttttttaaaaaaaaaaaagtttctttattctttatttgcatatattacaaaattatataaatatttttttaaatttactgttgaccgaggttttcggcaaccaataaaataataagagattaaagagctgtaagaaattaagagaaggatttttacgt

SEQ ID NO: 94847 - DNA, 690 bp, Cannabis sativa
aaaaagaaagaggaagcgcgatgatagcaacaaacaagatttaacgcacttggataaattagaacagataatagaaggaagtaggcattccttctcgctataaatagaagatcccctcattgaaaaagtaaaaaaattcttgatcacagtactaaactagtcgaaactctattgaaatacacccttaaattcacacttgatgagcttagcaagcaagcgacctaaacttaatcgagagaattgagagaaaaattgtgtaaactgattgagaatgtaattcgactagatcaaacctggtgtaaagaattcgaagtcttaataacaatttgttgttgaactaattttttgcatcaactggccatattcaatatatttaggcatattcagatctgatccaattaattttagtcatcgatccaacatccattagatattggattagatcgactctatatattaaatgtatttcatgtatatctattgcattgttcaaatttatccaatattttagatttagtatttattgaattagattataatgttttaatcttaattttcatatatgaatatatatattttaagcatataataatataaagtttaattgctcatctaaaatttaagtgaaaatactaatgagttcgattgaatagagatgttttaatcttatttatttaaatattttttaat

SEQ ID NO: 94848 - DNA, 826 bp, Cannabis sativa
caactatttcctcagccaccagtttcgcatagtccatgaagtcaaacattgtttcaccattttccaacattatgccttggattgtttatttttgagttgttgattcttctattggtggtagattgtctactgttgttgctattgcatttgtttgtgcaactgatgagttgctcatttccaagaaggatgtattattgtttgttgttgtgttgctgaccacgttcacacacaatagatacgttgtgaagtcaggttccttcagttttagttttatgtagaattataggctttgatcgtcctttattctcgacggttggtatccttcttttacttggtatttcagttgtaggtcaaagttttcttggttgcattctaatacttctttcatcttctgtattagttcttcagatctacaattaattgagatgatttgaccattagcttagtaattttaacaattcattccatcatcaaactgtctgttacaaaagacaaggaattaaattttgtctttttcctgagagtataaaagtttaattattgtaagtcaatttgtggaaaactgtaatgcaactgttatatatgctgcgagccaattataataaaaactcaaaaaaaaaaaaactattgtgtatgcaatagaaaaaaaaaaaacttactactatcaactttcctcttttcaagtaatgtatggccaattctgagtcctgtttttatgatacattatcattattatagctcaactatcattcaactgaaatgtaactaaggttttgtaaatgggcatctttaagaaaaattttgtttgttcttttttaacatttaa

SEQ ID NO: 94849 - DNA, 1201 bp, Cannabis sativa
  modified_base (457)..(458): a, c, t, g, unknown or other
ccggttcaggggagcctgtaacaactggtcgaccggttggtccccagggaactggacttccaattgggaactggtctgccggttgggccattttttcagaaccctaggttttcccgtttttgtgttatttagggtactgccatcatattcatcgatatggttattcttagttttgattttaaaatctccaatgagcgttttagcgtgtccctcaccgaagttacaaatgttgtgatttagggccttgtgaaatgtcgcgctgcaattccactcaggctgactggcacacctgagcacgaaaatgaggtaaggtagcataaaatatatatatatgtgactgaatgtattttattatctgtttacactactagcactactaactgtatagttataagggtgttagtacagtgtagggttttagggtgattacagtgttaccaacacgagtgccaggggnnaggtcgtgcatgtggtacaacacttagtaactatcccgaaagtacaataatggatctaccaacacaagtacggagttggtactttagagcatatggtacaatggtcgtacttccgttgagaacgttcttaaccacttggtgagctcggtaattgggctcaggacggcttaagcattaagccggtatagcattgcttatatatatgttatgcatatcttactgagtctgttgactcatcaatttgctaccttgtgtaggtaaaggtaaagctaagctggaagagcagtgagttagagcttgtcaaggattgtacatatcgcggcagtgcagtttggaagatttcggtctttcaacattttgagttgtattttatagttgtctgtcgtttgtaaaaaaaaatattatgaaactatatatatagtaaatgtaatttcaattgtgttttaaatctcaggatcctaacctataagactatataaatttaatataataagatttattttagtttagcaagttttcaaatacgggtgctacagggtccccttaactcattttgtaaaaaataataaattccatcaaaagagaattgagagagcaaggaagcccgatttcccatactgaagctatcattgggattgaagctcaaacattaatgactggaagaataccgatctttttatcgcatatacaatttcgatatgtctataattatcccgctttatatatcgttcatatatatatat

SEQ ID NO: 94850 - DNA, 507 bp, Cannabis sativa
ttgactagcgatactctttaaaaactatcatattaaattatatgggacctaatacttaattagaacaataacaatattgacataagaagatactggaccccagtacctttaacatttctctaataacaatagctagttaatcgaaataaaaataagattaataagactacccgtatataatgtcattaatatgttgtcaaatttcgtacattttttttcttgatttttgtacttcttttttcttctattatcttccacacgttaatatatagaaataattaataaaaataatatgaaaaaaataatcaatggatatacacatcaactctttagtttcttgaaagcgttcatcataggtatttagtttcttttgggaagaaaaaagtctctagaatatctcatttttctcctagtataaaaaataaaatgatcaattttttgttttaaaaaagtattaccgtgtattcatatgagatttagcatttatttttataaacaaattgcttt

SEQ ID NO: 94851 - DNA, 620 bp, Cannabis sativa
tttccaatacaacactaagcctcctcccactccttgggcctcaacacaaaaagatccctcaaagcccaattgttgacccaccagttcagttctttttttattacacttggtttcacataagataataaagttaggtttcttttgagcaacaagctccttaaggaattgaaatgtccattggttcccaagcccacgacaattctagctcaagacattcataatgcttagcgggtctggaaaccagagcccgcccccaaacaagttttttcgactatcctcaccttggctatccatagcaacatcaacatctcttatttctttttgattattaacattaggttgtttttgtaaattgtctgaactaggttcatccaatttattaagatcaggcccaatagcaacatatgtgtccagcccatccaaagtccttcttcttttagtgtccaatgccattaacgagtcaatcccactattctctccaatcataacatcctccacataagtctttgactttccatttgaaacttccccaatcccatccgaaatcactgtatccatctcgactaacgactccttatttctggtggggagtgatcctcctaaatcagtggagatatgga

SEQ ID NO: 94852 - DNA, 1086 bp, Cannabis sativa
acaaattatattctccgcttgcaattaatcctattattttgaactcctataccacactataattcttttttaacttttttttaataaatattttttttaatttttagtcacaacaaaacttgtgataaattataaatcatcattcttatgttgtgattaaaagatccgtggctaaaagtattagttataaaaattacaatttgttgtgactaaatattttttaatcagaatacttattgtgactaaaattaaattagtgacaacttgtatctaaataccatgttttagtcataagtaaattttttttgtgactaaaagtcacatttagttacaaaaaatttatgttataactaaaaaattgtcactaaaagtaatttttttttgtagtatgtgttattttcttttgtaatatgttacatatttcttagtctgagtttatgagttgggtttctctccataatgaacattcttcattataaaaagaaaaaaataagaaagaaattaggtttcacataacattatttttcatttagcttttttatttatatatttaagtgtttttaaaataatttcttaatttttaaataatttggaccaatcaaaagttgccacaagtatacatgacactactagaaaaggaatattttatcccactttctatacttgaaataaaataaaataaaaatgggataaaaggtctgctaagagtttttaccccacgtttctataaggcacaaggatcatgtttggttgagcactaaaaaaagaaaaaattacactaaaaaaagttaaagattgttttcttattgactggccaaacacgcccttgatgggttttctatcacactttggagcaagggttacagtttggctggtcaccaataagttaaattttcatcctttattgttttgctggaaccaaacagggtgtaaaggagaaacccttttatcgctgtttttaacaagaaaaccaagataaaagggttttcctatatcccattagggttttattggagtgatatattcctttctgacacatctttcttccgtcgctctttgtaatatctttctcccgattctatttca

SEQ ID NO: 94853 - DNA, 828 bp, Cannabis sativa
tgcgcgtcactataggcgtatagtatcagactgaaaaagtaacagccacacacataaagtgtcactatatcttctttttttattattattaatattaatatgttttttatatgtaaaaaaattaatattatttttttaaaattcagattttatattataaatttataaaaataatttaattaactatatttttttttgagaaaattaatcaactatatatttatcaattatacattaatatattttaattttagatataaaattattaataaatcaatattacaaaatatcacaattatacaaaatcaaaaatcaattcatcaaaaatcaattcatcaaaaatctgtacataattaataataacaaatctatacacacaaactctattttcttccttacaaaataaaaaatctagaatcaacaaacaaaatgagtaaactaaaaagtttatacatcatttgaaactaaatgatatatctataaacaataaaaaaaaatgacacaaagagcatacaatttaaatcaaaactaaaatctctaaatctatattaaaaaaaactacaaagaactgcccaatatcaaaccccaaaaagattaaacccgaggtgcgaaagggatggccgtcgttcatcgaggctcgaacgaccaccagtgactactctggtcgtacgtcgagatttctgctcttcccgtagctcaaaatttcaggcgttgcgaacactgtgatgtggtccatttggaccatcgtcgttcacctagcacgccgccaatcgaatgaagagggaacgagggatgggaaagcggttaagggcttcgtagtttactggg

SEQ ID NO: 94854 - DNA, 575 bp, Cannabis sativa
ttatttttattattaaattaaaatttcaaattaacatttaaataatatcattgatactagcttcttattttttttaataatttattttgtttaacagatactcaattattacttgataaaaaaaatagacatataatttaattaataaattaaacaactcataatatcatcattcaaaaccataataaccaaaactgctccatcatttatttatttattttcttacaaatacaatcaactttttattgtaaccttttagtcaactttcgtgctcgaaaacacatactggaatatattttttttaaaattttttttatggaggtagtcgttatgcttacaacatcctctttaaattttttaaaagttttgaatagtttacagtaccgaaaataaatttgaaattttttgaatacgtgtggtaaactggaatatcatgaattttattttcggcattgtaaactattcaaaaaaatttaaaaacttacagggatgatacgataattataacaaatactgttatgaaaaaaattagaaaaagatatttcggcatatgatttgggaaactttaaagagtg

SEQ ID NO: 94855 - DNA, 564 bp, Cannabis sativa
cgtgattattagtgtggttttgttgaagctcgtatcatttgttgtagtggagacatgatacttgaattggctaaaataatgaacatgatcagttatatagtgctaaatacgaattatttaatagtgattgagactattcgtaacctgattttttaaatgtattgaacatttgatgaaactaatgcacaaaactgtacatacactgaaaagattcctgtatctagagcttcatgattagataaattgtgcttcatctttgtaaaatagtgtgaattagaagtataaatttgacacaaggagatattactataaaggatatatagtagtagtcatacccagctagctatactatatataagtatgatataattgatttataatttttatttccctttggtggaatttgtttctgataattacggaggataacgtcattttctttgatcaaattaaataaattatgttgaccaaaacaaatattaaataaaatcgacatgtaaggagtaattttatgaggtaatgtttgttattgaaaaccataattatgaaatgcaaaggcaggtt

SEQ ID NO: 94856 - DNA, 551 bp, Cannabis sativa
atgtataccactaaaaataaaaaattatatagaaactactctactcaggaattcattacaacaaactaattataagtattaacgataaagattttatctacatataatagagattatcttgtgaacaaatttatattcaatattgtaattattcttttttttttttttttgtgaatcagaaaccttatactgcctcaatcagcaactcacttgagtctgaaaaaaaaaaaaaactactttaagaacaaacaaattcaacctgctatatatatatatatatgtatacttctctttacaaatatgaaaaatccaatccaatccatatctaaacatgtaatctttttctaacttcatttaataacgtccgctccagagattatacatgtagctgaattttgatcagaacaaagagtttgatttctatttgtccaaaagtgatgaagtaaggctaactattgtaactttaatattcgattataaaaatacatatacatataattcatgatcatgtatatctatattaaaagaaaaaaaaattataatggcatact

SEQ ID NO: 94857 - DNA, 597 bp, Cannabis sativa
tcactataagaaggcacactccttgtactttcatcaatcaggtttatacatcttttagtgagatttatagtatagacgagtcatttctctcaaatggaaaccgacattcaaatgatgtagattgttggagttcaccctgtccccgagaactgcaattgtcagatggagtgttatgtcttctgcgaaaaagtggcaaggtttacattatcaacctcagagagataggggaaaagctccaactcgctatcaaggtcattggtactaagttcttatcaagatatcccaaaacattatgatttataatgtgtttaatacacgattatcttgacccattaaaagcaaactaatcacagctgtgtgatattcaaataataaccgcatttattttacgtgatatgtaattaaatcccacgatttgaggggataattgttgtaaagattacagtaaactatataattaactccctgactatgtaatcataaatataggcaaattagatggaaaaagggataacaattactatctagaattactatctagaatctttaaactaagtgtgcttttctaaatttattttaaaataattcaatgaaaaa

SEQ ID NO: 94858 - DNA, 676 bp, Cannabis sativa
gaaatgagaaatgatggatgctaggtattattttggtattttattgacttattaaatctatccatttggtgattacataattgtggggatattgtttttcttttgtattaatgagtggtcctgattttgttactaatattttcttattaatataagagttaagccactacttttaagttagtattttgtgatataaattaaatgattatttataagctttatctttctacaagggtcaaagtgtgacctttgaccacccaagttatggatattatatatctgccacggcctaagactcagatcgtacatttggcataacaggaatagagttcatatggaatcatagcacctatacaatatatagtccattgtaaaaaagaattaagtctgatgtaaagcatagacttaattttattttgccaaaaataaaaaaattacaaagaaagatagtaaatgggtggatagtctgtaaagaattaattaaatttgtcattgatgtaaagggattgacctatggtgccaaagttgtgcagatttgaagttgagcaatacaattttcttttcaattcatgaaaacaaaaagtaataattatataaacatgtgcatcttgaatataatactacgtattcatataaatacatgcatcatgcgtacattgtacctatacatataaaa

SEQ ID NO: 94859 - DNA, 510 bp, Cannabis sativa
aacaagatgaagaagaagaactgggcaagaaaaaaacaaaaaaaaacatatatgttaatgaagagagagagaacttgaggaataagagagtgaaaaaaaattataacctatgaattttgaaacatggacaaaaaaaaaccccaagaagatgaacaaggagagagaataatggaaagtaagatgatgaaagtatataagaatgtgtagattacataaatggtgtgataaatttcatgattaaattaaattaaaagaaaaaaaaaatagtggcacaaattttacaataccaagtcaaattagaatttttttttaaaacataaaatataataaaaaaaatacatgcaaatacaatgaaccgctgcgtgtgttaaaaatagaataacaattttttattaaaaaaaacagtatatcagtataaaaataaaacagtaaaaaagtaataattatcgagtaacaataaaattaaaataaaattgaaaaaaaaaaaaaaaacaatgggatataaatttt

SEQ ID NO: 94860 - DNA, 504 bp, Cannabis sativa
aatgtaatatattattattttcttaataaatattattgaaatgtagcaatattttgatggaaaaaatatatttggttgggattattttaggtagttcaacattgaaagattttggttgtttcctaatagctaaattttgtcaatacaaaatagataatagaatgttaggtctctatttaataaacacaaataactacaatgtaaaataacttacttgtacattacataattatgttattaaagtattaaatataattttagataacttatcaaaattagaattgttaacgcgcataataagagtatgacccataaaattgggtactcaagcgatttcataccttattcttcttatctctatttgcaggcccgtctcaagttaacggaagctttgggtaaaaaatctaattgaattttttttatatgaaaaaatttatgttgtttgtatatatagttgtaaaaatataaaatatagtattttgagaatataattagacttttttt

SEQ ID NO: 94861 - DNA, 731 bp, Cannabis sativa
gttaacaaccccacctttaaacaataatctatttcttatgctccaaatttcatcaaagatacacgccatgtacactaagataaatgaacggagattaataggggcagacagtaaaatattttcaacaaactcaatcatatttgcaccaggaaaatttccaataaaagcataaaaacactctgaaaaccaaagcgccctcgacacactacactccctgaaggtgtggagacaagactccatctcaaagccacacaaaggacaatacttgtccacaccaaaaagcagtttgttcctaataggaatagcctcatttaggatcctccaaagcaccactggcagtttaggatggatattcccttgccaaattaatttttatatttccttctttggattaaaacgcaccgcttgatccacacaataagcacttttcacagaaaattcaccattcagattttccttccatataatatgatcagagtgaggagaaggtatcctaggtatctccataattctcttcccaagctcttctccaaaaatttgaagtgcaatctctttattccaagatctatcaatagataaatcagccactcttttaattatatatctcctgcttctcagctacttcataagcaggctaaaatctgagaagttcatccaaggaatctacggttgtctccacacatcaatcgactctccattagcagccgaaaataaagaccctttcaaaatta

SEQ ID NO: 94862 - DNA, 545 bp, Cannabis sativa
tgttttgttcttattagaaatgtagaaaagacaaatccacagtgtaacagagagtgttaatgagagaatagacatgtgatggttgtgttgatataatatgatcatccaatacaatacaacagttcttctgttgtgtgtgtatgtgtgtctccaaggtagtcagatctgatagggtgcctatgttcgcggcgactcttttgccaacgcaccacttgagtgagtgaccatctttaccaatatattcttcagcatgatgacatatacaaatataaataatatatattctcttcatttctatatataaaatccatttctaattaccatacactataatttaacgacattttaatattatcgaccatctcttttccatcaatataggcatgattcgcgaatataatacattttttttttttcatttgaaaggataatgcattctttctattaaggaaattttatcatgaatatatatattttagcctctcattttttttatctcaagttcttgaattgaaaaacatgaacaatcaagttaattttattat

SEQ ID NO: 94863 - DNA, 2182 bp, Cannabis sativa
ttaacccaagatatgtttccaagagggggtgaattggaaaattaagctaattttggtaaattaaaacttttaacacaaaactatacaattaatatacttaatccagtaaatgcaagtaatatggaaagcagttacatagagcaaataactaaacttgtaagtaaagagtttaatggtaaaaaattgcaaactgtcgatttttataaggtttggtagaaccaagccacctacgaccttggtcttcaaagttatagacctagctttgagttccaatatcgagccaagttaataggcttgactaacccttatcattgagaatttttcaccaaggtgtttccaaacctcttacaatatttttgcacccccaaggactatcaacccctttctcagattattgtagtgacaatctcactctaagagggttgtttaaaataccggtggcaatctcacctcaattaaaatttggaaattttttttgaattacaagcaaactcactctagaagtatgatgaaataatgaaaaaactagagtgattagcaagcacacttgaagaaattaaaacaaaatttggctcaaagtgtgtcaaaagtgttgttggattttaaacttgtgagctcataaaatctcttgaataggtttggtatctgaaataaatgctcagtcaacttaaatttcttagtaaaaattgagtttatatagtgttggagtgaaatatagtcgtttatagccgttagcacgcatttcaaggagaattctaccatgctctagaattccagattggttaaaactagaattctggattccaaacaaaattttagatggcttacagtgataaaatttgcatttttttaactaaaaagtgcataaatttttactcgtttgttaattttcaaaaattttaattttgtgctcttagttaaatcagatgtgatcttaaaagtcaatttaaaaatttttaatatcattttgtgaaataacttgtcgcacaagttagtgagccaaaattcgtacttaaaacatttttaagtatggacttgaaaatcactatacagtactttgaaatgtaaataaaccttcatgaagtcttgcattgagttccttgagtcttggaatgcacttcgggtcacttttgagaattttgataaaattaccattttgccgttggaattgattttgccttaagaaaatgctcaattatctttaatttgtgctacaaaattaaaaaattattagtgaaaaataataatcaaatattttttaatcatggaaacaagaaggcttaagagtttgggtcaacaatctccgcatttttgatgatatcaaatatttgattatttttaaaagggaagggaaataatattgaaacaatatattagattagctcccccacaatatgtgcaagggttaaaaaattaaaaattaaaaattttacctttttaactttatctttcatgattttgtaaactctccctcaatttattacttatattcaaaaagcattagaagtccaaatattaagttgttgccaaaaaaaaaaaaaaaatcactatggaatttgtcccacttttgattcatcaaaaagggtggcaagggcaagaaaaaaaatcataaacaccattcattaaaacatagaaccataaacatagataatcatatccaaacaaacatatcatccaagcataaagagaaaaagcaaacaagtaaaacataacacactaacacatagaaagtcaagcatattaagtctaaaaaaacataagcattaagaacgctgctaaaacatgatgcaagggactaagtggtggggctccaaagcagtccatgtaaggctttcattgggtcatttcccttggatgttgtcaaaaccttactccatgtctcccctcagggtggccattttgttttggatgttggtaaattgtgtgttcatttcacctcttaagttttggaaatgagtgccaaccgaggtgtggagacgagaaaattccaatttgattttaaaatgaggaacttgagacattggaggtgcttgagatagtgattcttctgcttcactctcacttgcaggaaagttaatattctcctcttggtcttcatcatcactttcttggtcaactttcattctttgtcctcttttaggtgtgaaaacccatacatcattgataaaagtgtaacccatag

SEQ ID NO: 94864 - DNA, 834 bp, Cannabis sativa
gtggtaattagcattaacaattgggtaattaaatcaataggattcttttcctaccaaatagaatcataaatctagtttagtggtatttagttcaatttcctgtagttggacctcacctgtgtgaatttactacttgattacgtgcacttgcgtactattcatatttttcgtaacaagtttttagcgccgttgccaggaaacttgcctagcatagcagaggtcaacccaaaagaaaattgtaaggaaattaccctaagaagcgggaagaagtatgaagggcctaatgggggacaaccagtggaagaagaggttcaggattaaccggcaccaacatcagcagaaaagaagactactgagagtctcgcaccaaaagaagcttctccaccagtaagcatagatcaccatgtgaagatcccttatccgcagagactccaaaagaccaacctagacaagtagttttcgaaatttctggaggtatttaaaaagctgcacatcaacattccctttgtagaagccttggaacagatgcctagttatgtgacattcatgaaagaaatcctatcaaagaagagaaaaatggaagactatgaaacaatggcattgactgagggttgtagcgctatactgcagaagaatttccctcccaaactcagagatccttggagtttcaccattccttgtactattgggagaatagaggggataaatgcgttgtgtgatttgggagccagcatcaatttgatgcctctatcggttttcagaagattgcagttgggggaggcaaagccaactacagtaaccttgcaattagctgatcagtcgttggctcatcca

SEQ ID NO: 94865 - DNA, 806 bp, Cannabis sativa
tacatttttacggaattttatatagaaattcctattgcaactagcgttgcaacataaatcacaacaaaaaatcgtatagaaactcctattgcagtgcccactttagaaactcaaaccgtaaattaaaaaaaaaataaaaaatcaatatatgaggttattctcctaaaaaaatacagtaaaatcccaacataaaaatagccttggagtcagtgtagcacgtataattattattttttaattaggtttaattaagtgatattaagttatgttcaatttttttaattaggtaatgcatttttattttttaatttttgaaatagggtttaagattttggtctttgaaatttttttttagctattgcggctatattggtatgctttttactctttagatgtgattttatatacacaataaaagaataaattttattgttacacgtattttatatacacaataaaagaataaattttgataaaatttgagtttgattaaagaattaattacttttaaaatacattttatatattatgtctaaatatatattttttaaaaaataatgatagtgataaatacaatattcttaatttgcagttaggattgtgtggttataataattataaagtgtacaaattattaaaggcatatatatatataatttttaaaagagttatttgcggcataacctccttaagaggtcaggtttttgcaactagcccctaattctaaaatttttgcggtaaaactccctaaactcaagttctgttagcacttagccctttccgtccatttttagctgttaagtgcc

SEQ ID NO: 94866 - DNA, 570 bp, Cannabis sativa
agaattctatatttattgaaatgtattattaacattttcatttttttttaatttttatttttttcagctaacatatcattataccattaatttgttggaacttattttaccacaatcttaataaactaatatgtatattgattatacaaaatataatctaacatcttaaaatatgaaatctataaaatgataaataatcaccttagagtattttaggattactttacattaatggtagcagaatataatgaatcttttcattcagtactctaaccttcgaaccttttttgtagtagagtatcaccaattactaaacctagatagctttccttaaacccaataagcaatatttattcacgattttctagaaaagtctgagtatcatcttgattagtgtgggctggtactcaattcacatttaacacattttgagagagagaaatagtctagtaattttgaaatggctaaagaagggagaatgagaattatctgacatggaaagctaggtctagcttttgtctctcatcatgttccttatataggcactccttagggttaacttaagatggg

SEQ ID NO: 94867 - DNA, 700 bp, Cannabis sativa
agttgagtgagatgtgttggcttggaaaagtgccagtgggcgtaagccatacaatgacattgttagagatgcagagttatggaaagaaggcatcaaagaagccatcagtgctaagaagactgagcacaaacattacaatggtgctagagtttgagtggaggccagagggttgtgccggtagacttagtagtcatgtgagcttgcaaaggtcaagagaggtgctagagtttgcatgaatgctagagggttatatcattagaacttagtacatcgagggatccggaagggcgtgatgctagtgcgaatcagttggatgatcgataaggctgctatatgagatagttgactcaagagtcacatcctgcgggatgcacttgtagatggcatggtgtgcatgaagagttgggcggtcaggcatttgcgtgtgggcatgttgtcgaggatgccaacaaatgaagtgggggaaagacatcacggttcacttaacagactaggtattcattataagcatcaggatgagcatcatagagatggattattgtcaaggatgtagagtcaagaagactcaggacacaggaaatgtcaggtatctagggtgaaagttagtaggactcaggtactaagataacaccatggcaatgttggcctaaggtgaaagtcagtaggactaaggtactaaggcaacataaaaatgtcgagg

SEQ ID NO: 94868 - DNA, 872 bp, Cannabis sativa
cattccaataccgttgtactagaatgagttgcattttttcgtcatacttacctaatttgtatgctccggagtcgagaactttaaccacttggtatggtccttcccagctatgtacaagtacacctgccgtactgtctttggtgcttaggaatacccttctcaggaccatatctcccatgaagaattttcggtagcccataaagtaagaactcaacgtacaagcatgcttgaactgggtaattttatgatgggtgacctcctgggaagttttcctaagaagtgtgcgagtaaggacaaagcacgttgaaaataatcgtgttggtttatagggccagacgtcattccatgaagctaccaaagttacgtactcgtgtataagagccatcattccgtcagtgtaagggcctaattgaggctagacgcagatgttacaatggtatcagagcctccttaacctagccaaaagtgtggtcaacgaggacgtcggaccctataaggggggtgattgtggaagttagtagtcccgtgatctttaaggggaaataccgagtaagctgtgcaatcccacactgcatggggaaggtcaagtgggatgcttctaagactgtgtaggtatgggactacatagttgaatagggcttaaatggattgattggtactaccgatatcaacaaggtgcatcttatttttcggtagcccatcacgaaagaattccacagttaagtgtgcttgacctggcttaatttccagatgggtgacctcttaagaagttttctcaagaagtgtgcgagtgaggacaaagcatgctggaacaactcttgttagtttgtagggttagttatcattccatgaagcaaccagagtgacatact

SEQ ID NO: 94869 - DNA, 505 bp, Cannabis sativa
ctaagaaagtcagtaactgtgagtgaatcttatcaacagacaagatgagttctcacatttagaaacttcaaggacaagtaatatagtagtgactttgttttaaaattatcaaacgcctttatgattcaagtttctttagaaacttaatttaaacacatatttaaaggatttaactacattaatctacagaatgatagcactcataaagatatgcatgttcaatctggcaataaaaattgtgttattaataagaattcctatacattatgatactaaagattatagaacatatctccataaatagaataaatattagtaagtggtaagaatattcattacactcacttttactaactttatttaaagcttgtgtggattgcataaaataaaagtataccaacaaactaaaatggtgcgcattaaaattctattatattagaattcttacaagtcaattaatactgatagatatgaactagtattttttaagatattcatctcatat

SEQ ID NO: 94870 - DNA, 602 bp, Cannabis sativa
  modified_base (540)..(543): a, c, t, g, unknown or other
ttcttttcttattttcttgctaaaaaacttttttttaatttttttttactgatggaacaatctcagcccatattatataaaaatgagagatttttttttaattagattggaaaattaagcataaaaactccaatttttttaattttacccattcatgggtaatacccactaagagtgcacccatatatatatatggtgcacttttaatgggtattactttatgaatgggtaaattttagtttttaagcttattttttctatctaattagtttaatttctcatttttacattatataggatggggttgttccattggctagaaaaaaattacgaaaaagagtttttcgacaaaaaaaaaaaaagataaaaaaaatgatttgacttaaatattttctatctaaacatatttttgatatagtgtaaaaagagatatttttgacatttttctaattaagtagctaaactaagcataaatatgagaatttctcttttattattcgtcaatggatcaaaacctaataatttaatatttttaaaatnnnnatttatagttaaatttatttactaaccatcaatgagtaatacccattgagaagtgttcc

SEQ ID NO: 94871 - DNA, 589 bp, Cannabis sativa
ccgacagtcccgcgtctctctctcgtcggtttcaatggtggaccaccaagctatttctttgctccacttcagccatgaaggtcgtgtagctggttcaaaaattcaaacctcatagctcaagttccctctactcagtttctccctctcttgtctcctcaccacatttaatggcaaaattgctatccctaagctcatcttgcccttcgaacagaagagttcagatctgaatgggactgtttaaaataaaggtttacatgagaaagagaagattatagaggtttatggtgcttattttttttcctttgactattttcttctgtaaatagaatattgaacttatgatgaaatgtttctatgtatttgtgtataaatctaagtgtagtctatgtagttgtgaagaattagtttgaatatgagatttattggttgtttgtaatttttgggtttgtttagatttgagattttgtttctttataaaatttgtttcttgaattcttgaaaatggaggatgaatagggaaaaaaagagtgatccgatagagatagggtaaatcttttttgggttgcctttttttattcttctctgcgtt

SEQ ID NO: 94872 - DNA, 1118 bp, Cannabis sativa
aatcgaagttatgaaagactgaaacaaaaaaatacaaattacgagaattcaatgcatcttttttagaaccttacaaaagaaaaaaaaaacaatatttctttttataaaaatactctgtcttgatgtgaaatacaaaatgaagatatataacatatgctaactattaattaaatcgataaaagtaccgtaaaagaagagccaagcagaatgttgcaacaggaaggcagttcaatattgcagcacccaatgttgctgttgtgtaggcaatcgcaacattagaagcattaatgggaattgtcaccctgccatggaacatttgcaaaaaatatattggtatagttttaataaacttatgaggatagctactgatataaaataacttaatttcatgattatttaacatatagatatatgtaattatatgtatatactaacaaacataccccaacaaggcaagcatgaaaatcttgcagaaggttagaacggaaagtggtgttgcatttcttctgaaatccaatagaaagatattgtcatttataacatgccatgatcacaaaattgaattatcataagacaagagattatcaagaaagaggaaagtaataaattaattaaagaaaggggtcaccgtttaaaaatcaaagcaagaggaactaagacgacagttccaactagttgtcgatagaaagtgaagatgtagcagttcataccaccattaaagattgctttggtaagtaaaaccatgccagcatatattgcctgagatagtatcacagccaaataaaccttcactccccccatattttagtgatagtgatgagctatttttctttattttgtttttttacatttcctctacttcaaattcagattgaagaatggatactgaatatatgatgaaaatgttcatataaataatatattaatacgtccgtcataaaggaaaaagcaatttcagatgatagaagttgcgtttacaacaaattgtgttttgtatattaatatttaatttaagtaatactctatactaggggtaggggtgttcatccgatccaatcagaacttttttggtcaaacaatatccaatccgcactaagtgcggatttcatattttggat

SEQ ID NO: 94873 - DNA, 784 bp, Cannabis sativa
ctattgttgcacaaagggggttgcgtcagggtgatcctttatcaccatatttgtttattctttgtgtcgagggtttctctactttgttgtgtagttatgagcagactggattaattacatggtgtaaagttactagaagagctcctgttatttcacatatgttatttgtggacgatagttacatctattgtaaagcaacagaggaggaagctcataatgttaaagcgttattgtatacgtatgagattgcttctagccaaaagatcaatttttcaaagtcgtcagtgttctacagtcacaatactagtacctctcaaaggaatatcatttgtgagctgttagatatttatgaggctgatgagaatgggtcatatttgggacttccatattcgttgggaaagaataaaaatgctatccttggttttcttaaagataaattaaaaaagaaaattcaaggatgggaagggaggatattgtctcgtgcggggaaggaggtgttgctgaaatctattgcgcaatcaatttctagctatggaatgagtgtttttctgttacctttggatacttctagggagttggagtgtctcatggctaaaatctggtggcaaacggactctgttcgtagattgggtgttagttggatgagttaagatcgattgagtcgtcacaaacatgttggaggtttgggttttcgaagtctgtgggacttgaatacggccctgttggggaaacaatgctggaggttgtcggttaatgataaagtaaagtttttaaagctaaatac

SEQ ID NO: 94874 - DNA, 748 bp, Cannabis sativa
aaattctaacattgatgaaagttcagggggcatgatttagcacatatcaaagtttgaggagcatctgggcaaggtggttcgggttaacacgtctcggttggacttctcggatgcgctatgtggagaagctgcggcctgctgcttgcctgtttcactggcgatggatgtagggtataagctagtatatcattgtagagagtgactcgagacaagttatcaatgtgcttaatgggaagatgtccctttgggctcttgagaactatgtctttttttgtactaagtcatctcccacttttatgtgttgtattttttctaatgttagtaggtactgtaattatgttccccataatgtggctataagtggacctttttccaccaactgtttggttttattccgatctcctctattccagagaatctattctgtaatgactgagaggtctaactgttttatttgattaatgactattcacgcttattttcaaaaaaaataaaaaataaaaaaattgaggggcatgatttggtagatatcaaaatttggggagcatagtttagtacataaacaatcactaaaacaataaaagtgaatgaaagtagacaaaaatccctccctaaaatttaacaatctcaatagtttagggagaatttttaatggttaaaaaagttcagagagcatgattgagtatatgtaaaaattcggggaaaaaattattaattagcctatataatatgtaaaataagtaaaatg

SEQ ID NO: 94875 - DNA, 966 bp, Cannabis sativa
aaggctgaagttgcattcaatcttggaatttgattgaaaagattaaagcgaaagcgtaaagagtagtaggatagacttcaagcagtccttccactacgggaaggagtgttaaagatgaatcatacacctagtgatctttcttgcatgaaaaacaacgtgcatgcgagagtcacgttgaatttttatgaagcaagcttcagcttttgtgaaggaaggctgaagttgcataaaaattcaagcacaaaattcccttcaaaagatcaaagagaaagaatcacgaggattaggatagactttaagcaatccttccattacgataagaagggttcaagacctatcgtacccccaatgatctttcttgcacaaaaaacaaagtccatgcgagagtcatgttgaatttttaggaagcaagcttcggcttctgggaaggaagactgaagttgcatacaaattctagcttagacttcaagcaatccttccattctgggaatgagggttgaagaagtattgtacccctattgatctttcctgcacgaaaaacaatgtgtatgtgagagtcacgttgaatttttatgaagcaagctttgctttcttggaaggaaggttaaagttgcataaaaattcaagcttagactttatttgaaaatatcaaagagaaagcatcacgaggagtaggatatactccaagaagtccttccattctgggtaagagggttgaagatgtatcgtacccccagtgatctttcttgcacaaaaaataacatgcatgcgagagtcatgttaaatttttatgaagcaagcttcgtattctgggaaggaaggctgaagtggcataaaaaattcaagcttggaatttgctttaaaagatcaaagagaaaacatcacagggagtaggataaaattcaagcagcccttctatttcggcaaggagtgttgaagacgcatcgtacccctagtcatctttct

SEQ ID NO: 94876 - DNA, 1341 bp, Cannabis sativa
acccaacttgaggggggtaacaaccgttatcgttgtgtgaccccccaggacctaacttgaggggggtgacaaccgtcatcgttgagtgatcccccgagaccccttgtctgttgtcagtagttatggtttaatgtggatgtccccatatacctttgagaatgtcattatatctatgataaaatgcatgacttgtgccatgagggtgtagggagtaggggtatacccctagactaacccctcatggttgacggtcatcccaacggtcatgactttacatattcttcattaatttagtctcggtatttttgtgccacgtgttgctactcttgacacgccatcgttgtaaaaatttaggtaaacaatatctataacttaattaaaagtcacaatattttaggctttttgttgttgaaattaattacatatatacccttctagaaaatatatatatatacactttaaaataacttagcaacataaataatttacaaaaaaaaaaaaaatgaataaaattttatttttaatattaaaaaatactactataaacaatagtaaaaaagaaaaaaaatataacacataggtttactaataatattttaatttttactttcaaaataaatatatttaaatatttcacaaaataatatattgtattacataaaatatcttacaaaaaaaaaaaaaaaattaacaaactaataagctaagtttaaaggagagttttgtttattctacataaaaatataaatacatacattatacttttaaaataaaaatgatttatttaggttttaaattttgtgagagatcttatcatataatcactaaaatattaaaatgatgtttgattagccgaaatgaaaatataataaaaaaatgacatttaaatattttaaaatataaccaaattaaaaaaaatagaatgagaaatttttatttttatttctattctattttattttattacatatgagtacaactaaacatcaccataaatataatttaacataatgtataattcatatactatgtgaagtacatggtacttcactatatatactagtaaaatatacttgcttgctacgtgtgagtaaaaaaaaaatttaatatagaaatattaaaattttacattaataattataaatctaactcgtaatatatatgtatataatttttcatataaataacacataaatatcaaaacttttcatttaataattgtacatctcgccatatcataatttttatatagctaggttattgatacgtgcatatatttagttatatttttggttcatattttagggattttatttttttttttacactttaaaatagttt

SEQ ID NO: 94877 - DNA, 860 bp, Cannabis sativa
actttcagaatttaaaacataatatctacacttaaattagtactaatttaattttagcatagtaaataaatattaatattgtaactaacaatatatatgtaaaatttttgttaatataatatgtataaaacctctaaaattgtgaaacgtaagagtgaaaaagatggataattagtgggttaatatatgtagcctaatgattaaaagtttcacaaggtaataggtaggtaggtaggttaatttgataaacaaaagtaattaagcataatatatataataattatgataatatgtgtatatatatatgcattaatgttcctcaccaacacgacaaaaagttttttagttgactcatcaggagcaaaagctattatatttcgcactagaaacatcattattattaccttatttaatcaactattgtaacaaataatgcttcaaattattttaccattccctatacatatacatatatatgcattatatataaatgtaggaatgaaaaattgctagttaaagtatagatataagtataggggattttctccataaattttcaaaaaattcataattatagggtgatgaatttagggtttaaacattttggaggtatgtttgtattgttgatatttatgtgattgtgtggcaaattatttgaaaattttgacttcgatgatgtaaattatttagaattttttaaaataaaattagagaatcttatatagttgtaatttatccaataactaaaaatgtaagtactaattataaatagtgattaaaatccaatcactaatggtaaccagaaatatatattattattgcaaatattaacttaaatcctttttaattaatgcataaaa

SEQ ID NO: 94878 - DNA, 786 bp, Cannabis sativa
ttctcatgatctcataataaaacagctaaaaattaatttattcaatacacattgataattttattagcgtttaggaagatcatcttccatccaaatacaactttatctcaattgaccaaccgaagtaatttcaaaatcaaataatattttacatgagtagtatttaattagaaaatttagctaactttgataaaatattaaaaaagctttagtcccaacttgataaaatacaatcaaattaaaattttcaagtattatataaataacttaacatagttaacttaggaatataaatcttataataatataactagggacaaaatgacaattgaaattattgctaataatcatgttcattggataatgttatattatgatgatcaagatcatcttttttttgtcattagtattagtagagctcttgcatttttggtatggattagacaaaagcattgttaacttttatttatttttagtatcgattaatcagtggcaaagtcagaattagatagtggggaaggccaatatcgaccaacacatatgacaattgtaaatttaggtatttttttagttgtgcgtgtcaattgaaaacaatattatactgttttttctgttgtaaatattttatagattactcacaaaatataaactaagaacaactcccataatataacgggcggtgtgtacaaagctccggattgaattcaaattacactcaaaaatctatatctatatatataaataaaggaaagcacaatagaggtttaggtggcactctacattcat

SEQ ID NO: 94879 - DNA, 597 bp, Cannabis sativa
ttcacggtgaaaagtggctattgggtaagtcaatgtggcagatttaagagtcccctcaaggtctgggagagattatggcagtctaatattcatcctcgtttgaaactggtcctatggaaagcctggtctgatatattaccttccaaacttcgtttgggtttggtagataaaagctgtccattttgtcatgaggaaacagagtctgtgcttcacttgttctgtttctgcagtgttgcacgtgctgtgtggtttcaaagtgcctggggaattcgtgttgatgacttgcactgggaggaaatgtctcattttggttgctggtgggcccaagtaaaggatgaaaggcttctcttattctcatcctgtctttgtgagatgatttggaagtggagaaacaagatcattttccaagggtgttctttctctttggcgaaattaatttcagacattaatctcagagttaaggagatggagatgcggatggcgcctttgaatcttatggatcggtctgaggacattgacgtggagttggattttcagaatattgatgacttgcagtgtttcttctcggatgcctctatcttgaatggggctgctggt

SEQ ID NO: 94880 - DNA, 3260 bp, Cannabis sativa
ttccaaaatatgcatttcataattattaatttaatctcatacataaatcctaattatttaataattcaaggtattaatcatatacggtctttacaatcctttattaaggataggtgatctaattgatcaatttcaaggaaagaccatctttcttaatgttgatctttaatttgattattatgagttaacgaattgggaagtgaatattcctactcggtataagtattattgtccttgtagtttactttgaattgattaactctatagtgatagttatagatttgacgaataaggaattttaagacttcttcgacttagaagatttggtacagattgaagtaatttgaaattcgacgaggtttgaaacaactatcgaagccaaaacttctcaggattagctggcttccaatcctcagccaaaccttaccaaacttttcaaagaatttataagcatcataattaacattttttgtgaagaaatcttaacccaattcgcaacagaattcaagttatcacaaccaagtcaagtttgaattctttgaactcaaacttgcataacttttgatataaccacccaaaatacttcaaaccacttctaagcagtcctaaataaccttaagaagcttttttataacctccataaacttcttcaataggtcctactaaaaacaactactgaaaaccaatcaaaacctagaaaatattaacaatttaagtactaggtcttaccttagaagtttggaggagctaggagttgaactccgttattaattccaactatgaagaggcttgaaaatggaggaaaacatcgtggtttcctctggtttcggaagccacaaagtagagggagaagagaacttgactttttctttcttcttttaacttttgttttttggttttggttttcttttacttttgcttttcctttttgttttcttcttaagcagctggtcatcctcaaaaggatgagccacatccacataaacccttccaaaaagagtgactaatcacttagggcaaaaagaataaaatgcccttactttcccgctaagtcatctggtaaccctaggggtaaaatggtccaattatgttatttcgttaaatcttgatattttaagatgtccaataatattttcccataaaatacttgatacaaatttgtattcatgtgactaaaattaccatccgacctatttctactattgccgggtataaaaatttaaaaatatgaaaatttatatatatcacatgcatatcacatctacaatttaataaaatcttcgaaatctttgaaataataatcatcacacctattttcatgaaaataaggtctataaagtataaaatgcgtaaatattcacataatcagattaattagtgctaagtgtcccactaatcccatgtctaagtataacgatcattacatgaaacttttgattgtgaatttaagacctagaatgggttaggtcaagttgttgattgatttaccattattgtgatatagggctgagatcgtcgggtgtttctccactcgggttggccgacatgcatggatttggattagaggtaagaaacgttcaattgtaccacatagcatgtcatgttggcatacaattattactgtttataagacacgatcattaccgttatgtgagaaaattcatggctataaattgaaaccgttgttaggtttcttacttgtcggttatctcattaggtaatgatagtgacatttggatgtcgagttagatatcagagttgtcttatgagacaaaaacaataatatttggatgttggattaagtatcatggttctcttattagacaataataagaatggttactttataaagtaacagatatgacttgtcttattagacaagtatttgtacattacctaatgtttatatacctgtgattacttgattgtgattatttgagtttaagtggatgatatttatgtactgatttgtgatattatgttattacttttcttgtcgaatctttgtgactcacaagtgctatgtggtgtaggtaagagataagaaacatttggtcagtcgtgagtcagggatcttctccagcaaatgtacatataagcttatttagcaagtagagacgagttgtcaggattcatatttaacaatgttctgaagtttaatgtatattttgttaaaaataaagtaatggaatcttttgtaatattttgaaagagaattcccgatcttataaaagttatgccaagaaattttatgtttcaaaattagttagcaagattttaattaaatcacaattttacttaaaccgttagtttattattataaactaatttataaaagtacacacgtggcgtctttatgggatagggcattacacaaatcgaatctcgaaccttggaccggactggaatcggaccgaaccctgaacccagacccaacctagaattagtgttgtggtcgagtttattgaaaatatatcgtaactttacacaacctattaataaaaatcaataccaagcatagcattgtattaaataatactaatacaatactatacaatccaacataatacaatacaatatgacgtaccaaatgagccctagtgtcttaacatatggttggtcttatcatttttttaattattatttaaacaatgggattgttatccaatttttattggaagatagtcattagtaggactcatttggtttgaaaacctaatatatttacaacaacataaaaataataactattagaggtatgtcatatcatatatagggttataaaaatatgttttggtatttttggttacatatataagtaatataatttttttttacaatacatgtccttaaaaggagtctactgatgtactctctatttatttcggtatttgaattttttagtctaattcttttcatggttgtctacattttaattatttaagacatcctgtaaaatttttaaacagtctatttcatacgcaaataaaaaaaaagagtctcgcgtataataaactttttgaaccttatttttgaatctctcaaaattttacaggatgcttaaataactacaacatagacgagcatgaaaaaatttagaataaaaagttttcttagatgtcgaaacataaaggggtgcatcaataaacccgtaagtagtgcactataaaactatccaatatataatatatggccttcaattatttcatccaaaaagatatatatattcatcaaatcttaaagaataaattaaatgaata

SEQ ID NO: 94881 - DNA, 1065 bp, Cannabis sativa
gagggttccacccgctgtcattcctggacagacgggaagcgtggtgaatgatggaacaattcttgttactgaaactgtgtctggtgtgcaagagaacagaaacaacggttccgcacacagccaagacattcataacatgactgttccaccaggcatcaatgcctagacgaccatgggagatgcaactgaattgcaaaaccttcgtgctgcgcttggactcatgcagggtcaccacaataccctgcatcacgatcaggaggaattatgtgccgcagtaaaccttgcatttgacgaacagaggtgtatgttcgccgagtggagggaaaaagagatggaggcattaagggctcaccatgcagagatcgaagatcgtagtcggtaagcaactgtgctgatacgaagagcctgtcaaactgtaggacagcaggcgccgaacgtcattccccttggagaaaccgaggatgacccaacagtgaatgcttcccagacagctaacggttagccgtccaatccccagtcacgacttccactcgtgggccaagaggtaggcggacagaccttgtccgtgaattcatcaggaggagccatgctcgatggatccacgcaaaataatggagccattccacttgccaaccaagcggacgaatcgctaaggcagccaggttcttctgtgttcgaaaggttgggaacaccccgtgacctaaagggcgacctaaacagaagaaggggaacatgcgagcagaatactacaacgaatgtgaagtccatagctcatactcaaatccccgctcagaaagatgctgacgtagcccaactcgaccagaatgccaatcaagtcagcctagtcgtacaggctcagcttgacgaactaaagaatatgtttgatggcatggccgggcagcgtaacaatgatcttgagttagatcgtgcacgtggaactcccttttcaccagaaatcaacctgctgccactacctcacaagttcaagatgccaacgtggaagatgtacactgggagagaagatactctctctcatctcaagtatttcgagatgcagatggattt

SEQ ID NO: 94882 - DNA, 926 bp, Cannabis sativa
tttgtaagttttccttttctaaattaatatgttatatatctctatattattcaaaaatataatattttattttatattttttctacattatttttggcacatttatttttaaaaacactctaagggtatactacattttaaaaatgttataattataatgtcacacattattatatatagatatattttttttattaaactattatttatattgtacctttaattttttattgtaaaaaaaatatagcatcaatatcattgtatatatcaatgaaaatttcaagaatagcattcttttatttccaatggtataacatctttatattttgtcacctaaactttctacctcatcaaatattctccaaaatattatataccattagagatgctctaacaaaataaaactaaagtctcacaaaaactcaagtaacactagttggtggagcattatctctaacgctctgtctatttgctccattctggctaaaaaattgcatattgaggaagttttctgttctatctgtggagagggagagaaaacgattgtacacattttttttatattgtaactttgccttttacttttggaaatcttctccgcgggttgtttttccacacatatgtttcctaacaacacactgattccataaggctatgtctttgacacccaaaccaccttcgttcttagatttacaaaagatcatgccaaacaacatttctaaaaccataaaattattacacatatatgctcccttctaaagagaggctcaacaaatctaaataatcttctacaccacagctttaggcaagataacaatttgagaccaattaaaattaatagatagcaaaatagagtcgataaaattaactattcttccagcataaaaaatttctagaactttaggttttatttctacctatcatct

SEQ ID NO: 94883 - DNA, 774 bp, Cannabis sativa
aaaaaaaaaaaaaaactcaataaacattttgataaatataaatataacatggtaaaaagatgaccaccaatgtaggaaaatgaaaaatgagtattttaaaacaaatttaagaataatgtagaaagatatataaatatatcttgatatataaaaataattatatatactttaaattaattttaattacattcatttattaatggaaaattttaatttatatcaaaacaatcaatgaaattttattggaatccaccaataaatgtaattaaattataaaatgaatttaaataaagaaagaaaagaaaacattaattaatgaataacagaaaaagaaatagaaatagtagtttgatagtatattctaactctctactcttattctcaaatttcagtttttgaaaaaactatgtggatctaataaatctatttcttttataaaattaaaaaacaaaaacaaaaacaacaaacataaatattaaatcaaatatcataaaaatgatgaaatagaaattatatataaatatttcatggtacctttaaaattaaagataaataagcattcaatttacaaaagcataaacatatttataaatagatctatatttctttatttttctaattaaatattaaaaacactacaatatatatatcatataaacatgggtgagagaatatattcatattttaagttaatagatctatatattttttctttgatcattttttgtattagtataatatatataaacaaccaataatcttcaaaagaaatat

SEQ ID NO: 94884 - DNA, 760 bp, Cannabis sativa
ggacttgaaaatcactgtacaagattagaaaatgtagataagccttcatgaagtcttgtcttgagtttcttgatcttgaaatctactttgggtcactttcaagaatttttgtaaaattatcattttgcccttgaagttaattttgccataaaaaatctgattttatctttaatagtactacaaaatcaacaacttattagtaacaaataataatcatatatttgttaatcatcaaaataaggagacttaagagtttgagtccacaatcttctaatttttgatgatatcaaatatttgattattttgaaaagggaaaggaaataaaagtgaaacaatatattagattagctctcccttaatatgtgcaagggttaataattaaaaaatttaccttttagttttaccttgcatgattttataaactccccctcaatttattacttatattcaaacatcattagaagtctaaaaaattgagttgttgccataaaaataatcactatgaaatgtcttccccttttgattcatcaaaaagggtggcaaaagaattcacaaaataaatttcaagtagaatgaataaaaaaaaatcataacgcaccattcatttgaaacatagaaccatagactatagactttcaagttcaaacacacttaccatccaagcaaaagaaaatatgaataacataacacactaacacatagaaagtcaagcatactaagaataaaaaaaaaataaacatgaagaacaatgctaaaacat

SEQ ID NO: 94885 - DNA, 667 bp, Cannabis sativa
gttatttcaccaccgactctagtccgctatatatagcagtcatttttccattgtaatctaattttcccaatcaataaagttcaatttctctctactcttcaaagctaatataaacgcaacaaggtatgtagaggaaaagctacactttagtctcgagcatcgaaatgctcaaccagtgcccaaatcacgttggggtgcccaggtgatacccaatgcacaagtgagcatcttgcttcgtggacgacacaatagctatggtttgattttagggtctaaagggtactccgatacactcaaatcatttaagaaacaccttgtatacttgagttaatgccgaagactattggaattacttttactaaaatcttatttattataacaaattctaatctttagtctaaatgttacacatcatgcatgcatactagaatagaatttaaacacacactactacaaatatcagaattcgcgactgtccaaaaaatgatttttttcggggaccgttgctcaaataattaaataactattaaaaccttctgttatagtgagatttctaccacctagaaactcgagacaagactcctatttaaaggacacgtatattaagatttccaatggaagctgaaatatccatgagagactgctcgaagtttaaacctcgcccagg

SEQ ID NO: 94886 - DNA, 651 bp, Cannabis sativa
cagagttttaatgatttttttttttataaaaatgcaaagttttttttaaaaaaaagaattagaaaagaaactattttctttcacagagtttaattttcattcactacacttattcttctcaaatttccattctcttccaatttctctctataatttgattgacattttaatttttgggaacaagaaaacttcttcgatatcaaaatatatgtatgaggtatttataaggtatttatgtatttattcatttcaaattgtaaattttttttactacctcgagaatgtttattttatgtacatatatttacaagtgaaatgtttatatgtgttagattctccaaaatttaaacacattatatcacttatatatatggtttgccatagcttgcttgatttaaaattatgtatcaaaataaatgacataattatgtgcaattatatatgtattgccatgagaatttttaattaaatgtatttttttttacacataattaaatgtatttttaatttaacattagttgaaactaattatatacttgatatatggagagatcaaaaaattataagtccatcaatctaaaaaaataagtactctattagaatattttaattatggaaataattttttatttatggaaatgattttctatt

SEQ ID NO: 94887 - DNA, 558 bp, Cannabis sativa
atatgttagagatattgctcaaaatagataatttatggttaaagtagattaattcagtgtatataaaaagctaagattggtccaatgctccacaaggggggacttggtattagaaaaaaaattatagaagtgatggacatgattaagaggcacattggctgtaaagatctttcaggcaaggattttgagatttccaagctttgtgatagaatgtagcctcagattaattcccttagagtttggaactctcttatttggaactggtacagtgatcctaaacatagactcatttgttggttggcttactggaaaaggttacaaacccgagatcatctaataagatttgactgcattcaagttattgatacttgtttgctgtatgatcttgaacaagaatctcactgccatttatttttttcttgtgaatatagtaaagtcatatgtaaactggtctttgattgggttgggcctaataatatgaagttgaagctagaagcatgtttgaaatggattaagagatatagacactcaaaattttgtagggaagtttacattgca

SEQ ID NO: 94888 - DNA, 530 bp, Cannabis sativa
tgatctagtggctccaacttcagctccttctacccttgcacacatgtagacggaatttttattagtattcagcatcatatttgtatcatatagactatgctttcatgttttgcatagcctgtggctttttatggcctatggcattttaatttaagaacattactcacttttgcgtttcatgtggcctatggcctttttgaaactttatgtgggctggagcctttttagaacattattttcatgtcctatgtggaatgagacatttttataacattactttattttcagtcttagggccttcatgttcgtatctttggccataaaccctctgtttttgaacactactagtatttgaccatgttgctttttctcatggttctgtgaccgactaggcagtctttaatcctggctatcttcttatggccttgacaattaagggtccagatttactttcccaagccgaagtatgcctgcacgacttagaggcatgtttagtagcttatactaagcgttaaaatttctctgcataa

SEQ ID NO: 94889 - DNA, 740 bp, Cannabis sativa
ttcgggttgctaaaatttaagtgcaacccgcctaattttttttaaaaaaaactgcaaaccgactaacgatttgatcagtttggtcgggttaacccgcccaaacagcccaaacttttttttttggtttcaaagtcaaaattgtctggtaaatttaacataaaataataatattatcaagacattttgggaaaatactatcaaatcttcttatataatgaatagattcagtatatgtgagtacacacacaatcctcatcagcatgaattctgttagcaacttcagatggatggacactgtcaaaaaatacatactgagtatcatttgaacaagttcctactgagtgaggattacacaaagctgaggttgtctctagagtcctagttccacatcagcctcttgctgcttcaacaaagcctataacaacaaattcaaaacagagacattaaataattgtatgcagtatgggaaaaatggaaagaagaaaggtttgattgtgagtaccatattgagaaggagatttaacaacatcaaaaagaggcttgtaaatgtcaaagataacaagtctaagatcagggtattgcttttaaaccatagaaattgaagataaaataagcttacagtaggaagggatgagcaaaagcagcattgactagaaagggtcttgtttagagagatgttcttccgtgtaacccctgaaaacgggtgtgtagcaaatagaatctcagaccgcctgagatgg

SEQ ID NO: 94890 - DNA, 520 bp, Cannabis sativa
acaattttcagcttcaaaaatggcaccatcaacatttatcttgaacttgtgtgtcataggtttcatccaatgctccctcccattactataattaacattaagtaatgagaggtgcgaatactaaagtaaaattaatggtgcaaactttttatgtaatatgagtgtcacattcatataaattattattatttttaacacataagtgtaagcctctactacgatacaaaatacaccgtaatagaaatgcaaccctcagtaaaaaaaaaacctcccaaatatatatatgttattgggcattgaaatactcgaatcactcaaagcccaaaccaccgttgaatgattttaaaaaagagaaatgcaacaattatcttacaaattacattcagaatcttattaaaaattataagatttaaatctaggagggatcttttgcagtgacaactggactaggtataagttttactaagaaagtaactttgactttgacacagattacaaaattattttaatattaaaaaat

SEQ ID NO: 94891 - DNA, 503 bp, Cannabis sativa
tccttgcttcccttctccctcaaataaatcgattccaatatttaccttaatattattttcatttgatttcacataggattcactttcatctctgtgttcttccactactagagatggtacaatatcaatttcacgagccttcctccattaataggtttacttctgtcaatgtcacaagtcctcaactcttccctactttccatactagacgtgtcacattattacgagctttctaaattgcccaacaaataccaacaatcaaactaattttctttctacaccaactattaaaaataccatgaattttctgttttgttaactgacaattcagactatactttgaatatggttttagtaaaaaataaaattgagttaggagtatgatagaaaatgaactacaattgttaaagctattgagttagggaataggaatatgaattttatgaagttatgataaaaaaaaatagttcgaccaaaaccgagcatagggtaccattatgttc

SEQ ID NO: 94892 - DNA, 1144 bp, Cannabis sativa
tgcacataatatttggtgtaacttcttaagtaaaaatatagtgagtttcacataaatttaatgcgaataaatttaaattatactcaacttaaaaattattatctaataatatatatttttaaaaaaatagtatgtattttgaagtataaacatatataactacatgaattgtgttggtgtatgattgaaagtatgcaagtgacatgcatatagccttaggtaatatcttttaacttattattgttttctttttgaaaaagaacttttattgttgaaattaatatgtatatatacttcataatgatgtatgggtataataatataatatttactcattaaacaaagctttgatttgaaaatgaattatcatattatatgatgtatgattgaatatgagagtttggacatgttttgtgctcatcatatagtaaatgtattaatgttttaattaaaaagttatatatggtagtgagtgagagtgtggttctctaatgacgttgtaagttgtaacctaactaattagtaattaacccttattatttatttaattattaatagatgatgcatgcacatgaaattccaaatgcattgggtaatctactttcttttaatatatacaaataaatacatacgtagagcttttcaggatacttgtggacacactacccatcatttcaaaggtcaagcttccacaattaataaaaaaaaataataaaatcaatttgtttaatgctcaattatttaaaaatttaaactgtactttatgtgtatatatattaattatatgaaatattgaaatgtacagctccactaacctaaatcaggtcactaatttccctgcccaccatgtgatgatgcatgtagtaagattttatatttataaaattttccctaaaatatataagatttgtaattgggggcatgtcacatgtgcatatgcttttttttttttttttgaaaaggcatgtgcatatgctttaattaccagtttcttttttttttttcatcataaaaagaatcaatattacttatttttttcttcaaaaaaaaaaaaatattacctattttaaaatgtttaaatagcatcaaatataatattagtgcactttcaaaatatatgaggaaattattccatatattattt

SEQ ID NO: 94893 - DNA, 631 bp, Cannabis sativa
  modified_base (579)..(579): a, c, t, g, unknown or other
gagtgttcaacccaaacttggaggatccatatgttatcgaagcagtagttggagtcggagtctataaattggctcgacctgacggctcgctaataaaaaactactagaacgttgagcatttccgaccctactacaaataaataaatgatgtaactcgcattaccgatgtaagcttaaaactttagttatgaataaagagaatcatttatattaagtaattacaaagtctcattctttaaaattacttaaggggcatttatgtatgactaacccgaattcatctggaaatacattgtataatgcaaacccgccatttcaattttttttttgaaattcaaaggttcttgactaaacctgtttcacgaaagtggagtcaaacagttataacaacctgacaaaacctttttgacgagaaaggggtcgaatcgttataacaccttgatcaaacctttttgacgaagaatagatcaaacaactataatttttgatttataacctctctgacgggggtggaaatcaaaatttatatctcgcgtacaaaactgaatactaatggttctcacgagctaggaaagtacnaaacgaggcatcacgacgccttgataacgtacttaaacctagaaaatgaata

SEQ ID NO: 94894 - DNA, 840 bp, Cannabis sativa
  modified_base (149)..(150): a, c, t, g, unknown or other
aaatactcaaatttttatatcacaccctataaataaattaatatataatcttaatttttatattttcataatttcaattataaaattataatattcaatattatatttaaattttattattattttaacttatttataatcgataaatnnatattttattattaataataaattataaaaaaatttaatatgtcgtgtcatactttttgagcttgtcgtgtatcgtgcttaaggacatatttttcgtgtcgtgtcgtgtccaagcctgtattttttcgtgcctagtcgtgctcgtgcctttcgggctcgtgttaatttcgtgttgtgtcaaaaagcccgacctatatttacaacactagttggaataaatgtgaacttgcaatatgagcattagtgttgttactaggggaaaatctgaaatcaaatctaactgacctgaaccaatccgttatctcaaattttgtccacctgacgtggcatgtccacacaaggtaagacagagtagacgtggaatacagccttgcccatagcaggacaaagtctccttacaaggcatggtagaatcatcaagcaacaagcgagaggagttaagcaagccgccaagaagttgcacaacaatgtctagccaaccaaaaagagtatataggccggctaggatgagcttatatggccgtccagggtttgagcagaagctggctagccaaaggtgacttttcgaccaaggaggggtcgttcgactaagaaaacctaacctctacaaggaaaagttgtacaaaggttggccaacacatgcaaaggctggaaaacatttgccagagctggcaggaacatgacctgcca

SEQ ID NO: 94895 - DNA, 652 bp, Cannabis sativa
ttctgctgttcaaagttttgttatgtattattttttttttggacaaactcaaatggtttggtatgatgctctaacacatgattttcacgagctaagaaaagagaacatatagatcattgttgaggtagtagtataattaatttaagaccatagaagtaataataattggtttctgtaggagggagcagtgaaattcataatgtaattttctgtaggagcagtctatttgggcgtcattagaatttagattcaatgtttcggcatatgaaaaggatcttttttaattatgagttctgcctgtcttgtttggctctgttgtctttatttggacaccaaactttggccacataataaatccatgagacaaaggatctttgaatagtcagagagggagagaaactagttttttatccttttatgtgagaatgaatgcatttcaatttttgcaatattacaatgttggccactcctcactacataagtacatttcacaaatcacttgttttctaacatttgacaaattgtgcacgtattgaactttgaaagttggaaaatagtctagagagaatacattgttggaaatatataaattttgtaggacttttagctttcatatgttgcaattaacctctataattttacctttaagatc

SEQ ID NO: 94896 - DNA, 919 bp, Cannabis sativa
  modified_base (644)..(649): a, c, t, g, unknown or other
  modified_base (745)..(758): a, c, t, g, unknown or other
  modified_base (826)..(828): a, c, t, g, unknown or other
tttttttaatttttttttcctatgaaatattaaataatttatcattaaaaaaaacaattgatccaaaataaccaattcaatatgcactattgcggattggatttaaactattatgcggatcggcaggggcggacccacatagaggtaaggtggagcagtcgctcaccctgaaaaaaaaaatcagaaaaaaaatatatatgcattttagtctgttataacatatatttataaataaaagtgatatctaaaataagctttggtataatggtaaagtcatttcatacatgtaaaggaggtcatgagttctaatcccaataaaagcatgtttactttaacatttttattttacttcttgaatttctaccaataatacttatatttaatgtcttaattattgaaccaaatatatttttattttattgttatttttttttactttatactgtatttaatactaaaatataaatttacattaatttttaacatgttatgcaatgtagaaaaaaaagatgcacccctcagttataaaaaaaagtgtcgtctcacctcaagttaaatcccgggtccgccattgcggatcagattggatcaaaatataaaattcgcacttagtgcggattgaatgttgtttgaccaaaaaagtnnnnnntggatcggatgaacacccctaaagagaaccgtacccccaatagctcactaaacccaataaacccaataatcaaacccaaaaaattaaacaatcttnnnnnnnnnnnnnntctctttttaaattaaaaaaaatcatctctctaacaaacctacctgagagaatattaataattttttnnnttattttttaaaaaagaaaaatctattttctaaatatattaatattagtgttttaaaaattaatattaattttaatggtataaccctaaca

SEQ ID NO: 94897 - DNA, 691 bp, Cannabis sativa
caagggaacagagtatttagtggggattgagttgggttgtgggtgttggggacagagtgattagtgtggtaatggcccataattctgagctgtaaataacaataggtggttagacccctcctttcacctaacttttcattttcaagctcaaattttagtcatacaatttttcaaactatttaaccattaacaaatgagaaatgttaattacaacctcctattacaatctctttgtaaacatctacgttcgaaattatatgtcgagattttaacgtgtcatgtattttatttcagttaaattcaaacatgaactatatatatgtgtgaattatatatatgtgtatattcaggctcggtcttgggcataggcgggctaggtctgtgcggggtaggcttgtgcctagggtccacctagcttgggagcccaaattttttttttctcttttcaaaattatatatattttttgctgacttggaaaaatactacattttttttaacataagggcctaaaaataattttttttcttgtggcccactttgtttcaggaccggcccttgtatattcttatacacgtggaatatttacacgggcatacctaatataattagaggaaattgcactttatactctttttatattgtcctcttttatttttacactcttttttaaagtctatcatttttacctct

SEQ ID NO: 94898 - DNA, 509 bp, Cannabis sativa
atatatatatatatatgaaaacgagtttcttcaagatataaaattacttacatccaatagttgtgtgttcatcgtgacatttgttgttcttgtagtggaacttttgaaaactgtttacggcactgaaaagttctcccttctcaggattagcctatttttcatacataagaaaatagaaatatattattcaaaaattattaatttttaggcaataatatttataacatcataccccaccgaaaatgtggccaactatggtcttagatctccatccactataaatcttcatctggtctcaattgttcgtattttattcaactcttgcctgtaatataaagtaaatttactgttaacaaaattcaaaaaagcataagttaatggagattcaactttacaattttaattttctacctgttgttttgggtctttctagtatacaatgattctgccaacagtaccttcggtgtgatcctctctcgatgtgatctcctattcgcatcttcctctcc

SEQ ID NO: 94899 - DNA, 637 bp, Cannabis sativa
gtaacaaccccttgctcaaaccttttctgacgctgttgatcgagagcataagtatgagccaagttgcgaacctcagtgagcagtttgacttgcccaattgagcaagagggcaaagcgagaagtgggcgaagagctcactggaggaagttctggtgcagcagtggcagcagtggcagcagggtcagaattggtaaaggcaatcacagatggaggaataggcttaccaaacactggttgaaatgttttgccaatggagggcacaggcacagtgacgtcctgttcaaggatagttggattacccctcaagaccaacctctgaatcaaactaggatacggaagtgtatgcttaacccttttagccttagcagaatccaatatgcgagtatagatcatagatggtaaatcaatggacacaccagtaccaagagcatataaaaaacgagcagtgttatagttgatggtagatgtatgtgaattagcccaccaattggataaagcaattttatgaagaactcgataaaattctgagaggatagtgacaggaaattccttaccattccacacaaactcaggttgactagtaagctcagcaccaacatctttgaacagaggcttatactcatcagtgtaagtgggg

SEQ ID NO: 94900 - DNA, 527 bp, Cannabis sativa
tctatttgttgcaaatgatgacaaattaacttaacttacaaaagcttacaaacccaactaagcttttatatattgtatagaaaagcgaaatagttttatttattttaatataaaataaaagtagtatctactttatatattacttttttttttaaatttatcgtttgagtttctcctgtaattttatgattacgagaattgttatgtttttgtagaaatataaaagaagttaatttaaagtataaaaaataaattaaaaaaaaataaaacctttttatgaaaaataataatagtattttttttttttgaaaggaaaaaaaataatagtagtatagttgaacattttttgctgaaaagtagtacacttggagtttttttttttttttttgaaataacaagaggctgacgagcaacaaacggagaaaagcacaacacagcctaatggggttaagagaaccgcctagtcttcatctctcaacctgagagcaattttagcaagggagtgagccttgtcattgtgttgacgt

SEQ ID NO: 94901 - DNA, 574 bp, Cannabis sativa
tttgaattttatttggggattcaagtgtaaaaaggttttaatatggtagtgcctctggggatgatcaaactaataactttcgttcttccgagatattccatgcggaaaaatattggagacctgaactgaagaggctaagcttagttttataattttcaacttcttttctaggattagaaatgaacattaatttgatgatgaggatgagtgagctatggatttagtactgcaaaatgctgtattttcctgaaaatttggaaactgttgacactttaggatgttctatatgtttttgttttgcctctgaagatgatcaaactaataactttcgttcttctgaaataaacccttgtggaaaaatattggagacctgaactgaagaggctaagcttagtttaataatttttaacttcttttctaggattagaaatgaacattaatttggcgatgaggatgtgtgagctaggaatatcggagcaatactgttgtttttggggcatttaatactggaaaatgctgtattttcctgaaaatttggaaactttcgatgctttaggatgttctatatgttttt

SEQ ID NO: 94902 - DNA, 929 bp, Cannabis sativa
  modified_base (901)..(903): a, c, t, g, unknown or other
aatttatttattttaaactataggatagttctacaatagacaccctaatattggtcacatccatgcactcttaaaatcttgaatagtgattgattataatattgggacacgtgctattttagtggattgttacacattgaatatttattcatttaattttttttaaaaaaatatttgtttatttatttacaaaatacatatgaatatagacgtctttgtttatctcaacctcgatttcaagaagtttcaatcgattctaagccggaagatcgaaatctcgccacaccatttctcagtgttcatctcatcgtcagaatctctcaagaaattcccaatgaacggtaatgtcaatttctggactaccataatctcaaggagaattcagagatggggaaaagaaatgcaatttctcaaattctagtctactagatctaaggattcagacgaggaatcaatggaggattctctcaagttccttgttcttgcgcttctaattttttcttgtgccatcaacgttacctctgatggaaagggaatctccctctggactgggactgagggagagggagtcgccggtggtgccggagctgagagagaaggggagagggaactgtgcactttgagttacgtgggctaatcaaataatagtttagaagttctataggtgcaccccaatttcactaagttttgatccactagagttagccctaccacaaaaatccttcattaaatacctgtcactaattatatttcctaatatcggacacactaatgtaccactaaaaggagtgtctatataagaattttcctagactatattaaatcagttttttttcttaaaaaacattacactaaaaaatttaattatagggtagttctactgtaaagaccgcttagtttnnnttggaaattagcagttaatcacgttt

SEQ ID NO: 94903 - DNA, 833 bp, Cannabis sativa
aactaataaataaagattctttagttgatgagtttcaataaataatttagtttattggagcttagaattataggtctatggtcctcgaatcgcctccttgaaatactcttaagggtaaggataaggagttgtataatattgttcaaaaaatctattttaaattggaaaaatagtaattatttatttttgtaaaaaataaataatttttcaaactaattaaatagacaaaagttgttaagacaaaatttattgagacaaaagttatcaggacaaaagacaccatcattgtcttaattaagacaaggcaggttcagtcattctagctgttcgtaatccactaactattcttgcagacggtcagattttttttttgaatatgctcttgaattcattcgagacgtgagcaaaactgagattggagaagaatatgcccatgggttccatttattggaactctgtttttatttatttttgtttcgaatcaattaggggctcttttaccttagaaaatcatagagttacctcatggtaagttagtcgcacccacaaataatataagtactaccgttgctttagctttactcacgtcagtagcatatttctatgcgggccttaggaaaaaaggattagggtattttggtaaatacattcaagcaactctaatccttttacccattaacatcttagaagatttcacaaaatccttattgcttagtttttgactcttcgaatatatattagatgatgaattagtagttgttgttcttgtttctttagtacctttagtggttcctatagttgtcatgttcctaggattatttacaagtggtatt

SEQ ID NO: 94904 - DNA, 1656 bp, Cannabis sativa
attttttgtaattattttgtttttgttgtacatttataaaaaaagccctaaaaaatatcgtcataaattcaatggcagatccaggaataaatttgtgtggggtgtaataattttgattttttttttttaataatatagtatgcaaaaaacttgttaagtaaattgtaatatggtatctgaacatataaatttaaaataagctttaaaaccaagctaattatttaataatatttatcagtttcatttatatatacactataattagtagcaattaatatttttttttaaagaggctctatatgtgggtccttaattaattaattaaattaaattatggtgttataataatacaattgatgatatgcaacgtcaaccttgatcatgaaatttttatattagttttatggatgtggacatgttttcaaaattttgattaaatttcatgaatgcatgtatgtattacttatattctaatttttcatttgaaaacaattaattaaaaataaatatgacttcaataacaaataacctaagaaaatacaactatataacccaacaaattagatgaaaaaaatgaattttccagtacatacgtagttgggtataggtagttgagataacacattaattattaatattttattttatttattaattatttttttaagtcaaagatatataatagtaataatgtaaagaaaaaaaaaacaaatatagattatagaacctgcaaaattatatgagggtgggtggaattaatatatataccaacagagaaaaattattaattagaagagtaaaaaagaagaattaaagagaaacacaataaaaaactaaaagatatagataatgattaataaaaacatttaattttattagaaaaaaaaatggttttcatgatttcaaaatttaacttaacagtcactacatataaaaaactttattattatttttattattaatattagtacatagtaacttagaaatatctttaaagagaaaatgcttttaacaatataaatttaaaaacatatacatagataataaaaaaattaacatttggttaagtattgtatgacttgtcatgtgatgtgaaataatgttaaatgattaagaggtattttaatcatattataattaagaagtttgaaaatgccactataaaaatgtacatatatatatttgaaaaataatatagttggtattagaaatttgatcatgatttggtagtacttcatattcagttcaatattcaaatataattatcttatggtaattaaattatgatataattgtatctttaagctcatccatcaaactaagctatctttaattaggcattattagctatttggtttatatgaacatattaattagcttacttttcaacgaagtttaaaataaacatggcgcaatcctacccattatccccaattaattagtgatttattattttatatgtattatgtataaaattctactatgatactaaaagtagtcaaaattggtgacaaatttataatacctttttgcatgttgtaaatttacaatataattaattacatgctatgtagtgtagtggtctttattggcatgcatatttttttatttgggtaagggttgaaattcacaataatttttcttggaagggattat

SEQ ID NO: 94905 - DNA, 637 bp, Cannabis sativa
  modified_base (523)..(523): a, c, t, g, unknown or other
  modified_base (568)..(585): a, c, t, g, unknown or other
cccattctcttggcaaatattgagcgagtgttgaattatgttcttttattgtattggctatgtatgttatattaatgtctttttggtccttggtgcaaatactaactttggggttcaacctaatacgaatgagtttgttgattgaattatcgaggatgctgaatctataaaggaggagcaccataattttagggaaatttctccccaaagattgcctgcaaaaatcacaagacattatagaagaaggtatctcgaaacttcaatcccttgaccacattaacatcgtccttctaactcgagaacttgagaagactggaattaagtttactattttgactcacatgaccgaagagtaacgtatgtttgcgaacaagatgtcccaaaagaggacgatcaaaattcccaaagctagtgatgccatggctagagccaaattgacaacaccaaagaagtcactgaagggtccaaatatgtttctgtcagtaacttcattgatgttccatttgttggaattattttaccnggatctagatttactaacaagttttttttaacatcctaaacatgnnnnnnnnnnnnnnnnnnaaataaacacatataaagttttaggaaccttacagtggttgcagtgaaatat

SEQ ID NO: 94906 - DNA, 555 bp, Cannabis sativa
  modified_base (527)..(530): a, c, t, g, unknown or other
taattaataaaaaaaaataatttttttaataaataaaaaaaacataaaaaaataatatttttaaaaatttaccttttcttttatttacattggattttgttgggaggtttaattattctactaaaatgataaggaattgaattggattgatttttagagtaatttgcggcataatatcttagtttaactcccgtttataaataaatatttaagtttaatttttgacgataataatatttatttaagttataattctagaactctgtaagtacctgaccgttaaatctcaagtcatttttcacatgtcattgtcttattggtaaatttaagctattttttcaaaataaaaatttaatgacatgggccaatcaaggattagcacgtgacaatttacttaaaacttaacagctatgtacttacagaagttttagaattataacttagatattattaccgctaaaaattaaacttaggtatttatttttaatcggaagttaaacgtaatttttttaagagtaatttgcggnnnnaatacctaagttttatgccgagtag

SEQ ID NO: 94907 - DNA, 1015 bp, Cannabis sativa
atacaaggtgacatctctgcaccaataaataaaaaatgttgctaaggtactatttttaattttgttattggtgtgtttatatacatttttttgttatattgtttgttggtatattataattgaagaaaaaaaagcaccttgagaatttggttagagttctagatctgaattatatttattgttagttctcaagcatccgcatatgtcactacaggcatggcaggatgatagggatagaaggaagagactcaacattctccaatatgaagatgtatgatacttgaactttgttccttggtaatttgtgtaggttagttatatgtgtgtttcctgtgttttttcttattgacaagtattattttaattagtgcgtgtaacttattcaaatttcttttatcaataactaaattatttgatagcaatccaatgcagcattctttttctcatcttgcatgtaactgtttttgctgcagcaattgtttgtaaggaatggcaatataactactccttcaccctgccctttcttagatagggaacaaataaggtttaagtttgtctcaatgtgtttatatgcaaaatacaactcctccaatcaccgttagttgtttcagctgttaagttttcagtacttctataaagatagcagtcaatgtcattaattcttttcttcaagagattgaattgattgaactgttcattttatgcattattttaattttcttttatatctatataaactttatttccaagttgctcaccttagttactttacatgttgcaagattaataaggctgtgtgaaatattttttctttaaaaagataaaatctaatatgctgtcctttgtgatcatcaaatgttatcattgtttttttctgcagttgaagagagaactgttccttgtgtctatttgaattggaattgcatgtagtggttattgcttggttgttctatcagtccaggtacactttaataaaagaaaactcctatcttttacattattaaacaatcttttt

SEQ ID NO: 94908 - DNA, 993 bp, Cannabis sativa
tattttttattttttttcttgaaatttgttttttatttttgacaccgtaaattatttaaaaaaattagaggttcaaacaacttgttattttttaaatgttgaagcagataaaaagtataacagaacaactttttttccagatgtactatactaatttttttaggttatatgtactagtctaacattatatcttaaataaataatatttaggagtgatatggataaagagatggctaaaataataaattatctagttttcaaaaacaattgcaagactatctactttttattatttaaaatttttcaattcatattattaaattgtctacctttcggccttaattagatagtgttaagcactaagtcactttaattatattatgatattacaataagctgtaaagatatttagaaaatacaaattaaaggtaaacaatgcacttccaataacacctttatctacttcattaattatggataaatttataattaacattaacaaaatgctaattaaacaagtttcaagcttttggagaggaatctcttatttttgagagtttacttgaggagattcttttttgaagtagacacatagatcgatgtatgttgtgatagctatgtagaaattactctataattttctcagcaatgtctaaaacactactgattaaactcttaggacgcgggttaaaaactgcgcaattcttcctaatctcaccagcgcttccaacagtagcgattcttcccatcttagtcatagcattgccgaaatctctagagaacaagcgtggatttgaagccaaatttgcaacataacgagaagaggtaggatctgtagcaagctcctgatcaatcttcagaacccctctctttaaacggatttgacgatagaactcattatcgaaaatattactagtgttttgatctaaaaacacctttggatcactcccaaccgcacataatgctttcaacctggtaaccaagttaggatcc

SEQ ID NO: 94909 - DNA, 526 bp, Cannabis sativa
gtacacccaggtatctaaatggcaagaaatttcttttaaagtttgatgcctccaggatcctattcacttcaacatcagccattcctaagcaatatatggctgttttctgatcatttggcattagtcccgaagtagatgagaacaattttaggcctttgagcaaaagcattatggaaatgaaatcaccattgcaaaaaacaagcaagtcatccgcaaagcataagtgattcaatttgatttgtccacatctatcatgaaatttaaatccaggctgctctcctacttttgtaaaaattctcgagagatactccattcccaatacaaaaagtagtggggacatgggatcgccctgtcttaatcctctcttagtgttaaaaaatccacacatagagccattcaagagcaagaagaatttaggagtacaaatacattccaggataagagaaatgaacttacgagggaagccaagtgccttcatcatctcttctatgaatccccattctatagtgtcgtacgccttccttag

SEQ ID NO: 94910 - DNA, 509 bp, Cannabis sativa
ttacgtgctggaacaaaacttcttgtgcgctttaaatcaaatctaaatatttttcgctcattaattttttttaaggattttttcgctcattaattactataatataaatgacacattaatccattctccaacacctataatatcatagatttaaattgtaacatacactaatcaattgttacaattttgtatgttacatatttatttatcaaacactaatatgttattcaaatatactagtgtattaattcttttataaatatttatggtgttactaatacattgcaaggatgatatcaagaactaataatgaagaaactaaattaatacaaacacataaaatttacaagcttcatttgcattgaaaatgcattccagtcgactagagcttagtttcctcgaactagagtaaataacctataataagaatcaatgtcaagatacaaactccaatttttaaatcaaagaaatgtaaaataatatagcaatgatccttaaaacaatttacc

SEQ ID NO: 94911 - DNA, 699 bp, Cannabis sativa
atttcggtatttatgctgatgtggcacgtcagtatttgtataaataattttgttgaaggtatttttataaataaaattaattttaagtataaaattgaaaaaaaaacccattatattattggaaaatttacatggtatattaacttttgttggtttttatttacttttttactgtattttttttataaatttcatactgcatatattatgttaaattttcactggtgttctactagtattttttagttgttctactgttgttttaagttgttctgctatgtgttttattggtgttttataaaaacatagtatttttgaaaagatttccgtgtaacagtatttttgtaaaaattaacccaaattctaatattttcatagtttcccttattatttgcacttcacttttcatgtttaaaaagaacaaaaaaataaaaaaaaaaaagcctacctatagaaaggaaaaaaaaaatatgtcagttttggttcgtgttactcttggaggttgtcatataaacctataaaattatagaaaaaaaaaaaaaagaatggctaaaaagtattattggtttttacattgttattggtataattatgtattggtttcaatataacttaagaaaataatttttaaataatatcgctagctaatcgtaaggcactacttataaaaagtactggacactattggtgcccaataac

SEQ ID NO: 94912 - DNA, 1173 bp, Cannabis sativa
  modified_base (1110)..(1114): a, c, t, g, unknown or other
atgaatttctcataaaccaaagaattcagttatataagcacactttatatagagtagatatttgtgaaatggaaaaaaacatcatgaaaaataaaatcaaatcacattaaaaataaaaataatttaacctgaaaataactagcatttaacctcatatatatataaatatatatatatataaatctgtgaatgaaaaaaaaaatatactaaaagatagaaacaactcacatttgaaatggaaacaaaaaatagaaataatataatgtcgaaatggaaactataatttgtaaaatggaaataaccagcatttaacctcgaaaaatagaaacaactcacatcaacaaatggaaaaaatttaaacttaaaaattagaaataactcacattgagaaatggaaacaatttaaactcaaaatataaaaacaatttaaactcaaaaaataaaaacaatttaacctcaaaaaatagaaactatagtttgtaaaatggaagcaaataacatttaatgtcattgttaacccaaatgctttctctggtgacatggacatcaatgtttaacacatggcaagaaagataatatctcaaagttgagtagtcccgagtcatagtagtcgacttgggaggggtccctagccctgcacccaggttaactttgggaactccggaatagaagtttaaacttcgataactcatttccaacttactatcttacactattgtgtaccatgaagacataaaataatcaaatccaagcctcgagagctgaaattacacaaaccggcaccccaaaagttaacctgggcacctagggtttcacccaacgcccaagttgaaatccctaactagggttttagtttctggaaccgtcatagtgaaaatgggtcaaactttacattggaacatgaactagacaaaccacaggtatatttgagacaacaaaattagattaagagaaagtttacttttgagcacccaaagcactcgatgctcaggcaccagtatcaaattgatgatcaaacttacatattctttgtcttcatgaaaatggagaaatatgtactatctattgggaatatattaccaggatctcgatttactaacaagtatgttnnnnnaacatcctaaatatgaattctgtaaaataataaaaataaacatataagagtttaagaaa

SEQ ID NO: 94913 - DNA, 529 bp, Cannabis sativa
ttagcacattatttttttaaaaaatgattcttcaattatataagtgcagatatattatcacataataattttgagccttaaatattaaaattaatgaattattactattatgaataacctttaagatttttaattgaaaacacatgtatatcaatgtataattcttggaatgaaaattttgaatcaaaacaaaaatcacagaaaaagtaggtagaaaagattgaaaagtacgtaacttcatggttgtgatgattcttaaactttaaaaattatcatccaccatataagaattaagattaataaaattaatttttaattatatatattatatatgataaaaataaaaatttaggcggttgagaattatggggttccatctcaaatatctccctcaagatggtggctatttttgctcggatctcaggcgtctttgcaccatctcgtgcggctgggatatagctctgataccatgttgagaatcatggggttccatctcaaaatcaagtagtgatgagtggagtagcccatg

SEQ ID NO: 94914 - DNA, 807 bp, Cannabis sativa
caccacatgaggcttcaaaacaccatctttgatcaaactcttggcttgtaagataaccccagcggccgttcttgctaccaaaccgatgccaaaatgcctttcattagagaagattgcaccatcaacattgactttaattataggaaattggggaggggtccaatgctctaaagatacatcacccgaaccattaacttcaagagtaggaacggtattcttttgagcattataccaatctataaagttcaatttagctaatgtcacaacctcactaacctcaggtcttttggagttccaaactagctcatttcggtgcttccaaatagcccaaacaatcatagaagcctcaagcttttcggacatggtccacacccgtagcccctcttcgaaccaggctgcaaacgtcatcgctgcaacagccacactaggaactcgggacaagccccaacaactttgagcaaaagagcatcgaacaagaacatgcagagatgttttgggggcagaggcacaaaaaggacattgagtattgattggcacatgtttagttgaaagcggaaaccttgttggtaaacaattagaggtgactctccatagaaaattaagcaccttcggggggagttttagctgccaaagttctttccaaaagcccgaacttgccgccattacattgctacccttgattacttgctgcaacgcataagcactcttaactgtgaacaagccattgtcttccttcatctaataccaagtgtcattgcctacattccttgtaagaggaattttccaaactaaagcttgatctctacc

SEQ ID NO: 94915 - DNA, 771 bp, Cannabis sativa
cgtaaggcgtggctccccaagtcatgtcctcctcgatctgtaaaagccattacctcttttggtaggggaagtactacggaggacctggatatgggaaatgagcctgcaattctaccaatttcgaagataaaagaaaaggaccggtctttggaaggtcttcatgatttgaataaggagaccgttggagataatgggtcatgtattgggcctagctctaatgggccgagattggaggcaaatagtgggcttgctatttctcactctgctgatgtggctataaactcggttggagtaaaagatttaggaattgggctggcctttattgggccgtgtgtgtcaattaatgagcaggtcattggttgttttccttctcttgcaactgggccttcatttcctgatggttctttgcaacctaatgggcctgagttgctagagagtaatggaattgtttcccatgaaggtggttatgggaacctgaggcctctatgtattatttcaatagtaaatgataatggacctagtgctcagaaaggtgacgggcgagctgggaagcccatatctttggctccctctaatgaacctgataatgattgtgaggccaaagtgcactctaatgaagaaaaggctctatctcagttttttcatgctcaagaaaaattattacatgatctaaaacattttggggagctggacttgtaccagattcgtaagattggaggagatattggagtctcggcttcatctgaagttaatgagaggactactttcaag

SEQ ID NO: 94916 - DNA, 584 bp, Cannabis sativa
aatcatcttattttgtctagaaaattaaagttcaacctaaactactttcagaattgataaaggtagaagtggcttgtaatggtgaaggattggtttgaggagttacaacaactaaaggggggtcgctagaggccctagattctataatatcgtataattcaaaaacattcaaaggaaacaactcccattcgtcagatcgccaattattggctcgatattgatatgcaatcccaaaaaaagaactattacacgaggtttgaacatggaattcagaatactaactatcaaacttatgggctatccgctattcagtcaacatagttctaaatatataaattttattaactatccctaaacttctctaaacttgtcggctcggatataaggatagtaggagaccatccaaaaaaaatgagaaattttacctcggggagccccttctggaggctttgtaacgcccagattttccaagacgtcacacttactagtccgtttaaaaccatttaagataaagtcaataaaagacttctttaataaaaaaatgagatctcattattttaaaaacaaagcatttatttattcat

SEQ ID NO: 94917 - DNA, 794 bp, Cannabis sativa
aataatgatttataattagtcataacttttttacttttggtcacaagttttgttgtgactgaaattaagattttttttgtagtgtttttagtcacaagtacatagaaataataatttacaattagtcataatatttttattttaatcataaattttattgtgactaaaaataatttttttttaatgcaataattgaaggtttattttcaccaatatgactttatcatacacattgtctcacacaaaaattcttgacactctatctcgagttcacattttgaagaaaaaaaactaaatcaatttaatatgtcattaaaaagtgatatattttctattgtttctaattgtttttttaatataattctttgcagaattcattaaaaacccaaaccctataattaaaattttcaaacacctttgacataactcaacattttgttgaaaaattctaattaatgaatcacaactaagaagaagtaattggtcaaaactagaatattgttttttaataatatcactttactaaatatgatacattttataattgtttatagaaaatgttgtataattaagaaaatattatcaaatctattttatgaaaaaaaaaaaattgtctaaaacaatttaattaaaaaaagtcataattttctaagaataataatattttgttaaatgataaaatagaccttgtatttttaaaaataatacaaataagactctaaaactaattttttgtcaaaataaaatttaatgataatctaatttaaaactgttatgataaaactgtttatatt

SEQ ID NO: 94918 - DNA, 707 bp, Cannabis sativa
catttaagtaatgtttctttaaatattggaacatcaatttttaatttatttttggattaacttaagaatatatttcaactattaagctttcttaaacactaatatattgcattcagtattcaataataatctcactttcaaataacataaaaaaaacttaatataaaatttaatgcacgtagttttttgctagtatatatatatgtaaatataaattgtgaggaaatatgctgacattttttatacatttattttgtaacaacttgattattaaacgcacactcttttcttaagcaagccatcttataaactcatatttatatacatggaagaagtcagaaaggagctatctctagattttaaaggagattaaattacattttttttttcttttaaataattggtcttacataaaaaaataaaaataaaaaatgttactaatcatttaacaaattttagaggggacttgagacctcatactcggtgctttacatggttctgtgtttgtttatacatagaatcattttttttttggttagaaatctttacaaaatacatcaaaaatttgaaaattaattacaaaactacataaacataatattttttttactttaactctttgaatttttttatttacaaaagcacatcttcaataaaaataataaatagttttttagttgttttataatttatgtctaattgtatta

SEQ ID NO: 94919 - DNA, 821 bp, Cannabis sativa
caaacccagaccaggatctggaatcggacccaaaccaagacctagactcggaccaggattcagaccccgacccagacccagaccaaaacccgaaccaaaagactgaatcgaaatttaaactgggacaaagacccaaagctgaatggacctagatcgggacctaggacctggacctacattggggacctagacttgggcaccggaacctagacccagatcagaaatcgggacacagacccgagcatggacctagactcgaaccaaaatttggacccaaactgagatcggaacccaaacccaaactcggactaggacttgacccacgaccgggtcctggacttggactgggacctaggactcgggcttggatgagggacctagacccgggacatggcaataaaaattaggaccgagacccaacctcaaacccggaccgtaacctaggaccaagaccaggaccggggagccaaattggaattagactaggaccctaacccctgactcattgcttggaacttacccgtagtcagtgtttggatctgggacccatacccggacccaaacccagactcggactcggaccctgacaaaaacacacacccgtaccccagacttgggtccgagtctgacattgggtttgagtctaggaactagaatctgactaagacccagaactagacccctaccgggatgcagacccgaattaaaactcgaaacgggactcgggacacaagcccaaacccaaacatggacttggaccaagacccggacctagattggggtcccaaactaaaaattagaaccagaatcgggacccagga

SEQ ID NO: 94920 - DNA, 891 bp, Cannabis sativa
aattatcatgtattttcttaagtttatacaacttataacatacattaaaaaaataacaaaaaatttgacattctattgagttttgtttttttttttttttttttcacaaaaattctgaaatatatagcacttcaatagagatgctattataactaaatattactttaaattagcttatgtgacgagaaaaattatttgttatatggagataaaaaaattaaattatattgtctcaaaatttaaatggtaaatactatctcaaaaaaaaaaattaatatttattttaattttttgtaatagaaaaaggctccgtttcaaattcaccttaggcctctcaacaccttgagacagccgtgtaaactaatagccatcttagtttaatgataaatgctaaaaggcaccagtagtgcctagcaccctcgtatatgtcaatatcattattattctacttaaatattgaatctcatataatttaatataataaattttaaaattatctttagttaattgtaaagcgacatgtgtaaaggtgctagacaccaaataatgccgcatgacaacccgctagtttaatcagttagccgccggacataggtacgcgtacatttctctacataataaataaatatatattcctacactaccaaattctgtatttccatttgtgttctacacaacatttttcattttcatgtttatttttttacatgctttggtattatacgcatctatttattgtatattactcaaagtttgtgtggtggatatagtgttagaacatgatgctctagaattccctatgttttaatattgtttaacaagtgattaagaataaatttgttatatatatccagaatatatcttaacgagaaaactaaaagaaattgtggg

SEQ ID NO: 94921 - DNA, 694 bp, Cannabis sativa
  modified_base (647)..(651): a, c, t, g, unknown or other
gcaaaagtgcaaataagggaggccagtttcggtttagtgccatgagtctccatatttctttcagtccatatactccacatacgacacaaaattctctccaagtcagagttcgaagtggcagcagcaagggaagaaaaaatttcaaatccattcagttgggaaatattcggaacagccgtgaaagaaggtaacagagaccaaacctgttgagctcgagtacacagaaaaagagcatgaaccaaagtctctcttgagcaattgcataatgaacaagcactagattgaatgactttcctgtgcaaaagattaacagcagtaggcaaatcatcattaatcactctccaaacaaaaattttgacttttttagggagcttgagagcccaaagtcgcttccaccagttgctattggaagagaatgtagatgaatcgttattcttgtcaatggtctcggccaaatgatatcctaacttcaccatataggtaccagtttcagagtgatgccaaatcaatctatcatctcttgggttaggactaatcgagatagagaggatgcgatcgatgtcaatttggccaaagtgttgttggagaagacttaagtcccattggcggtcatgggttatgtagtgtttgttgggttttatgccctnnnnnaaactccatttcaatgtaatccagattattcaatgtcaataaa

SEQ ID NO: 94922 - DNA, 836 bp, Cannabis sativa
tatatgacatatttgtttaatctcgttataaaaaaatcttacttttggtcacaacaaaatttgtgactaaaagtaaaaaattgtgactaattataaaatatcattcttatgatgtgattacaagatccgtagctaaaggtattagtcacaaaaattacaatttgttgttactaaatgtgtttttagtcacaatacttattgtgactaaaactaagtgaagtaatagatactagttaataaatgaatacaaattaaatactttttactatagtagaataaaagacatttttttttataataatttatatttggggaattactctatttactgttttttaacttttttttttttttttcaaatttacagcttgggtttttaaagtagttacaacgctagttgtaataggggtttttatacgattttttgttgcaatttaggttgtagcggtagttgcaatagggatttctatgtaaaatttcataaaaacgtaaaaaaaaaaaaaagaaaaaaaaaacattttaaagtataaaaataaaaaaacccctttatattttcacttttaattttttttaattattaaattaaaaaagacaaaacttattaaatttatattcatttatcaactattatttaccgcgtcacttgtttcatgataaaattaaatagaatatgataaaagaatcgtatgtaaaagttatatttcaagaaatattattaatattaacaagtctaacaagtcctatggcaaaatattttcttattaagttttttttttttgaaagaacttttcttattaagtttaagttttagaaaacaatatcaattttttttgctc

SEQ ID NO: 94923 - DNA, 4458 bp, Cannabis sativa
tgagaccgccacatgcgaaaatatttgaaaggcttcttgccagtactagcaatcggatgaatggtaataacccccggggaatgatcaaaaatcccttcattcagataaatcacttcagcaaattcatatctattcaaccaagcctgattagctaatactcgatcaatcttagaaaagattctgtctccaccttgctgtttatttgaccaagtaaagaaattcccactggttttaatatcatccaactgacattgatgaacacaatccccaaatgccgaatcaggatagtacctaaccttgtttccgattctttcttcctttgctagaacatcattaaaatcgcccattatacatacattgtaggattttcttaattattcttctacacttcaagcctagttacttgttatacatatttttatgttaaaagaaaattggatgtagtttgcttatacacattttctttgcatgtgagtcattcttgtttaatgtttagagagtaaaggatttttccctggatataagaaatctggggtaaggtcctcatatttttgatgttatttctttctttttttgtgattgtgtttccactcaaataatgtctgctatatagtacatttttctcagtctcatacttttgtcgtaagatggttggcttcctttgatctccttgggcagggaaatgaaatgttagaagcaaatgaaatgaaatgttattctactagaccctgttcatcccataagttttgtacatggggggagggagggagggagggggatatcacatagatttatgttttgcaatagatactgagaatagtatcttttttcactggaactggaggcttgcatcttttatcatgatgagtgaatttcagaaattgtaaatctgatgtcattaattccgtgtgttcctttttattatctaatgaatttattttacaaccctctttctattcacctacagatgccatgataaagaactttgaaacaactgtagcagctaatagattgattgcagaaagcttgaactctaagttgagcgatgtaaagcttgagttgaagttaaaagaagatcatattaatcacttgctaaccctgagggacaacctggagaaagaaaagagtgatgttcaattgctgaaggaggatcttgctaaaagattagatacgtccttccttgagataaagaatcttgaagctcttatccatgtgttcagttccctgttggttgaagtggataaacaaagtttgactgttttagataagtttgatcagctaaactatctttacaactcttgcttcaagttggtccaggaggagagggaccttgctagcaagcatgctaagagacagtatgatcaacttaatgataagttcttactcatatcatcagagaagaatgcattgcagttgggaaatcaggacttaaacaataaggtcattgagcttcagaaagttcaagagtctatcatggcacagctttctgaggaaggcaatatagccagggagaggatccagaatttggagtctgaagcagaaagtctggtctcaaagaagatcgagtcagagaagctgatttccacattagaattgcaagttgaaactctttcggaaagttcaaggtcatcagagaataaactggttagcaattttctcaactcatctatggaagttcctaacatacaaagtttttaaactaaggttattttatgatcttgcagcaagaactactgctaaaattttcagcattagaaaatgaaaataaagataacacagaaaaattacaagcagagatgcagaaaaaagtcgatgaaatagatattctgcaaaaagagggagagaaacgagaggagcacataagcttactggagaaacaagtagagcaacttcgtaacatcatagaggaaaaggaaaggctcattttgcaatataaagaacgagagactaaactggaagaacaatttacagaggttctataaacagctttggcatattattttgtgagtcctataatatttcattactgaagagattctgtcggttaatgcagaatcaggtgttgttggctactgctgaaagtagactagcagaagctagaaagcaatatgatgttatgttagaaagtaaacagctagaattatcaagacatttgaaagaattatctcagaggaatgatcaggtcttgtatcttattatttactaaaatatcattatcaagcctctgtaagctgtacaaatacctttggattgactcaatatggaattggattaggcaattaatgacatccagaagaagtatgaggcagagaagttagaaattatcaacatggaaaaggaaaaggtaagcctgtttcataatctctttccacatttttaatagtgaatcatgcttttcatacttttgaaccttcaggtagaaaacattactggagaattggaagcaaaatgtgataaaacagttgctgaatgtaaagaagaatcaagacagtacctgatgcgtgtccaggaggaacatgcttctctggtatgcctaaaaaagtggtgcaagcctaatattgttaacttgctaaatatcatttttccaatggcacattcttctttatggtgcagcacaaagatctttgtttattttcctagaggtattttgacaaaggacactggcaatctttttctttcgcttaaggagtaaaaattgtatgaatatgctgagcagccacacggattaacctatttaatggatctagtagatttcattcattcttaattattcaccatttaaatcataaaccttatgtggtatgcaaacttatccaaccgaaacaaatggcgttcggaaaatgtttctgagctacatccgatacagttttctgatcttgttttttctgcacactgatgtgtactgttatgatttcatttccatcttgtgcgtatctaggtaagtcgcattcagcaggattatgatcgtaaagagctgagtcttaaagccaatcacagtgaagaactaaaacgttctcaacttcaagctgaaggtgaactgaaagaggtacatgctattcatatttagttggagaggttcaattttaaaacgaagtttgcttcagtagctaattagttgtaatatgatcagagaatgacaacactgaggaaagagtatgaagcgcagatggacactttgaggtgtcagcttgaagatgaatgtagaaagcttcaagatgagttggatcttcagaaatccagagtaagaactttcctcggacatgatataacatcatgatcactgctttgtattaattttgcttgtaagcgcaggaggaccaacagagggctttactgcagttgcagtggagagtgatgggcgataaactacaagaggaccaagaagtaaactcgaaaaaggtttctctttagaattggaagctctctccctttctctcaagtgctcacatttacataacaatggagctcgatactacataaattttcagatgaaattaccctacacatctttattttgttgaagatttttatggagctgtatttttttagaactaaatttgaattttttccttgtattacctacctgttacattttcataatcttttaaacttctttttctcttcaggattactctgtttcctcaattcatatcaagaattctgctggtgcgaaaagaagtcaacatactctagtaagacctgacaatgaagagaaggtgaaaacagaaacaagcgatcaatttgcaacatcaccttgtgtaaaatatctccttctaatttcactatttttaaaatcaatttccttttttctcaggattcttcatacttgagagcaacacaaacaccggtatcaaagatgttgaagaaagtagagaatccaaccgcgggaagtgtgttgagtattccaaaacatcataagaaggcaagcaattctgtaattgattttttactacaagtatactcttaaatggtggttcagaagtttggtatagctgcaaatgatatttaattgagctcatatatgatgcttcgctttgagactcacttcatagttctgcaggttactcatcacgaatatgaagttgaaacttctaatggaaggacaattacaaaacggaggaaaacaaagagtactgtcatgtttgaggtaggcacttggttaccatgacaaagcttacatacatgaaatgagtaaatttatcttataatacagtatttttgcttaatgctgtatcaggatcccagaaaacgtaaaaagatgaacactccaaaagtaaacactcccaggaatcttatcaaggtgaaatctgtaatgagattctattttttccttttaagaacctattgttggaatctagctgaatattagattgtcaggtagtacttttgattatgccattttcttctagatagaataacaggaagttccgtgctctctaaatagagcctataacttaa

SEQ ID NO: 94924 - DNA, 1220 bp, Cannabis sativa
  modified_base (27)..(38): a, c, t, g, unknown or other
  modified_base (1186)..(1194): a, c, t, g, unknown or other
tttttacatttcaattttttttttttnnnnnnnnnnnntatttttacggaattctacactgaaacctctattgcaactagcgctctaaattgcaacaaaaagatcgtatagaaacccttattgcaactagcgctccaaccactttagaaattcaaactgtaaatttaaaaaagaaaaattaaaaaaatagtatatgaataatttcccaaaataaaattagtaattaagtaaaagaatatatatatagaagtactgtactgttatttattccagaaaagaagacaaatttggattaaaaactgtaattctaaattctgcagcatatgcgtgtgactaatttattaattacctaaaactgtaatattctcttcgatctcttattacgacacacactaatattcttttaatttgcattctagctaagcagtacgtactagtggaagattaaaaagagtaaacaaaaacaagtaaagtagaataatttttttggtagcctaatatagaagttattatatatcatcactaatttactattataaaatagtactactattcttctcttcttatcttttcaaatgcttttttgtacaatttttttttattatttttatgaattgggaaattattaattatatataaatatattgttaagtataaagttggatatcacttccatgacatgtctaatcaatttacgtacgtgaaaactatatagattaaccacaaccatatacatattagttatatattattggattctctcttactatttatatatcctacgtactactttaagtgaaacaataattattctctcaatgaatcaatttattatatatatatatatatatttttattatgttgttgctaaatacagtgatacagtggcagacttagaatttaaattgagtagagccacttttttttttgtaagtgggggaggacgtctcttttttctacattatataacacattataaaataattatttttaattacaacaaaatttgtgactaaaagtgaaaaagttgtgactaattataaattattatttctatgttgtgacttaaaagtctgtgactaaaggtattagtcacaaaaattagaatttattgtgactaaatgtacttttagttataatacttgctgtgattagaaataaattaatgacaacttgtatctaaatnnnnnnnnntagtcacaagtaatattttgttgtga

SEQ ID NO: 94925 - DNA, 583 bp, Cannabis sativa
ggtcaaacataatcaagtgcctttaaagcaagcattatatttaattttataaccaatgtaataaataggcctattattgtttgtaacggttcaattatggctataatttgtaaccatcatctacaccatataactagatgaaccttctctccatttaaagggggttgggttgatcataataaaatcacatagcaagagatctctttcaatagtggactaggcagaccgagccctacagaaccgctatacttttttatgtgtattttatattatttacatgcaaacaaacagtcatatagtatattcttcgagtactgtactcacatattataatattgtctaaattttttaacaatatttggcattagaaggagggtattctagcaatattcccatgctttttggagtagaatcattgtggcaaaccaaacaataaacacaacattagctttgttcaagaaaacttcaacaacaaaaatacacaaaatattaaatatgctcgaagaaataagcagccccaaacttgggaaaaatctaaaatcagtcccaaaagtattcacagatcagaaaaattaaatagaca

SEQ ID NO: 94926 - DNA, 594 bp, Cannabis sativa
aatgtacgtaagagaagagatgtacttatttatgttattactcttattagtttttttttttattttaatatagatagatatagattgtttagtattaaatagaaagaatgaatcaaaaaaatgagagaatgaagattagagaaagaagcttattgagattgccacatgtcctcctttatactttactttatatatattgatgatttattttataataaatacaccccactacttgaattttaatataattatacataaaaaaaaataattgttaaaatctattttaaaaaaaaaacagttggttaaaagtttcaaacccaaaaatcatctaaacaagttttgacttataaaattttatcaatggagcaatccaataaaaaaaataagtttattatatatatttaatatttaattttataattattgtgatggtatattgtgtttcttctattattgatgttgatattataagcaatcattttagtatatattctcactattttttaaggaaatttaattctgatatgaaatgaattggttcaagcccagttacattcatgggaaagaaatttagttctgctctttttttttttt

SEQ ID NO: 94927 - DNA, 2065 bp, Cannabis sativa
aaatcgtaattcaaacaaaagataaatcaatcaacggcttcatttccaaatatataagaacaggcaatgaagaatcgtcaggctaatcgaacactatgaacaatagtcagataaagattagatcaagctagaagtgtggacataccggcttagtctgtgaggagaaagaatgaggaagaaaaggtccgagagatcgtcggagatgagataaagtgagtttggtgaagaaagggactgtaatttgcggcttgcctaaaaccctaatgtggggtccatgtccaaacataagaagtcaatttttaaaatcataaagataaaaataaaaattaataatttatatctgcaatgggatgataaatcttcggtgaggcttgatctcatattttacaacttctcgtacacatgcacacataattaataagattgttgttgttggattttttttttttttggatttatttattttttatagaatatgaactaagaagtgattggaaaaaaaaaatgcagttatttatgttcttatgtgttgtgaagttcgtataatgtaataatgtgcattaatgtataatgatgcagtaatttataatcggtagtggcattttctcaagtacgaataacttattatcaaactgaatggatactttgccaaatcatgtgttatagaactcttatcacaagctacatagaatagaactactctcgaaaatttaaataataaagttataacattttcaaacagaaccaccaactcattaaaaaaatcattcttttgttgataattgttattagagagttaaagtttcagcttgtaatacaaaaatactacttaagaaaaacaaacaacaccaagaaacatgtattagaaaagaaaatccttcaattaaacttaataggctaatatcaaatttgaacacctaactgaaaaactaaaactcaactacaaaaagagaacgaaatcttgactaaaatctacagagaaccaatccatatcaaatatgaagacttaaaaagattttaaaatacttatttgtcaaaactgaaaaatcgttgaagtagaagtcatgagcacaaaatgaatcgtttctcttacttaataaccatacgacaaaactactttaaacaattaaagacaatttataataaatgacacaacaaccgtaaaagacacaaaaaccataaaagacacaacaaaatccataaaaagcatcaaaaacatcaaattattgtgtaaaaactagcttggtcttattagcttatattttttttttaaagaaatattaatactttttgattagttagtaagaagaaacctgatggataaaatattttgtttcccgtcttaatccataaaatagattttttagtattcttgtatgtttttttgtcaagaataaggtattaagagtgcactagaattgagttacaaataagagaaagagtttcttctaataaaacttattgtctaaccaaaccaaagaacatactaaatcaatttatgagtcactaatacaaaattgtgacaacataatgccctaaatttagtaaaatacacaaggttaaatcgtgcacaatgagtaatgacatataataatgtacaatgttaagtatgaatcattaaagacgtgtttaaaagttattgtgtaattactaagacgtataatagttaggacaataattataaagtatagtaatttacactatattttataatataaggtgtgtttggatatgtcgcattataatattttatctgataaaatagttaataattaaatgagaaaataatatttttttaatagtttatttttaacattattttttttaagtaattacactcaatttttacataagctatgagatttgaggagtgtaattggaattagggctgaacattgggctgatttaccgagtttcgggttcaaaaaaatgaaaccgaacccggacccgaataggacacgggttggcgggttggcgagtttcggttggccggggtgaccggggtgggcccgtcaactcttttaaaaaattaattttttatttaaataactattttttttatttt

SEQ ID NO: 94928 - DNA, 984 bp, Cannabis sativa
ttttttttttttgttataatttttctcttttttttttttgattgattttttttttgattatttttttttacaagagacaacatataaaaatacaaggaaataaaataagattacgaaaaaaataaaataaaataaatgctctttatcacaaaagaaattaatccctctagtaaatgtcatgtttgaaattctaaaagttcaattttgccaactaaaataaccaataaaagttcaaaaaactgttttctcaactctcacaactcacaaaaaataaaaaactttacactcaaaatttttctcaactacatgtgttaacaacaatttcttcacaagtttggaaagtgcatataatcactctgaaaatcacaacttagtaacaaaacatagttaaaatttgactcaaactgcaattttacaatcatgctcggataattttgaaaaaaaataacttaaaaattcaacaagacaattaaaattttccaaatgaacgctcgctagagctcactacccccaactcaaaattagacagtgtcctcaatgtcacaaaatatgaaatgaaaaagatagagaaaagagtacacctgattgacgatatgcatggggcgagagcagagataacctgataatggcaacgcaaaacaaacatagaaaagaaaaacacaaaaacaggaaagataaaattacttactaaaaacataaaaataaaacctgattcgttattggtagacagaagtgatctcctcaggtaagtctaccaactacatgtttgtactatccaatatcgaaaatgaactttcttttatccttcgtctcaaaaattgatgcattggtgacattttcaggataaagaaattttcgtctcaatgtcgtggaggaagtgctatgcttggttacttgagaaaattttacaaatttcctccacaactgtgtctcacatcagtatgataacacttgttttcatttggaatgacatttggaatggtt

SEQ ID NO: 94929 - DNA, 777 bp, Cannabis sativa
tattttatataaattattcaatttctgtattgtgtttggaagctgtgaaaagcgacgttgggcctttagagagtcatattttgtatgtttagaatattaccggggtatcatggttagatgttagaagtgttagaattttcgggatttggtaaatgaccaatttatccttgggagtgtatggttattttatttagctagaggggcaagaaggtcttttggcaaagatttcttttttcttatttgagttataataagactgaatataagttgatttttttaaaagaaaatctatgtttacttaaggtagaagaaaatcaaagaaaatttcgagaaaagggttcacctctttattcattctctctctctctctctctctttcgattctcttgggcagcagctggggattgggattttgaggttaaaacaaggaattttagtgattcttaagagctttggccaaggtaatcctttctatttgctttccttcttgaattttgtattttaggttatgtttttgtagtgagtttgtttttcttgatggttgtatgtattagggtaatatattatgtaattcttgagttaggagttgattatttatgctattttgagctgagtttgaagcttgtgttgagaattgttcaagctaaggtttagagaaccttagttgggtctttaatggtgttttcttaaattgagttgtttgttgtggtttgatgcttaaaatgagttgtttggagtataagtaggtgttctggaagttattggaaagtttgggat

SEQ ID NO: 94930 - DNA, 1426 bp, Cannabis sativa
aacagaaggttgaaaattatgatttagtgaagtagaatctgtgaaatttgtgtgatgcggtgatataaggatgagaacttgtgtatcggggtggggcgaggtagattattacatgatttaaatcaagtcaaatcatagctggatcatattcgacccactctattgacactcctaactgccacccatgaatcctcagataaatgaagagtgctcacacgtgtaacatcactcaagagtcatgatcaagaaggcacaaggggatttggtatggcaagtaaccaatgaaggcacttctttaatcacttgggaggcatatatgttatgttatggtgtacgagagccatatgttatacaagcattcaatttttttggacatctatgtaagtactctcatgtaatgataactttaagaaaacaatgacgttactcccagtaaccgagtttcttaagacatgttaagtgcaagtgttagtcaaggggtaacagataaagttgaaaaaaaaaagtaaacaagtattggaattgaagttttattaagttggaaataatttctgatttaactaaaacaaaattctaatcacattctactaaggcttatccacatggaaaggtcgcctagaaaacaaccaactaacacactaaagttaaaagctaaaaacaaaaaagaagaatggactccaagaaggtcttggaggctttgtcacattaacaagagtctcctccctgcctttagtctccctaggaggtgcctcaccaacacaaggagggatgtcgggacgcttagggttgtagccttcaactcttgaagtttctccgacaactggtccgctaacatttacagtgaagtcaacttcttcaaaggattctacagcaaagcacttccaacaccgctcaatgaatcctggaacttctttcccagggaaaccaatccagttgaacgactgacacctactattggcaaccctagttgtgtaaatggcattgaagcataaatcattgtagaatgtgacatcaagcatagactatttttcaagactgagtggagacaattagagatatgaccttgaattattaaaaaaaaacttttcaaaatcacctttcaaatgtaattttttcttttaaattttattttatttatatgggtcaattaaactgtgatacgtatacatttttttgtccacatacagtctaacatggaattttgccgcaattcacaatttctaattttacatacaaagttgtaattcaattcattttagcctttataaaattatggttcattagaaattttgtttaaatttttacatgtgccaaatcatgtcgcttgaacttttctggtcgttaaaaattctctctgaactatcaagattgttagatttaaagacttttgccaaatttcattcaattttactaattcagtgattat

SEQ ID NO: 94931 - DNA, 531 bp, Cannabis sativa
agagagagagagagagagaaagcgaaccttcatcaccggatcatgtgctatactacttccaagaaactttctatcatgggaaaaagctacaaaactaaaccacaacaatgttaataaaacatagaaaaaagaaaatatgaaacctattgctatcacaaaatgtcagcaagatgatatttaccaaggcgctcaacagggtactctgaatgttctgcaattggttgaacaattctgttaggtaatatgtttaccaggctgatatagatagattgaaattatgtaagtatatgtataagataaaaaaaaaaattaagagaaatcaaatcaaattctaaaaaaaacccttacttgagtgagtccattctcttatccagttataattctatcttcatcaagctataacagtggaatatttatgttctctagtttcccttcttcagggtgatgtttcgggttggcggggtaggcttgtcgccgttgaaaaatggagagacgatcgtatttctaatgaactcaggaacatcctctctc

SEQ ID NO: 94932 - DNA, 1088 bp, Cannabis sativa
aactttagttatttttgttggtagttttttttttatctattattgtatatatatcgagcttcaactttattaatgaaccgagttcttttcaccatttctttctttctctttctctacctaacatggtatcagagtagttttttttagctttcgcaatcgtttcttcgggacagcatctctttctctgcttcgattttagcttgttagtttgctctctgcatctctgtgattcttgatcatgacgactactccatcttctccggccacgtccagtgttcaaagaacttcgactcctctgtttcaactagtggtgttctcccataaactctccattaaatttgacaataaaactttcttactctggtgacctcaagtcctctctgcgattcgtggtcattagttgatcaattatatctctgatgatgtcgttcctccacgaaagtttcttgatgagcttgatcagcgtgcgaaaaggatcaattctctgtatctgcaatgggaacagcaagatcagcttctatactcctagctactctcgtcaatgatagaaggaattctgactcatgttgttggaaatgaaacttcagcacaagtctggaaaactcttgaggtatatttctctacacaaacctctgctaaaattgattagtaaactaatcaattgtccaagatcaagaaatgatctctctctttttttttaatgattacttgctcaaaatcaaaactgtcgttgatcgacttgagtttgttggccaccctgtctctgttaaagaacacatttatgcgatctttaaatgtctgcctgttgaatatgatacctttatcatatcttttaattcacgtaaccaaccatacaatgtagctgaaatcgagtctctcttactctcacaagagcatcaaatggataatcaccacaaataattaaattgttaatcttgcaactaattgaccatctcgaggtcgaggatttggttttttcttttctaatgcagatcacagatccaatcatgtggcttcttctgctcctattggtagaggtcgaggatcttggaatccttatgcatttcctcctcgtgcaaataatggtt

SEQ ID NO: 94933 - DNA, 596 bp, Cannabis sativa
  modified_base (67)..(80): a, c, t, g, unknown or other
acacacatttgttaattataattaacagtatctattcacctgaatttaacataataataataataannnnnnnnnnnnnnataataataataataattaagagcattgctattaggtattagcggtgtctagtacttttgcgacatgtcgcgttgtgattagttagcgatactttctaaaaattattatattaaattataagggactcgatacttaattgtaccaaattcaataataatattgatacataagaaagtactaaacacccttaataatttattattcattgcaaacaaacaaaaaggacaacctttattgttaaaccaatttaattttaatcaaatacgaatcatgaaaaatacaaatacgcgttgaccattttgtaatgcagtggcacaatcgtaattaaactaaaaatcatgacctattctactcttatcatcttcacgactcacgaacttttaaccgcgccttttgaaaaaaaaaaagaaaaaaaaacgaggcttgctgctagcctgctacttatatatataaatttatttatattgcttcacatcccattttcaaattttgcactaataagaagttaatacaat

SEQ ID NO: 94934 - DNA, 556 bp, Cannabis sativa
gtatacttttgccagtgagaaaaatcaccagcaaaatttatttttcttgtagtgtcagtgtctttcttaatcttttcatccttcaactcttcagcaagctcttcattagtggctaccgcaattccttgatgaaacagtaggagagctttcattttggtcctccaaaggctaaaattattagtcatggtgaacttgtctacctcaaacattgtcgatgtcattattgattaaagttcttgaaatcttctaagcagttctcgaattcttgaagcaccttcaactaagctctgataccatttgtttatctctgatcacctcaattaagaacaattcaataaggtttcataatcataagattcaaaacaacttaaactaaaccacaaagcatacccaatttttgtcaacaatgagaatcaacataaattaaaaacactagagacactttacaccagagggagctacaaaactcaaaaaatatttacaagtatttatataggttctcacataaagtgttggtgataaaaacacaacaaatcgttaacaactttctaatctc

SEQ ID NO: 94935 - DNA, 542 bp, Cannabis sativa
aggaaatcaagcataaaactatttataaagataacattaacaaagaaaacaattgtaaaattaacctggaacttaggctaaaaatcgaactcttttatcaaagtatctagtgatacgatgttgataagcaacattgtttacttgtgactctgtgtgtttttcttcacgtagatccaaggacatgcttagaggttcttgattttgttcttgattgtagaattcatgcctatgggtcgcaatgtttacttctacaagtaacattgctttcgagccaaataccagtgaaaatggagtgtgtccctttgatgttttctctgtggttctatggccccagagcacttgtggtccatttgcttgaggccttgacactggtgagaagcttttgattattttattcctttcatagaactcagtgaataaatctccatcaaactgagtaccgttgtcaaatactattttaattggaataccaaacctacaaataatgttcttgataacaaaatcaagaaccttcttggatgtaatggatacttatggtttgg

SEQ ID NO: 94936 - DNA, 875 bp, Cannabis sativa
  modified_base (825)..(825): a, c, t, g, unknown or other
ggctttgagtagaacttccctacccgcttgggagaataagctagctttccaaccttgaagtttatcccgaatcttggtgcgaatggacccaaagacttcttttttctttctcccaattgtagccggcagcctaagatatttagtgtggcagtcaactaatttaaccccaagatcagccgcaagcataattccatctgcttgctttatcttccttccatcacacagctccgatttcataagatttatttgttggccagacagaaacgagtattcttctaatatggacttcatacatctacattcagttggagttgcttcaaggaacacaaaactgtcatcggcgaagaagaggtgagataatttgataccctctcttccaaactttatactgtggattttatccgctctttcagcctcttgaatgaggcaagagaggccttccgagcagaggagaaacatatagggagagaggggatcgccttggcgaaggccacagtagggttgaataagaccactaacttccccattcacaaggacggagaaggagaccgatgtgatacaattcataattttatccacccaacaaatattattttctttggcaaaaataaaaacaaatattattttaaaaaaaatctattaagtctattaagaaaataaatctcatatacggctgagatagtaatttcctcttttatggtcctaagacaccggatgtatatgtccaaattacgacacgtgttctaatctaaattttaagagggaaatttaagtttttatacttacatttggttaaaaaaaaatttcctaaacaaataataactnatatttgtaggatatgacaacttttatgatatccctaaaatacccccatt

SEQ ID NO: 94937 - DNA, 1103 bp, Cannabis sativa
tcactcttgtttcccttgctggaccagtgttctcttatgctctttcaggcagcagggccggctacaaggtggcgcaactggagactaggccgcctcacaattttagaagctcaaaaaattaaaatttatattatatatatgaaaataaaataaaatatataagttttaatttaatatatatcattaaaatgttatagaacaatttattagttaaaacttaaaatgtatattgatgatggtattttgggccggtgtgatcctcaccattgttacttttgttgtagataatgacatttttaaatattatattcttaatttaaataaataaataaaaatagaccctaataacctctataaattattgaaattaataacaaataataaaaatattataacttaattaaataaaaatatatttattaattattacgcatctttttaaatttatagaattgattagaaaaaattaataaaatttttggcatagtatttttttttacaaaagtgctaaaatatattatactttaatatagatgttattataattaaatattactttaaattagcatatgtggtgagaaaaattatttgttaaaaaagttaagggtaaatactattttggatcttgtgttttgaaaaggttgccgattggactactgttttgttaaatgaaaaaatggattttgtattttctaaaatagtaaaaataagatcctgagtttaatttttgacaatttttttaatataaccaacatgaagacaattcctaatacgaagatacagaaaatgtaaacaattttgtcataacacctttatatcagattattattaaactctatttcgacaaaatacatgatcctatttgtaccattttagaaaatataaaatccattttgtcatttaacaaaatagagggtccaattggtaatttttgcaaaactcggggtctaaaatgatattacccaaaaaataattaaaattgatattgtatcaaaatttaaataatatttattttaaatttttgtaaaaaaaaaaccatcttattcatgcaacatggccttaataatttaatattatgttgatgttcaaacaaaaacaatagt

SEQ ID NO: 94938 - DNA, 554 bp, Cannabis sativa
caacttaattttgaaattttaaacccaaaagatattcagatttaagctggttacagaccccaagtgccaggacatcgcatttcagacaggagatcatgtcttcctacgcatatcaccaattaagggtatcaagcgctttggaaagaaaggcaagctaagtgcaaggtttattggacctttcaaaattttgagaaggttggacaagttgcatattaattagccttgcctccaacatttcggctgtgcacaatctcatgtctcgatgttgagaaagtatgtatctgatccaataagcattggaattacaaccggacctgtcttatgatgagcagtcagtgccaattctggattgaaaagagaaagtcattcgaaacaaaatcatagcattggttaaaatactctggaggaatagtaatgtggaagagcccacttgggagctggagtctgacatgaggaatcaatatccaaggctattcaggttagatttcgaggaagaaatccttttaacagggggataattataaagttcccctaattttaatatgttatattat

SEQ ID NO: 94939 - DNA, 500 bp, Cannabis sativa
cacttgattatccttgagttggtaaatacaaggttcatcatcgttctggtgaaagttataagttttgattattttatcaaacctttgaaccaactgtgatacctttttatcggtgcattactacgccggtaaaaggttcatgccttttctcacattggcgcgaaatgttttaccggcgcaattggtgcgctggtaaaactttatattaacataataaattaattataataattataatttaatcaattttaaatataaaattatattatattttatataacatacttaaaaaaaatacaaacataatttacattcataattagaaaattttccaatcaaactaatataacaaaagttttgtactaaaattagtaagtaatgtaaataaacaaaacactaaaagatgttcagaaaaaaaaagtaaaattctaattggtatataaagtatgtaatgtcttaaagacgagtaatgtcatcgtcgttgtttctctgagtctcgg

SEQ ID NO: 94940 - DNA, 809 bp, Cannabis sativa
tgaaacccaaatgtgcaacttcactaattcaacatgttcaaatagattcaacacccaaattgtattcactgtcagtcgaccagggctaaccttgaaatagatgccaattagttgaatttttgggggtaaattaatttgagcaatgctgatattttagaattgttggtagaggtatgaattattggagtaactttggaaatttttggatgagattttggtgtgattgaagggtgtcgtggttaattggtgtgttcagggccggccctgagggtaagcaagctaggcgtgcgcctcggcctccgaacactcaaggttccgaaattgtgaaaaaaaaaaatattaatatatagataaaattttaaataagaagaaaatataataaaaattgtttggtgtagtggtataaaattgtttgcttagggtggcttggaaggaattggattgttagtcgaatcattggtgaagtgttggaatttttggtgtgattgtgaatatttggtgtgatttaggaagattggtagtttcgggcagattgaattatcattggaattattgttgtgtttttttggatcaattgaggtgttgctagattattggtgtggcattttgacgtatttaaaaaaaagagaagaaaaggggaattttgttgtggttgtgtagtgttcaactgaaaaagaagagaacaaaatgccgaacgtcaagaagattgcttgtaaagcaaaacaaaaatcactccacgagattttgaaattttattgtaagacggccgaaacgagtgtattacacatgaaacgcttttaatttataca

SEQ ID NO: 94941 - DNA, 608 bp, Cannabis sativa
aaagtatttttatcgaacactagtagtgtttagtatcttttataagtgcattttacgattggttaacgatattcttttaaaaaaattttataaattacatgagattcaatacttaactacacaaaaaacggtgtgatatcgaggagagtagtaaacactaataatactttttagcaatttttatataaataaaaacaatttgttaaaagtaccctaggcaatataacatttattgtaggcaatattttacctatgatgtatgactgctaagtatttttagcttttgtttctcttctgaatctagccaaacttttatgacaacaactatattttaatacctctcaattacgcataaatttaaatagtattagtattttattttactataattaagagtgataatttagagaaaaaattaaaaatttaataacgatcaattctgtaggagcttactctgggcatacgtgtcatatttgtgtttagaacctccactcaatgaagcctccaattttatattgcatctcacccatttcatcatgattgcctttgcaacttcttattttttgtatcattatctctaagtttgtaacttcctatatgtatatata

SEQ ID NO: 94942 - DNA, 954 bp, Cannabis sativa
tacggctgggctgacctgctcggcattctggtcaatttgaattacgtcagcatctttctgagcggggatttgagtacggattccaggctgcgagattgtcgttacattctgatcgtctgctcctctccttctatttagatcattccttaggtcataggttatccctaacctttcgaacacagaagcgcctggctgccttagcagttgattcgcttggttgacgggtggaatggcaccattgatctggttggaaccatcaggtatgatttctcttgatgaattgccaaacaaggtctgctcgcctaccgctaggcccacgagcggaaatcgtgaccagggattaggcggctgacaatttgcagtctgggaagtattcatcgttggatcttcgtccgtctcacctaggggaatgacattcagcggttgtcgacctacagtttggtaggctctccgtatcagcacggtagcttgccgactacgatctttgatctctgcatggtgagcccttaatgcctccattcggtgaacatgtgcctttgttcatcgaacgcgagatttactgcagcacgcagttcgtcttgatcatgatgtagggtattgttatgaccatgcatgagtccgagagcgtcacagagattttgtaattcagtggcatctccgatggtcatctaggcattagttccaagcgaaacagttatgttatgaatgtcctggttgggtgcggaactgctattcccagtctcttgcacaccaggcgcaatttcatctataggaactgtcacaccattccccacgttcgccggctgtccaagattaacagctggcagaaccgttgtgttttctgggttctgcgatgcaagatccatcgtctgtgaatttgctggatcagtcaggcctctacgagtttgcaccatcgtatttgtgattggatgttgaataaagagcgattcgtga

SEQ ID NO: 94943 - DNA, 910 bp, Cannabis sativa
tccttaaaagatattttagtcaccaaaatttaaatttgttgtatactgcgttgtctgatattgacccccccaactatttagttctggctccgcctctggtggcagagaataactgcactgcacatgcaggtatggtacgagtacgatattagtatacactgcccattccccctcgatatatacatatatattaaaaaaaaatatattagttatatatttattttattctattatcatatcatatttttaatttaaaacttcattaaatttgtggttattgtttgatttttgttttttttattgttttgacgtgttaactaatagttttgaataatgaatatatatagttggattttgagtttgaaaagcatttacactattgtttaatataattttatcaaaattcaattaaataaaatattataattatttttcaaaaaatggttattattagcggttacaaatcgtggtttttctctaataatttactagttaatacttgcatcattaccgataggtattaggataagtatgattatataattaacttacatgaatatggatgataatttaaaaaccgtcatcgattcccaatagtttttttaatactcacaccatcactgagttatataattaacctatagtaatttaggtggcatttcgttggaggtaataaaataattagaaaggaaacaatatatattttttttagagtttagtacatcatagagaaatggaggaaaatcatccatccaaactaattcgccttccaccctgagtgcacgaattgctaactcatgtgcagctatattggccgaacgacgaacatgaattagagatgcctcaggaaaattggatagtaaactagcaatatcatctaaaatagagccaaattcattacagaaggaag

SEQ ID NO: 94944 - DNA, 511 bp, Cannabis sativa
caataggcccaaggactcgtttatatttgatgattgctgacttggtcgtatgtcatccttcggtgagagtgtgggtctattttgactggtattattacatcatatccatatgcaaaggtgaagggggtatcactgatcgctattctttccgttatcctatatgaccataggacttcgggtagttgctctggcatgttcctttttgtttcttctaatcttttcttcaatgtatctttcaaaatcctgtttactgcctctacctacccattttattgagtgtgggcaaccgatgagaagcttttcacgataccatgtcttgagcagaagtttttgaacatgacactgccgaattgtgtaccattgtctgacactagcttgtggggcaagctaaattgacatatgatattctttactacaaagtcaagcattttttggaggttatagtggctagttgtaacgctctaatctatagggacactacgtgtgtgattttataaactagtttaatact

SEQ ID NO: 94945 - DNA, 614 bp, Cannabis sativa
cattcagcaatggtgtaaacacctttgtttgagcatttttccatgtgtcaagattagtcctagccgatcggattacttccaaagccgtagtcgatttgttgttccaaagtgcatcattccgtgccagccacaaacgccacaaaatcatggcagtttcctccgcctgctgcttgctgctgtgcaataaaatatcgctaaaccagctggtaaacatgttttcttccacaccagcagccgtgacagaagaaatgttccagcaagatcgtgcaaactcacaaccaaagaggacatgtgatgttgattctggggacttagtgcagagaggacaagtgagatcaacatgaatgtgcttattggaaagttgaactttagttggtaatgaaccagcagctactcgccacaccagatgctgcacttttggtggaacatgcagctgccaaattttcttccaaaaagcattagcaccatcattcggccagtctccattctgttgctgcaacagtttgtaggcgcttcgaacagagtacaccccacttgtttccttcgaccaataccagcagtcacctctacttgaatcactcaattgaatggacagaattaagtcctgatcatgt

SEQ ID NO: 94946 - DNA, 789 bp, Cannabis sativa
actttggttgtcacaccatatagtggggataggaagtttagtgaaaccgatttcagcaagtaggaattgaagccaaatgacctcagcagtggcattttcaaggcttctatattcagcttcggtgcttgatggagagacagtcttttgtttcttagagctccaggatatcaagtttgatcctaagtatatgcaaaaaccagaagtggaccgcctatcatcaggatcggaggcccaatcggcatcacaataacttattatattcagagcaagacacggctttaagagaagaccatagtcgagagtccctttgagataccttagtatctttttcacaactttgaaatgggagtctagagggttatgcatgtactgagatactttgttgacagcatatgcaatttctggtctagtaatgacggcataatgtaatgctccaacaatgcttctatattgtttaggatcagcaatgggatcactgttgaaagtagacaatttttctcctccagtcataggtgttggcaaagggttggcattgtccattttggctttgcacaacaagtcagtgatgtacttcttttgacatagatgtaacctgattgagagttgatgaacttggattccaagaaagtaatcaagtgtgccaagatcctttagagaaaactgagcatggagatctttaataagagaattgagaacagatggtgagctacctgtgaggatgatatcatccacatagaccaaaataaatgtggtgtgactttcagtaatcctgaagaagagtgagttatc

SEQ ID NO: 94947 - DNA, 704 bp, Cannabis sativa
attgagttactcgcatcattcttgtaaatttcaatagagtcttcaccttgtaagcatgcatcaattccttccaaagctcttttaaaattttgtattgcaatcccataaactttttcagttagcgacctcttgttgcaatttgagtactaattctactcaattcttggtaacgccttgtcatggatgtttttggatcatcaagatgtgtacttttgtatgtcgaagttattgttcccattttagcatgctttgtccatcttttcaaaatatactgagaaggaatttttccaatattacgagaagaaaaaactgtaagaacatgtgagcacaatattcctgcaaactcaaacttcttgcaactgcatgaaactgtcttatttgatgaatcatagttgacagtatgatgaaaacgtttaccattaggagtcaacttgtgttttgtttttgtctcatgctcaagacaaatttccataacacaattgtatgcttttgaaaattcaaattcaaacattttcaaaattgctggggtgtatacagcaacaacatgatttagaatttcaattggaagagatggtggtaacttacattgagttactctgaaatctgctttcacttcttcgtatcgacgatcatcaaccaacctttcaaaattttgtaagaatcgcaacatattatgctagtagctaacataatgcttcagaaca

SEQ ID NO: 94948 - DNA, 943 bp, Cannabis sativa
atcggatgaacacccctagtattatggcaccatttaactctttatagacgtgtcttcttgcgacggattagcaatacgacccgatacttaattataccaatagcgatataatactgatccaatatttaattacactaatagtaatatgactgacactgatatgataagagtattagacaccactagtatcttttagtatttctcaattataaaatcaccctcacttattttttaaaaaattaaacaaaatatattcatttgttataaaattattaggaatagtataaaatagataacaatctaaacttccatgatgaaaaatgagtaaaattgataaaccattttctctcgagtctgagagtgttggaatttcaacttaacgtatttgttttggtggtttcaccatttgactactgaggaaaagaaacaacttcttaatcccattaatcagtgtatcgtgtcttttacaatctctccatttccttttactgatattcgttttttactattcaagtggggcctgtgtgtgatcctgtctgtctttaagtccactctttggtttggtgtcgaagctgtatcaattatgggagacattaatgatcaacatgagcttggcgaatctactgacggagtgcgaggccaggaggatggaataaacattaatgatgtcgatatgcacagctcaaacaatggtataaatgactctggtattaatgaccccattccctctgatgaacaggggacagatgttgtggaaaatttacgaaaggagttttttgagtctatgacactggaacttgagccagatatagagcttaatgaggaggtcacgagaacaggtgtggtggcaaatttcttcgaaggcaaaggagtttctagatccagactcaaggagattcttactcaaatttggaagaccaagggcaaactcaagggtaactgg

SEQ ID NO: 94949 - DNA, 1031 bp, Cannabis sativa
  modified_base (645)..(652): a, c, t, g, unknown or other
gtgccacaaaccctgaaaaggggtgtgcgcctggtcgggtgcccatggtcagcaaggggtattgattcctttgcatcaatacttcaagaatgtggcggacttcttaggcctctgcccgacgcagctcactcctaagggcattaaatatttgtctgccctcttcgtcttctacgcttcccaggagtggggtactccttctcctcacgaagttgcctagttctttgatttgaagtccattccactcccaagcaaggcaggtcagggtacttctatttctctcaaccaggcttcaagtggttgacgggcacggacaactcggccatcagcaagattgggcattttgctgttgagtacttcatggtggatggcacgggcatcagttgtactcggttccaacagatttcgacatatcaccgccctcccctcactcttgctcttagggatagagctcaaaaacttgcccgactgccgggggaagaccgaaatattatccagttgacctctgaggataattttgtgaggtatgggctctatcccaaggactttattcctaagtccgtgacggggaccaagaggaaatctagtgctggacggaccaaatgagctcatccacagaatgaactcattcaacttaagcgtgaagcnnnnnnnnagggaggtgcaagggccaagcagtgtgctcaggagcccttgaatcctgaagatgaggctggggaagagtaggtgacttcgctgaagaggaagaagaaactcccgaccccgcccaggcctgttgaacatgtgattcccataagagagcccatttcacctgttcgaccatcccctcccatgctcgaaaaagggaaagctgttatgtctgaaataagagcgatgtcaggtgatgatggacttctgagtcttttttgggcagtcaccttgcatactactttgtcttgtttttgagcttcttgattattatgtcttatgtttctgatgtcttttttctctaaccatattgtttttcattctgtacagacatgtctcgacagatg

SEQ ID NO: 94950 - DNA, 731 bp, Cannabis sativa
tgggccgctttggtgacagagtatgatctggaaattacccgttatgcatgacttgtatgaaagacgtaaaaattgggcagaaagttttctaaggggaaattttttctgtgggatgtcaactacacagcgcattgagggggttaatgctctacttaagaaaaagctcaactgaaacctgaagctgtatgtatttgtaagagctgttgacatgtcactttcctcaattcgatacagagaggccaaagatgattatgacacattgcatacaactccccaattagggaaaacaagcttctctcaaattgagaagtacctatctaacgtgtacacaaggaacatgtattacaaagtccaaaaggagatggttaaggaggctagatacttgaaggaaagcaagattaagactgataatggaactttgttggagttattaaaatatccagaatgccggataagaagggtagtcttagtaagctttaacaatgaattttttgtgtgtgaatgtcaacacgttctatctttcggaataccatgtcgacatgtcttcgcagcaatgaagtatatgaaagtgcaggacatacccaagtcacttctagtaacaaggtggacaaaaaatccttatggagatgagacaaagcattatcgtgaatgtgagaatgcgtcaacagaagtgcaggctcgatttggtaggataactacgaaaatggctgaagttgcatacattagggcta

SEQ ID NO: 94951 - DNA, 559 bp, Cannabis sativa
tatttttttgaagcttatttaatttttccatttttttaaaaagaaaaattagacaccaaattaaaaaaaaaaaataacaattaatcaaaattattttatcatgaaaataattatttgaattattttttttgaccaaataattattttccacgtgtttaaaagtattatttcatgtaaattttctattttatattcttatgtgggattttattacaaatcttcttctaaacatatttctctcttttaaattattttctttgaccaaaacaaataaaaaaattaagaagaataattataagtgggactgagataccataactttttataagtaataaattttaacttatatcattattacttttcatcaaacctcactaattatatctctgtaaacaacaccaaaaaaaatgtaaaatgtagatgaacaattttgaataggacaattgtctgtttttttgaacaatgtaattttttaagtaaattttttatggattaagtgaacaaacaaagtgaaagtaccagcaattaaatatgcttagtaatcaaaaaaaaaaaaaaa

SEQ ID NO: 94952 - DNA, 1711 bp, Cannabis sativa
atagagttacatattttttgactgataaaatcagtattgtagagatagacattgggttgtggagttacatgaatagtagggttttgcctttatttgtacaaattcctttgtcaggatggtgatggttgtagtgtttgtttgatagaaatgaaatttacttacttacagaaaaaaaaagtaaaaaagttgtgactaattataaatcattattcatatgttgtgattaaaaaatttgtggctaaaaatattagttacaaaaattacaatttgttatgaatacatgtgtttttagtcacaatacttattgtgatttaaacttcagtaacaacttccatctaaatattatattttagtcataagtaactttttattgtgaatacatgtatttttagtcacaatacttgttgtgactaaaattttagtgacaacttgtatttaaatataagtaactttttgttgtgactaaaagtcatatttaatcacaaaaaatttatgttatgactaaaaagttatcactgaaataattattttttgtagtaaatggtgataggtaccgttggcacccacccctaaaatataaatgggtccccttccatagacactaaatctacagttatattttacaataatttaaaccaagggtcaaaattatcttatgcaatgtgataaaattcttcaatgcaggcaagggccaccaaaattaattattaaggctgtgacaatgatgtcggaggcagaaaatattaattgaggggtaagttctgaaaataattatttcagggggtaaattataagtagctatgtattatttttctttcaacatatttaatataggagaattaatttatatattttttaaaatatatttttttattattttttttaaatttaaggtttggattgctttggtggtttttgtataggttgctatgtgaattttattcgcgatataggttgctttgttggttgctatgtgaattttcgtaaaaatgtaaaaaaataagtattttaaagtaattaaacataaaaaaacctatttaatatatacaaaagtttatttataggatttttcccgttaaactattatctatatatattattgctgcagtccctaaatttaccagtattatatatgttaaaaattatttatatacaaagtatagattattattttatatttgggtaaatactattttagactttgtgttttgcgaaagttacttttttgaccttttgttttgttaaatgacaaaatcgactctacatttttcaaaatggtacaaatagtccgatctagagatgttatgacaaaattatttacattttctatatttgctcgtgttagaaattgtctttaagttggttatattaaaaaaaaaattgtcgaaaattgagctcagagtcctattttttattattttagaaaatataaagtccactttgtcatttaacaaaacagagagtccaatcagtaatttttgtaaaatacagggtccaaaatggtatttaccctatttgcatgttgtattcttatttttttttcgggttattttcggcaaaattttattaaatatattttaatttttatacacttaaccctcttattttttttttggtagaaaacccccttatatttgcttatccttgcaaatttgagactgtaatagatataactgttaaatacaagttggattattactgtattgacttt

SEQ ID NO: 94953 - DNA, 3108 bp, Cannabis sativa
  modified_base (82)..(90): a, c, t, g, unknown or other
ttataatattagattttttgtgagtactaagtgttaagtaaattgacacgtaataaactttgattggttcaagtcattaaannnnnnnnntttttaaaaaaaaaaaaagtttaagtatacttataagaaaataacaagtcgataatgacttatatttaacgagtacctacagagttttagaaatataatgatgtattagatagactatcgtaaaaaaaaataataataataatttaccaaaaaattttagatacttggacacttggtcaataactgttggaaccttggtactgtaaactataccgaataagactctgtaataaggtattaatgaagaaaaaaaaaagccaaagtggtcttgaagggtgcattccttctacaaaaatccagtcaggtcaggttggtttccatttccaagctactaaattctctttcattgctagatttgagctccaaaacacagaaatactccaaacaaattatggaattataatctaatagggttatttgtttcagagcaaaagaaagctaaaaagtgtccaaccatggtgttttctcctactgctccccattttttcaagattattcttcaacaaactcctgacaacacctacaccaagctagtaagtatacattattactactctctcgccctctgctacaccagattagggcttcactacttacattacacattaatgtatgtacatttgtaaacttagttattactatcatttgtttgtggtagcttcattatgtacattttatagcattgtttactgtttcgatatcttttatctgaatttattgtcaatgtaccggatatatgagtatggcattgacatgttaaagtgagtcttgtgatatgtcgattttgtaatttttttagtactaattaatcatagtttctgcaacatgaagtttgttaaagctttagcatgaacttgtttgtcacagactttctaaaatttccataagcaaatgtgccttcatcagatcatatgcctttgatttttatggcatggttggtcacccttctacaccatggctagattttatgaagaggagatcacacacacacatatttttgtaggctgcagtcatatagttcagttttctggtaactctttttaacttaaatgataacacattttccatcaacatttggctttggttttctcttgtgcagcaaattccaaaggcattttgggtgaaatattgtggctccttatcgagtcaagtatttcttaagcttccatgtggatcaacatgggaggttgggttgacaaaaagtagtgatgggaatgtatggatagaagagggttggaataaatttgcacaacattgttctttaagccgtggaaatctcttagtttttcgatatgaagggaactctctgtttgatgttaccatattcgacaaagatactatggagatcgattatccttctaatcctagccattttgagaagcatagtgttgataatactaaagatgatatttcaattaaaatcttggataagtctacattaccatgttctgctagttcccacaagaaaatgaaaactagtccttgtgataaatctgaaggtattgatcatcttaatacttatgaggcaatatagtgataatgcatgacaccttgaaccttttttcatgatgatttcaccttttttttgtatgttttgactaatctgtagaatctattttcagtgaaatttgatttgtcagataaagtatgtggagaatctcctgtaccaagaggcatggaacctgaaaaatatacaacaaagcagagattgactggaaaagtaaaggctaaagctctcatgagagctgaaggttttaaatctaaagacccctttttctttgttcctatgcaaccatctgttgttggagctaagtttcatttggtaatgaataagtttctttcgtgttgtgattttcaaattagacattgaaaatattgatcatattgacctttttcattttttgtcaagaatgtaccatttcactttgcaagaacttacctcagtaagtcccaagatgtgatccttaaggttcagggcgggaggacctggtctgttatgtactcttataaacagtatgaaggatcttcaagatattcaagattctgttgtggttggaaggaatttgttcaagataatgatttgaaagtaggtgatgtttgtgcctttgttttgagaaaaaacattggagtaattttattcaaagtggttatattttatgaaaatggagctgcaaattcccctatgttaccaggtaaacaagaactgtattacttactctataataatgataattatcggtaacagtactatcttgatcatttcccttcacacccttcaaatatttattgggctaataatgtatgtaacaatataggtgaagagaaaataagagaagagcaacaactctatacaggtaatgatatgttattataattgtgtcctgaattcatatatgattacagtattagcttacatgtgtatgttgttttcagctccaaatatgagcagatcagctacactttctgggacagtgaggaatccgtgtgtgaaagttgaatcttttaataattatggtgaagataaaaccagcattatttcttacaacttaaatgcaaagagagaacaacagaacatgaaagttgaacgacctttgggtatgtcaaaaacattctcatgaaaattcagcttacattttgtttttaaatttaatcaaggcactaataagaggctttcatcttcagggccaagccaattcgtctcaaaaaatccttactttcaagtgactttgcgatcaacacatgtgcatagacgtagactggtatggtagaaaatgttactccttataattattatgtacattattagcatgactcttttatcaagtgagtattagtagtgaacatcaaatatttgattcttctttgtgcagtatattccaatgagttttgcaagagattatttagagggaaaaacacaaactattattctttgggttggtgaggaatgtcagtatgtgaatttaattgttaatggagcagaacataagttttccagtggatggtgtgcctttgtgagag

SEQ ID NO: 94954 - DNA, 577 bp, Cannabis sativa
agcagtagctcaatacaaataactaaatccatggtccctaattcactcataagccctatatatgtaactaaccataccattagtccggctcgtccctaatcacaaataccaataaacccttctactgataacagtatcaatttcctaccctttagtgaattcctatcatatttgagaatgaaggtctctctaaactatttggcatagtgttaggagataaagtattctagataacagacaaggctagttataaccaaaacccataaaccggaacactaaggcaatgtttactgatgagtagtggacagcagggggagtaagggatggagaaatgtgtctccttcctgatcattcaagtgtctacttacctatttgatacacaaaattgggagaatgccataaactattagttaaattcataagaaatgactaaatttcaattccttcccattccttcaaatcttttccctttactattcttctcattatagattagtaagcatgtcctaaaagtaaatattgattatagtaccatctaaatattgtcaatgtcaagcatgcattcccttgagataaa

SEQ ID NO: 94955 - DNA, 633 bp, Cannabis sativa
aatctaacatccaatatataattggatcggatctggatgggcctaaaaacaatgaatgtgatccaataaacacccctaattttaggaagctgactaagttttctgggtgtctttgtttgctcactgataatacatatgaagattcaattgaaatttgggttatgaagaattatgatgactcggattcttggttcaaatatgtgtctctcaatttggatgttcttcttccaaataggtttgagttatctggttctagcttattttttccatcatatttttttagcaatgtgaattttttaattttttgtgatcattctgatgatttgtatttgtatgatgccaaaaataagaggcttgaaaatatggctgaaagaattggtttgttggactctataacatatgttgggagtacttttaatttaaatggttgagaattctgtattgacagaattttttttcataaatggatctgtggttcatgaatggtgcatctctccttagtcctgtttatatatagttttggaaagtggagtgttacatgctcctctacttggtttggttccctctcaaattgtgatgttaattggctgcaaattctgcaatgagctaagtatgtgactattgactggtttg

SEQ ID NO: 94956 - DNA, 709 bp, Cannabis sativa
aatatcgaccgagacacaattgtgaaattcttttgatgctctaatagataagcttgctggtgtgaataagaacattgtagaatcctctcatactcagacagaacatgccaaagaattatcaactgtagagaaaacaagaggaggggaagttcctcctcgggaaaatggaaaaattcgtgagttggaatgtccaagggatcagtagccaagaaaagtaaaaccaagttaagaacatgatcaatgctcataaggttggacctattggtcttctcgagacgagagttaaggcccagaaacttggggtcttatatgtgaatatgttttgaggatggtgtttcacatcgaataatgcatggcatgatgaaggaagaataatagtggcctggaacccttcttgattcaatgtaagcatcctcaattgcactagccaacttattcatctatatgtcacaactatagatggaaagaaccgattttatgctacatttgtctatgctttcaatgaagtggaagggagaaaggcactctggacagatttaaaagcaatagctactcatgattcatggatgatcttgggagattttaatgagatattgaacaaggaagaacgaattggcaaaaaagtaaaatacaatgcagctacggacttcatcgactgtgttagttattgccaattagaagatataaaatatagggggagttttttttt

SEQ ID NO: 94957 - DNA, 966 bp, Cannabis sativa
tatagttatttaagatatcctgtaaattttaaaaaatttgtaatagtttacaaaatagacaacaagattcaaataccctatttcgcaagtgtataaaataaaatagtcgctagtgcaacagactgtttaaaccttgtttttaacatgttaaatgtttccgaaattcttaaaattctgaaagatgtcttaaataactacaacatacatgaccatgaaaaaaacatttgaactaaaaaattatcttggatgccgaaactgatagaggtgcacaaaaggagggcgcgttgtagaattctcttatattctatacttaatattcaaaacttagtcaatggtgaatgatagttttaactcctttgtctacaagttctctctaaagtgtcctttttttaaaattaagtttgaaatgtagaattactaaagctttgtatttgataatactttattgatattcacattaacactaatattttttgcattttatgatgttcacattaacactaatatcttttatataggtataattttataatttcatgaacacatattagatgttttgtattgcaatataaattatataaaaaaaaagtactctttgtagcctgtaggaacatcacatatttaatctcacagataaattatcaacaaaaaaaatagacaattcataatgcagatagaaatgtaaatgggacgggtcagtcccacctgttatctttcgccccgctcgccccatcccatccctttatggtttatgaaccgagcgggccgaaagataacctgcagtagttactctatctgtcattcatttcacaagcaaactctacatctatatatgcaaataactatatttaaaaccatgctttcttcatacttcctgctgatatcgacaccataggataactagtagggatgcttccattgaatccattatcaaccagatctaacacttgtaatgagcttaaattt

SEQ ID NO: 94958 - DNA, 580 bp, Cannabis sativa
ggcccaaccagcatctcccctgtaattcaattcaatggtattttaaaaccatatatatatatatatataatataagattgtgaatagtaaaaagaaaggtttataaataccagttgtgactcgtttcctctgtcctccggagataccccttagcatttcatcgcctacaactgtatcagcacatacttccaaaccaagaatctgtacgtaattaaatataattaacaccaactaattatattaatcatctgctaattcatacgagacagcttcacctttaaaacatagtctgtcactacacttgatttttgcccctctgttgacgttgcctaccaaacaattaaatccaaaataattattaacaattatattgtaaattattgtaagagaataacattcatctgtttaaaatgaaaaagttaaaaaaaattgaggggcatatttcaccaacatacaaaacttttattatatttatatttattacatttaattacaaatatatgttgtaattaatgagtccgcccataactatattacactatttttttaaagtacttttgtaaaatttgagaaaatataa

SEQ ID NO: 94959 - DNA, 506 bp, Cannabis sativa
aatcatgcatcgttcgagccaagaccaaaaaagaaaaaagaaaaaagggcctaattagatcgagccatttacttttaatcgacattatatatttattagtttttttattttttatttttttggtgattgagtcatttttgcttttaatcaacatagctagattggtgctatgaataatcaacattgattgagccattatatatatatatatacacaacaaaaaaaaggggttccacttggtcttatattatatatacaatctcaatctcaccccactatgtgcctgaatacggcgcaacacacattaaggtcacgccccatcgccttgtccatttactctttttgctatgtaagtatccaagactcaaggtccccttagtttaggttaataggtcatgcatgcatgcatgcgtgcaagtgtatttgtttgtttcccccgaaagttttttctagctagtgccaatttcttttcctttttgtttgggagagaaaagaaattatacaca

SEQ ID NO: 94960 - DNA, 543 bp, Cannabis sativa
atttgtttgtgtcgacaacttttgccggcgcatgtcacgaaatgcgccggcaaaaagcccttttaatatgtactataaatacatcattatttcttttcatttttatctcaatttacttggataattgattaaattattctactcagttaattaattaatttttaaaaaaaacttcatctaatatatgataaataataatatttattttattatttgtatatttatacattaataatatttgttgtgtattaaaagatcgctatgcttgattactatatactgtaaaaaaaaaaaaatttcgtaagcatatgtcattttttcgatttatatactacaagaaaagccacttttgccggcgcattgttgcgccggtaaaagtaccctaactgcgccggcaaagcttatctgggaagcttggtcggtaaaggactttttaccggcgcgtagagtaactgcgccggcaaagcgactacaaaatacaaccccagaagtcccgagaccgaacacttcaggtcgcgctgctttgacatgtacaacctcatc

SEQ ID NO: 94961 - DNA, 589 bp, Cannabis sativa
tccgatcacaattggatatccaatgtatggcggtcggttctcattggattggatcgatttatgtccatccctacttactattataacttaatgaagattctacaccactttcagtaaaatagtattgaaaatgttctaagtacttcaatataatctttttaaaattttataaaaattaatacaatgaaagtgatactatcattgtaatatacatcgttgtatgaaaaatttgaattataatttctctaaatatcaaacatagacgatcacattccaaagaggaagcaattggaatagcaaggaagaaacaaagcgctatcctccaccaccattggctgccggaatggatttaaaagaatctacaaaacaatatgcacagaattattatgattttgatgattttggttgaattcaactgtaaagtttctaactcaaatgccccacaaccataaccagattcaatgtgtttgaatgaatcaatcaatagacaattagtccaatagaattcaccacttgaaactgtacataatcccgaaaaggaatgagctaactactcttaactgttgattaactgtactaacggttacaa

SEQ ID NO: 94962 - DNA, 623 bp, Cannabis sativa
atttctagtgttgtggttggagtaggaaataatttttgacaccaaatttggtgatagtgtaacaccaaatttggtgtctccttagagatgctcttaagtcattaatgacatgggttgttttaattagttagatagatgaatggattgaaaatttttgacagatgatcagcatcctaaagagaactatgtagaaactagccatttaataatatttctatattagcccatagagttctataaataaaaatgtaatctcatcattttgtaccaagtcacaaatcatacaaattgagatataaaatatagtttcttccattcaagtattatctccataattcttcttattttccaacatccacctgcagaagataattaaaatatggaaaagattaattaacatttttgtacgataaattttcacatgtaccactttttggtcatctcatctcacatataaaaatcatagtcataaatgtgcctacattgattaagattaaaaatagttttctcaataaactccacttcttgctaaggtttaattcataatataagaccaaaagatgaagaacggtttacatggcatatatttatcagttggaattataaataatattgaaagtttg

SEQ ID NO: 94963 - DNA, 613 bp, Cannabis sativa
  modified_base (271)..(282): a, c, t, g, unknown or other
atgttcataagaacaaagcacttacagaaaaaaaaaaagatattggcggctaaaccaccttaactttacggtttgtaacagttaaccacaaaaattaaaattttggcggcataactacctaaactctggttccgttttattttgtacccctccgtctaaaaatcactgttaagtgtcatggtggagtgtccacgtgtacacacttgtacgcataacaaatttttagtggtccacgtaatattagttttaaaatattataaaaataatttannnnnnnnnnnnataaataaattataaaaaatattttattttgtttttttgttttgttttttttttcttttcttcttcttcttttgttgcgtgcaagaccaaaccccacaaccgaaaccctagccctcctctttgtgtggcagccttccccaactctggaggagctatcaccggcaatcctcaatccaaacaggccattattatccccaacttcgagaaacccaaacccccaataacattccctctcatgtgaccccccaaacgggccctcctctttgtcgtctctctctttctcattgacggaaagagaaaacacaggtcaacgcaggtcgacagaggttgg

SEQ ID NO: 94964 - DNA, 1118 bp, Cannabis sativa
cttactattgatttccattacttattagtaaacatgccataagctccaatcgtgtgacttctttataaaaataataaaatctcagttacaaactaaatttcaacaaacaaaaagcccttgaatgaatttcaaatcaaacaatataatagaataaattaggtaagtgattaaagaatgaattgattgaattgatgaaagaaaagtaaaatcgaaatagaaaaaactattatgaattattcatatattctttttatactttaataagctttaaaatttattttcttacttctccttctttttagcttagttggtttctcttaaagaaaaatattaatagaatatttaatcgctagaaggtctttattaattttttaatatttattttttgaaagttaacaataatgcgttaacttcagccaacaaaacaagatctttattatttcagaccaggtacaccgtcgccgaccgccacatagcagtcggagatgtccacgacgacctcgaaaccccttctgctcctctcagccgaaaccccaaccccgaaaccccttttgctcctctcagtcgcatctcccactctttccctctggtcgctcagccattctccgaccacccccacccaaacccaacaaaaacactcctttttcaacctgcgttccgatacggtgcggtccacggagtaacagaggacccctcgtcaaaggccaagtcctaagcatagaagccattcaagttgtccaaaccctcaaacgctaccaaagatcagaccccacaaatctccaaaccacagtctccaaaaccctttcccgactcattaaagttgacctcatagctaccatgaatgagcttctacggcaagatcaatgcgttttggctctccaagcattcactacgatccgatcagaataccaggcggaactgtctctgtatgccgccatggtcaaagccctttcaaggaatggcatggcggaggatattggccagttaatcgttgatctagaggaggccggaggtggggtttggtgggatgataagggagtgataacactgaggatcgagagcggtgattgggtcatgtagagcccaaccaaattaaaaaggaaaagaaagaaaaagaa

SEQ ID NO: 94965 - DNA, 823 bp, Cannabis sativa
tggcatcctattagggaaatttctgggattcattgtgaactcaagagggattaaagtgaatctagaaaagataaaggcctcgaaagacatgaagtcttcgtcaagagtaaaagacgtgcaaagcctaataggacaaattattgaacttagcaagttcatctcaaagtcaaccaacaagtgtggacccttctccaatttacttaaaggaagaaacaagaggtttgaatggactgatgagtgtgagtaagccttccaacctctcaaaaattatcttgccaagcctcccatcctatccaaaccaatagatggtgaagaattgttcatctagttggcaatcaccgggcatccagccagtgctactctagtgtgtgaggaaggagggaaagaacacctagtctactacatcagaaagtgtctcattgaggctgagtcaaggtataccaccattgagaagcaagcctactgcttggtattggcctccaaaaaactaaggccttacttccaagctcacacaatcaaggtgctaactgaccaaccacttacgcaagttctgatgaaaccacaagcatcatgatgcctactcaagtgggtagttgaagtaggtcagtttgagatcacctcccagccttgcaggaaatctaaggacaggcattagcagattttaatgttgaattcactaaccttgaagaatacgatcccatgatttatgcagaccaggtccacacgcttgaggctgcagcttagggggacatttaacctatgtggaaactctatgtaggtggatcttccaatgagcacggttctgatgccagactcatcttga

SEQ ID NO: 94966 - DNA, 798 bp, Cannabis sativa
gaagatgcgattagtgccgctatagtgcgagaagagggcaaacactagcaacctatttactatgtatgtaaaaggttactaagggcagaatccaaataaacccctctagaaaaactgacgttgtgcctagtccatgcgtctcgtaaactacagccatacttccaggctcacccgataaaggtgttaaccgatcagcccttgagacaagttttatcaaaaccagatgcttttgaaagattgataaaatggtcgattgaactggggcagttcgacataacataccatcctcaaacatccatcaatggtcaagctttggctgacttcttgatagaaggaataattctagaggaaattctacctattcagcgagatgcggaaacctagaagttatcgtggatggtgcatctaatgaacagggttcaggtgcaggggtaatattcatatcgccagaaggcgtaaagtttcactatgctttgaggttccaatttgacgcatcaaataacgaggctaagtacgaagccttgatcgccatcttaaagatagctgaggcgttgaaagtcaaaaccctcatccgtcttagtgatttgcagctgattgtgaaccatgtcctcggggaataccaggctaaaggcttaaaatggcgaggtatttagagaaagttcagaagaacttggaaagattcgattattttaaaactgaacaaattctcagagaataaaactccaatgccgacgccctagcaaaactggcctcccagaatgacttggatgaattgaacttagttccggtagagatgct

SEQ ID NO: 94967 - DNA, 655 bp, Cannabis sativa
  modified_base (550)..(564): a, c, t, g, unknown or other
aatgtttattcaattcatatttattttttaacattaatttaaactataactattttaattttgaaaggcatatactacacatttattttttcaattgaacaccaaaaactaacaacaatgaaagaaataaaaaataaagatcggtttaaacgggctaagccgaccaaaccgacaaaaatcattaggcggggtacactttttttattttttcattggacgggttacaattagatatttgcaacccgacatttatattgggttgataaaaatacactataacccgaccaaactgaccaatgtgcacccctaaaaactaaagggagatagagaggggaggggcagaaatatagagagagatagtaggagactttgtggttcaatttcttatgttcaaagctctcttctcttcctttgtttagctaaatctttatgttttagtttctctttttcaaataaaatctttattaatttaactaaataaataaaaataaataaattggaccaagaaattttagcttggccgcccactatgggccagtttggcacagcnnnnnnnnnnnnnnnagcagctgtagctgtgctgtgagaaaaagcagctgtagcagaactgtggaaaaaaactgagctgagtgtttggtaaattataatttttaaa

SEQ ID NO: 94968 - DNA, 612 bp, Cannabis sativa
aaaatattattatcaatagtactcacactgtaattatacttagccaatttattttgataaatgtcctgagtatagggggtatagcctacctttgtactattgattattgtaatgaaaattctcaaagtttttaattttttgcaagtttttaacatcgatctgtaatagtaaaaacattgcaaatagaaaagataaaagcagtttataattatgcgagtacccctgtactgcttaatgtaaatatgcaaaagaaaatatcctcgaaaggatatatattgttcgaaaaggaaaagttgaaatttgttcaaagtacaaaatgcgagtacccatttaccgctgaagagttaaaagttcaacgataataatagtaaagaacttggataaattaagaagctggagcaatggagtcgtctgcgaccttgctggtagctccatcagcgacttcctctgtgtccgcattttctgcctccttaggaaaaaggtttcctccgcatccttgtgtttgagtaggtgacatagcacgaaaagcctcagatatctcagttgcttctgccccaaggacggagaagtcaaagtccgacagtttggataacgtcgtataaatatagtcaa

SEQ ID NO: 94969 - DNA, 1613 bp, Cannabis sativa
  modified_base (296)..(299): a, c, t, g, unknown or other
tttattgaatgcttcgtatttttatatttgaacttaatatatatgtttgtttgcattttaattcacaacttaaacaattatattttgatcaaatttaaaatactttaaggattatcattgctcatattctccttcgatattatttaagtagtaaataatctactatgtgcgcgagcagttattatctgctatgcttttgaattacgagcaactatcaattctgctttgcataaatagttataatctattttaaacaaacttgaatatacttttaatgatttatcactttgtatatnnnngattgcttatatgaatagttaggttgtctattcatatactaggtttaagtatttttttcaaggcatcttggtctctcgtttaatactttcccatacaatgcaagcctttagtattcaggttcgtatgtagcttatgagttatatctcatttacaacttttgatttccctttctcgtcagaaaggttatttaatcaaaaagtcgttcacaatttttgattttcctttctcgtcagaaaggttctttaattaaaaaactttaaaaattttcaaaatttttaaagtggtgggtttgcaatatattatgtatttcctgataaattctagttaatcatacacataagcccctcaagtaattttaaagagtaacactttgtaattacttgaaaaataattaactttattaataagtaaagttcaaaatattacatcagaaatatgagttacagcatcaatttactattagtagggtcgcaaatgttccacgttctagtagttctttatcagcgagccattcagccgagccaattttgtaaacccaagttcctactatcgcttccatcacataaggaccctctaagtttgggttgaatactccggcagatgcatctctcttatttgcaaatactttccttagcaccaagtccccaacgttgaaaagcctctttttcacccttttgttgaagtatcttgttactcggtgttggtatgttgcattagtaatctgcgactcagtacatttttcatcaagtagatccaaggacaattttaaaagttcttggttttcttcttgattataaaactctcgcctgtgagtcgagatatttacttctacaggcagcattgcctctaagccaattgctagcgagaatagagtatgcctcgttgttgtcttctcagttgtcctatgagtccaaagtagttgaggtagttcgtcgacccgtctacctttggcagcgtctaatttcttcttgatagtatccttcaaggttttgttaacatcttccacttgtccatttgcctgaggcctagatactgacgggaagcttttaattatcttgttttttttcatagaactcagtgaataactcaccatcaaactgagttccgttgtctgatactatcttgattggtttccaaacctaaaaatgatgtttttgaccacaaagtcaagaacttctttgtaggttatagaaactagaggttcagcctctgtccattttgtgaagaaatcgacagccactactgcgtacatggctcttcctcaccctgtgggaagtgccccaatcaattcaatcccccatattgcaaatggg

SEQ ID NO: 94970 - DNA, 816 bp, Cannabis sativa
  modified_base (765)..(769): a, c, t, g, unknown or other
tttaacttatttattaattagattaggagtgtacgtcgctcagtttgatcgatttatactatattttattcaatccaatgtcaaattcaggatacaaaaatataattgcaacccgtccaattaagaaaaaagaaattagtaatccgtccaataaaattggtcggtttggtcgggtgaaaccgctcaaactgacaactaatatttttttttaaatttttttttacattcaattattatattttagttaattgtgataataagacaaatatatatatagattgaattcaaagtttaaatcaactatcataaaataaaagaaacataatagtttgaactttatattttttttttaaatatgtataaaaattatatgatatgtaaatatatatacatacataaccctttttatcaggttggttgagttagttcggattgattggacgtactgatattattttcaacttgcccaatataaagattggggtggttatattttcgtcgggttattcagtttgcattattcgttaggttatgtcggtttggtttaggcgggttgttcagtttgggcggtttacaaaactttatgtacatccctaaattagacctttcaaagtctcttaattaataactaaatcctaaaaaaaattttcttctcaaataaacccttgcttagtgaaaactcataatagtgttacttagaattcaaattgcttaataaaatcaattaattgagtctacaagataatattatctcaactagtgtgnnnnncatgggcctatataatcaagctctcaataagtagttatagaatttac

SEQ ID NO: 94971 - DNA, 534 bp, Cannabis sativa
aatcataaaaaagatatccaaatataaaaagcaactaatgagctaggataaacttatgaacaaaaaagagaattgtctcttcaatttagaaccttatagaaaatatttgtaccaaatgttaattaagtagtttgttaaaagttggttagttagttgcttagttgtcatgttaatttagtatcttttctaactaactcttcactctgtactgtatataaagagctgtgctcttaattcaattcaatgaaatcttttttttacttttctatactcaacatggtattagaacaaaaattttcgcattgtgaaaaaaattacaaagctagtacatacttaaattttaaaaatctatattataaaatttcaataatttaaactaaactttgtataattatttttctcatcaatacacacaaaagtttaattacataaaatcaattttgtgttcaaaaaaacaagagaagaatgggaaattttctacgaatagctcacaaattttagaaaaaaaaataacttattaaatttttgagcaga

SEQ ID NO: 94972 - DNA, 676 bp, Cannabis sativa
tttcttacttcacaagaggatagttagagttcttgttgcaagtggaacatttacaaacaccatcgtcaagtacaagttttctaaagtatttttggcaggagatatagtatcattcaaatgtgttgtcaactagtctttaagagttcttcaatactcatcctattaaggaacatcttttcctcaggtgaaattttattcacattcgacctctcaatgacttcaacaccattggagatggtagaaaaattttctactaatgatgctacataatttatttttagatttatgtatattttgctggcagttgtcatagagtaacgaactttgcctatttagagtaaatctaagttagtaaaaatatattataattcaaaatattaaatagtgtgatatttaaaaaaaatacctctaaaatatttttaatagttgttgaagttactattacaataacagggccattatccttctcatataattttagttcgaacatcttctccaaatctccccaaaaataatctttgatgtgaccgaactacaaataaaaaataaataaataaagaaataaataaataattattaaaataaagtacacaatcatgttagggttataaaacacttaaagaaatatataaatcacagatctaaacatattcctaaagtgctttaatatagaaaa

SEQ ID NO: 94973 - DNA, 516 bp, Cannabis sativa
gaaggttgacacgacagagcagtgaagctcattgaaagatgtttggagctgattaatgaagtacaaggagtatgccttcctatagcgagaaggatgcctcgctattcgccatccatgtacttcaagctactacacttagttagtataatgcatattatacgctaggtgttctaacaacctattcgcctcatcaacaccttttacacatagcgaggttgatgcctcgctatgtattttcgatgccatccttacgattatctctaacgtggaatggtttctcgtcaatatatgaatcaatagtttttacatctgtctcgcttaagactatacagttagcgagttatagatatgttctattaactccgcatttaatgagttatttcatttgatatcttttaatatagttgccattatatatgttgattagtatcctccaaggttgacacgtgtcatcctcttaagtaccagctaaatttcgggtataacaattgccccttaaaaagtttttttccagtg

SEQ ID NO: 94974 - DNA, 812 bp, Cannabis sativa
caattgtaaatttttctagccacatatattatatgtattttttttatataattatatatattatacgtatgattgacgaaaattgaccgtgaaaaaattacaccaaaaaggaaaataaaaagaagacaagacagagaaaaaaaaagaaaatgatatcaatcttcacatctacttttcttgattaattcttataattaaattttgtagccttaattaaatttgtatgtaatgcatgaattcatctataccaattactcaaatttatgctaattaacaaacattaatagtctaatctttggacatatacgtatacattttgtagatccttgccttaattagttttgtccaataatgtatatgtaattttttaaagagaatggtataaatatttaaatttaactcttagttgcagataagtacataaatttaaattttgacaataataatacttaaagttatatttataaaactttcatatgcaccggtcggttaagtgagttaataatcacgtgatagtctctggttgattcaggtcattagatttttattttttatttaaaaaatttaaatacattactaaaaaagtgacgtgtgaataataacttaaatattattaatcggtatttacgatgtattttttaatgatataaaaattccaccttagctaaaaattaatgccaaagattataagtattatgagtttaactatgttcatctacttaagttcaacagttacataaatttaaaaaatgaatcattaaaacaaaaaaaatgcctaaacttaaatgctgccaataatcaataacatatat

SEQ ID NO: 94975 - DNA, 616 bp, Cannabis sativa
gttcatcgatgctccggttacaggtctgcatttccatattaattattttaacaattttctttgtatatatatttctaaaacaaaagtacataatacattgagaatgagaatcaatttgggtttcctacccggcaacaaagacgtttaaaagtattgtcattcccacagcgattcctgctaattctccaatctaaaaaaaaggtaaaattgttaataaagaaaaaatttcatcatcatttatacaaggtgacaatttattatttaaaaagattttttaattttagctgaatacttttttaagaagaaattggccgtaatgtagtatttggagaatatattggaataatcatttgaaaattttgaatttttattttttttagcttaaccaataagtattatgcactgttttcactgattttgaaatcttataatatccaatcaggcccaagattttgttacacattttacttttctttcgccttttttgaatggatatgatttaattatttgtaataatataagcttgagatatattaatgtcaatgaaaatagtgttaaatgataacaattatataaggtgtgtataatgtagagggaaatgataagtaattacgta

SEQ ID NO: 94976 - DNA, 584 bp, Cannabis sativa
tttaattgccttagcaactgcttcatcaagagtagccgatttgttttacctggaggtcatactgcatattctcaattcaaaattccacttgttgttgataaggacattacgtgttccaatagtaaacaatcaggattagcaaaacttttgcgtcgtacaagtttaattatttgggatgaggctcctatgtgccatcaaagaactattgaagcacttgaccatatgttacaagatatcactgaatgtggacatccatttggaggaaaaattgttgtgtttgggggtgattttagacaagttttgcttgttgtacaacgtggacaaaaagaagatattatcaatgcaagtttagcaaagtcttatctttgacccctatttacaaagctttgtttatctcaaaatgttggagcttactcagatccaactttcattgattttcttttgtgcatcggagaaggaaaaaatagtacttcaaatgtatatattgttaaattaccaaattcaatgataattccatacataaatgatatatcctcaattcaacttcttctaaatgatgttttccaagacaacagttccctgga

SEQ ID NO: 94977 - DNA, 1074 bp, Cannabis sativa
ttcaagtttgttattttgatttaggtgtgttgttgaaactttaaaaagattattgacttattgttgttgttataacttttattagtctcaagtttgttgtattttcgtaagtgttttggaataattttattgatgatagtttaattattttatgatgatttcaaaaaaaaattgtgatagttacaaccgcaagaaaccgcactgcaccgcaccgcatcattttttgcggtgcagtttttgaggttttttagtattgcggtgcgggtgcggtttggaaaattagaaaaaccgcatgtgcggctcggtttgaaaaaatggttaaataccacaccacccgaaccgcgaacacccctatgaccgggacctagtactcgacccagacctgaactttaacctaggacccagctcgtgacccagcaccaaaaatggaaccagactgggacccgagtttgggatccggatgtggacccacggcttgcacaaaacccatagtcggtgtctggatttaggacccagtactgggcacgaaccctgtcaaggacccaaacccacacccgaacctggacctagtcccaaacacaaaagtggaccagaacccgtaccctgtgacccaaaatttgaaccaaaaccggaagttgaccgggactggaactaggacttggagttggaatgataattgaaattggacctagatccagaaccgtaaccggacaaaaactcagatgccaaatcagacctacacccgaattgggagccggacccggatcccaatccaaaagtggacttgggacccgaaccggaacttgaactcagacccaaacatggaactagactagggacaaagaaccaaggtcgggacctagaaccgcaccctagtctcgatcccgaactcaaaatcagaaatgggacccaggaccaaaacttgaacgagaccgagacacgtgacagtggtcttgatcttgacacgagattctggtaacggggcctgaaaagaaccagtagtcggtgtctagatttgggagtcaaactaggaccagaacccagatgaagaaccaaacccgaacccagacctag

SEQ ID NO: 94978 - DNA, 629 bp, Cannabis sativa
gataccagtcattgatgagcttcttgatgagttgtatggtgccaaggtcttttcgaagctggatttgaagtcggggtaccaccaaattcgggtgcgaccggaggatgtgcctaagactgcttttcggactcacgagggtcactatgagttcttggttatgccgtttggactcaccaacgcgccagcaacatttcaggctaacatgaatgaggtctttaaaccctatcttcgtcgctttgtgcttgttttcttcgacgacatactggtttatagtccgaccatggaggcacatctctcacatttacaggtagtcctggataccttggctaaataccaattttatgctaacaagaaaaagtgttgttttgcccaacagcaattggaatacttgggtcacattatctctgcttctggggtctcggtggactccaacaaggtccaagcaatgttggattggccgctgcccaccaatttgaaaagtcttcgcgggttcttgggtcttacggggtattatcgaaagtttgtcaaggggtatggatccattgctaggcctcttacggagcaattgaagaaagatcgattttgttggaatgatgaagctaccaccgcttttgaagctctcaaacacg

SEQ ID NO: 94979 - DNA, 519 bp, Cannabis sativa
ataattttgttacaaaataatgctatatatatcatcatcattccaaaaaaaaggtaaacatgaaaattataattattactcccaaattctaaaaaaatgtaaattaaattaaaataccataaatgtagaaaccacaattataggaagaattaatactgatatcaatcaatttagtatacacaaacttacgaaaattaggtaacgtccatcaaattcgtcttcagctaagtggtcaaattggatatccaccacatcctcactcaacgaaatatcaaggtttgtcacctcccatgtacaacattggcacacagcaatgacaaaaacttaacgtcgacattatagagagaaagaatatcaatgaagatctgaatctttctaacacacaataccataatcttgaacagacctaaatatggacggaaataacaaaaggactaccaaaacctctatcactgttagcaaaacacatatatacaataaaaagaaatcaaagattaaaatctcatttgatcaaataaa

SEQ ID NO: 94980 - DNA, 626 bp, Cannabis sativa
tctcacgagaatgattataagaaagatagctaagtctgaaagttctaatttctagagagagatgctctgaccttatgagtattttttcttaatgtgaaaaattaaccagtggagctttccttttataggaaagaaggtcttattaaaataataataaaatattctaaaaaatatgaaaaaagtacatttaggctatttttttgaccattgattatgatctaacagtcaaattctttggaggccgattgccaatctctagagcttgtgttgcgtctataggacccactttgggtaagttgtagcttaaattcgtaactctcatgaggacaaaatttggacttgataacttcagaattgcaattggagcgtgagacataacttgatggagcattgaaagagcttcaaaatgcaagttgagtctaacgaatcaatattgagagttatgactattttactgaaggctgctctgaaactagcacccaagttgacatctagggcccaggttgacatatgttctaaggaaaaaacatgttgagggtgtactttttgacccctaagtgatattttgacatcacttagctagtttctatgttttggtgaagttgttcactagttctcggagatgt

SEQ ID NO: 94981 - DNA, 577 bp, Cannabis sativa
tttttggattttgcttgattgtttgcataatattgcccttttgctgccatggatttgacttcaatgattacctttccttaaatgatagaagtagtagtaataacccccctcttatgaaattcagttgaggattgtttcatttggaggcatcattcctcatgttgttttacagttaactaggcttaccacttagcgaattcttcttctaatcccaactgtattcaatcttggtagaaagttatgtggtcttttagaatgcccccaaaattaagcatttcatctagaatgtcttctttcatttaattacagttgctttaaacctctttcataaaaaggttttgtctgatcccttgtgttctttttcaccataaaagagccgaaatagtcactcattctctccttaagtgttctaaagggccaaagcaatttggaaatgcactgagttttatcatttttacaataagaataagtatcatgacattaaagacttttttgtacttgtttaataacacaataatataggtttaatcttgatcttgtagaagattggttttcctcttatctgcaggattattgg

SEQ ID NO: 94982 - DNA, 659 bp, Cannabis sativa
aaactagtagtgtttgttttgatgatttaggatgaaaataaagttagcatttcaatcctatatataatatccatatcatgatatgtatagatgcgcgtttagaggcactaattagtaccctgaatcacaagttatttgtattattgtaatataaattaataatgttagagagccggtagttttttattcgaaggtttgcggtcctaaaagactgaccaaatttaatggtttgggttttcatgatattgaggtcaggtaatcatgcatgacaatgacattgactcaagtggctttcggtttagaagtcagtgggtaatatttggtttcaatgggcttaatagggtgagatgagagttaaaattataaagtgggtatcaaaagaaaagtcaaacttctaggacattggaaatcttgaggggcatccgcggacttaactaactaccaaatcttgctttaaattactcgttttcttccaaggtatattctagtcgcctacaagggaattttttttccatctttttcacagaaagtaaggacggaataaatttccgttgcaatattaacaaggctaattaggatttttgtcccttgaattttgacatgtaccaaatcatacccgctgaacttttaaggtcgttaaaaatgccccatgaactatt

SEQ ID NO: 94983 - DNA, 688 bp, Cannabis sativa
taaaactttatttaattacttatatactaaaataatgacatatatatataaccgagatcccatttacaaaatatttacaaatgttttatagtgcataatataaaagatgtcgcctagcgcctagacaaaatacaaccaactgccccaaagatcgtacgctccaggcctaacaatctcgacatgtaaaatctttattcgctcgctctcacgactgcttaacattagccttgtccttacccacacatgcatttgtgagttgacagactcagtaagaaaagcataataaaaaacataactataacccagattataatcaggtgcccatacacccaaccataaacctatccccgtgtctgacactgtattgagtcaagaacattcaaacgatagtactattgaccataatatcagcctatactcggtatgctagtcatactgatgtgatactttcaaatattacagtactattgaccatatataatatcatcctatactcggtacgctagtcatactctagtcgtaccgatgtgaaactgtcaaatagtacttaagccaacatatattcattgatatcaaatgtaattctaaatgaactgataccactattataatgtaatctaacaggcttaacaaatatgtacgctaaacatgtaaatacataagtatatcattatactaatcttacttc

SEQ ID NO: 94984 - DNA, 573 bp, Cannabis sativa
gtaaataatagctgaaagtgtaccactagctagagttgatcaaggaactgagctattacataagcaggtacctataaaatacaaccacacactatagtattatagtttaatcttcgtctctattcttttcataaagtgcacattgattaacaccatataaatttaatcttatagggagttaaaaatgtaatctcatttgaataaagtttggtctggtctggtcttgaattgtttgtttttcttatcaaatttaaatattaaaggagagagaaatacagagcttttgattacaataagacattgacttgtggaataaaaatgggtagttaaattgtgtagaattgcattaattaagataagattagttgaaaactctatttttgttgatgtggcttttggtcgtcattttcttgttctatacacaagcttcatataatcaaattttgcttagaacatgctcacgtgtttgagtgaaaatctcttagtagtggcgaaagaaattgtggtcgcaggattaaaatgggcactagagatataaccaacagagtcaaccattatcatcacactcaataa

SEQ ID NO: 94985 - DNA, 589 bp, Cannabis sativa
ataataaagaataattaaattataaaattgacatagctatattatatattatatatatatatataaatattagtgtggagtacgtgttactggcacgtaatcccacttaaaatatgtgagttataattatatatcttactttcattaattttgtttgaaaaaaattaaaataaaaaaaaatatttttaaacaagaacatagtgtgatataggttcatttattgaagctaaaatgttagtcgttatatctaaatataagctcatgtgatttactctagtattacctactaataaccaaagtttataagtaaaataaaataataattaacaaaaataaactataggaaaacctcacctaagcgctgtgtaacaagtaaaaaacagaacttataaagttatgtataattggaaaaaatgagttaacattctaattaaagtgaataaaaatatgtacatattaagaacatcttcaatagagagctaaaattgtagtttatatattttagttcatcttgataaaggtaaacttcaatgttggtgtataatgttagagatattattacaatggaagaaaatcaaaatattacaac

SEQ ID NO: 94986 - DNA, 581 bp, Cannabis sativa
tctttgttcttggctgatccactctcttttcctgtttctcaagaattatatccaagtaagccatcaattctttccgaaactagcacacttcataccagaactccctcacttcatcctaaattgtgctaatcatggcatcaagagtctcttctattttttcggcaaatccttcgacctttcttggtcggtttttcctgctttctttggtttcttttctgtcctctcattgtctggtctgataccatttgatacactaatgttctagttcagttcttgtaagaattagaacataggcaatggcattttattgatatcaaaaagaaattacaaagttccaaactttcgagatagttggtatctccctgagtaatctcttactcactttgttacaaaatcattcctccgtgatcagccctatatttatagttatactaagtctttcgtaactgttttaacaccttaaggactgtaggatagctcacctaaagccaataagaatttgacaattcagcgtctaaaattatactcaattatactgatgaaacttatattaaggtgtaacaaaaatacatatattgaac

SEQ ID NO: 94987 - DNA, 657 bp, Cannabis sativa
gtttaaagtttattattattgagagtgactcgagactagtaatcaatgtcctcaatgggaaggagtcccattgggcccttgagaactatgtctccttttgttcgagatcatctccatctttttctagttgtaattttttgaatattagtagacaatgtaactttgctgcccataatgtggctaagtgggcgtttacccaccagatatttggttgtattccgatctctgctttgccggagaacctactttgtaatgaccgagaggtctagcttttggattcaatgaagttcttcaccctatttttcaaaaaaaaaaaaaaaagatcattacattcatcctaatcctctattaatggttcataattaaagaaaataaaattactattttactgttttaattatatcttattcttagtgttgactgagattttcgataacttaactaataattataaaataaagaaaaatagagcttaaaatgaaatgagatgaaaatttttacgtgattcgaatgttaatgaatcctaatccatgaaccaatattattgggagttgttgtatgagcacaacaatagtggttctctctgttggattttgtgccctaaataaaatccattacaatatgatcagttatcaatctaagaaatttgaagtgatt

SEQ ID NO: 94988 - DNA, 803 bp, Cannabis sativa
ttgctatgcaatcagagataaacagatctcaaaatgaagaaaaaaatgtgaagattatgagaaccattactaaatcaaaagcaaatttatgaaacccaaaataaatgtgataaaatttttactttgaaaagctcctaatatcccatccaaacacccaacctctacgacagaactagccacctgtgaaccccgacaatgcaagaacagctacttgcgaacccgcgcaaagcaaactcgccaaccgcccgtaacctgaaacacaaaaaattcaggcttgattttcttttatccaaaattaatcaattacatgaaagtaactatttccacaacccaactctaattgggtcgttccaattagaaatccaaaattttaagagcagagtaaaaaaatcaaaaggaaaattaatacacattaaactcactcaaacttgtatttgaacaattctttttcgtaggatcaaaaccataaacatttaagaagaacatgaatggactggagaagagaagagaagagcgagagactttcgtgagtttgcctcttgggtttggacttttgatgcttcgtcttaaccatttcaaagtatccacagtcgtcgtcttcgccaatagccttgttagttcacactttcagttaggttctccctttgttgagacaaacagaaaggagatacattagtgaggcacttaaaaggctcatataaaagtttttgctgggcttttcaaaaaagaaaaaaaacaagaagaagaggagatcgacgatctcaaacaagaacaaaaaccagaacagtactgaggcaactatt

SEQ ID NO: 94989 - DNA, 706 bp, Cannabis sativa
gtacctttccagactcttctaatactctggcagtagaataatgcatgtgagacagactcttctgaaattccacaacggtcacagcccgaggaatgaatgatttttctatgagctagatttttggctgtggggagggttgaatttgtggctcggaaagcaaagtgtttcaccttggcaggaaggataaggtgccacagatttttccaccaaggcgaaggtgaagaggaagaggggatatcagggggggaggtggaagaaaggctaagatggtaacccgttttgacagaatagacgcctgattgagaaggctcccaaatctgctcatcggggcaggggtggaaggggaatggagaggacttgctcaaccacatgaggcagaaaacaactttgcaagctatttaagtcctaagacaaagaaggtgagatgaacgaggcaactttatcagggacaagggaaagggtaggaacctgatggagacccgggatccaatgatcgcgggtcgtggatgtgttctgcccgttacctatttttgaaataattcctttgtgcaacaactcttttccccaacagatgctacgccagacgaatgaaggtgagtgccctattgagctattaagaaaggatgagtgaggaaaatacctagcggacaaaatttttgacaccgttgagtttggctgtttcaggatgcgccaggcttgcttagca

SEQ ID NO: 94990 - DNA, 1750 bp, Cannabis sativa
ttccgatctgagctcgtcgtgctcaacagtggcttggttgaaagttaagggtttttctcggattgcgggtgacagccattcttttacagagatagtaaaaactgtaactgttgtttaaagaatatgtggttgcattgtaaaattacataacaatatcacatcattacttgttgacacatgtatatttagtgtccttcctttcaagaggaaatcacaaagcatgtggctggaatttagcctcgaatatgatagtaaagaatggtcttgattagtgaattgcaaatggcagaagcttgatcttattgttctcattttgtatctgtacatctgtatagaatatttacattgtagccaggataatagagtaaaagctaccaataatcaccacaagaacaaattccttttttgaaatagtgaaaccggttacgatctcttaccactattattctgccataaaattttgacagaagcttggttgcagcatgacaattgtcacaaactctcggattcttgataatccacattggagtacctgcagtcacaaactctcggattcttgataatccacattggagtacctgcagttgtactgataggactgaatgccatgactaatttttcactatgataattaagagagatttccttttcttcctcatcaatattctacaacacaatcgatgtgtcaggacaatgacggacatgttatttgtgctgagaattttgttaagtactccattgatcaaggactagatgatttttaaaataaagaatttccctatgttatttgtgctgccttttattgcggatacacttttctcatagtttttttttttttggctctttgtagtgtaataaaaaaagaaaaaatctaaatttttttgtttataaaaactatgagcaacattgtcatagtacaatgtttcacatccttattgaccatattgaaacattgtactacgacagtgttgctcattgtttttataacagaaaaatttagatttttttttattcattactaagaagaagaaaaaaaataaacggaaaaaacgtgtttgtggtaaaagtaacacaaataacataagaaaagtccttattctaaaattactaactcggcgatcaataaaggacttggctaaataattttgagttttggaaaattatttttctttcttcgataatttttttaagtataaatatgagaattttgtaatatcactaataaaaaaaaaaaccaagaaaactttttccctagaatttttaatttattacgctccgagtctcgtggaaacccttcaggagtgaagttccgccttcaacttcctggttctcgttctctgctcgtcggccggcgtcgccgatcaacgatagcctccatctgcaagtcttgtcttttgtgacatggtgtgattgattccggtttgtgtttggttgatgtttttctaggtgaagtcttcttctttttgagagtcttggttcggtgggttctggattcagtcttggattcgtttggttgattggttcgtttggttctggggtgagtcttggttccggttttgtttctgggttgagtcttgatcggttggttcgtttagtgtgactgtttctggggtggtgactgggttggtggcgtttctgtggtggttttttgggtgctgctggggtgcgacgggggtgcagttggtgggtgaaggggtgcggttggtgtgtgacggaggtgcggttggtgtgtgacgggcgtgtggctggg

SEQ ID NO: 94991 - DNA, 505 bp, Cannabis sativa
aatttaattttttatgctcacatacacttaattttttttccataaactcgtaatatttgatatttgtgggatatgacacattttataatattcctaaaataccccccatttacatcactctcctctctcttcttctctcttttatttcatagccatcaggacccatcgactccattatcgggcccaccatcgggcccactatcaggctcacaatcgaccatatcaattttttttacacaggcattgggccccatcaggtctttgtcttcctcaatttttctgtgataccgtcggaccggtgtcgggcctgcatcgggcccgacgaaatcaaaccccaaacccatatttttcccaaatcacatctaacgaaaaaaaaaagatccgaagagggttcggtccgtggggtggtgggttcatcggttcgtggggtagtgagttcatcggtggtcaagtgggaatggtccgtgggtggtgggaattcgagagggaaaagagagagagagag

SEQ ID NO: 94992 - DNA, 782 bp, Cannabis sativa
tttattataactaaaaaattgtcatattctccttttttgtagcgttacttgcttcgcaactaaaagaatacatatatattatacagaaaagacaaagtagccattcatgtttttacttttgcttttctaacatggtaaagatagaatattaaacagtactaataatatggaaagaaaggtagatactttgcccttcatcaatatatatttatatcaaatagtattaaataagctaaaacagctacaatgtggtccacgtaaaccatacaaagttaaagctgtgaagaacaagagattatgtactcttacctttacaaaagcaatatactagaaactttaatatatatgcaaactcaatttatgttgcttgctaagttaggaaagaatatgagcggtagctagctagtagtatatatatacacctaaatatgtatatgcatgccaacaacttattaagaagttttactatttcagctctaatccacaaatacttttcagcattaataattcctcttgaatggcatcgactccaccaccctcaggggcaactactcctcagccacagcagccgccgcctccaccacaaggagaaaaggctccacagccacaaccaccattgcaaccattgggggtatccccacctgtgcaggttacagctccacaaccacaaccacagccgcctcaacctccatctccacccgtagaggcaacgactccacagccgcagccacagcagcaggctccacaaccacaaccagaactggttgcagctccacaaccac

SEQ ID NO: 94993 - DNA, 545 bp, Cannabis sativa
tggattaagtaggccgatttgcaagagaaacatccatttccttccttggtccaaatccaatggtctttacattgtcctaacgggttatgccctttcaaaatagtagcaactgtctcacgattaaataggttatgcaagttagttgtgtcacaggtacctgacttagtcagaagctcagacactaacgtgtatgaatgagaagggttaatagatccttgaaggaggaaatctttaccatgtgtgatccagtggtcttcccaaatattttaccatcagttacaattttgcacaccccctcctaaagatgtcattagctttcacaatgctctttcataactaggagtctgaagttttagctaggggtgagcaacggtcggtttggttggtgttttacacaaaaaaaatccaaaattcaattttttgattttcatggttatattttgaaaaccgaccgaccattatacaaatgtaaaaaaactgaccgttttaatacacggtttggtcggtttaaaccgaccaaaccaaatttcattttttttaaaaaa

SEQ ID NO: 94994 - DNA, 702 bp, Cannabis sativa
tgattggagatggaggatttcatctacgatccattcctccttcccctatgccaagatccctaggagtggggaatggttgagaaggtggaactgtgttactgcctgttgtgcccagttcctcgcgggagttctgtcatgaaggaggtggaatgttgtttcaggggtagcaagttcttacatgtcccttcgggtctgatgttgcataggaagaggtgcattcttccttctattctcatgaccctgggtggtcgctcgttgacattattttgacggaggatgctcattcctcccaccatggatgttgttctcacgagacaatcgttgtggtacaattttacgagtagtttcttaactttggataacaataagacttccatgttaggttattattaagttttattttgatgaacaattaggtcagggtattattttgtagaattttaaaaaaatatattatatttgaattgttatttaaatagaaagagtctgatcaataatttttacaaaatacaaatttcaaaatagtatttactcaaaaatattatacttttaattgcaaaatttttgcataacatacattaagtgtaaaataaaatttctaaaaatatagaatcaaaacttaatgtattgggttggttgaaatgatattttttttaaaatgagactcttaacattatttttgaaagtgcaacaggtgtgtct

SEQ ID NO: 94995 - DNA, 983 bp, Cannabis sativa
tattttggggtcactaataaaagatgaggatagttataaaatttttaaaagggtggtataattaaacaccctatctaatgtttaagcataaaatgtcaaatttccattttttattttaattcaaaaagtgtaatggtatttgcccacatgatacaccaaaactcttaataaaaaaaatatttactttctttttttactaaaataaatgtactctaaaaaaaaatccaaataattaggtagcgtttggttggaggtaatgaaatgaaataaaatagaaaggaaacaattttcattctattcctttgtttagttgcatttaaaactattagaatatcattccgatggaataatctttccatcattttggtagaatgactattccattttaaaatagaaggaaaggtcattccaatgcaagatttgaaaaaaattaataattttttttatcaattttttatgcattttaatttttatttcattctattccaattcccattctcattcctattcctatattttaattcctcacagccaaacgccacttagttcgtagtaaagttatgtgatatgtgttctaagaatataaacataactttaccatgacgaaacaattgaaatcttagtcgtttttgcgatggcttctagtagcattgatgggcgagggatggtggttagaggggtagatgtgagtatagaggaggaaaagacaagtgttttgaggctactagttgagagaaaagaagaggtagtaattgatacaaggtggtgtttggttcttgacgggtccagcatttgatttcaatgtgtttcagaatctgatggcttacatttgacagcctaagatgggaatgtatgttaaggaactcggtcctaacttattcttatttcaattttatcatgaggttaatatttaaagggttatagagagaagtctgtggacatatgatcgtaagcaagggttatgtagcattcaggacaaaatt

SEQ ID NO: 94996 - DNA, 537 bp, Cannabis sativa
gtcaaagttcagggggaaaaatcactaattagctttggaaatgattttctcttgtttttttaattataatcagtatctaagttatcatgtgttattaattttttagtaattttttttggaaccaattctattttaatttatgttttagttggtctttcatttagtcatttcagaaaacagtccttaaaatatttatttcgaaaaccggtttttaatttaatttattcaaggaaacaatttttaatttaatttattcaaggaatcgatttttaatttagttatttcgtgatctgatttttgatttagtgaattcaaggaaccaacttttaatttatttatttattttatttaactgatttttatgtgtaaggttttattttagttgctttatagaattaattttttgtctcaaatttttagttagttgataaatataaccactttctttatcttatattttgagctatcgtgtgttatttgtttttaattattttattataaaaattaattctttttagatttatgccttagtatttt

SEQ ID NO: 94997 - DNA, 555 bp, Cannabis sativa
  modified_base (496)..(508): a, c, t, g, unknown or other
taaaaaagagggtaaaaataaaagagtacaatataaaaaggatatggagtgtaatttcctcttttaaaaaaatgttaccacattcatttttttctagtgattgaaagtaaatgtgtaattactaattattagggtgataattatatagtctaataattacattatcttttaaagtataaaagtgtattttgatattagatggtaattatacataaatttctaatattttatttggcaaaaaaattagtaattttataagaaaataatattttcttttgtagataatatttaaaacagaaagttcatagtaattacactttcttacgggattatgagaattaaagagtgtaattagaactccttaattatctctaattacaaagttacaatgtaattacatatttagacaaatatatcaaatcgtgtaattacttttaaatacacataaattacacaatgattctctaaatgcgctttaaaaaaaaaaaaaaaaaannnnnnnnnnnnnaaaaaaaaaaaaaaaaaactaaaaaccaaaaaaaagaaaaaaaaaaa

SEQ ID NO: 94998 - DNA, 518 bp, Cannabis sativa
taatttaacaaatgtcaaagttcgagtgacatgatttggtaaatattaaaatccagcgagtataatttaatacaaaattaaataaaattaggcaaaaattgttaaatccaataatatcaaagaattttcagacaaattaaaggagcttaatttagtataggaacaaaaatcctaattactctaacttttatattcggttatattcggtggccttttagtatttctcaaccaaaattagaatgtatttggggtccttcttattttttttgttgcacagtagaatttctgagaaaaaaattagcattgttatgtggaagttaatacattaaactactatatgaaaccggataaaaaaatactagacacgtaccttttagcatttctataaaaaattatatataataaccacaagaggaagaagaggaaagctactacactccaccataccacctcgaaatcatatcagacagaaaggataagctagataataatggcgattccgatacccagtaggcagc

SEQ ID NO: 94999 - DNA, 544 bp, Cannabis sativa
  modified_base (457)..(483): a, c, t, g, unknown or other
taataataataataataaaaccagttacaaattaagggagagtttctcgccaagttgccatcacgcatgaaaagcggacaaccacttcaaccactttttatttacgtaaccgcaacttttcattttcaacttttttatttacaaaaatatctctttaacaaaagtaataaattattttttttaatttatttgtagttgtcgtgatacttttctagtttgttttttattattttataatttatttatagttgatttatagttgtcatgtttgttgttttttaatttattttttgctaaacaaagtgtatttttgtaatcttaaaattttacaagtgaatttttataaataaaaattttagactgtaaaattataaataaacataaaataaagggtatttataaaaatttccctaattaataagtgattggaggtttgtatattattattattattatnnnnnnnnnnnnnnnnnnnnnnnnnnntattattattattatttggagatgataaaattaagggtctttttcatttttacacttctaa

SEQ ID NO: 95000 - DNA, 660 bp, Cannabis sativa
gtatatagatatatattggtttgcagatttgatttttattcaattttatggtttatgtattttaatttgcatttggtattttgaatagagatttgggcttgagatggtttgagtgccaaaatttatattttttttgtttctgtagttgagtgtcggttatgaaccgacgtatatggtgtaatttatttacattgcatcaattcaaaattgacgatactatttaatgtcgtcaattacgaatcgacataataggataattatttgtgtcccctgtatatacgtcggttacatgaactgacgcaattattatatatgtcatttataaaaatgatgctaataagctttttgtagtagtgcacctttaaccaagctaaaagaaaactatcgttttacttcttaaacagagctatagctgtccatgtctatgattcttacttaattacaataccaagctcccaagatgtaattgtatgtagggttgaacattgggcaagtttgctgggttctctagtttcgtactcaaaaaatagtattcgtacctgcccgtgaaatgggagggttgaccgagtttgcaggtcactggctcacaagctgtgggttgaccgagttggcttggtcaaatcttttttttttttttttttaaaaaaaaaaaaaacccca

SEQ ID NO: 95001 - DNA, 711 bp, Cannabis sativa
atgagtcaatactctagtcatctacacaagtttcttaggcccagtaaaacttatcattcacttctcccagcaccaaaaaaaaaatatattagcagtgtaatagtatttttaatatatataatgaattaataaacattttatatattatgtcaaaaacaaaacattttaaatatatatattagtgtgggaaaaataacaattggagtgttatattatctttattttactccatatatacctaccacatataacaaagaaatcaaatatatttggttgaaaaaaacaattatcttctgttagctagcaaataataatatataagttctgatccgttctcttctgatctaactcaaaagaaatttttctctagcaaaattattactattataagatggagggaagtaaagagcagcaagcttcatcaactcatcaatacaaatacaactccaatatcacatctctccataaggacttaaccaccacctcttcttcatcttactcttttaaagagaaaacgacatcgttttctggtaagttcaaatgcaaaaaaatgtttgatgagagttttcgtaataataagaacgcctcatcacaatgcagcaacaataataagcaggcggaggagtcccttcgtacggtcaaccttaagcataaatcctatgcttaaattgggtaatctatacatgtttagcacaacaagcttaagcataa

SEQ ID NO: 95002 - DNA, 572 bp, Cannabis sativa
agattaaattcaatatgtttaatgtgagcgtgtaaaacaagattggcagtgagtagaattgtactcatattgtcacaccaagtggtaggtgattgaggtaattgaacatggagtttagagaacaatgaatgcaaccaagttatctctgataccacttgagctagacttctatatttagctttagtgcttgattgagaaacagtatgttgtttcttgcattgccaaacaactaggttagaaccaagaaaaatggtgaagcctgatgttgatcttcgatcgtctggatcacttacccaatcagcatcacaaaaggcagtaacatcataatctttgggacacttgaaattcaggccatgtgaaactgtaccagtaagatatcttaatattcttttaaccgcattccagtgagtatgtaaaggattggccatgaattgacaggccttattgacactgaaagaaattttacgcctggttattcttaagtactgaagtgcaccaactattgatctatacagctgaggattgtccacaggatccccatcaaaagaagacaacttagaccacttgtcatg

SEQ ID NO: 95003 - DNA, 910 bp, Cannabis sativa
tattttcaatttaatttaaatatgcttacacttttatatgcagtttttggtgaaagttgtgtgatttactattttaattatagtctcggcgaaaggattttaaatggttgggtattaatttttaatttatttatttccttaaaataatattaatgttaggtgagcaactaatttttatgcttttaattatcttatttagttttgtttaaattttatttatacaaatataagacttttgaattttatatgttttcctaattattcttgataatattaatttatttatatataattatatatgaactttatttgtttcttttactagttatttaaatagttttattatatgtttaaattatatatgagaccacactgatttttgcattacttttgatagttttgataccttttacggcttttgtgccatttattatggtttgttcctacttgtttaagatagttttgtggtatggtcaatgagcaaggaaattgatccattttgtgctcacgatttctacttcaacgactgtttcacttttaatagatcagtatttcaagtcttttaagtccttatatttaaattgaattgttttaccatcgttcttttacattatctttttcattatattgggtgataatatagttttattttttgttattttgtaggttggtttgtggagggcctacaattacagagaatttaccgataagtttaattgaaaaaataatttgtttgatgttgattttcaacagtttctaattagggtgatagtttgttactactagccaaagggtaataccttaggctagtttttctcaaaaattatgtttggttttttagtttttagtattgttgagttagtgttatgggttgtgtgttaaattttaagtttattttttagttttattt

SEQ ID NO: 95004 - DNA, 502 bp, Cannabis sativa
aatgggtataattatcaatttaaattaccaaatatataaatacattcaaattttatttaaattataaattatatagatacatctaaattaataactaaaaaaatacacaaaaataattatattataattaatagcaaagtatctcaaaaaaaaaaaaaaattaataacaaagtaatacagaataagtaattcaataaaaatacaagtataatttaaataaaatatatgaacaaaatacaataacaagtatgaacaatacacagcaaaaacaaataaaattaccaaatcaaaacagtgcctcatcaatcccggctagaaccaatgattttccttagtgattccttaactgaaccaatgattctcatgaaagttgtcaagacttcagcagttgaagaaattgacttgggaagctttcaaaacttggaaagactcttgtttaacttgtcattgattttcttatcaatgtcagttaagtttctgtcaatactcttggcttgaatcc

SEQ ID NO: 95005 - DNA, 829 bp, Cannabis sativa
  modified_base (783)..(790): a, c, t, g, unknown or other
ggatgaccaattaagataataataaaacattccaaaaaatataagtaaatacatttaggctacttttgaccttagattataatctaaaaacaaaattgactatggaggtcggtcatcaacttttggagcttgagtcgcatccatgagacccactacaggtaagttgtagcttaaatttataactctcttgagggtaaaatttggagttgattacgtcaaaattttgattggagtgtgagacattacttgatagatcattgaaatagcttctaaatgcaagtcaaatcgcgccaatcacatcaatgttgagtgagttatgactattttactaaaggctattctatggaaaacgtgttggggatgtattttttgatgtctaagtaatattttgaaataacttagctagtttctgtcttctggtgaagacattccgcagttctcagagatgctgctattttgcagaaatgggagacttatcgctctcaattgctatgaaaaattagacaaacggttaagaaaaaattaaaatcggataagtagaacccaacgcaccaggccatatgtcaacctaggtgctgagtgctctaattaaaactttcgagatgtcattttgatacttccaaggttcttaaaattaaggaggaggtctcccttcctttttttgatcattttggggagaattcttagagttgaatttgcatttggaggattgaaactagtgcaccaggttgattgtcaacctggccgctgggccccagcactgttggaaattattttactagnnnnnnnnatctactcacaagtatgctgattaacatcctaaatatga

SEQ ID NO: 95006 - DNA, 1470 bp, Cannabis sativa
  modified_base (245)..(248): a, c, t, g, unknown or other
  modified_base (729)..(730): a, c, t, g, unknown or other
tcttcttcagagagagagacagaggctgtaatagttgttgttactcttgcaaaagcagctgtgagggttgcaaaggatgctgctccgctagtgaaaacttctgagcatgaagaagaagacgaagaagaagaagaagaaggaggaggaggagtagggggcggcgagatgagaagaagagaaagagggattagggtttttttttttttttaatttttattgttcaaaattatttttttttaattttnnnntttttaatttttaaagaaaaatatttttttattttttatttttaaataattaatttttatttttgaaatatttatttgcgtggaccattaaaattgtgccacgtgtacactgtgtacacgcagacattctaccatggcagttaacagccaaaaatggacggaaagtgctaattgctaactgaatatcagtttaggaggttttaccaccaaaattttagaattgagggttagttgcaaacatttgaccacttaaagaggttatgccgcaaataactcttttgtatttaaagtttggacattttagtgtttaaaatctagactttatagttaataatttttattgtatttggatattaaagttgaagtttaaaatttatacaatattattacttttttttttattattattttatttgattatttcatgtttactcaattatatttatcttatattaaagtttttaaaattaatttagactanngtattttttaacttgaaatataaataatgtatttttattttttttaaatctatttttttcaattagaaaccaagaataataattatataaaaaaagtgaagaacggtttggacgggttaacccgaccaaaccaacgaaatcattgggcgggttgaactttttctaatttttaattgggcgggttacaattaaataatgcaacctgatatttatattggattggtaaaaatatactataacccgactaaattgaccgatgtacacccctagtaaaaatactattttttaatggtaaaagaaacaaaacctaatagaaagagcataattatgtaactgttatattttaaggagaatttttaacaagctgtatattttagaggacaaaatcaaatagtaccaaatgttgaggaaaaaaatactaattattcttaaaagaacttatttcaataaaaaatcctacttcaattccgatgtatttaatttgattgaagctcaattcaaatattattcattccaaaattatttttattccaatgaaaattgttatataataaaaaaaatataaacactaataatattaaaattaaattaatgttattaatttaaggggaattatcccatatattatttttttttaactttttttttaaatttacggtttaagtttctaaagtggttgcagcgctagttgtaatagaaaaatttatgtagaatttcgtagaaatacaaaaaaaaaaaaa

SEQ ID NO: 95007 - DNA, 578 bp, Cannabis sativa
gaaccccacagccagcaatttttcattttcatttttttcacttcattttataattgattaaaattattaatataatagaatatttagtatttttgtcccttaaatttttaacaatagtgattatatttcttaaaatatatagtttgttaaaaatcttttctaaattattatatttataaaaattttagtctttctgtttgttaggtttcgtctcattattttgtttaaatgttaatatgtttttgtaaattaataattttgtccacccaaactttaaaaactatcaaattttaccccgtaaaaaataaaactgaaaaagcttcaatatctattttagtaatttttttttaaaaaaaaattattttgaataattaaaaaaaatttaataaaaggaagtaaaattttgtattggccaaaatttaaaaggtaaaaatgttaattttttaatagttaaagaaacagaatctaacaaaaataatataattatataactattatattttaaaaaaaaaatttaacatgccataaattttaagaaaaagaatcaaataatatcaaaaattaaaaaaaaaacaaaa

SEQ ID NO: 95008 - DNA, 570 bp, Cannabis sativa
tttatatttcgtgtcaggtgtgtttatctgtttttaactcgtgtctaattttttcaatcctaattcgacccgtaaaaaattgtatcgtgttcgtgttgactcactttaatttattttgctattcttgaagctaaagttgtaaagaaaataatagatttaggttcattaaaaaaatttgtatacgcatatataattgtttatatatattatctatacattaaatattaaatttttaaaaataatttcaatttctttctaaataaaattaaatttaaatttttaaatttttacatagttatattattaataattttttattttattgttcaaaattttattttattttattttatttaaaaaatcgaattaaacgtgttaaattcgtgttaaacaagttgtgtcatatttaatccatttttattttgtatcaaggtgtgtcaatccatttttaattttctcgatcctaacttgaaaaaatcgtatcatattcatgtttataccgtgtaaaaatatattttgctacccctaaaattagtagggttgttattatatttaggtattgaatttggg

SEQ ID NO: 95009 - DNA, 755 bp, Cannabis sativa
accaaaaagtggtgccaattttgtttataacctaacctaaattttctctttagtcatagcccactaaggccttatggacttttatcctaacctaacctaaattttcttgctttttgaattaaaacataggccaatgtctaaacatataaatataaaatctatccaaagaaaaaaataactgataagaaaatatcaaaattaatataaaaatctagtcacaacaataaaatactaaaacagattgattaatggaattgaaaaaaaaatatatgataataaatgataatgtagctgcatgcatgcaacttttaagtataattagacggttgcaacataatatgatatgcttttatagtttatgatatcgatcatgttgtttaatctttcttcttcgagtttcgcaaccgtcaaaaattaatatcatctcattgaaataatatttattactagctagctatataggcatgcatgcacataaaatatatatgtatttttagttgtcatttccaagatttttaatctatatagccagccaattaaacgttaaattcagtaattgaaattaaggtcaatatctcctttcaaaaaaataaaaatatctttatcaattaccaggaattaatattatatatataaatgctttgcgactcttgggttcctctgtttgaagttatacgtagtaaataagaagtactataaataatagtgctacatacatatctatatacataattaccattattcttctctttgtt

SEQ ID NO: 95010 - DNA, 1891 bp, Cannabis sativa
  modified_base (1856)..(1856): a, c, t, g, unknown or other
tctaatttatcaaatctctaatcaactgaactaatagtttggttcaatttgaattcataattgtttttcttttcttttttaatctcttgagattggtgatatagctctgattgaagaagattgatcactttcaataaaacattgagcccataatctcttgactaaggcattcgtaaaaactagaagaaattcacatatataataaagggctatttacaaatatgatgaaaaaaaataagttttgatacatatgacatggaaacttttttgatcaagaaggaaaaaaaacttcattaattgaacaaacccaattagagctaaaagctacaaacagccagtaacacaagctagctattagttacaatttgtgacctatgcaaacaagctttccttatgttcgaaacagtaagatctatagagctggagcaactctcacacacacatttgttcttgttcagccaaatgttgttgatggaggcaactaagatagtaacctgtataaaatgcaaaagacctttggttttcaagtcaacaagtcattccagcccttataattcataggccaagtcctataacccaactaatcaaaaatcttatcaaacactctttgggaaaactcacacacaaagaataaatgttcatgtaattcgaaggccaagccacaaaccgaacagtctagaacttctaaaaaattcaaaaccttaacattttatcttcggtaagaagttgattattcactacttgccatagcataaaacgatgtttaggaagaattaaagtgttctagataactctgtgataggttacctgaatttgagcaagttcactgctgtagagctgccctattttgaacttgttggtgcctcctgctgctgcaatttcatctagcaaaaatatttttctcaaattgcaaattttacgccaataccaactagtgtcttgtttgagctcataagaccaaaaggggacgttcttcaagtagattgcattgatgcatttgacctaaagcaagtctctcttggtgtttatagcccatatgtactttgctatattagcatggttccatctaacactatccttgaacccgaggcccccataagcctttgggagacaaactttctcccaagaagccacatagattttgctcttgttaccattctgcatagtctttcaatctctttagtctcactttgggggaggatgaatatactcatccaataatttctaagaccaagtaacatcgagtgtatcaaatgaactctcccaacaaatgataggtgtcaactaatccaagtttaaatttgttgtttgattttcttgagaacaatcccattatcctcagccttccactttgttggtctcaaagggatccccaagtaggttagaggatagctgccttcggttagctggatagtgttgcacaaattagttttttttttttttcagcatgatcaataccgccaaaataaatctaagatttggtagtgtttacgtttagacctgaagcactgctgaatttttcaagaacctttttcaaaacaagaattgattgtttcgaccctttgttgaataatatcaagtcgttggcaaagcagaggttgctaagctttgagcttttgcacataggatggaacctataattagtgttcctagttgctgccacttgtaaacatcgagtgagatattccatcactaacacaaacaacaatggtgagagagggtctccttgtctaagccccttctcacccttgaagctcccttgaagtctcccattcaactaaataaaactctatttcaatgtaatctctatcatttaaatatcaataaagatacagaagtattttcatcacttattnaatgtgtcatttggttcatgttatcatttatatat

SEQ ID NO: 95011 - DNA, 1694 bp, Cannabis sativa
agttatcaaacaaaaatcaaatattacccgatgacaattttatttctgagatcgagaattgttatggtgatttcatcgagtattgttcttgattggctgtcacagtagcctctttctctatccttcttggtcgagcactgtcagacctaactctaaactggtgaagtggttacttagtcaagaattttgatggcctcaaaaaacgatagtgaaattcatcttttgggatggttactagatcggctactacagtactactgttgctaatcgacaatatgggtttgggctggttgagagaagaatgtgaaattgcactacacccattcttaactaaaacatccctttagcagagtgtattataggcttgccctaattattttaataataatatataattttattaatatgatatatatatttttaataatatcattttatttttaattattgtaggtatataattttattctataaaatatatcttttgtatactatatatttaatttgttacattagccattttgttaaacttaaaaaatacattaaaaaaaaacatatttatttatccaattaatcttatgtatttctagctcatttaaaaattattccaaattataatggctaattactacctgtctttgtagtttatattacatcatcaatcaaatgaactgtttagaaagccaaaagaaaaactaaaagggaaaattcagcattgtattcgattaacaataagtccctcagtttcttccttccaaaactagcatatacattaaagcaacctgatttacttctaagaaataaaacatctatcatgctagaagacagtctctatctattatataaaacaagtaaacaagtttcatttctttgaaaaattcattccctaatttctcaccgcttgccctgcttgtactgttgctattacttgagctacaacaatggcgtattggacggctgtatgttgcgaggtataatggtctccaagcccgaaatcggcaaaatttggttctatatgcatgaagtgacctggtaatgatctttttgacacagcatcctgccatagatcgaggaaatcatccatcatctgcctagccttttcaattgaagagatagggaggtactccaactgcaataatattcaagcaactttcaattgcaacattcaattcaaaatcacaagatttagatattttaataaaaaaagaagacttaaaatgagtaaaacccatttgcaggtaaatgaccaaggcttgacagtaaacttcaaaaagtctcgtctttaacatatgtatactgtcatatcctactgctgagaaagtagagagaaataatcttcatcaaaaaagaaaatagagataaaaaaaagctaaaagcctagaactccacttttcattttccaactccccttgttacttttccatttccaactccaagcctatgaaagctgaattctcaacattttagctcgaagtagtagaaaacacacatgttaggagtgcaggcatggcgcatggtatggttacaaagaagttatatagtacataattgatcagaatcagggtttaggaatgacactcgacttgttggactgaaagacgggaacatcagaagttgatattaactaattaagatacctaagaaaccagcatcagaagttgacattaactacttctaccgtgcggggacaagca

SEQ ID NO: 95012 - DNA, 4359 bp, Cannabis sativa
ctaacaccccccctcaaactgagcatggatagggaaaccagactcagtttgcctttgagacaagtgaatcgagcattggaaaggggcttggtgagaacatcagcaatttgatcttgtgcaggcacatgtttcacgtgaagttgcttgttgaggatacgctctcgcacaaaatagaggtccagttcaatgtgtttggtgcgagagtgtaacacgggatttgctgacataaggactgtactttgattatcacaccaaatggtgggaggagaaggctgaggtagatgaagctcactaagcaatgactgaatccacactatttctgcagttgcattagctaaacttcgatattctgcctcggtactggatcgagacacagtacgctgctttttagagctccatgaaataatgtttggtccaagataaatacagaagcccgtagttgatctgcgatcgtcaggatcagatgcccaatcggcatcgcaaaaaccagtaagaggcagagtaggagaggcttgaagcagtaaaccatgatccaaagtgcctttgagatatcgaagaattttcttgacaactttccaatgagtatctaaaggactttgcatgaattgtgagactttgtttactgcataagcgatttcagggcgagttactacagcgtactgaagagcaccaactatgcttctgtactgatgaggatcaggaagaggatcaccagtgtaagcagaaagtttttcactactgaccattggtgttggcaggctattggagcagtccattttggtcttgcatagaagatcgatgatgtactttttctgagacaaatgcagaccagaagtggtatgatgcacttcgatcccaaggaagtagtcaatctgacccaagtccttaagagaaaaagagttgtgaagcttctgaaccagatcagagatgacagaaggagaacttcctgtaactaagatatcatcgacatacactaacagaaacagagtatgagatgaagtcttttgaatgaagagagattggtctgcctttgaacatgtaaacccaaatgagatcaaagcatgtcgtagtgtatcaaaccaggcacggggagcctgcctcaacccgtagatagctttattaagtttacagacatgctttggaaagttcgaatcaacaaaaccggggggttgcaccatgtatacttcctcagataaatccccatttaaaaacgcattattgacatccaattgtctaatgctccagctcttggaaagagctatggtgagaaccacccgtatagtagttggtttcacaactggactgaaagtctcagtgaaatcaaaaccatactgttgaagatacccctttgcaactaatcgagacttgtgtttgtcaactgagccatctggtttatacttgattttgtgaagccacttacatcctatggctttcctgccttcaggtaatggaaccagtttccaagtatcattgttctttaaagcattgatttctgagttcatggaaggattccatataggagactgtaatgcttctttgatggtcaaaggggtatccgaagtgataaacgctttaggtttatatgtaccaactttacctcgagtgatcatgggatgattgttttgcacacagggagaaggtgcaggtgatggcattatgagtggggaaggttcaatggaggtagtcgggttaggtgatggttgttgagtatggtggacagatgagagatgatcagggggtggggtaggaacaggaatgggagtaggtgtttgtggtgatggtaatggtgtgtggtgcggagaaggtggtgcatcaggtgtatggttgttttggggaggtttgggaatgggtacagagggcatggtattgagagagacatttgaactggatgatgagattgactcttgagcaaatgggaaagaatattcatcgaatataacatccctggagatataaatcctacccgaactggctaaacacttgtaccccttgtgtttaagactgtaaccaagaaatgtacatttgacagacctaaactcaagtttgtttctattgtatggtcttgtgttgggataacaagcacacccgaagactctaaggaaagagtagtcaggttttctagagaataagacttcaagaggagtctgattctgcagaatgggggtaggaagcctattgatgacataggcagaggccctcacaacttcatcccaataggataagggcattgaagcttgggcaagaagagtgagggcagactcaactaaatgtctgtgctttctctcggccacaccattttgctggtgtgtggtggggcatgagagtttgtgactaatgccatgctcatctagataagactcaaaactttgaaattcacccccatagtcagactgaagagcaagaattgaacaattcaattctttttcaatctgtgttttgaaatttatgaaggttggaagagcttctgacttagcttttaggaggaaaacccaggtatatctggaaaaagcatccacaaagtggatgtagtacttgtagccactcgatgacagatatggagagggtccccataggtctgtatgaagcagttgtaagggtctggtgtacacggtttcagatttggggaagggaaatcgatgaatttttcctttgcaacatgcttcacaaaaatcagtaggcattttattactatgaggtatgttacaagcattcagaatatgagagacaactctggcagaggggtgaacaagcctcttatgccataaagagaatggtgtaaaattggatacatgagaagtgggtgtagtgactcccacattattgacagacaatgctacagggaaaacaacagacttagaatgagatctagtgagttggatctgagagggttggatgacatataacccattgctaagctgtccttccatcaacactgccttggtagcctgatctttcacaagacaatggttagggtaaaacacaaaataggcattgttgtcagctgaaaactgagatacactaatgaggtttttagtgatgtggggaacatgaagcatacgatttaatgtaagagtttttgaggaatggggagtagagaaaatagtcttaccaacattctgtatggtgagaccagtgccatctcccatatgaacttgatcattaccctggtaaggagtttgttgagtgaaattgtttgcatctgcagtacagtgagttgtagcacccgagtctggataccatgcatcatcaagtagtgtctcagcagtggctatattgacagattgagaccccacattagctgcacctactccagggaattccatgttaaaacgctgataacatctagaggcaatatgacctgtgcgagagcagagttgacagacaattttcgtgcctgcagcaggtgcaggaggttgcatggatcgagtagggcctggtggtacagaaccagggagattcggtgcacctgtggatcgaggagcaacagcatatggattccaagaaccgcgtccacctttcacaggaaagaattgttgcctgggatccggtgttgaattgaacattgaaggagagtttcctcgaccacgtggtgtgcgattagttgcaagattaacagaatcgagttctttgtgattgctatccatacgatgctcttgagatagcagaagagactcgatttcagccacagtgtaatcagtgtttcttgaattgacagaaatgatgaaagtgtcgtaatcagatggaaggcctttgaaaatggctgaaatgtgttctttaactgtaactcgatgacctacagagccaaggcgatcgactaacgctttgatgcgaagcagatattcattgattgagagacctcctttcttgcaggtctgcaattgattagtaaagaaatcaatcttagcagaggtttgagtaacgaagtatacctctaaggtgtgccaaacttgagctgatgtttcagctccaacgatgcgagttaagatgccgtcgaacatggaagagagaagccacgagtagaggagttgatcttgcacctcccattcagagaatcggggatttatcattccattgagtcgatcgtcattggataggaactgtggtggaggttgaatagcattggagatgtactccgagagacggtgaccacggatggcagaaagcacctggggacgccagagtaagaagttgttgtcgtcgagtttaacggagactttgtgtgagaaaacaactggattagccattgaagaacagcaaaagcttcacagaaacgcaacgaagagcaatcgaagacgatgaacgaagatgcggaagcagagaagaaaaaaaaagatcactggcttgataccatgttgaaac

SEQ ID NO: 95013 - DNA, 914 bp, Cannabis sativa
ttgagactacattccccacaatagaccaatatttatggtaaaacattgctgacataccatcacttcctgggcttttatccggattaattgttttgagagcattgtaaacatcatcattggtaaaaggtcggagcaaagactcattcatatcagctgttactgttgttggaatggttgagagagtgtgatttaaagcctcatgatttatttcagatgcagtaaacaagtccccaaaaaaagttgtgattacatctgtcataccatttttggaggtgatcacagtcccattgttgtcaattagagatttgattgtgttatgctttttgcgagttgacgcataggcatgaaaaaatttggtattttgatctccattttgcaaccaatcgactctcgaacgctgctgccaatatgtttcttcttgagctaacaaatcgtcaagaatattttcactttgtttcaattctgccatggcaggtatgcttcgatcaacactattatttaagtctgcaactttcttttgagctttagaaattttcttcttaatgttgccgaacttctgtctgtgccattgctgtaaagaatcggagcacctttggagattatgtttgaaaagtgcagcagcagtttctactgaatcttgctgccagttttgctgaattaaacttgtagcttcatcctcttgtaaccaaatcttctcaaaacggaatctggtgcgtcttatgggctgctggtgtgatgcattgtgtggcagaatttgaactgcaagggcacgatggtctgatcgataatagtctaggtgatgagtagtaatgtcttgaaaagtctcatgccataaggtattgacaaagcaccaatctaaccgttccttgattgtatcggctgtgattctacccttaatccatgtgaatggatct

SEQ ID NO: 95014 - DNA, 1031 bp, Cannabis sativa
  modified_base (240)..(240): a, c, t, g, unknown or other
aaaaaaaaaaaaagtaatcaacaaaaaacaatgtgtagggtataaggataattatataaaatactattttttgtaaatttttatattttaggtttgaagatctttttttatatatttttacggttttcttagaaacaacacgcaaacaataaaaaaattatataaaagtaacaggaaaataatattcaaataacaacaaaaaataacatacagagaataaaaaatcaacaataaattaanaagagtacaacataaaaaaaatcgtatgctctataaataaaatcataaaaattataaaatattaaaaattctgtacaattgtactgatatatatatgtcagcctatttcaaaaaaattattaatttttaaaataaattatcagtgtgtgtaaaactattacataataactaatattttaataatcaataataatttcttaaatgttttaatttttacgagtgggatgtaattaatttaaatatttaaacataataaaacttgaaaagggaaagagtaataattgtgtagtatcatatatatatatagatacatatatatttataattattaaataataaaaattaatacaaaaagagaagagagcgtagaaaataaagaaaaaaataagctaaaattgacagagtaaactgaagagtctactttacagactgaagatatctcggtatgcatgtttgagataacttacaaaaactaatagtattttatcaaataaaatagtgaaacataaatatgtaaatagtttaatatttacgctgtagaatgcaaatatctctaaaataatataacttgtaaatatattaaggtttatgatatattagcttatcctaatatttcttcaccataattttgtaataaatttagagagtattattatttagtataattctaaaagtagtagttgaaaacaaatagagattaaaaatcaataaaatttaattagttaagaatgaaatttatttttagggaattaccttatatactatttttttaacttttttttcaaatttac

SEQ ID NO: 95015 - DNA, 691 bp, Cannabis sativa
acaaatttttgggaccgagggctacaactgctgttgctgttggagctatctgttccccctgaagggcttgtgcatttggagcttgtattctaggagcttgtggatgacctactccctgaggaggatttatggctccatgctgtcctggaatgaaaagttttcgatgtgcaactgcctgtccaggatatatgactagaatccttacccaattggataagtgtccattttgtactagtccatcaatttcatcttttagatagtcacattcatttatggtgtgcccaatatcatcgtgatattcacacctcttgttcggatctcttctttttttttttctgtccttatacattggtagaggcttcttgtaatgaaccatgttaccagtttccttgtacatattctattagacttgtatacttagtgtacctcgattcttgggtctttcccttctttgcacaatcactctggtttggaccctttgaactccttttactctgtggctgggttatatttgacactggaacttccactttttggttagtttgtctaggagcgacactatatccaatttgtgtagctttgaatttgaaaaaactagcctgggcagtgggctgcaaagaagtatctggtccatataccgtaggactagtaaacgcagttggtggagggtaaatttgtaacaccctaacta

SEQ ID NO: 95016 - DNA, 552 bp, Cannabis sativa
tgttatgagttttactctcttggttatacctgctactggattttaccaactcatgcttgattagcttctacacccttaattttgtgagtaaaaaaactacacaaattttacactcattcgtacaacaaaatattaccactagatatcatcaaagatcatcaaagacaacataaactataaaccaaacaaatataccaacaaaaaaaaacaactgaaaataatttttcatttaagaagtaacaaatatttgactttgtcctagtttttttgtgctcatgtgcatctcctaacccatcaactaataaaggtatagatacaaaataaatttgaatgaaaagcgcatacctctttctttactttgagttatatattggttggcataacatatcactattggaattaaaacataaatgcaacaataacaggatttttgtctaactatttccatgactaaaatagttctttaattctaatattaaagcaaaaagggtatgtagcacaccattttacaatcacattatacaaactaaagaaaatgataattataattca

SEQ ID NO: 95017 - DNA, 788 bp, Cannabis sativa
ggagcacaataaaaacccgtcgtcaagtagtaatctatttagcctaaaagagacacaaaagatcaattatatgaaacttacacccattttggatctggggtatcgcaatctgcacaaagttgatttccgtcttgttgcaagaaattttccatcctttgttgtgtacctgtaaaggatgatagaaatcagaagtgatccagagattgctttaacattcttaaatgatacattccgaagagtataaggagacatcatcattatgataaaacacgcaaatgagagcaaatgttaggttttatcaggtgattgatccttcctgttattccatttacttcagaatcttaattcatttggtatagtctttaaagaacttttattatattgcgactcgaactctgcaaagacttgaacagactcaaataccaccccatgaaccttatcaaatgtttagaattttgttacatattcatggaaatagcataaaccctctgaattctacctcaactaacgaatgatctttgttattctaactgaaaagaggaaacaataagtttgaaaaccaaaaactagaaattgtcttataaaaattgctatgaggatcaaagtaccagaaaatgccgattaatcattgtggtactttcaacattctgtttctgaacataagagatcatacaggcaggcaactgatcctacaaatgtaacaatttaaatttcaattcactaactgcacatacattttttgccataacagcaaaaatgtacaaccacaaacaatatgaaaaaccctt

SEQ ID NO: 95018 - DNA, 507 bp, Cannabis sativa
tttttttttttttttttaaaatccttttcatccttcatttttataaaataaaatcttttaaccaatgttagcattgttattccatgaattttccctttatatatctgctatttattatttttcttatttccctattttctacctatttgttaattagttcatttcatcccttcatacatacataatatatttgtatgttcttggtgttgtgggattctctcgtctaatttgttttattaatcatgttattgtttaaatttttctagtattcataatttcgcccttcatgaaaaaatctattggtttcattattgataagttgatttcatgtacagtatatgtgtactgattttttttttctttttctggtctgcataatatttaatatatgcgcaaataaagatatatatatatatatatatgtatatatgtatttaatatatatatatatttttctcatcttttgtaacttttctataataaatttcatgcataaatattgcttca

SEQ ID NO: 95019 - DNA, 1339 bp, Cannabis sativa
tgtgaaatgttctacaatgggagcggaaacatcaataggtgtttagaaaggaaaaatagtttcatttaatagaacatctctagacatgtatattctaccattcttagcaagacatttataacctttttgagtgtgatataacctagaaaagtgcaaagagtggatctatacttcatcttgttcctattatagggtttaaggttggaaaaacataggcagccaaggttttaagagtagaatagtctggttttgtatgaaatagagtttcattcggtgcgaaattgtttaagtttctagttgacattttgtttattagataaacagagatctgtaagcctaatcctaatacttaagtggtagagaagagtgagctagaggagttgaattagattctactatatgcctatgttttctttcaactgttttattttgttcatgagaatgtggataagaaaccctatggataatgccacatgactcaatcacagaagtgaaagttctaaatttctctccccaatcagattgtatggcttttatttgataactcaatttgagttttgaacttaataagtaaggcctcatctttagttctaagtaggtaaactcaagtgtacctagaataggcatcaacaaaactaatataataactatacccattagaggagaccacaagggctgaaccccataggtctgtgtgaagcaattgtaagggagcattataaacagtttttaaatttggataaggaaatttgtggtgtttaccaagacagcatgcagtacacaaataaaaagcatttttattgttaggagagatattacatttagccataatagattgtacaattttcttttttggagaaatggcctaatcggttgtgctaaagattaaaattggagaaagatacattaaaattgtgagtgtggcattgaaatttagaggttgaagaggatgcaccagcaacaataggtgaggtggaactggatggaagacttctgtggagaggttgatcaaacttataaaatataaagtcctttatcaaccctcccaaccaataaagtctacataatagcctgatctttcacagtaaaagtgagggtgaaattcaaaatgaacagaattatcttttataaattgtgaaacactcattagatttttggtaatattaggaacatgaagtaaattgtgttagggctatacaaaaaaactcgtaaactgcccaaactgaataacccacccaaatcaaaccaggaaaaaccaataaaaattacaaaccgaaataacccgaaaaaattacaaaccccctaatctgttaattgggcgggttgaaaataggtccaa

SEQ ID NO: 95020 - DNA, 1697 bp, Cannabis sativa
gaggaagggaactgtttgcatgcgtgtttggcggtgttggacgatcatcatggaccggtttggagagtaaagattttgcccgaggaggaaccggagccggagacggaactggagaataggagtgtttactgtgattgtggtggtgggtccgagtatagtagtgagttggatcgaaacgattcgaggagtagtaataatcagtattattacgagaataataatacgactagtcctgttttgtcaccttcttgggttcatgttaagaaaagtgcgcaggctacctctcgtgggattctacgttcgacttctccgaccgaggctcttgcggaggttgagatggttcttgtgagagctgcggttcatggcctggccggttttgctccggcgggtttgtcaagattgatgatggtgactggtggatctcgagaagtggggaggggaagctgtttggctgtttggttccccacgcgtgttggtgggattaccatttttgttaatcccttgtgtttgctttctggcatgcatggaaagggtactattcacgtaccttattttcttaatgaccgtttgaagtttaatttgaactttagtgagtggtgtggtgtgggacccgaggtggaggagtcttcaatgctgagttggcacttgatttgggattgtaatatgcatttttctgggcctgggagcttgtgttttagccacttgtgtgggccggttttgtggttgggttttattgttttacttggccaattgggtgagccttcttccaattttgttgggcccatggggttggctcctaaatttggttcttttggtagtagtggtcagaggcccttggccgtgtgggtgatcaatacccttcttcgaatgagccacgttgtgggctcattggttggctcattgatgggtaatgttagtatttaccttgttaaggagggtagtttttgggcaaaatttttcaaacctcatgtgatagatgttagagttcttggaaaatttggtgagcttggcctccttaaaattcgtacgttttgcgggatttttgctgccggtttggttcttcggcgatttgattgcaattctccgctcatgaggaggaagcttgttgaaggctcgacaccaatttgttctagtcatttgaatatgatgtgccataagctatttcagagacaccagactgttacccgagaattcccttgggtcacaaaggaacaggaactagatagagcatccaaaattgattgtgaagacccttctgaagttttttcagattccttgtctctctctgacggtattgtgaagaacccgcttattgattcgttggtgattgaagaattcgactctggctcatctgtccactctcaaacccctgtggaggagaatgtattatctcctccacaggagccatgagaggtgtagcatggaactgtagagggttagggcagacctcttcagttctagagttaaaagccctgattcggtcgtgcaatcctgatttcattttcattaccgaactaaaagtggatgcttcaagtctggtacgttccctaaagaaaattcacttttatcataatattgtagtgccagcagtgggatgtgcagggggattaattttagcttggaaagagggctttgaatttgaaagtattaatgtttctaaaaatcagattaccggttttgtgtactctgaccctgta

SEQ ID NO: 95021 - DNA, 528 bp, Cannabis sativa
ctagtagacgaacgagatcaataatataggaaggatcctcaagtggcaaaccctttgaaagaccgaaatgctggccagagatcctattaaatgggatttcaagcgagatgttaatgaagataaaattccagaaagatggaatcgcggtgcttacgatccaaactgctatgttccactggtggagttagaaacctaccaacttcgttaaagattggccaaatctaactgggaaaatataaatttagaatgcaaagcggctgcagtaatagcaacacaaagaaacgtacctcctgctcaatttggccagccgacgaggcatcctcgaggaagacctcacggttcaaaggctaggaaagcatcatgagcccctttgataatcagaataatctaactgatcccccaaaacgacaactagagtacatgagaaagattccaattgataggaaagggccctagaaccctaggaatcctaatatttattaattacaaaattacaataaaaagttatttatcttatatttaatattt

SEQ ID NO: 95022 - DNA, 519 bp, Cannabis sativa
aatcaatagcagacaatataaatattctgaaatcaatgaagaagaaataataaaaaaaaggaacaacagaggaaaagtaaagaagagacgataaaaaaagagggtggaaagactccatgacatcatttaatctgacctatcttacatattctaatccaattgacatattgaagcgacaattttaatttatcctatttgtaaagataaataatttaacagagaaatattaattgatttggtggttgaaagtccaatttatgtttgtgtttttcacaaacgtggtgtgctgtcattgattttttctgtgtcgcttaactgtgaaaagagagtgtgccgcattgtaaattttctctatatataactaggtaatatagttgctcttcgaacgtctgttataatacttttcaagtatgataacaaaaaaataattatttatgaatataataattaacaaaataaaatattattctaatatataataacattaaaattacctattgataataataattctattta

SEQ ID NO: 95023 - DNA, 523 bp, Cannabis sativa
ggttgttggtaaatagattttgttctacagtatatttctattttattgtatagtatattattattctttgataatatttattttttattatgctatgtattatactagtatataattttgatagcataatacaaatattttaatgtatgtatgtaattttagaataattctatagtggtgactatatttttgtctctatactatacatataattttttaaccatttatctatatgacttttcaaagtcaacattgtgtaacatgtatttgtctttaagttactaaaatttttattttgaaaaaaaaatctataccaaattttaaaaaaaataacaactaatcaaatttaactttatatttttttttctttaacaaaaccaatttttaatcatcatcatcttatataaccaatttttaatcatcatcatcttatatagccaattttttccattccccctttttcatcatcagcatcaccttcaaaattcaaatcagtgccctttttccattctccctcatcctt

SEQ ID NO: 95024 - DNA, 505 bp, Cannabis sativa
tgatgccatcaatcttattgttggatagcaagaaaagaagttcttccttccaggtgtttgtgaaagtctcttaacagatatagttcttatttattgtttctgtgaaaagtggatttaagaagggaatcaatctctactaatagattgattattgttctcaaatattggcagaggcttttcttgcaggcttgcatctagtaccctattatatgctcctttagttgttatattgcattgtattattttttattcttatttttaacaattttttatgaactttatgaatattttagtgctatacaactacttcttcccataatttttttaatgtgatatatgctctttgggtcgtattcttttattgatatatgaaataggttttgaattttatttcttcattcaagaacttgtgatgatgtctcctaatcttttttaaatgctactgcctcttttttgttttgttgcatagagttaattaactactataacttcacatcaatgttaa

SEQ ID NO: 95025 - DNA, 855 bp, Cannabis sativa
gcaatctatttcaaagatgatattatcatactcaaagtaatgacaatgtattatgacatttcaaagtgccaaagcctttgccacttcaggattaaaacaacctttcaggcaccaaacagcaaaagcaagaacaataatcacgcaccaccataccaaggccacgataagcaccaattttatcaatagcatcatcattgttaaccttgatagactcagccagcggaggaaactattttgaaacaacctcatcagaaggcaaagaagccgcttgtcccaaagagagcggaagcccagcctgagcccgactatgttggaagttccaaagacatttatgagctcgattcaccaccaagtcaagaggcaattattaatgttattatgcaccaatttatttctcttgaaccagatacgccacaaaatgacaataactaattcaattttatcctacggcaaatgatcaataacattgtggataaagctaagaaaatttgtatgagtagaaaaatgattacttagatcaaaatcacaaagtttcatgcaagccattaaagttggacaccgctacaaagcattataagtaatctcttcatggagctagcaaagaggacaaagaccatcagataagagaccatgagtagccaaattaattttcgtagaaatccaattagagaatgcttgccaaacaaacaatatcacctttggagggatattcagggtccaaattttttccaccaactcgagtaccccctagagggagaagcacgacccaagcccttggtacaaagagccaactggtaaccactcttgacagagtgtcaaccagactttttgaaattttaaatgagtttgtcatct

SEQ ID NO: 95026 - DNA, 539 bp, Cannabis sativa
caacctcaaaagaaaaagaaagggacccatgcttcacgataaggggatcaaactgatcctagaggtagagttgctgagaaagacaaatttgatgctagagccaagaagcctactacccaaaaggacacaaatcattgtgatgattctgttagttgaagtgatgatgtcaaaaatgtgtatccattgttagatgaaaaaagtggaagtctttccacgaatgatctctagacaaagctgacgtcaaaagagtaaaggccaaaactaagaaagccaaactttgtagagatgacctaagaaatcatatcaacgatcatatttgtggaatagaatcacttgatgctatgacttaacgattggagcataaaattgaagagttaacaaagctcatggaaaagatctcccagaagaaaaatggaactgtgtctaacttggaggagcaagacacggaaccgtgtgtaaaaagaatcatagattcacaattgtcgaaacactttagaatgccttagatagaactgtatgatggaagagcagaccccatg

SEQ ID NO: 95027 - DNA, 501 bp, Cannabis sativa
atagaatatttctctttttgttttatgttttcttacttttaaaaaacctgcaaaattgtttgataaggaattagtaagtttttattcttgattggactagttgtactttcatttatttttcaaataaacaaattcaccaaattcatctttctgaatacaaaaataaattaagtgaattagccaagagcattagaattattggaattgtaggagtggtttttgttttgttttatttttatatattggaattattttaaaagtaaatgagattctcgttattttaaagagtacttgattgtgtaacaagtaataagaattaaaaataaatatatgatttagtactcttataaaaaaaatatgttagtggtccagaatagtacatataataaaatgatcttatataggatagaagagatgtttacttgttattgaaaacatacagaaaaataagtgtacggatgatcattaagaatctgggagtctgtggagattgccataatg

SEQ ID NO: 95028 - DNA, 516 bp, Cannabis sativa
atctgacaatgtcacattgtgcaagagagggtgtagaatgttatatgttaagcaccatttattttagaaaaaattacataaaaaatttacatttttacttttaaaatttttttatatatatttttacggtattctataaagacacaaaaaaaactaaatgaaagtagtaagaaaaatatattaaaacaatataaaaagtaatatataaataataaaaaaatcaataacataaaaaaaatatatcaaaaaatcatattttatgtaaataaaatcataaaaactctataaaattatatttttgtaatattttgcaattatttttgtgtttttttcctaaataattatttattttatagatagtatagaaatttactttgttaaatttactcttaattgaattggtaatagaagtaactagggctcttttttttttgtagcatccattattcttagtacgagaattgttcatactttaaaaataaaattaaaataaataagaatataatataattctta

SEQ ID NO: 95029 - DNA, 515 bp, Cannabis sativa
tggtggcttgggcgatttggaaggctcagaatgatattgtttggatagataagacttcttctacattggaggttattctgtcagctagaatggtgcttaatcaatggaaaagtgctcaagaaaggaaattggccgagcattatttattcatgggtaaataatatcttagagaattagactaaactatatttaaatacaattaagataaatattaatggtgcaatctttgattccaaaagtcttttcggagcaggtggggtagctcgagatggtaatggtcgtttagtggaagctttttctacaaattgggttagttgtataatcaactcgctatggcagaaatagttgggattaaggagactttgagttggattaagcgtaagaattggtaacttattattattgaaattgattgcttagttgttgttcaaacaattcatagtacaggtgcatatgtcatcttcgtttggttcttcagttaattaatgatcataagcttcttttagcttctttaa

SEQ ID NO: 95030 - DNA, 547 bp, Cannabis sativa
tctaaaaagttttaaacaccacttctgtccaataataatgttatggttagtaattatttatgttgtttaataaattaaaagaaatgttaaggtgcataatttattgttattggtgcaatttattattttaaataaactttagagaacaagagagaaaaatagatcaaggtaaacaaaatgtattgcatttaaatgaattggttgaattacactgatagttagtttagtctttatatatataaagagttagttagaacagagaattagttacaatgacaacctctaataactaacacccaaaatagaatctaacaactaactaacctctaatcctattctcaaacaaatatcacatatttttttattaatgctaactgatttcacttataatgtctcatattaatataatgttgagcacttttttttttttttgagtgataataatgtactaaataataatgttccaatattaatattattaaattaagtataattgacccaatattaaattatattataaggtgcatctatctattgtggtgctagt

SEQ ID NO: 95031 - DNA, 804 bp, Cannabis sativa
attggtgagagctgggagagcggttgtgtctcgccataaacatgtagggggattgggcttctgaagtttagaagactttaatttggctcttttgggaaaaaaatattggcgtttgttggttaatgatgattctttgattagtaggctttataaggcaaaatattatgctagtggtaatctattttctaatgaatcgggagacaaacctagttttatatggtgtagtattcttgaagctaaatatctaatctatgcctgtgctcaaagaactatttctaatggggaaaatgtctccattcttaattatccttggcttcctcataactctaacagctatgttgtctcacggcaccctactcttgtgaataagtcggttagctgcctctttcaagtcgatactcgcgtttgggatgaggatgttgtgggagatctatttgtttcccgtgatcaggatcttattttgtccattcatcttagtgattcagccgctaatgatggttggagttggagacttgagacttgtgggaattattcagttaaaagtgcctataaattcttgcaagaatccaagggtgcttggtctcgagatgccaatactgatttttggaagcagctttggtcattaaaaattcctcctaaggtcagtaattttttatggcgagctgcttcgggcgtgcttctagcttgtttttaacttcaaaagcgtcatgttcgcgtcagtgcagaatgccctttgtgcaagtctagtacagaaactatttaaaatgcgttggttgaatgttcgtttacaaaagtagcttggaa

SEQ ID NO: 95032 - DNA, 505 bp, Cannabis sativa
tgttaagttttattttatttcaaattttttaattccccatgaaaacgtgaaatatttaactattctaccctaagtaattaggggcaagtcattaaaataggtgcaaaagtcttaataggtatcaaggccaacaaactgtaacgcatcaacactatatatatcccacatgaaagagctccacattaaaactaagtgaaattgacttattcacccaacaaaaaatctatcaaaataccttaaatactatcattctctaagaatctcaacacatcaaataaatgtgtacacctaacacaatatcattcacactaacacaatctaacagtgaaactattttcatttcagatgaagagtgagggtaaacaaacataaagagtgagagaaaaataaaagttctaaaaaatcacaatcccaacatattacaattaaaacatcaaataaagttgaaaatgagattgtacatcccccattgtcgtcctccatcgtcctttcgatttctgagtac

SEQ ID NO: 95033 - DNA, 2415 bp, Cannabis sativa
atctataaatagttgtaaatctttgtaacctatgtgagaaacataccaaatttgcgtgagtgaaaatcgtgatagtgtaaggttgagtgagagagtctaatttagagagagaaaactttttctcgtaatctcttagaatttgtaaagattcttgtaacattgtaaacactaatatgaataaagatatggttgctgttgttcctactatgatgtagagcattgcacatggctcgaactcgttaaacttggtgttattcttttctgttttactgcttaattcattgcttaaatctcgagatctcttggtatattattttttgattgtgttgtgcgtttattggttaggtaaactgaatcgtaagtcagtgattgtttttagttcgcacaacacggtgctaatggcggagctcttcgttatccagatgggtcttgagctggctcaatggttgaacctcaagcactttaacattggctctgaatgttcaactccaatttaattagaggctacaaaggcttgacctggacttgacagattggggagactctgtgaataataccactaataggtacagttgcatcatggctgctctaaaatgttgtgttcctcgtttgtgtaatacattagcaaattgtttagtcaattggactaggattcagagagcaaactcttaatatctctcttgtgctgctgctgcaatctttagtgattctatcacttttattcacaaatgataaaataaaagtgattcattcaaaaaaaaaaaaaaaaaaccaattcacactcattattatttgctggagaatttatccttgtttaataattagtaaataactttgagttaattagttactgtaaattaatggaccaaatcatgattagctgtttgatgaaagtaataaatttaattaaatactgaatgagaaattaattatatataaaaactaatatgtatgtgtgaagaggagacagctatagctgaaaatagtaattaccctaataaaagttgatgaaatggagagggtgagctatcacgatctctttcattatataactcgacattttggatttgggctaacaatattatactcagattcaataataataacatatgtaataatagtcaacaaaatttaatcagtgtcagaacttagaatcttgatttttttttttttttgttgttgacatgattatacagtttttattttgttggtgaaaactcacataattgaatagataattaatcaattaacaatcttgatgatcattgattaaatagtaaaaggaaatctagcaattgcataacaccattctcaatctcaactcaaatcattttcataataatattcacatacatcacaataattttatccaaacattaataattttcttttaaattcctctcattataattcataatagagatggccataccatacaattatggtcccaaaaaaataaaagaatcaaaaaatagaccaatagtaaaggagggagtggccaacaattgtggctgatctggaccaaagcaaatagtcctagtcctagctagccacgtgggacccaagtcatcagagatgacaggctaggtcacatggtgacgtggcacatgaatattttttaaatttatttttaattaatttaatcatttttggtggggtttagggcacaagagattgtgggaacagttccttaaggaagggatagaagagaagagggttgtgtttgtgtgtatgtgtggggcaaaatgaaaaagaaagtttgagtggctttaagacaaacccatctggctatagctttggctattctctctctatatatatacatctacattcatgtgccctcattaatcaatgtgggtgaaataaaaagcaaagcaaactcccaaaaggaaaaagtatacatgattcttgtgccttacgagagtcactgtattacagaacaatacaaacaaatacaatactctcttttattttttattttttcctagtatgtaaatatcatatacattttatggtttatatttataatattttacatccttataaatacaaaataaaaaaatatttttaaagattaccaaattacatttgcatttatgaatgatatataaaccatatactaaatattgatcgatgcatatattcttcaaatcaattgtaaataaattatatgacaaaaaacttattttcatcgaattcaaatatttttttaaaaaaataaaaaataaaaaatcgatcaaaaaatttcaaattcaatcaaaataaactttttttcatattttatttacaagctcattgatttgaagaatgtgtgcatcgatcaatatttatattgttatattaaaattataccgatatacacattattttgggttattttataaaatacaaagtttatttcttatattaaaggtc

SEQ ID NO: 95034 - DNA, 615 bp, Cannabis sativa
gagagagagagagagagaattttgaaaagtttatatggaattttctctctatattttgttaactgtatgtgtcgtattatgtattacctatatatcacatatatatcgtatttcataattagatatttaattctttaaaataaaaagaatatattatatttaatttaaaattcaattcaaatataatatcgtaactgaatatctaaattcaattaattatttattattttagaaattttcttatcttttcttgagctttggcctatcattttttcttttttggccttagttaaagcaagattgcagtattctcgtgcagtcttttgattgcctttcagacaacctactctatttctagttagaaattcgacacacagatggtaaattgaggttaattactaccttcaaatcatataagagtgatcgacctaacatgatactaaatgcaaaaggtacatcaattggcaaaaactgtactatgattgtataagcatttggagctttccctactgtgagtagaaggtgagtgtgtcctagaagagctataccttggctagagaaaccatatacgagctgtgtgtaaggatctgggtctttgagttgaagccccatctt

SEQ ID NO: 95035 - DNA, 1452 bp, Cannabis sativa
  modified_base (405)..(407): a, c, t, g, unknown or other
  modified_base (1140)..(1141): a, c, t, g, unknown or other
taattataaaactttaaaaaagtattaaagaaaattttaaaaagtaaaaatgttaaaaattagaaaggataatataaatgttaaaaattggtcaaaatagtcattttgcgtaaaaattcttatttaaaattacttgtaaatgtttaaaatattttgaatagtttatagtatttttagtcgaatttttcttcattgtgtttgttattatttaagtttatttgtaaatttttttaaaaaattaaataatttattgtgtagaaaataaattttaaataattatttattatatattaaaaaaacagtcatatttgaaatttattttcggtactatttagatatggataaatactattttggaccttgtgttttgtaaaagttactgattggactttttgttttgttaannnacaaaatggaccctgtattttccaaaatgacaaaaataggacactgagtttaatttttggcaactttttttttaatataagacaattcctattacggacaaatatagaaaatgtaaacagttttgtcatagcacttttagatcggattataaataaattttattttgataaaaaaattaattaaggatcttatttgtatcattttaaaaaatacaaggttcattttgtcatttaacaaaactctttagatatttagtcgtatatcacctcatagtaattgttgtgtatgtggttgtgagaatgatactattgcactacattttttttacttcacttttttcacaagatatctgaaataatttcattttgcatttctattaagccaaaacgaagatgaggaatttaaagaggtaatctttatggatggaaattctggagaaggaagctgacaaataaatgctaatttttttattttttctttcgcagtgataattaaatattaattacaatttttagggttcgtttggtacgtcgtattatattgtattttattgtatagtattatattgaattgtattttatgcaatatttttatgtaaaattatatgtggtattaatttttatggacacctaaatatataatattttaggataaattaaagtttaacatagtattatataaaaatatcatatataatctaattcaatataatataatacaatacgacctaanncgacgttccaaacgagcccttatgtgacgtttggttggaggtaatgaaatggaatggaatggaaaagaaataatttttattctatttctttgtttggttgcatttaaaactattggaataccattatgatagaatgactattctattttaaaatggaaggaaagaccattctaatgcaagatttgaaaaaaatttaataattgtttttatcaatttttttatgtattttaaattttattccatttctattctaattttcattagcattcatatttctactagcaaaaaactacgtgcgaggcacgtatact

SEQ ID NO: 95036 - DNA, 4467 bp, Cannabis sativa
  modified_base (4395)..(4433): a, c, t, g, unknown or other
aaattaaatatttttgccaaaaaaagtaacaaacatcaattaactaacaacaaaagataaaaaacaatgatataaaataatagaaatttttttttcaaaattgttaaaatataaataaaagcaagatttaaaacttatttgtgaaaattgcaagtagcactctttgaggttgtatccatgagcaaaacgagtcaacaacatactacaaactagccaaaaatatggtcaaaaaaccaaacaaaatggcacaaactaaccaaaaaaatatggcaccaactagccaaaaagtgaaacactatatcaaaaaatagtagagatcttatcttaaaaaatttggtcaatattatattttgtgtcaaatctagcacaatttttaacatgtgctaaatttaaaccattttatacactatcaaaatttactttataaagatgagtgaaaatatgtgtatacatcatactttttttttttttttttgaagaaaagcatgttattaaatcaaatcaaatcagttgttacaggagcactaataactctaggacaagcatcagtccacaaatgaacccctatagaactagtaaatgactttgctagtgcgtgggtcacaccatttgcatcacgcgtcacaacaagaaccaccaccaacagcagctaaaagagaaataatctcttcaacaattggtttaaacataataatagtatcaagacaattaatccaagagctaactacagaagagtctgtatccactctcaaccacttgaaccccaacctggctgcccacaaaagacccgtacgtatagcaaggagctccgccaccaccacttgaaactacccaactccaccaatagcccatgctgcccaaaccacactctcgactcctcgattaaccccaccaaaccccataaatccccggtcggagtgactgccgcatcaatcgacgatacaaactcacccaacacaggcgggaccaccgtcctcagcaagcctctcgtcccccctcctcgtctgcccctgccccaacccagcagaaccgactcccacaccagaaaaaccagcagcacattcccccaaaacccgacttccagcactcatgcccaccctctgaaactcctccaaaacttccttagctaactcaataatcacttcaaatctagactgcttttttccaaacagaacagagttcctatcataccacacccacaccaaatcactgacaacaacgcaaaattagtctgaccaagctcatcaaaaagataaacaagcaactctgccaaaggcccattcctacctcggtatagaagactccaaacctgaagcttagaccatattggaaacaatgaagagcaaaaaactaaagcatgctctgaagtctcagtatcctcaccacatctgtgacacatcagctgaacaggaatcttacgtttgataagttaggaattagttgggagagcccgatgatatatcctccaaagaaatattttgactttctatggtacctgtaaattccacatcccattccaccattaagattgattcacagaagagcatccattcctgtcactcaccatatcaagagcaaccgcatacccactttttaccgtatagcaaccattagaagtataatgccaacaccactgatcttcacatacaccactccccaacgggataccgagtatgacatttatatccaacctcaaaaaatattgggacaatgtatggatatcccaagactcgtccacactaattaaatcgctaaccatcacactacctgtaagaacaaccgttataggatgaaacgttctaggccggggaattcaaggatcccgaaatgcatcaatactctggccggcccccactaccttccttatccccgcccgcaacaactccaaaccccatatcagacttgaccacaaatgagacgatcattggcgatctttagcctccaaaattgatgtgtgcgaaaaatacttgtacttcaagacacatccgggcaactaattcggcgattggagtaaccgccgaacttgcttagcaaccatagcttgattaaagagcatcagatccttaaatcctaaactccccttggacttcggttgacaaacattctcccatttcacccaagcaatttttctcttatcactctttgtaccccaccaaaattgtagaatgattgaacaaagtttattacacgtcgccacaggtagctgaaacatactcattagataattaggaaccgcttgcagaatggccttaataagaatctcttggccacctgccaaaaagaaacttcgcttccacccccgaacccgtttctaaactttgtcacaaacactagcaaaagtccacttcttattcctcacaataactgttggcaagcccaagaccttatcatgagtcgccactaaccttaagcctaatatacccaatacacttgtacgatcctcatgttgaacattcaggctaaatgtgatagcagatttatcaaaattgacttgctggcctgatgcacgctcataatactaaagaattcgatgaatagtttctgcctccctaccattggctctaccaaatatcaagttgtcattagtaaagaaaagatgtaacactcgaggcccagacccagaacacaaaaatcccatcaaatcaccattcaacttagcttgtcgaagaagggttgaaagtgcctcagcacagaaaagaaataaatatggtgaaagtggacacccttgcctcaaacctcttgtaggagccacacaacccctaggcttaccattgaccaaaaaagcatactcaaccgtagtaacacaatccataatcaaatccacccacttctatggaaaaccaaacttgctcataatttcacgtaagaaacatcactcaactctatcatacgccttaatcatatccaacttcaaggccataaaccccctaacgccattattcttcttaaaaagtgaatgcagcaatttaaagcccaccataaccatgaatagctcgaccaggcacaaaagcactatgaaacgaagatatcagcggagacaaagtacctttcaatctttaagtcgcagctttagccacaatcttacacatcacactacaaagactaataggccgatactccttaacaagcgaagtctttgtgacttttggaatcaccaaaacattcgatttattgaaattctttactgattgttccccattcaaaattgcaaggcaaacagcagtaacacgatgaccaataatatcccaatacttatggaagaaaatagcatgaaatccataaggccccggggcctttgtcgctccaaatgctctaaccgcacatagaacatcttaagcagtaaacagagcttcaagcctgtcacattccgtaggagtaatcctggcctcaatgttacttataccactttccacctattgcaatgtaggagaagcagacaaaaaaattgtgccaaaatatcgctcaatctcaacgacaatatcctcttccgtactcatcttgcggccatgctctgtcataattttcacaatttcattcttcttcttcctaccggtagctttgttgtgaaaatatttagtatttctatctcctagcactagccaatctgcacatgaccttaacttccaatagcactcctcacgggagaaaagatctttcagtttaacctcaagtcgtttcacctcatccattcgaaccaatggtgcagacacactgaggaggtcatccaactgtttctgcgtttctctaaccaacctaggaatcgaaccaaacttgcttttattccacgcccccaactgatcgacacacattcaaaaaatatccagaagactatcttgactagctaaaggaaaatccagagacaaccacgtcttattaacaatttcgtgacatgtagcatctttcaaccaatgagttttgaatcggaagcttctcttcttatcattcgatcgaagcctaatgatattctccagagtagccacaataggcctatgatccgagtgaaacaaatccacattaatgaccttaactgatggaaacaaatcgtgccggccctggttacaaaaatagcgatcaagccgctcttgcacatgcgcaccaccgtgtcttttattaagccatgtaatccaccaaaaaacacttatccagagcttgttggaactcattcatagccgacatgcgacaatcagcaccacccttcttcgtatttatggaaagaatttcattaaagtcaccaccacaaacccatggaaggtcaaatatatcattaagccgacacaataatctccaagattcggatcggcacctagccttcgggttcccataaaagccactgaaccgtcataattccctacctggacacttcaccaaagcatcaattgttgggttttatgcccnnnnnnnnnnnnnnnnnnnnnnnnnnnnnnnnnnnnnnnaatatagatcagaaataacattaaatgttgcatg

SEQ ID NO: 95037 - DNA, 735 bp, Cannabis sativa
cacgacacaatggagattatttctgcaacctggctccatcctccaaccggttgttatatgtgcaacattgatgttgccatgggcgaaaaccgatcagttggtgcagctatattcagaattgatgatggaagtattacccatattcacacaactcgaatcatgcagtgtgatcctttagcgggggagctctacaatctttgctggggggcagtggttgctgccaagttggccctcaaacacgttacttttcagagtgattcaaaaggcgcagtggaagcaatcaagggtattaactccaaagattttggcttgcactataacattacagatttagtggtaagattccatacttctgctaagaatttagatctttgggatgtctgctggatcccgaggaagttgaactgtgtggcacatgatgtggctatatgagcgatccgttcttgccatttcaaggagattgaattgtccaattttgacagtttcctgcgtgctactgcagatggctattgcgagttcttaacgtagggtagtttatttattaatttttgttcagacttcttttgatttaaactgttagtttgttcaagctgttgtttctgatttgtctgtttgtttttgctgccatcttttggctagtagttggagtcggttagtttgttttgctcgcttgaggcaatattaatcaaaacaaaaaaaaaaaaaacaaaaaaaaaaccagaaataatcaaacca

SEQ ID NO: 95038 - DNA, 510 bp, Cannabis sativa
ggtagagaaatcgttgaatctcaacgtccattaaggtataaatttaatctctaattattttagtaatttatactgctttatttttattttggtaatttttttagggtttttctagatttttaagattgtgttattatggtggtgcgtggtggccgaattttagtcagtattggtggtcggattttggtaataaagtaaaaatctaaattttaatagtatatatgtatgtattttatgttttattgaatatgtatttttattgagcaattaaattgtttttattacattaattttgtgcccctaattactctttccttctgaggaaagattccatctcggatggtctcatttggtttaggaaacttcttgtaagagactgaattctcttatggaaagttgtttaactttggaaaatttgtctttccctttttataattgatgatttcaattttgccatgattagaactaggggtgttcacaaattatctgatccaatccaatccgcacgat

SEQ ID NO: 95039 - DNA, 1269 bp, Cannabis sativa
gagatagagaccaatctcggcacacacacgcgggcccgccgagatagagaccaatctcgacacacacacgcgggcctgccgagattggtgtgtcgaaattacctttttttcttgtagtgatgagtcaaaaaaattctcacttgtatacaatgtaatcatccatttgctcattggagatcacacccacaaaattaataatatataattacatattagaaatgtgggccaagtgttcatataaaaaaaatgtggccaagtttattaaaatagacataaataaggagaatttccataaatatgggaatgaaatgtatggtttactttttatagtataaataaataacactatagagttatgagtttttcttatttttttacatttatatgggattttttatgccataattttgtaaaaaaaaaagtggaaatcccatatgtgcaaaacaacaataagttttgccggaaaagtcaatatcgtcagaaaagtcgccggaattttcaccgacgccgaaaaagtaaagtcattggattggaaaaaaagtctcagcagaaaagtaaatgtctcagatataactaaaaatataaccggttctatgaataaaaactaataactcaaaccagttataattgaaatataaccagttctgtaacataataaataaatataaataatattaaataactcaaaccagtgataattaaaatagaatcggttctataatagtgttataatgaataaaaagaaataacacgaaataactcaaaccggttataactaaaatagaaccggttaacataatgaatgcaaacaagtaacacgcaataactcaaaccgattacaattagaaacaaagattaaatcagttcctaaaatactgaaacataaattaaaagcaaaactagttccacaataaaatacttcataacacataatacttcataaaactgattataattttttttaaaagaaaagtggggatcaaatgtcttagatataataaaaatagaaccaattctataacgtaatgaataaaaataaataacacaaaataactcaaacttattataattaaaataaaatcggttctctaaatgaataaaaacaaataacacaaaatgactcaaatcagttataattaaaatagaacaggttctataacagttttaggatgaataaaaataaataacataaaataacttaaactggttataattaaaaaataatcagttatctaacataatgaataaaaataaataactcaaaccgat

SEQ ID NO: 95040 - DNA, 540 bp, Cannabis sativa
gcggggtgcttcgaaatattaaggaagtacaataagaagtttaacccgaaaaaatgttcctttggagtctcctcaggaaaatttatgggattcatagttaacgcaggggacattgaagcaaaccccgagacaatcaaggctttgatagatatgacatcaccaaccaagcctaaggaagtccatgccttaacaaaaaggatggatgcacttaacagattcatctcgaagtcaactgataagtgtctaccattctttaacgtattgcgaggcaacaagaaattcgaatggacagaggaatgcgaggaggcctttaagtgcattaaaaggcatttgttgagacctccggttttggcaaaatcggtaactggagagacattactcctgtatttagctatctcagaagacgcgattagtgcagcaatagtgcgagaagagggaaagcaccaacaacctgtttactatgtcagtaaaaggttactaggggcagaattgaggtatccctgtaacaccctaactagaataggcgtattacgtgatttt

SEQ ID NO: 95041 - DNA, 1603 bp, Cannabis sativa
tgtgtattatgttaagttttcacgattgttttaatggttctgttttgttattttatggttattttataaaatgatagtatttttgtaaaataatttgtgtgacagtaaaattgtagattttttctcaaaatccaacatttttgtaaaaaacccccataatttttcttttgtaattaattctcggcagggccggaccatggagttgaaagaagttgacctaaggccaagcccgacccaagaataaagcaaacagggcctaggcccaaaatcccttaatttgggaaaaaaaataaaatatgtgatataaatacacgtacaacaaacaaaaataatagtgtacatataaattagtaaattactagtcaattttatttattttttataagttttttttttggctgaattttattcttttagtgttcttttcatgttaattttataaagttcgataaaatttaattatgaaaacataaaaataaaaaagatttgtaaaattgtaaaaaaaatatcttaaccttataaaagttaaaattaggtcaaaaataatatttaattattctttgattaagttgagctattcatttaatgttacaataatgttttacaagtactatcaaacttttgaataaatgtcatacaatattattaatgaattagtaggggtgctcataaaataggaataagttgaaaaataccatttcttgtatccattaattaaaaataccttcatattatattttattaaaatatacccacttttttaagtggattgtctaatataccctcactcactaattaagtgtagcatataatttatattaacttaaagggtctaataggaacatcatttataaaagtatgtatatcttaaagaatataaaaatagaggtaaaaattaaaacaaataaagtaaagtgggtataccatgtaatttattccataaaatagttgatttaatccaatctgcacgatccaatccaatataatctgcaaagtacagatatctgcacttgtacagattggattagattagaaaattcacaatccgcacttatgcggattggatgttaattgacatgtaaaagtaactgatctaattcaatccacacatattttttttaaaaaaaaattaaaaaattatatataaaaataatattttaatgtaaagaaaatagtaatttaaaactctaatacttataatacaattatatttcaaaacttaatagatcaaatatatttattttaattaaacaattctttataaatataattttttttctatgaatttgttatttggtattttatttattttaatttattgatgaagatataaaataacaataattaattttattttattactagttatgtgaaaaaaaatatttttttttataaatattaaataaattaatattaaaaagtaattaatctaaaataacagatccaatctctatttttgattattgaattagattgaatttgagctattatctaagatccataaaataaaatctgcagtgggaatttaataaactatgtgcaaaataattaaagtgttttgcgataatgtgtggttttctgcattttataaagggaaatttga

SEQ ID NO: 95042 - DNA, 613 bp, Cannabis sativa
  modified_base (369)..(377): a, c, t, g, unknown or other
actttcttttcctagtattataggtttgagattatctaaacctgtggcttatggtatgcctggtgatttacttactcgggtgcaagcaatttactttagtaagatgctggtccatttttctaacggccacatctatagaagcttctcgacttttagatatagattttatttatctaagaaaaattttcaattattgtagaaaagataaagggcaagaaaaaaaaattccttacgatcaacagtgagaggtctcaaatatgctttgttatgcattagaccagacacctacttttgagtgggagtaatgagtttgtatcagattaatctaggaaaggaacattgaaagaaaatcaagtaaatcttaagatnnnnnnnnngaactatatgttagtcaataagtgtggtatttattactcttagactacactaaatcaggtgtctagagttgccttactgctagaaagtctactgatgagatggtgattactctgggtggagtagtgattttggagaagtgtaaaaactaatctgagtgtcgaactctaccattgagattgaatgttaaagttgtagaaaacatacttattcagtctatggaaagttctatacagtt

SEQ ID NO: 95043 - DNA, 619 bp, Cannabis sativa
aaaaaaacagttcacttagatcacaatttgagttcacggacatgagaagataaaagacaaattttgcttcattattatgttctgaagagtaattaggagtatccataaattaatccaattcaataacaaccaactgattcaattacaattaaccgttaaatattagatgtttaattgtgatcggatcagattagatgttatttttgaatattaaattagatcggatcagatgctggatgaggtgtccaaaaatccaatacatctaacgtctaattaaattacttaatattttcatttagtttgaataagtaatttgattttatattattttacgtaaaaaaaaaacatgtgtatatgaaaataaacattaaaagtttaattttctttttggattggatggatccaatccaatccaatacatactagatttaaaatattagatgatccgatctgatctaaaaaatactagatgtaaaatatttaataaacctaaattactgcaatagatatacatgaaatacattcaatagacaaaaccgatccaatccaacatttaatgaatgttggatcgatttagatgactgaaatgaattaaattagatcagatggtaaaatttaa

SEQ ID NO: 95044 - DNA, 664 bp, Cannabis sativa
tggtgtattatataattttatattattagaaatttgtgtagttcactctaaaagttgttttggtaaccttgtgtctatttggacgtaaataataattgtatatgttttagttatttaagattatttgtaaattttttaaaaaatttgaataatttatagtgctaaaaataagatttaaatagttacttactaggtgtataagaaaaatagttgtatgtgtagcaaaatatataaatcttatttttggtattataaactactaattttctaaaatttactggcagtctttatataattataaaaaaaaaaattaaactaaaaagctctcatatatatatatataccaaaatagataaaaatctactcaatgcactcatttatattatagaattagtttattttgtatgggataaataatataataataaaaaatattacttttttgtgtagttttgttgggtttggaatggatctaattgaatgaaaccaatccaatctaattttattataacaaattagatatttaattacaattagattagtttagatattaaatattagattgcattagttattgaatgtgaatatcaaaatccaattaaaaagcaatcgagacttgttttattatactttatttgttaatgtatatattgagatttttttt

SEQ ID NO: 95045 - DNA, 546 bp, Cannabis sativa
gtagttggagtgatgtccttaattgttgtgtatattgtagccatttattcatctattttcaaataaaacaatagatagacaaaataaaaaatatagtaataacaaaataaaacaatatatcaaatttcttgtacagtcattattcctaacaatggatacaatatagctatccactatatttgtctctctctctctctcaataatatttttatatttcggtaacagtgttgtatattttacaatgctactacaatattatttaccatcggtttctaaaactgatgcatatgtgatacaagcgagcccgccataaaattgggaccatatataaagtaaaaaaaaaaaagaatgtattattcttcctataaacataaacatatttttcaaaaatttctaaactgataacaaaaaaaatgaaagaatgtggactgacgtaagttttgatttgatcagaggaagttcttgcttgtttccgagtgaggatttggttctttaaattttatatttataggcagtttcttctttttttcaaaatgtgaaaaaata

SEQ ID NO: 95046 - DNA, 616 bp, Cannabis sativa
aaaaaaaaaaaaaaaaaagtgctagctagcttttgagaattgccatcaaaacacacactaatagatatttctagatagaagttttcattaattgttgggttgatggaaattaatggtcaaaaagtaaccctagagaaaaaaaaagtaataaataggatccattgaataaggttacaaaaaaaaaaagataagaaaggtaaaagtcttctcaaaagattaaatattcattggtattactctttttattactatttttttatggaaaaaaaaaagtatgataacgtgtttatgatttagtgatttgaaacatgcatgtgatgtgagctcatcaacataatttaccaataatgtactaaaaatatcttttgtaagtattatcttagttttgagagtggatgaatcttgaaaaaaaaaaaaattattattgagtcatttattaaaaaaaatatgtgatatttttttaattattccgcctttaaatttggtaggtcttaggcataaatttagcccgccttaactcaggccaactcatgcattaaaaatatctcaagctatagtataagttttttttttctcacattttttcttgataaattaatccaaagtccaaacaagc

SEQ ID NO: 95047 - DNA, 556 bp, Cannabis sativa
ctttctttgatagaaggttttaaaacatgattagtcatatgtatgtaaagtctaaataaaagtttgccaatgaaaaaaaaaatgtctaaataaacgttttataaaaaggaaaaaagtaaggaagattttcaaaaatatccaatttttttaaagaaaattaaaaaatacaaattttatttagaaaaatacaaggctatgaatgaggcttggatatttagttttttatttatcattctctcatgttcttggctcgtttttacaatacatatataattaataatgtagtttattttttttttctcctcaattctttcattttttatttttaattctatttaaatcaatttaaacctatattataatcactatgaaccgtataaatgaaattaaaaaaaaaaatctctccttatttttctcatttttatttttaaaattatttaaatcattacacccctacataatcactatatataaaccgtataaattaaatagaaaaaaaaattcaaaaatatctccataaaactcaccctaatattcattttttttttatataaaa

SEQ ID NO: 95048 - DNA, 1036 bp, Cannabis sativa
agtagcagcaaatatggtgatgctctgagcaaaatgccagggctgaccatccaaaactctacccttatcaccctcacagccaaaagtgacaaggaacatgccatcagcatgctcagagacaacaaccgggaatcgacatagcgatgaccacataccagaaagggtgttcatcagagagggacgattatatggcctaatggtatgaagcttaaggataagactaataggagcaggtgaagagctagatgaaccaacttcacaagtaaagacagtagactcatcaggaggaagagctaaggcactagacatagaatttaagaactcatccatattggcagaagaaaacacttcaaagacagaggctaagaaaagaaaaataaacacaaagagatgacagaaacaatacctaagtttggatatatatatatataggaaaaaccataatccacgaaggattttcctcatcaccgccctagtcacttccctagtcccatccattggagctgcatgatgaagagaagctgaggagcttcagaattccagtcgtctgcctccatattactgtcttcaagggtgttttacagagagaagatttgagaaatctataataaatggggagaagacaagaaaagatgatggaagagggggagagataatgagaattgaggattagagcaattaatgctctgaaagagtttaatgagatgggaaggaatgtaataataacccccagagcaataaatgctcgaaaaggaaagagaaacaaaagaaaatgaatagcaaataggagtagaacacctgaaaccaccactaaacagcaaagggtggacaaatttccccattagtgggaccaagttgacactagataagatgaagaactggatgctggctagaaggctccagaagaagaaaagcttatttttgacatataaaaaataaatattaaagtatgcgtaattttataaatttattatttattctaataattatttaataaaaaaataagggaattttttttataccataaaaatttcta

SEQ ID NO: 95049 - DNA, 812 bp, Cannabis sativa
gtttcacagtatttatctaactctgcccctttctacttaaggcatcagcaaccatgttggccttaccagagtgataaaggatctcacaatcataatccttcataaactctagctagagtctctgtctcatattcaaatccctctgggtaaagaagtatttcagactcttatgatcgtgagtagggtacctctggtcgtactcctttactgccgagaagcataggcgattacctttccagcttacataagcacacagccgagaccctgtctcgaggcatcacaataaaccacaaacttttccttatctaaaggaagagttagtactggagcggtaatcaagcgctgctttaactccagaatacttttctcacactgatcagtccaaacaaacttcaagttcttttgggtcagtttcatcaagggtacaacaatctttgaaaaaccctcaacgaaccgacgataatacccagctaagtccagaaagcttctaaccttagtactgattttggtgttggctagtcccgaacagcttcaattttggtcggatccaccatgatcccatctttatctactatgtgccccaaaaaagagacacgagataaccagaattcacactttttgaatttagcatacagcttgtggtcccgtaaccattataaaaccgacctaagatgcaactcatgctcttcttctgattcagaatacaccaggatatcattgataaacacgatcacacatctatctaggtaatccttgaacacccgattcataagatccatgaatgctgtcggggcattggtgagtcccaaaga

SEQ ID NO: 95050 - DNA, 567 bp, Cannabis sativa
attttggggtgcagtatcaacgcaagaagtttcatgaagcatgtcaatagagatcatataagattgaaattgaacaaatgtatattctttgacattattacttcccaaagtacgaatagacacattaaattaattttgaatttcagcacaaaaagcacaaaatataaaaaattactcattacaattttttattaaataaccaagttacataagaataatcatccacaaagtaacaaaatacttgaacccaagtttagacaacataggagaaggaccccaaatatcagaatgaactaactcataacactagcacatttattgacttaaggactcaaactaacacgatgatatttgacaaactgacatgactcacaatctaatgaggacaccttcctatattggggataaaatttcttgagcaaaaaaagggatggatgacccaaacaacaatgaacctcaaaatcagaagcgaaattcaaacaagccataggagttgagggtagtggataaaaaacatacaggctgccagattcatgtcctttactaataatcttcttcgtcataaga

SEQ ID NO: 95051 - DNA, 565 bp, Cannabis sativa
taaatcattcaggtcaaatttgccttgttaggctgggggcccaacccgacctgcaaaaatagctcaaattgccattcctactgttatcagagtactatagggatggctccctatgaaattgttgtatggcaggaagagcagatctccaattcattgagatgaaactagagaaaggaaatacctaggtctggaatcagtacagcaggccaacgaggctatagaaaagatcaaggccaaaatgcttgcctatcaaagttggcaaaatatctatgcaaacctgaagcacaaaaacgtagaattttaggtaggagatcatgtattcctacgagtgtctccgatgaaggggttcaaacgtttcgaaaaaaagggcaagttctgccctaggtttacagggcctttcgagattctcaaaaaggttggactagtagcgtatcgtctagccttgtctctaacacttttagcagttcacaacgtgtttcatgtctctattttaggaatatacattttagatcccactcatgtgttgagctatgagaacctggaacttcagccggatttatcatac

SEQ ID NO: 95052 - DNA, 692 bp, Cannabis sativa
agaatcgttaaagttaaggatgagatgaagctactttcaactccagatcagttcacttcatcagatttcacaatagcaaacatgtacaagatgttaagttaagaacaaagagactttcatgtcagcaagcaagtatggagcagattaaacgtcccaaaacacagtttttttcctttggttagcagtgttgaatcgtttgaaaacaagagagagattgcaaaaaatgcaggttgtgaatgatactacctgcattctgtgtaataatgcagcagagaacattttgcacctgttttttaattgcaggtatacacaaggctgcttgcaagaaattaaagcatggctgaattggaggattaaagctgagaccctgcctaatattctgagatggatcaaccgaaaaaagatgagcaacttcaaggcctgttgctacatagcaagtattgcggctttggtgtataaaatatggcaagctagaaatcacaaattctggtcccaggagtcaacacaacaaccagcattggtgcaggaaatcaaatggctagttaaaaacagagtttctggtgtaatgccaaaatgtatagatcaaaaagagttggaatggtttcaagatttataagaggaagttagatttttttattttgtttcacagatacatgtatagatgattgctcttctgtgagctataggttgta

SEQ ID NO: 95053 - DNA, 602 bp, Cannabis sativa
  modified_base (559)..(559): a, c, t, g, unknown or other
tctcaaaattttgtaggttatcttgaatagttataacgtacataaatatgaaaaaaaattagactaaattttttttctggataccgaaacaagtgaagggtgtatcagcatatcccttttaaaaaggtgtattgtagaatcacccatatatttataactattcacaaaaaataagaatgagggtacaccatgcattgctttagttgcaccctataatttttctaaaatttatatatttttgttaagaattaagatcacttgttaaaaattagtgttcctattaaattaataatttaagtgtgccaactcaactaattatttttttttaaatactattaaccatgtagatatttttttttcctttaaaatactctcaaataaattaatgtatcatatttagattagtttaatacactatggtatagtatttttcttttaagggtttgcatattgacaataatattatgattttttattttttattatttttttaagggaacaaaagtattagactcaatattccaaaaagaaaagttaaaaaatttagagcatgtttggnattgttttctgttttttgttttaaaaaattgtttttagaaatg

SEQ ID NO: 95054 - DNA, 780 bp, Cannabis sativa
  modified_base (125)..(129): a, c, t, g, unknown or other
gactcgaactcgaaaaggtaaccacattagggactttatgcaaagcatcctaaccagctacaccacacttggtcataacagttagttagatcactacatgtgatttttttaaaaaataataatannnnnaattaaaaaaaaattaaaaataattaatcctgtgatctttaccatttacaatgtttgagtatacatccaccaacgtgttattgatttgtgttagttgacttgataattttttttaattgattgagcatactatatgagtattattcaaaaatatatattttaattgattgaacatactatatacatatgagtattatacaaatattgacctaacataacaattcgtgtgtcttagttatcaaaattaaaaaaatatatataatactactaagagtagtatatataggcatataattaataattaatatcacttttaaaataaaaatttaaaaatttagaataacttatagtatgttgaaacagtttattttacgcgtataaaataaaagagtaacacctgcaatagaatgttatttgaactctatttttaaattttttaaaattttacaagatgacttaaataattataaagtacataatcataaaaaaaaaaaattaaactaaaaattcttgtggataacgaaagaggtacactaatacattttttttttttttttgaaaaaaaggtaaattgtagaatatttaataaatatataacaaagctaaataattaataagtgatctaggaaaaattgaaaacataaatcttag

SEQ ID NO: 95055 - DNA, 785 bp, Cannabis sativa
actttgagtgcaactggtatgatccaatgataatattacattagagcgacattgtatcatagaaaagtatttgaaaattatgtagcaatactcataatcagaaaaatgaaaccatgatagtcaatatctcttaaagcttagtgtgagtcaaaatatgcataaatttcttcttgatgataacctgtcacgaatcaatttgttgaaactaaccagtgcaatttccccctgatcagtagagcacattgtcttgtccatattagtcttgaagttccatcttagaatagacattagggagctttctcccaacacttcaagatctggcaaagacctgttaaagaagacaagacatcagacattaagaagtaagaattagtcccagtagctattactttagacccaatttaaccaaatgtcatgtaaaattgattcatcaaattattaatttgctttatagtggaaaaaaagaagctgacaatagaaatagaactgagcttttcaccttatttcaattactccagtttgataaagaacaaccaatccacattctttctcatctttcttcaatgttgtagtccagcaacatggtttcacaagatccaccttgtgaatagagtcattgtcaccctacagtaacaaagtttcgttgacaagggagatgaaaaatacttgaaccggaatgtatatacagtaggaagttacctcgatcatagaattcagagagtacaagtgcaaggaatcttcacaacacagcaaaataagtaggttcattaatctccgatcaaaat

SEQ ID NO: 95056 - DNA, 603 bp, Cannabis sativa
atgagaggaaattaaaaagataattaatagtgcacaatgtcccccattaatgtatcatatatagtacctataaggagaatatatatacaattatatataattcaaaagtacatattaatcacatacaataatggatcttaattatatatatattaggtatatatgtaaagggaataagtttgactaattatactatatttgactttcttataaacaaaaggagacgtaattaacaatgtacaatatgaaatgactacattaattatgaatagaaaatgaattaattaattattattacataagtattttaacatttgatcatattaatattaattaaacatctgtacccaactaataagaaacaaacatatatatatatatatatatatgtttttccccttcaacttattatatacatattttatgctatacttacaccaacacttatgaaattaattatatatgtatatatatatttaaatagtttgtgaactgagcttataattaattataacatacatatatatatataggaagaaaatttaggttggaatttggattactaactctctatatatatatatatatatttacaattacatt

SEQ ID NO: 95057 - DNA, 554 bp, Cannabis sativa
caaggattaattagggtttgtctaggtttatgtatatatatatagctagctatagataaaacataaaatatatagggattcaagacagtacatctataatttataatagattcatgattatagataactaagtgttgtgaaagttacctcaacaagaacagaaaatgaagcaaaacacaattgacaagttaaatacaaaaccataacaataaaaaataaactaactaatctatgaacaagcaatatatataataaaattagagtaataagaacagctatatattacgtggttcaatcaagataacaatgtgtttccttactcccactataagaaatatcacttttatcagtgcaattcacagtgaaattacagcctctaatgagttaatctttattgaacactttgagagagattacacacagtaatttgtccaagacagtagtttgatcacaccaatattattactctctattaacaaccctacaaattctcaaatatgttctctatcaatctcaactatatataagcctttcttttctactctctcaactat

SEQ ID NO: 95058 - DNA, 613 bp, Cannabis sativa
gtttgtttgtctgggagcggcactatatccagtttgtgtagctctgtgcagctggctgtacggaagtatttggcccacaaaccgtaggagttgtaaaagtagttggtgaagggtaaatagatgtagtcataaactgcaaagtttgggcatttggtatatcggttgaatatgctgggagtactctatatgcttgagtataagcttcttctaaatttataaatccttgagctcttgccaaaaaatcagctagagtatttgctcttttgcgttgaaggtctccccacagcaaagatctagttgcaagtctggatgttaaggccacaatttcttgtcattagtgaccttaattttagcagttacatccatcatgcattgcatatatttcttcaggctttctcctggttgttgcttgactctagtcagggaactagcttccaggtcgaaggcctttgctgctagaaactgcttttgaaacattgcttgtagatctctccaattgtggatcaatcccagagacaatatcttccaccaatcatccgcaaatttgcttagtgttagtgaaaagcataaatattttgtgccatcactagccttggcaacttgcataatgtga

SEQ ID NO: 95059 - DNA, 779 bp, Cannabis sativa
tgaataattagaaaagattagcaagctcagagccactttattccttgatgatcatttgaattacatagagaatagcttgaattcaaaagtacatgtttgagagaaaattgtacaagaacaagttataatagaacctctctttagtcaactcaatagaaacatgagggagactttaacaacccttcaatctctctaaaaggaactctctactattatgaatgtatgtacaaatgaattacaaaagccttagttgatcgtgtagggtggttgccttttatattggttgtagaagcttaacttgactggtttagctccaaccgaattaactgttatttttttccagctaggataggtagttagctgacatggcagggagagagtgagccaaatctaccacaaatccacctgatctgattcacttgttcactgcctggatagtgctggcagaattgatcatacccttgcaatcgagtatgctcaataggttcaaacaatgtgtaaatttatccctcgtaacactctttgtgaaaatgtcaacagggttatcatgagcgcaaattttccttacttgaacttgttttgccattaccacatctctaaatgtagcttgatgtcaatgtgttttgacctctcatgaaacataagatttttcatgagatgcaaatcactttggttgttgttgtagtgagatttctctcacctagaaactcgagaccagactcctctttaaaggacacgtgtattcagatttccaatgaaggctgaatgtccgtgagaga

SEQ ID NO: 95060 - DNA, 921 bp, Cannabis sativa
ttattggttgaacagagtagttagttcttctaatataataaacattttagcaaccttttatttgatcaaatgtgaatctaacatttttcgtttaggcgagagacaaggtcattcacattttatgagctgttaccattatttcgtatttataaatctattctaagtagtcatctttagggatgagtctactagaaagaaatttatagaatacttatttttcgagattttactttgttaaattgtctaatggtaatcatccattagggggacggcaagcgcctcgagatcttattaaacatcagtcatacaaaactgacaatggagattgaatatctcttatttaaagcatattattttatgtaaagaatatattcttttagaaatatttatttctaattttttattttaccaaccatataccaaaaattctattaaaattaccaatttagttagactaaatctgaattttaattttaatatttatagtatattattaaaattattctgaaaataaattaattattttccaactttagtatacatttatatattctgtataaatatcaatatcaaaattttttaaatattgatatactaaatataaattaaaatttaggtatttataaaatatttattaaggttagtttgaaaataaattaatttattttcatctttaatatattttcatataaataaagagtattatcattaaataagttgatctaaaattaaacactaatttacaacttcttaaaataatcctattagaattttcttaagtataaatataattttaaaaatttatatttaagataaatattaatttttagaaattatcctataaaataaacccttaatttatgttgatttaaaaattaacaaaaaaaatttcaactgaaattaattttttttaattaaata

SEQ ID NO: 95061 - DNA, 503 bp, Cannabis sativa
ggggccaatgttatcccaatttttgcactctgatgttgcaacactcgatggtgacacatggaatcgactctgggtatcttctcacaagacacaagccgaacaggacacctcatatgcttgctcaggcgaagcattaagcaacccgcacgaaacgacaaacacttagcgaattcagctttcgcaccgtgagtcatcaaggaaatccctataactttgggatcagattacagagatatggcaagctatccaaatcccacgattagtgtattctgtatatgctatgcaatcattctacttatatcaattgtaaccagatgggaaagacttcccccccaagtttatagcccaataaatagtgatttatacacactaggcaaagggtcaaaagttctttctaagaatttgtattcagagatataattgtaagagctctaagaaaaggaatcattctccttattcttaagtcaatacaaataactaggattaggctattaccgaactgc

SEQ ID NO: 95062 - DNA, 624 bp, Cannabis sativa
gctcttccgatcttttctctctctctctctctcgttatgaatttctccttcatcttctttgtcttttctcgctcctattcttctcaatgggaagtgccgataggatagtgggcagcgccgatgaacgggatcaatggctccaatgttgacagatgtaggttcgtttttggatctgagatttttttttcaatctgggtttgttactttgtttcttccgtggatttgagatggaggtatttgtttgtttgtgtttatgtgatatcaatttgtttaaatatttttaggtatttttagatctgggtttggagcttcatatgtatatatatgtgtgtttgtttgttagattgtgttttgtgaaaattttatttgtgcgatttgggtttgaaaaataagttatagtgatggtgttggtgagtagtggtggtttcggtacctgtattgatagtggtggtggtggtggtgatttggtgtggatggtggtggtggtggtgatgttatgaattgcgaaaatgattaagaaaaataaaaagtgaaaaaaaaaacgaaatgttagaaacataaaaatatgattggtaattaggtttttttctaatttttatatgttttaaaatgatttattttaaa

SEQ ID NO: 95063 - DNA, 784 bp, Cannabis sativa
ttggccttccagaagtcatagaaatctcgagaccaactgtctctatagcattcactttccctccgagcctctcctcttcagatctttgctgcccgacctctgacttatacttctcaacctcagctctaagctcctctttcttggtcttcttctcttcttccaacctgctattaaacagcccggagaacctccctttcttcttgaaggctggtcacttccttagataaggaggcaatggcggcttcaagctgatcggtggcctgtagatctttggtcagtttggccacattcttctcagtagcaagaagcttcttattgacctctcccagctccatccggacagccctaagctgaaccctagcttcatcggggtccttcctggccaaatccacttccgcccgcatagtgttggaaatggcggcattcttagaggcaatcgacttagctcgggaataagcgtaagccatcttcagaccggtctgtacagagaaagaatattgaaatctgaactaagtgaagaagggacaaaaagaaactatcagaaaggacttacccttgaaagctccttcagaactcctcccatcaccagctccagagaaaggtcattgtctgccccaaccagctgctcgttcacctcagggaccgaccgagtcacatagtgagtgagcatttctctgccccttttggtctctaggtgcaataccgaaggtggggcataaaccttgatctgctcggatccgcttctgaccagctcggatctgcccctcgcctgctctggcctgtc

SEQ ID NO: 95064 - DNA, 935 bp, Cannabis sativa
acttaatcagaattttgagataataaatatcatcagaagtgtaatttttacaatgctatattacctttccgaagtatcatcatcaatatcatcatcttcatatactggaggttcaataacatcctcagcaccagcatctaatgcaatatcaaggagttgatccttgtcaacgtccgaggcttttatgtttacaactcgagcacgtctgaacttaaacatcacagatcctgggtcagccatctttccaccacagtccttcactacctctctaaccgctgccaccgatcgagttatcttgtctgtcagaacctcaacaacaatactgaccccggcaaaaccatatacctggtagttaaaagtagcatttcgcttaaccaactaaatcccctacatgatgtaatagatttctcaaaccagacagataataccagacttcattacataaaaacagaaactgtagtccaagttaaacttacctcgtagattttttcaatgtaagattcttgtcccttctcagaagctctcttaatgtttctttccaaaatatccttcgggacatcgagctccttggctttctcaagtatagcagccagggttgagtttgatacaggacttgtaccaccttttttcacgctgcattactgagaaataaattttgtgcccatgaaagtaatgcattacaaatgaaaacaaaatcgatattttggtatcaacatgaaaaggacaaagtaggtagctcaatgaatatttgaaagtaatgaaacatgcactaacaaaatcgtaattgtaatgtttacaattattaatgtaatagctattaagaactactaacttacgcagaaactacttcctttccaatcctggcatacagctttgccttcttggcatcttgaatcccctgcaacaaaatgaattgacagaaaactaagcagatg

SEQ ID NO: 95065 - DNA, 1080 bp, Cannabis sativa
atgttctcataatccaatctatgtattcatcatttgcttttttaggagggaaagctctaatccttagcaaactgagttgtttgattttctgtacagccgtggaagttagccactgttggtggttccataaagcttcattcctggccttccatatgtgatacacaaggttggcaatgattgtgctcaccatgcttttccttgctgcattaaatctctttgaatgatggcaggcttgcagcaatttggcaatgtcctctgctgttgttttccattgcaggaagtgatctttagtttgctgcagacaacttaagctataatcgcatttaaaaaataaatgctcagtggtctcatcttctttgccacacaggacacaagttgtgtcaatactttgatatctacttactctctcctttgtgtttagccttttccaaaacactagccatagtataaatctatgcttgggaataatgagcctatcccaaactagattacaccatgaaagtttaggatgttcaggaaataagtcatgatagccctgttttacccgatactcctgttttaggaagctatccatgtccattttctgctgaaatctgtcttttactgccacaattttcttccaagaccagctgcaatcttgtggagcagtgtagctccaccagttttaatccttcaaataaaccatgtgtatccattttacaaaaaggcaaccctatttgcttgctatgtcccacacacatctccccaaagctgccacattccattgttgtatgttgcgaagccccaaaccaccagtagatttgggtctgcatatgtactcccatgccacaagccctggttcattaccctcttgagtacctttctataggaaggatctgcaagttgcttcaatgtcattcagaagtttcttgggtaagataaaaatttgagcccagtaagtatgaatagccaacaaaaccgagttgatcaatgtaactctgcccatgtaggatagattttttgaactccaacacctgattctgctagtcatcttctctagcaagcattgacattcttctctagaaattttccttgagcaaa

SEQ ID NO: 95066 - DNA, 590 bp, Cannabis sativa
gggtttagaccgaggtcggggttcgggtttggggtctgggtccgaaattaggtccaagctggggttctcgtctggggtcctagtccaagtctaaggttggggtctgggtcagggtcagggccaaggtctgtgtttggggttggagttagggtttgggttcggatccgggctggggttctggtccaggtgttaaggttcaagttgaggtcggaatccaaaatattgattaagtaaaaaaaactgtttaaaaaaattaaaagtaactttttttttttgtttttaaaattttgattcttaattaaaaaaattaaaaaacaaaaacaattttctagaacatatatttagaaaatatttttatttttctaattaaaaaataaaaaattaattaaaaaagtattctcaaatgtactctaaatttataaattttatttacaagtgtttaaattaattttttttctgaataatacagtatgtgtaaattattgtcaaactatatataaaagtaaatgaaattataaaataggcaaaaaagaatcatattgggaaatttgattttctatacttacatatacctaatattttatttctaa

SEQ ID NO: 95067 - DNA, 800 bp, Cannabis sativa
tttattagttgccgaaaatctcggtcaacattaataattacaatattatgtatataattaaaaattctcctaaattttattaacggcaattattcgagattacattaagaaactcacaagaaatatcatctcttcgtaacaaacgacatgcaacagaataggatgctctagccagaaagtagacaacactatttgcagaccccctgataaaaataacaaaaacactttgtagctcacataacaatatcttacattcaaaaataacacttccaaaataagataacatgatgagcagacttcggagtgatcgcacaactgttagactatttgtttctatagtcaatccctgccatgactttcaaaacccccatagcctcagtatggcttatttggaataacataatataattgaagtttacaaagttaacactattaaatatatatgtatataaaaaaaaaaaaacttatatgacatgactaataccatagaaaacattaaaaattaaagggattttttctattttgggctaaaatcattcaaaactaacatctatactattataaggaaaaataaacatttatactatttaatatttacaaaaatactatttttaagttctttattcacaaaaatactttgtaacatactttgtagttacaaagtaatgtgaaactaagactaaacaggcgcgtgaaaaggactatcctgacgcacgcaagtcagaacaaaaatatgataagttctctcacacaaatctatagttgcaaagaagacacgtgaaaaacttagtaacattatt

SEQ ID NO: 95068 - DNA, 755 bp, Cannabis sativa
  modified_base (547)..(557): a, c, t, g, unknown or other
tgattggtattgagagctaggggtctagtggacggtgtgatatgcatttgatgcttgattatgtgattttttatggtctctctattttgtttatacattttgatactagtgatgagatattttatttttacaaagctaaccatgcaagaattttattaaactaagtgtcctttgatattagttgtttttctattaggctttataagcttaccccctattttcctcccttccaggaactcagtttgatgctagtggatgaggatggtaccgttgagaaagaaagtcgttattaatttagtcttattctactctctaatattctaatgaaactgattttgtatttaagctgaaatggatggtctagatgacttaaattagatatgtactagttagaaatgaggaatgatggatgctaggtattattttagtattttattgacttattaaatttatctatttggtgattacataactgtagagatattattattcttttatattgattgttggtcctaattttgttactaatattttcttattaatatannnnnnnnnnnattacttttaaattaatattttgtgatataaataaaatgattatttataagctttatcttcaagggtcaaagtctgatatttgatcacttaaattatagatattacatatgtgccaagcctagggctcgggttgtgacactacttgtcattgtcaatcattaataaaaaatgaaagcgaataaagctgcttctatcca

SEQ ID NO: 95069 - DNA, 658 bp, Cannabis sativa
aggtcataagaaaaaaaaaaattgaaacaaaaaaaaatatgatattttttaaaattagtataaaaaaatataattttaaaaagaaaacttttttaggtccttaaattaagtgggccctaggcacaagtctaggcctttatgcttaggatgaggcctgattacattaaattatttagagtgtatttaatgttagtgagagttatttttattgagtaattataggcatcaatttataattaacggacaatataaaaaaccttttgtagtagagttagagtgatcaaaataatatgttcatactatatagcaagtcattttttatccaatctatcatttattaaaattgagatttaaaactagtgttacatgcatgtcattgtgtgtaatattttatttctatgtaaatattaaaaactaagctatatatattgatgtagacataattgagtcaatataataggctgcaaatattctttggatgatttgttattaatcatgggataattagtaggatgatgacatttctttatgctattaattaattaaacgacatacatacaatcctgtattaatccttatcaattagtaatgactatgcatgcatgggattaattattgtgaatttgctataataaattatatatatatgaattaatta

SEQ ID NO: 95070 - DNA, 597 bp, Cannabis sativa
  modified_base (529)..(529): a, c, t, g, unknown or other
aaaaaaaactgatttaaagtgtaaaaatacaaaagcccccacttcttacttagcttattagctcacccctattttattaccaggccaagataactaatgatcgatagcaactcgcgagttacttatatgctccatttatgcctagttaactaataatgtcattctttttttatttttttccacttcggtaattattatgtctttattgtcaaaactggtcagtaattttcatgaactatttttacataatttaaagaaggtattgtctttttcctaaagcaacaatgctaataaaaagataatgtaaaatgtgtttttttttttttgaatagaactatgggaagttcattagattaaataagatggaatcacaaaaggagatccctccctatcagagtaaacaccattacaaatccatgttctagcccttttagctaaggcatcacactccaaattgtcaatacgtttaatatagcagaaaatacaagtagcaaaatgttggatatattttaccaggatttagatttantaacaagtatgtttcattaatatcttaatatgaattctaaaacaatgaaataaacacataaaagttta

SEQ ID NO: 95071 - DNA, 726 bp, Cannabis sativa
actacagaataaaattagaaaataaacagtgtggaaaaaataaaaacacacaaaatttttgtacgtgatatcaacaatctatgagaattgctactagttcacggggccacaccaatttattagatagatctaaaaaatacaaattaattaacttatgctttatagaccccctcttattgtatgtcataagcttgatgtattccaccttttaatcaaatcttgttgaaacttcaagtgcttgaactccattcgatctccttgaagagtgattgcttcctcatgaggcaagacttgaaaagctatctccctaaagtaggggtgtactttagttaatttggtcggattatgctacattttattcagcctaatgttaagaccgggttacaaaaatttaagtgcaacccgcccaattaagaaacaagaaaatagtaacctgcacaataaaattggtcagtttggtcaggttaactcgtctaaaccgaccactaatatttttttaatttttattttatttttacattttgtaacgtccccgcttcaagccttcattggacctttgcacccacggaatgatggctcttatacacgagtatgtcactctggctgcaacttgggttgacaactaaccctatagaccggtcaggttaacccgtccaaaccgaccactaatattttttttaattttttaatttttacattttgtaacatccccgcttcaagcctcca

SEQ ID NO: 95072 - DNA, 889 bp, Cannabis sativa
cctcatgtaaaagaaatagatttacaatttactcaagcaccaaatataaaaagtacctatacataatcaatatttactttaatagataaggtacgttacatattttataattattgtgctaatatttgttaataaaagaagtttataataaaatgtgatttacataaaaattcgtaacaattaaaattttcttaaaacaaattgtaaagtactatttgcgccaactgatctcccatagatctcatatgatttggaaataaataataattagaaaagaatgagatgtaacaatttacataataagtgagttagctaatataaagcaaattaaatgattgattaggtgagtgtaagactgatgaaaaagcaagcataggtgtaagagtaatatgacgccagatccaagaacagaaaaggaagatccattagctaaggcaacactagaagtggaactatgagattgaaaagtagaaaaagatactggaataacctatcatatgataggtgacactagaatcaatgacccattatgagaatatagaaagaaggaatacattaaatatatattacctaaatcaataataacactaacagaaagagatgaagatcgacttaagtgattacttggcaaattcatcaacataaataacaactaattttttagatacattattggtgctggaacattagcaaactgtctttgctaatttttaaattgtaactttctacaccaaaatttggtgtgaacaagatgtttataagggttacaaaaaatgcgttcagaatttggtgtttgaatttcaagaattttcactatagttgcaaaaaaatgcctccacaatatgctcgattgtcaaatccttgtggatattccccttctctccacttg

SEQ ID NO: 95073 - DNA, 606 bp, Cannabis sativa
tcccttctccctctggtgatactcaggtagaagcctgccggaagtttctgatcaatccatatatccaccttaagcttcaaaaagcctcggcgagcaatagtccgattatccacaccatcggattccagaaattcacccaccttggccccaatcactctggaattctggaatacaagatatggggtaggaagcccatgaatctcgacccagaaaacagctttgttcatggggacgttgaaccaactcccatctgtaggccactccctaatgttcagtaattgaccagctattatccatggccttcgcttgagcacttcctctttatcctccaaagagtcaaaaaagaaaccccatacacccttctctagcgtcttcattctccatttaccttttaaggaccaaacccccaaaagaatctgtttaagtctccccttaggaatggcccgagagccaaataactttgccaacaccccagattttgcaacttctgcattaatctcaaagtcagcttcaagttctagggtcggcccttcaatgaactgaagcctaagatcctctatactcccctcttcgaccggagtcgtcatagctcaagccagctgacaa

SEQ ID NO: 95074 - DNA, 670 bp, Cannabis sativa
taagagcaaacttggacatctaggacatgtcggggtagatgaggccgaaagatatgacctactcatgatcaacctagtggatcagtacaaaattaccgacaccatatatcaccgtgagggcactaaagaagaaatatatcattgacccaataatgttgttaggtctgaattccttcaaaagttactaatctcgtcaaacttggtgtatttagaacttgactatgtagatttgacagaggatatgttagaggaaggatcaggcataaaagagtagaatagtcaagttgcattttttttttgtaataaagggtttaagtatggctccactttagttgggagttttagtgtaactcctttagcttgatgaaattcataaataaataaagaggttttattctatctggtaaatatttatttgaatcttcttatgttaagtcttactaaatagttaagggataattgttgcagatataggagaattgtctcttagagttaaagcgtcaaacgaaacagtacttacagaaataaaaagcattttatcgcttaagatcaaaaataaataccacgaagaggataagattcttagagctctacgagaggtcatcgcaattaatgaagaaatcaaaagagtagtagaggtgaggggagccttaatcaaatcacgagaaaa

SEQ ID NO: 95075 - DNA, 688 bp, Cannabis sativa
gggaggctgaagggaaaagagatagggactggcgaatcaactccacgaggctggacagagttgagttatcaccccacttactgttgactttcagaaagagttgttggcaatctgaggtgataaggcttggctggaagtgagaattgttgcaccaacttaaacctgcaaggagagcttgagcctcggtaaaaagaggggggggcggggggaggggcacctgagatggatcgggaaaggcttgcaagcaactgattggggccttctttaagtgcagctcccagacctgttttgagaccttttaaatctatcgctgcatcaacacaaaggcaaatacaattcgggacaatgactaagctggaaccatctgcagggttagaattttgactgtgttgtctcacatttggggtgagacctttagcatttaagtgcatagcttccctataatctgcaaaagtcttttaacagaatcttccacatcaaacaatttagttaaggtattgttgaagagagcattatttcttgcattccaaatttgccatagaataccaataagtaaaataaaatcatcttttccgagattttctaaaccttggagataaaattccttgacatcacagtttttgtaagtgaaataaaaagttttgagggaggaatgcttccaaatagatctagccttgggacaattcaa

SEQ ID NO: 95076 - DNA, 708 bp, Cannabis sativa
agaaatcacatgtgatgcttaactgcctatacctccttttttcattggctaaattaatatatatacatatgtcaatctgatacttaatataatctttatttcttatttatatgcaaactcataatctgttctattataaagaagagtgtaattttagggggccaaaaataatttttagggcaggtcaaatgcatatatctgaaaaagaaataaatattattttatacataatttttaatttttaattttaatgttgggagcaaatatttcctgtcgttcacttattcatgtactgtataaattgtacattacacattataaattttaatttactatttctttctttttttatttatttattgtggacagagccgactctatgttattgggatttgaactctcaacctcttagttattaaactaattaaatcaccacttggctacaacacatatttaacattaaaagtactattattatttattttattacgaactatattttaatttttttttcgaaatggggcccgagcggtgggggcctaaaacggccgcctctttcgtcttaactcagggccggccctgattgtagatattattattattataacttatttaattgtagagcaaaaaaaatattatataattatctttcatatattcaagatggtatttttaaatgaaataattatcatcaagttttttattttt

SEQ ID NO: 95077 - DNA, 553 bp, Cannabis sativa
  modified_base (521)..(527): a, c, t, g, unknown or other
tatgagatgaagtggcatcatggtcgggaacagattcatgctcctcagaagggtgttgagatgatcctgtagagggcagtaaagaatgtgagaataattgatctattgcattaagagagttagtgtcagatagtgggaaaatatcttcatgaaaataaacatctctagagtgaacaatatcttgagtgtcaatgtttaagagagtgtaagctttcataccaggtggataaccaataaagacataaggacgagatcttggatcaagtttatgtcgtttggtttccaaggtggaggcaaaggcaagacatccaaaacctttaaggtgttcataggcatgagctttcttaaagagaacttcaaatgaagtctttttgttagtaatatagatgaagttcgatttatgagataaacaacagtttttatgacataactccaataaggtgaggataaatgagattgaaatagtaaagctctaccgacatttaatatgtgttgatgtttgtgttggaatatgttttacnnnnnnntagatttactaccatgtatgttaatt

SEQ ID NO: 95078 - DNA, 596 bp, Cannabis sativa
aaaaactagaaacatgtgtgattttttaaacacaaaaaataagaaaataaaaaaaattaaaaaaaattaagaaaaataaagtagaagatgaatagggaaggagaacggaaaattagaatgaaaaaaaaaaaaagcctaatatatccacacatataaaatgcaaaatgagtaagagaggcaaacattagttttaattataatttaaaaaaaaaaaaaaactaccacagacgtgacataactcatcatctcaattatttttataatttttcatccaatataaatgtattgggagacccatagcaacaaaaaatgcaaagatttttttttaaaaaaatgtacatattatttaaataagacaataaacttgtaataatatctgtgctatagcaaattaaaaaagttagtatataacgttaaaactaatcttatttaactgtttaattgatatataacgtgtaaacaaaataattaacactaatctagaagaaaaaaagaaacaaattgatattaaatataaattcttatatttaaaataaaatattaataaaaaagatagatatttaaataaaatatacaaagaaaatatatatttatat

SEQ ID NO: 95079 - DNA, 1642 bp, Cannabis sativa
ggatttgctacgaaactctagcttatgtgaacactctgatttcctaagtttatttataattattggctcattctagtggtttgatttgtaggagatttttctatgttgattattttgtagtggtaaattacactcaatacactattttaaaagttaattacatatgttgcataaaaaaaaagttaattacatattatatttttaaatttgattaatttatatgacatttttttatttttaaataattttatatatttaatgtttttatttgtttagtatgagaaacagagtattgtagagattttgtatttgtttatctttattgaattgaagttgaaaatacaagagcaaggtctattcatagactaggtgagtcggttaagattctaacagaaaaataaaccagctaaatagaaaaatataacaaccttcctaacagaaaatatctaactcttaatagcccccctcaagttggagtgtaaatattaaggacacccaacttggatacaattttattgaattgagatggaagaagagctttggtgaagatgtcggctaggttgttgttggaagaaacatgtagtaactggagtaaaccttgttggaccttttctcgaatgaagtgacaatcaatttccacatgtttggtgcgttcatggtagacgggattctcactgatgtggatagcagcaatgttgtcacaatatagccttggaggtgtagagtgatgaacaccaaagtctttgagaatggcaaggatccaagtgagttcggatgtggcatttgccatggcacgatattcagattcaacagaagaacgagataagatttgttgtttttttgatttccatgatatgagagacttgccaagaaagatgcaatatcctgaaacggatctccttgtgtcttgacaactatcccaatcagcatcggcaaaaaaggagagttgaacattgcagaagagaggctagtttctgcaaatgcagtgatgttggggcatgaattcgcagggaaaaaatgccctgtcctggtgtctttttcagatattgtaaaattctatgagcagtttggaggtgaggaactcagggacatgataagaactgaatgaggtaattgactgcataagtgatatccgacctagtaatagttaggtagattaatttgccaatgaggcttctataggcagtcaggtcagtgaggataggtcctttgtctttgatgagttttaaatttgtctccatgggtgtggaagcgggtttggttcccatgtaacctgtgtcatggagtaattgaatggtgaagggtctttgagaaattgagatgccttctttggtgggaccaatttcaaggccaaggaagaaacgaagtttaccaaggtcttttattttgaatttttggtcaagggaattggtaaaatggatgatgttagtcgtgttattgctggccacgattatgtcatccacatatatgagaatggcaacgaaatctcactgtgagtgtttgatgaacaaagagttatcagattgggattgtttgaagccatttttagtgagtatggtgctgagtttagagtaccattgtcgagaagcttgttttaggccatatatactcttgtttaatttacaaacagagtttggggggg

SEQ ID NO: 95080 - DNA, 560 bp, Cannabis sativa
atgtattgatttctatattttaattattattttttggttttcatttttattttttttttcttacataaaaaagtaaactacaacataaatttttatatttataaaaattttcctttataaaactcaaaaaatatgggccgagtaagcacgatacgaagtgggataaattgaaaaatacccgctttttttatcaactaaccaaaaatacttccattttagattccactgaaacgtacccacatttataagtccaataccaaatatacccttatcttttaagtaagtctcccatatgattcaatcattgacttccctatgcacgccactaagattttgccatcgccgatgcacgaaagtattaccacgagtcagccatcgatactgtcccttcgcatcttctgccaccgccgatgtccttccacctcttctgtcaccaccatcaacactatacagttcaacaactccaattgcaaccgccaacattattcgatattgagggtggattaacgttgtctttttaaatttgtattagtttgtctttaattctagtttctccctct

SEQ ID NO: 95081 - DNA, 510 bp, Cannabis sativa
agtaatgaactaaaatataacttaaaagatgataggattttaggtatttgaccatcttacacaccctaaccccaagatcattgaaattcatatttatatatcatttccatttttcaggtggtcagttttggaaatatctaaacacaatttattacatatccatttataaattccttggaaatagtgcatttgtttttaagctgatctaaggtgtgcgattttattttataggtgtaccaaagagatgaaggtttctattctttattttggggtatttcataattttctgaatacttagataattggaacaaaaataagattcctacgactgaaaaatcctacaaggaacatgcatggtaaaaaatcaaaacacaacatataaaaaaatccagaaagccattgttatagttgttacatgggtaagtaagtcagaggacgtcgtcgtgtctgtcagccctcgttagagttgggagtcagtcgtcatcggagatcggagtcagccgtcgtcag

SEQ ID NO: 95082 - DNA, 513 bp, Cannabis sativa
aggtcaaatacatatatattataatttttttacatacctgataccctaaaaaagtaaaaacacaaaacaaacttaaaactaaaaaaatcaaaatcgtgtcttcgaagcttatagcctcccctctttgtctctctcttctctttccaatccccatggcttctccagtcctccttcaatgatagctatttttcttatgtatatatataaatatatatatatatatatatcttacagagagaagggtaagaagatggatagaagagaaggatataaggataatacatgtgcactacaattttttttacttttagtgacaataaaatttgtgactaaaagtaaaaagttgtgactaattaattataaatcattattttattattgtaattaaaatgtctgttgctaaatgtattagttgctaaaggtattagcaagacctctagtatgaggaacaactggtataaatacttgataaaagaaacaaaatctttcgaagcaagacaatgacactagtga

SEQ ID NO: 95083 - DNA, 635 bp, Cannabis sativa
atattaggtgtaccatttttttttcttaattcttattggcccatttagcttccctatgccatgaggtaaaatgaaagatgcctacactagatttcccctatatatattgtctcatcatatcttactcgttattattactgtatctcacacggttattatcacagtattttactggtttcatcaccatatctttttcttaacttgtacgtagtcatcatatcactaaattataatatttctaattttactttactcattccaattttaattctaattgtcaaaaaaacaaatatttcttttttattattatttgaagaaaaaatatcttttgaatttaaataccaatatcattagatatatatctattttctcttttttcttaatattgtttacaaataagtagatctaacaaaaataattattattttgctaaaaccgaatcaatattcaatagtgatatcaatcgaaatggtatcatttattaatacttacatatgtctctctcatttttttttcttttttctaaggacatatatatatacactacaagaaatgttacttttaccagcacagttcgctactgcgtttttaccagcacatttcacaaactgcgctggcaaagagatcaaagtttt

SEQ ID NO: 95084 - DNA, 972 bp, Cannabis sativa
caaatttgtcacttcgtatacattggttttattaatgttttagaacttagatctctgtttcagattctgagcaaaatggcctctcttgtgtcacttttcctgagttgtagttgctccaaaactcatgagaatatgttgtctaatacataaataatatgttcattcatacttgaggccatattagttgaataaaagaaggaagaaagggactttttttttgtctctaggaatctgaaggcatcgaatgagaatatgaatgttataggcttaaatgattcgtttttggattatttataactgttagaatttgggaaataaggtgaatggggtttcatcccaaaatcaattggtaatggaaagagtagcctattcctcttatatattctattatctttctacacattagcaatgagggactttctaacatcccttgaggctctttttttagctcactatccctgatcacaagttgctcttttttgctctacttttcggatcggtatttttggatttttggttgctctttttttattttcggctcactatatcttcgaatggctttttttgactttggctcttggatcaattttttctggattttttgtggcttttttttttccggctctacttcgatcggtttattttttggggttggatagtcgctagagatttttttttgtttgtttattttgctctgataccatgttagaatttgggaattaaggtgaatggggttccatcccaaaaccaattggtaatgggaggagtagcccattcctcttatatattctattatctttccacacattagcaatgtgggactctctaacaataacgagtattagaatagaagtcaagaaatgaccatttctttttcttatttctctaaggtacatgttagtggtctctatacacatcgacatagagttcacaaaaaattgtaattcattatttattattattatcattttt

SEQ ID NO: 95085 - DNA, 753 bp, Cannabis sativa
gttctttggcaaagaaaaataatcgtgttcctgatatatctcctgatgatcgtaaatccaaaaagttaaagttgaagagtgcgacagagtttgatgatggagacttagagtctgaggatgaaagtcgtattgcgattccttcaaaagctaaggtaattatttatttattttttttgtgaagatgtgttgttttgattttgcatgttgataagtgacggtttaatttctattatattttattatcattttttttgttgttttaaatttttctagattttgttctgatttatgagttttggttgttttggtttcttatttgatatgagaggtttatttttattttttataaatttaaaaggttttttgtttagaatcttgagttttttttgaatatttttatatgttttttgttatgtttggccactaatagaggattacacaacaactagctaagtcttttcacaactaatcccaacggttttacctaactgtcagttatgacagttaggatcgagtcttgaaggataaggctataaatagccagctgttgcagcaatttaaaaaggaatgttttgggaattattgagtgctagttcagtgtatcatagagagaacttttgtgagatgagttgttattgaagcttggattcatgagtgtatgtgttagataaacaccttgtaaaacaacttgttatttctctcatctagcatcaataaagataaagacctttggggctgttttggccgaggagt

SEQ ID NO: 95086 - DNA, 607 bp, Cannabis sativa
  modified_base (41)..(70): a, c, t, g, unknown or other
aacattaaatgttattactgatctatattaataagtaaatnnnnnnnnnnnnnnnnnnnnnnnnnnnnnngcataaaacccaacactgatttgggtatcaaaacctgttctagtggttagattgaatggtatgttgagaacttgcgtcaactttactgacctaaacaaagcatgccctaaggattgttttccccatttcttttcctcaattagttttataattttacctaaattaaaataaaacaactaattaattttattacaataacaactaactttaaaacatattaaatttacacaataataaaataaatatatatgataaataaataaatgtatttataccgagcttggagagagagaaagagagagagggagacgaacgagaggtggtggtggtccgacgtatgagatggagatgagagagacaccgacgggaggtggtggtctttcgacgtatgcgatggagaggaaagggacaccgatgggaggaggggtgggtggagatcgatggacgagagagacgacaagaaagggaggaagacgacaagagaggagggcgatggtgcggaggcatgagtgaggttttcgagagttaagattttcg

SEQ ID NO: 95087 - DNA, 585 bp, Cannabis sativa
atatccaattgtgatcggatcggattggatgttatttttaaatattcatttggatcggattggatggcggatagggtgtctaaaaatccaatagatccaatcgaactaattagtattttcttttagtttagatgagtaattagattttatattgttatacgtaaaatctatgtatatatatgaaaattcacattaaaatgttactctttttttattggattggatggatccagtccaattctatacatactagacctaaaaatattagatgggtcgatctgatccaacaaaatattaggtttgaaataatagataaactcaaattaaactaataaatatatatgaaatatatctaatggatagaaccgatccagtctaacatccaatggatgttggatcgatttgatgagtggaattaattggatcgggtcggataggcctaaaaacattagatgtggtccaataaacacgcatctattgaccatcaaaacttaaaaagaaaataaaaaaaaaaaagttgggaagtaacaatgccattgttattttacattctttcatctctacataacttattgaccccatatt

SEQ ID NO: 95088 - DNA, 700 bp, Cannabis sativa
tttttttttttctttttttttttctttttctttcttttctccttcgtcttcttcttctccttcccactcccagaagccaccaacccaaaccagcagcaccaccagcgttttcttcttgttctcactgccagaaaccaccaaccaccaacccctaatataaacaagattttcactctttcttaaaaccctagcctattctctacatccgtttaactctcgattccaaccctctttctctcccgcctcccatccaatcatgggacactccaacgtctggaattctcaccccaagagctatggccccagttcacgcacctggtaaggatctaatttcctacaacttcttcattttgattctgattcaagtaatttttttttgggtatttcatagatttgtaaatatcttaaatttatctcctgggttaattctaaacactgtgattttgactttatttttttgtattgtgttggatctttaccattaacgacagccgtgtgtgtggaaacccccatggtttgatcagggagtatggtctcatgtgctacagacagtgcttccgcagcaacgcaaaggagattggcttcatcaactattattttttaattttaggtttttattttatttttaaaaaattattttgggttggttttttgtggtcgattgacaacatcaggactggagtggggttagggctggccg

SEQ ID NO: 95089 - DNA, 510 bp, Cannabis sativa
aggcaaccatggatcatcaagaacgcgaaatgcatttctatccataattctgtagcgataacccttcaaaataagttttttaccccacaacaaacttcgccacatgaaagaccaattactaccacatttagcttccagtacaccacaatttggaaagtaacaagctttgagaactctactataaagtaattctggaaagcgtaaacatcgccaaatcttcttagcaagaagagcctgattaaataaccccaaatcacgaaggccgaaactgcctttatctttaggcttacataagtaagtccatttacactaatgtattttcttttgttttgcagaagacccccaccaaaatagagcaatcatgccatgcaaattcttaatagtactcttttgcaactggaagcaattctgtaacatctcaaaaacctaattatgaataattaggattaattatatattatgggttaattaatgttggaaatattttaccaggatctagatttaccaaca

SEQ ID NO: 95090 - DNA, 849 bp, Cannabis sativa
aaaaaacaaggtcaaacaagccaaattattttcaaaaaacaattttttgtttttaaaaataaaaaacagttttttagttatgatgcaaacatgcacttaatttcttcctttttttaatttaaactgttcttgtatacttgtcaaccaaaaaaaaaataataaaaaattatttaatatacaattttcttaaaaaaaatttacaggttacattgctttagcagttttttcagtagtttctatatgagttattatgtaggttttaattgcgatttaaattgttccattaattgttataagaatttttatataaaattctgtaaaagtgaaaaaagaaaaaaaaaactattttacagtgtaaaaataaaaaactctccccaaaaattatatgcttatttagagaaaattatattacgaaaactcatcaaggtgtttgaattttacttattaatttaaaaagaatgtcgttttttgattactcaattaggtaaaatagtaaatcggtaaaaatagattaaggtgcttttacaatgtaccctattcaaatgggtgtattataataactctaactatttcgacatttaaaagaattttttagtttaaattattttataatcgtgtatgttatagttatttaagatattttgtaaaattttgaaaaattcggaataatttaccatataaaaattaatattcaatctatctatttcatacgcatataaaataagaagtcgtgccatacaacagactttttgaactatgttttcaatgtgttaaatatttgtagattttttaaaaaaaatttcaaatgtcttaaataattacaacgtatacgactagaaaaaaaaatta

SEQ ID NO: 95091 - DNA, 551 bp, Cannabis sativa
ttgtctagttcaagtacccaatcttgaaagggagacaacccgtaagctggttgttcaaaagaagaacttcttttaaggtattccaagatcgacctatattggtttcatttgcctgtgaaatgttgactctaatactaatgaaaggcctaggaaaattctggtcgtcttaagctctttctgagtttgtcatattgttgtttattgttataggaaatgaaattggtctgagttttatactataaaagcttaaacaaaactaaacaaaaaaaaaggtacaatcttattcatatgtgttgttcatattacgatatgagttaaagaaagagcttttgatttcaatatctcattccattcttttcttcaagattattgtaggtgggcatgcaatttctgttcttgttgttcatcaattagaaccacatcacattattttcttcttacacagatttctcatgcattatcaagccatgttattactccaaaacccattttaatatatgtttttaggtacccttttcgatcaatctttccttttggtattcattttgatt

SEQ ID NO: 95092 - DNA, 645 bp, Cannabis sativa
tgaatgatgagtatgtttattatatcatgatgtgattatttgcattttatattgcgtgtgatttaatagcttttcttgctaagtctctatgactcacgggtgcttcgtggtgcaggtaaagggaaaggtaaagtggatcaaccatgagtcagagattttctagcagtgtacatatcaaccgcggtacctcgatttccagtggacaggatccaccctctttacagtattttgaaatgtagtcttattttgtaaaataaatttttggaacagaatgtaaaggttttatacgggggtcctcatacttaacggtggatttatgtttaataacacttaagtttattttaagtaaaaatttcaattaaaccacattttttctaagctaataaattaggttaaaataaatttataaaagtacacacgtggcgtccctgtgggatagggtgttacatatgagcttttttactagtttaggaaatttaaaatagaataaataagattttatcctccgaactatgacccttgtatagttttgccctttaaattattttttctgttacaaaatatttagaattttttttttttttaaaaaaagtacgtgcttataaaaaaaataaactaaaaatttttgttggatgaaacaaataa

SEQ ID NO: 95093 - DNA, 648 bp, Cannabis sativa
  modified_base (618)..(621): a, c, t, g, unknown or other
taataatatttataacaatattaatatctatttttttttaattaacattattttttggacaatcttttgtattagatctaaaacatttattcaagatttaacataaacttagattgatgaagtatttaagtttatttaacctagaaaatgacaaatactcaaaattctaagattagaaaatcaaatgaaataactcaaaatatatgaaacataaaattaattaggtaatcttttaattgaaaaaaattattttaaatattatttataaaattgttataaaaattgagtttattttatgaagaaattttcatttattggaaattttattattagataaatttattataaatagttgttataaaatgataataaatatattaaatataacacaatattaatttactgtgtattaccaattttttttgtcaaatatcggaatagaaattttcatataattattatttgatatatccaaataattactatatcaattattatttgtttacacacacacctttcataaaaaagatagtggactatacgtgatatatcaattttatttaacaaagatgtgcagtactgctagatcatttgactttttatatatatatatatatnnnntatatatgtatatatatactagcaaaa

SEQ ID NO: 95094 - DNA, 651 bp, Cannabis sativa
gtaattcaatctcatatatgttaagtttttatttcaaataccatatttttttttattaaattttcttaccatatttatctaaactagcactatttttaccatatttatagaattaccccatatatatatctatatatattcatggcttcggctacagtacatatataactaaaaacgtgacccaacacgttacacggtggatgtctctaaacatgacacgtgttttgtttatagctttagaaaatattttattgtttttttttttttgaaagaacttagaaaagttcattgcaataaaaagttgggaatcacaataggggacccccccctgaaaatgtagccattacactgactattttctctagcccattttgctaaagcatcacaagctaaattgtctctacgagaaataaaaaagaaattacaatcatcaaacaagttacacaagtttaatatctccaaagccagaggtttcaactgccaaattgggggcaaatctgtttcttcaatgcatcaatcagtacttttgcgtccgaggcaccggcataccttctgaatcctttctctctaactagctgcatagcccattgaattgccagcaactttgcctcagctgcagaagaagccgaaacttgcttggcgaaccactcc

SEQ ID NO: 95095 - DNA, 928 bp, Cannabis sativa
tcaacatagaaacttgtacaattacatataatatttatacatatatgtatatgtcaccccccaaatctctggaattagttacttgcataaatatatatatatatatatatgtataaattaaatatttatacgtaatatatagcccaacattgaaccatgcagtggaagatttgcaaagaaaagtttttaattgtgtgcatataatattagaatttatagatatatattacaatgagatcatcatttgatcataatgtagtcatcatctgctatatatcgataattagaacacacacatattgacgtatatatatatatagttatatataacatacatatatatatctataatataaatattgacacaatattgattattactaaaattgaaaaaccaaataacataagtttaacttagagttatatactacgtacgtatggtaatatacatggagaatttcaaaaatacattttttttttcttttttaagttttttacaattttacggtctaaagtatttatttatttataaaaatatatgtaaagttttaaaagtaaaaattacactttgttcaataaaaaatatgaaaaaatttaaaaaataacgagaatttaaaaaaaaaaaaaacaatcacatcacaattataatacaaataaataaactataaaataatcaaaaaattaatttattatttttactgaaaagatagatattttttatatataataaaaatattcaaagtgtaaaaataaaaatttttcatgttaatatatttttttttgtctattatataattttttttttgtctaattacatgatatgtatcaaaaataataatactcaaataatcgtgtaatcatttttgtcaaattaagatccatttttttaaggaaaaagtaagtaaagaagaaataaaaaatcattcat

SEQ ID NO: 95096 - DNA, 707 bp, Cannabis sativa
ttgaagaaggtataatttttttatcttataatgattgatttataaattaataatgttattttattttattgtgctaatttaatttaaataatttgagtcacttaatacttaatttttgaattgtagacaataaaaaaaagatcaaagcatcaccaaaagtgaagaatattgtcattcttaattgatgttgaacattgattttttttttttaagttggtaattatttcggacaatttaattaattttaatacttattttgaatttggatgactgtaataattattttttatttttgattattttatgattttaccttaacttaatatttatttaattattcaactcaatttttttaatgagaaaattcaacttaaaaattttaattgtaaaaaattaaaggttgtaacccaacccaacccaacccgaataataacgggttgggttgggttgttttataattaaaactagatatgaatgggttagaatttaataggctgatctcattgggttggcctactaaaatagccacaacccgaccaacccaacccatgcacagccctaattataaactgaactacttaagaagttttatcgctattatcctttcaaaaaatttacaaactataaaagaaaaaaaaaacaacttgaataacctaatgaaaattcaaattgcccaatgattatatttattggattaattatttttt

SEQ ID NO: 95097 - DNA, 1369 bp, Cannabis sativa
taactttcacatcgtgcttcccatatttccttatctctagatcagtgattgtggaacttatgatggtctttttttagtttttcccttttatattttatctataccatttaggaattgatggaaaagaaataataatattggaatgctgatgtgggctttactttcacttggcttaagagtactacgactttttgcagggcactttggtaagtgatgaagggtttttttacttcttagcttaattatataaatacagaccaaaagattgttttcaaatttaccaaaatggctcttgtagattggaatggttctagaagtaggtttagcttagggggcaaaagatatacacactatagatgtatatagccatagattaagccactaaaattaacttagtggtgagggagggatgggaaaaaggaagaggttgtggatttaaacccaagactgttaaactattaaactattaattaaacgtaaaatatcattacgctacacactataagattaagaaccaacggttttagatgtaaggtgtttaggtggcaacgatacacactatggatgtatatagccatagattaagccactaaggctaacttagtggtaagggaggaaaagaaaaaaggaagaggtcgtgagttcgaacccaagactattaagttattaaactattgtaaaatatcattacgtacaccaaaaaaaaaaaaatataatcatagattatgaacaaccattgctattagacacctcactatccgattgtagtattataagtaattagtaatttgtcatattattaaaaaaataatatgacttaataattaatgagagaagttgaagaatattatttttcttcatacattaactaaatttacatctaaataaaatttaattcaaatgtacctcatttaataagtattgtactcaaattatcctcacaccctcatataattaagaaacaatttcaaacataataaattgtgttctttagagactgacgtgtaagtttgtgaaaaaaattggggcaaaattttagttatagaaaaatagagactattgttggaaaaaaatgagatagaggtattggtagaataattattaaaaaaaaagataaacataataaactttgaaagaagagataaaaattaaaggcatcaatttaaaaaaggtatataatgtaattttcttaatttaattactttaataacaatataccatatattatgatgtttgacaccttaaactctccttaaaatgtctacataatcccaaaacataatattttagggacatgattttgtctcgtgattgtactttcacgaaatgtattccgtgatgtacggcagccgttagatgagggagttat

SEQ ID NO: 95098 - DNA, 2684 bp, Cannabis sativa
tttaaggatttttatctaattttagtaagaaaagtctaatataaatcaaagtttgaaggacatgatttaatacgtgtcaaagtttaagggacataatttggtgggtatcaaagtctaagaagcataatttaatacattgagaatccaccgaattagtaaaattaaataaaatttgataaaaatccttaaatccaacaatctcaataattctggaaaaaaatttaaggggccagaaaaatccaaagaacataatttaatacatgtcaaaatttaaggatcaaaaatcctaattatccttattataattaccatacaatcatttactattattaactaataacaccacaaattgaggagtttttatttttgctttctttagttatgccaaacattaaaaaaggaaagaggttccaaatgacaataacttgcacatatatgattttatttacaacttttccctagctctctgttagttctgcaatctgaccaactagatgagatttcgaagattgcggtcgtaacttgcagctcaaggaatgatttattttgcaggtttcctcaattttccattccttgtaatgtcatcttagttatgaagctgtttgatctttgaattgcttcatcatagaaggatgatacattgttgatatcctcttcatatttatatctttatgcctcatatttctgaatcttctacttcagagctcagcacaaagctaggaaaagctagagttatatccctgaaaatggagaaaacacaaatgcaatgagctgtttcgtaattggaataagaacaaataactccaacatggaagctcagattttttcgatgatcaatggcgccttttaacacaatttattactcactttaaatatggtaaagtcatgttctttatcagagtaggatgtttcaacacaaatgctttccactcttcttggtcgatccttccatcgccttttgaatcagcatcaccaaatgtctgaagaaaataaagatttcagaagtgtttggttgaaaaaagaaaggatcttgattacataaataaatacaaatttgcaccttatccacaatttgttcgatttcatcatcggaaagtattagatctgattcgtgcaaaagggccaaaaccatctccttcaactgtcaataaaatgcacatttagtaactcagataaagcaaaaactttagagaaaacaatgagaaggtaagaaaaaaaaaaaaattgctgtactcacctcctcgcgctcgatatatcctgtgtgtctcagatcatacaatctaaaagcaactgcaaaaagataaatcccatccaccaacttagtcaattagaagaaagtaatgtatggttttctttgactaactagttctggcttctgttttgttattctaatggtggcaacagttagaacataaaagtactagaaatctttaacttacatgcaattttgtcttcaacatctgcatttgggtgaaagacaccgagtgatcgaacaaattctccaaactcaataaccccattacgcttaacatcaaacaaatcgaaaatctacaagaacactcaaaataactcagtttagaatgatagataatcaaaccatttgtttccaagagacatgaccattgatattggaacatttcacagagccatgaactactagatgccatattatattgaagaggagccaacattactcaccctatctgcaaaaagattccttctatttctgtttctgaaaagtgcaagctggaattcttcctggtaaacaaggacaagatggaaaattttatttcagagcagtaatatagcatagctgatataatatgaagctaatttattagtcactttacaaaatgtgaccttaggaaatgcaccttatggataagaccgtcgtcaattatagagctgctcaactttttaaaaagctcatacaaagcttctacttcacttattgtgactgcgaaaaattggaaaatagtcaattgtttattcccatatctagttcttgacaatggagtcatgatgttgtttcaaaacattaacaatcacacaatctcttctgaatcgaaaactcttgcaaattacaatgacatctcttgaaatttttccaaaatggtgctgataataagttaaacaaacaagagtttttattaattcagatatgagattatgacagtggtttttatgcaactcacatggtgtttcggctgcaagaacagtaggctcttcatagccaggcgttttcacttgcttggatggataacagcccattattgaagcataactcaagatcaaaactattaagggctgcagaaacagtaaacaaaaccagtgatgatcagtgatatgtaaatatttccttacacacacacaccatattatcactccctatggaccatatgatataggaatggctagacatacagtcacccataaccaaaatcttctaagggctactacattactataattattaagtattcagatacagattctagtgggaccaagcaagcagaatatggctcccagtgcctaaaaatcagtggatttatgtggtggaaactccagctgcacagtatctagttctttagtattaaaggttcagatctggtcttcccttgaataatctaaatataaaatacatatttcaaggaactcatgttgtaaatcaagtaacagaaaaa

SEQ ID NO: 95099 - DNA, 614 bp, Cannabis sativa
gccatggaaatgaacagtcgaaaaaatgtaagtttaacaacaggagaaaaagtatcacaatagtccactccataggtttgagcataacccttggcagcaagacagacctttaagtgagcaattgttccatctggattgactttaaacgtaacacccatttacaccttatggttcgttttcccgaaggtaaattaaccaagacccaagtatcatttgcaactaaaacattcatctcttctatcattgcagcaagccaacaaggacgagacattgcttcagttttaggaatagtgatagattcaagagaagcaataaaagagcaagaagaagagagatgtttataaaaaacaaatgaagaaataggatatgtacatcggcgtttaccttcacgtagtgcaatgggaagatcattgttgagtttcgaatttgatgacaaaatgcaggtgcaagaaatgaaactggaggtggaggaagtagacgcctcgagtacactataggagatggtgcatgtgtgggcgttgtgggagctatgaccgaggcaggtgaaggaacaaaagactcatcaaaacatgtaataggcacagaaggtgtgacagaatttaccaacaaatcat

SEQ ID NO: 95100 - DNA, 1482 bp, Cannabis sativa
agagttagtggggttgttgctcccgcctttggtgggaaagaagttggaaatttaaatgatggacagaacacaactgggccggatacttcattaggcccaatggattgtccaatagtgccatgtgatgctttgggggcccaagcttcaaaaattaacacacatatgaataatagtggcccaaccacttatggccgaacagctggcggtgaagtgtcaaatgagatatatcattctgcatctcgtaaagaagtcagggggaatggtagtgaggatgagggcgaaggggatcagaaaaaacgaaaagggggtgctgggtttgtagtgactgattctaatgaggggaatgggaagaaaaataaaggcaaagaaattcttagttgcccttcaacttcgaattcggatgacaaagtcccattgttaccttctctcgttaccgaagaacataaaggaaggaagggtgtctctcatgggcagaggaggaaaatttctatcaagaatcgggcacgccatgttcatagagaaaaggctgagatggggcactcttcctcagagcaaatggtggaagggattaatggttttacggtggtgggatgctcccaggatggcacttttgtatttggagcagctacagagacaaacaatgaggcacaagacactactattacatctccagaggtgagtatttctacagaaattaatttctcatctcatgatactgaaattgaagcggcgagtcttgctatgcaaggccgccgaacacaatgaaactcttaagttggaatgtccaaggaattgggaacccttggacattacgtgctctgcaatcccacattcgggatcatgacccgagtattatctttttagcggagagtaagttaactagagttcaagcggaaagactttgttcggtcttgcaggtaggagagaatttttggtctgttgacagaattggtcttagtggtgggttattattgttatggaaggatgatattaatattcggattgattcaagttcccctggtcatattcttgtggaagttgcggggaaggattttttgccctggacgttaacttgtttctatggacatccggaggcaagccagaggaagttttcgtgggagcttttacggaatctcaaggctggaatacatggtgcgtggttatgtattggtgattttaatgaaattgttagtcttgctgagaaaataggtggaaggacgagaagtgctacgatgatggaagattttaaggaagtcattgatgattgtggattgatagatttttgctcggtgaaatcagaacttacttggtgtaatgagcatgaatctaatcaagttatggaaagattagataggggtttatgcaatgaggaatggttgagttgttttgagggagcgaatattcgggttttggattggtgggaatcggatcataggccgctcttagttgatttacctgtagctgtggagcgtgaacgatgtg

SEQ ID NO: 95101 - DNA, 507 bp, Cannabis sativa
gcattaacggaagaatcgtcttgactagggatgacggtcagagtttgtaatgactactaacagaagcggcgatgatggatgagtttcttgttctaggagccatgaaataagaggaaaagtggggaaaagcttctaagcactgagcaaccttcaatagggctggccggccaagtgcacggaaattcaccaatacttgtgtttttctcacaagccttccaactcgccctcagcattctcacgactttagaacagctcaaactgtccacaaagatatggactctccatcaacaaataacaactctattctttagggattattatttttttactttgtatttcaaatatacattgtaacttttctattttctagggatatatctatatacaacttgtagggcctactactatataaagggcaagatacacactcataacttatgctgcaagtataaagggcaagtacgctcaaaaacactatagcaatatagttctctctctctctctctc

SEQ ID NO: 95102 - DNA, 681 bp, Cannabis sativa
gggaggttgtaatctttggttattctggttgatggatggattttgttcatttccttgaggtcttacatattgccttagatagtctctgagatgagattttcaatctcgtcttttagttgacaacattcttctgtcgtatgcccaatgtccttgtgatacttataaaatttggttggatctctcttgtgtctcgcattcctcatgggctcaagattatagaatgcgaccatcggcttaagtgcgagatagatattttcccgagtgtcatttagctcggtataaatagtgtagattagcatggacttgtccagcttcttttattttttcttgtccttggctgattccttagagtgatctttcctcttagagcctcctggattgtcagccttcgtccatacggtacttatcgagacaatgataggtttacttcccgagccagtttttaacaagttcatctcttttcttgcttcctcttttcaaacaaacacctaagctctctcattaaactcactgaagtttttgatggggcgaccctgcaagtcatcccatagcttgcctccagcagttgagagatcagttgtgatccttgcctggagacggtaagctagatagtgtcattcaaatttctcactatggcagcagctgcactaaaacaactcaagtatgccttaagtatcttgc

SEQ ID NO: 95103 - DNA, 555 bp, Cannabis sativa
ttaatataataaaagttttacaaaaaatctctgaacaacttgatcagtaaaaatattgttattattattattattattaatattattattatcataaattttctcttgataattttcctcattaataagcgactcagcttcttttcctgaagaatacccctcttgagctctagcctatgagaaaagcaaaaactaattattatcgaaaacttgaaaaagctaaatacaaaatgggtgggtttcattattataatccaagtctagccccatgatttctaatctaattacgcactgaaaaacccaatatccaaaattgtcatgaccacctccgccatctctaccaccaggaaatcggcacaccacatctcggcaaaaacttcactgctactggcattgtcaatgtcgtgcacaacgaattcgcatgagaaataaagtcggggatagaaagaactgaagagctagagagatcgttggacatctgagccccgaaggagatggagcgaacaagatctgaggttcaccgagaaccactaaccccaccccctgccgtgaacc

SEQ ID NO: 95104 - DNA, 618 bp, Cannabis sativa
ttttttgtgttgttagcctaaactacacagcaatgttggttcattactgaatctctatattctttataatgttgatattatatacagttgtgatcttaattttattattatgtttttttctttgtatttcaaatgattattaacattttttatacaatggtaaaacaaataaatcaacatgtacatctgttttcaaatgtatttttatacataaaccaattcatatctgctttaatagtttgcaactttaattttgccattctataaattcaagactaaacacttcattatcaaatcaattcagttaaaatgtatttcagagttcatttattcaaatagaaaccaaattcacagttaatcatctcaatagcaatcattatttaaaattctttctttttcccttgttgtatctgtaaaaatgttctatttatgttgtatttatgtttttgtaatgttctgtggatgttgttatttttcagtctatacttgttttgttgcatgtcctcttgttttgtcattttctttcacatttggtgcatttgatttgtgtctttgtctcccaactaggtcttgttcttttcttctttggtcttttcgctttcaccctttcaagtggtg

SEQ ID NO: 95105 - DNA, 826 bp, Cannabis sativa
atttttattcattatgttgtagaatcggtcttatttttatttaaggtaaatagcggcataaacctaatgtttatttttagcggcataagtatccaatgtttgtaaaattgtaattttccagtttcgtcagtacaaactctgttttgaatttattaaaagaacatttagaagtaactgatactacatatttctatcttgacccaatgatcaagaatttaagccttacatgtgccctgtttaagacaattgcagagtctgtactgacaaaattagagaaaaattacagtcttacaaacattgggtactcatgccgctaaaaataaacattagccgggtttatgccgcttacaaacataaaactttaagtatgtatgccgctatttacccttttatttaaatctgaattttttaatgactttttcgacaacaatgatttttctagtgatgatgatttttttggtgacttttctggcgataataattttttcggtgactattctggcaataataactttttcagtgactagtttgacgacttttctggcgttagtaactttttcggcaaaacttattattgttttacaaatataaattttttattttcttacaaaacttcagcataaaaaaacttatttaaatgtaaaaaaaataaaaaaaaaaattcatgtaatttctacaaaaatatatatagttagcttatgtgacgtttccattttatttatttttttataaaattcttttatatttttttaatttttgtggttggggtgtgatttcaatcaatttaaataaaatatatgataacaaaacaagtaaaaaaaaaaaa

SEQ ID NO: 95106 - DNA, 737 bp, Cannabis sativa
ataaatttagtaagagtaattataatgtagctataaatatttttttatgataaataagcccctacaaaataaaaattctgaatccgtcattgcatataagtcatgtaaatctcaaagataagaaaattttttaaattatcaaattgtattctatgcaataagtagaatcttatttttgaaaacatgatcataataaacaatatttcaatgtatgatacttgaatatttttatcaccttttcaacacatccaatagtaatgtatcgactattctcatcttcgtaatgaatatgcttcatcgttgcttgaagagctttttctcttataaattttttcaacggccaacgagttaaaaaaggctcggtgcataggtaaagactatcccatacaaaatcttgtatccaatgaggtggataataaagatcctcctacaatattatataattaatgaagtcatgtacaatataattaatttatgaagatagaaatataaataccaacctattaagtgatgtacatgttttagttgtgtgttaattaagagtattgatatgtgtatacacataaaatatacacaaatttgatacatatttatgtagtaagtaacttttaacaataacgatctatcttgagtaagattcgataattatttacaacaataacgaaatataggggttggacattctaattaagatgctcgatcaatctttagtatttctattagggttaacactacaa

SEQ ID NO: 95107 - DNA, 593 bp, Cannabis sativa
ttcaagtacctaattataacaatataggatgagattaattagaatggaaaatgttatatatgtcatgatgataaaatggtcatcaattatatataattattatatatgaataaaaacctttgaaagagtatcttggatgcgctttgaatgttgatcaccaatgattccataaccctcttttccataaagaggtgataacaaaggatgagttgaaataacatgcattgtgtatatatcagtgtggtcctttacttaattttctttagataatgaagaagaatgagtctctctctttttgctgttttataataacaattagaatctttttcttgtaataaaacaattaatgtattatgtaggggtgagagtggacgagaggaatgggcatgcggggaagtttgtcgtttagtggactaagcctttacatttcatacagttgttggatttcaatgcataattatcgaaacctggcaaaactacctctaccattttctaacgtaagttcttaatgttatatgttagatgaaataaaactatggaatcaacaatccaatacgtatatgtatttgacaaatataaaagctccatttatg

SEQ ID NO: 95108 - DNA, 1541 bp, Cannabis sativa
  modified_base (1145)..(1147): a, c, t, g, unknown or other
  modified_base (1205)..(1205): a, c, t, g, unknown or other
cttaaagtatttttagtgagttttctgatacagaactagggttctttataatcagtgtattcttttttctctcaaagatctttttactttttttttttccgtacattctacccttatttataataacataggttggcaattaattacatttcaatttgaatcccaagacgatattttcccgaaattatgggctataattatgctccacgtaaataaattcagttattatttaaaaatcacacagttgtgatttaaaccgcttttaaagggtcaatgctaaagtggactcaaacacgctgcaaaacgtacctcgctgaggcatctcgcttggtgcatgaacaacttgatttatccataagttttccagcaatagcatgagcaccattgtactgagcagatttaagaactactctttgatcataaggccttgcagactggacaataatgtccttgggattcttaatggcaacaataagtctggtagcgagctggagcttaacaggagtatgccttcatgtacatagtgagatgggtgtctcgctatgcgttatctatgtccttcaagctattacacttaatataatgtatggtatacgctaagtgttctaacagctaattagccttgtcaacatctcgctacatattgcaagacagatgtctcgttatgtattatcgatgtcatccttgcgattatgtcttctgacgtgaaatggtttctcgtgagtcaatagttcgtacattcttgtctcagtaaagactgtgcgatctgcgagttataataaatataccctattgactctgtattaaattagttattccatttaatataattgccattatatttgctagttcatattctctaagattgacacgtgccaccttctgaagtaccagccaaatttcgggtataacaattgtccctaaagaagtccatttttaataaaaggtgctttttaaataattactaagggtatctttatcataatctattttgaaaatatgcatgccattgattttggcagttttgtggtttcgacggacattattaacattaatgagccatcctttccacttctctttcatttctatccattggatcttttgcattttgatctgacggttattaaatgagtaatttgcggcannnatacctaagtttaacttccagttgtaaataaatatctaagtttaatttttggcggtantaatacctaagttataattctaaaacttttgtaggtacttgattgttaattgttaagtaaattaccacgtagctatttctaattggtccaagtcattaaatttttattttttaaaaataattaatttaaatgaaccaataagaaaatgacacgtggataatgacataatatttagtggttaagtacctacagagttccaaaaatttaacttaggtattattactgccaaaaattaaacttaggtatttatttacaactagaagttaaacttaagtatttatgctgaaaattactcttattaaattcaaagtgtaaaatggtaaagaacttatcttt

SEQ ID NO: 95109 - DNA, 602 bp, Cannabis sativa
ataaatttaaagtaagggcattttttatttaaaaataaatctaagaggttattttatttgtttattttaattgtttttgaacatttttttttgttttaatttttagaaacctagaatcatgttaatgagcctaaagtaaaaaggccaaaatagtaatttcctttataattataataattttacatgataaaatatacattgagaaatcaataatttatgaacacactttattttattattttgactttgtataaagataatatatattattcatctttttagagttttttttttttttacacttcaaaacagtaatagttttttttatatttttacgtaattctacatagaaacccgtattgcaattaacgctgcaacctaaatcgcaacaaaaaatcgtaaagtaacccacataaaaaccactggagaaaccactctagaaacccaaaccgtaaatttaaaaaaaaaaagttaaaaaaacagtacatgagtttcatctcacatttcttaaaatatatattaaaaataaatatattttaaatattaacataaaaatatacataaaatcttattagaataaaaataaattaaattatgaaaac

SEQ ID NO: 95110 - DNA, 560 bp, Cannabis sativa
gtattttcaattaaccaagaaagagaaagaaaaattgaaaactttataaatccttcataaacagccaagaatcacatttcataaagaaaataataataagaagagaaaaaagaagctaagaattacatgaacacgtaaagcagtaatgaaaaactactagttatctttcactgtttagtcaaacaagggtcttaaaaaattttcgaaagggtcttgagttacgtttaatattttgttctccctgtgacaatgtactttaacttaatatttttaaatcattgaggattataacacatgtaaaaaaaggtatattaataatgaattaaagaacaatcgtcatttataatagtgtatactatatacacatgcacttagataaaagactaaatatatataagtcaatatattggaaagtaaaaaacaggacattctattgtcttgaaatatgtaacctcacttttaattctctgtaaattattgctgccagggaccaccaagtaacaaagaatgcccttttttttatttttatttcaatcgtaactttaagtaatttcacaatg

SEQ ID NO: 95111 - DNA, 572 bp, Cannabis sativa
ggtgtaaagcctccgacacattttttcttctggttttttcagcctcttcttcgttttgagtttttttttttgttttgaaagagtatcataagatattattgggccgacattccttgtcaatagttagtgggctttggcccataaagtttcatgtctgttatcaggcctgactgagcaagtggcccaagtcggcccaatactagttgaaaaacaatgatgaacgattaactcacgattaccaccgcttaattttctccatttctcttaacaaacttaaatttattcatcatctcaaataaaatactaaaattatcttatatacaattttttttttattttttttttaatttacagtttgagatgctccaataacttttatgtgaattgctatgtaaattttaattgcgatttaaattgctccgttagttattatgcgagttgctatttaaatttgtgtaaaaatattaaaaaaaactgtttttaagtataaaaataataaaaaaaaatcgtataattaattccatcatgcatgtgtggtttcttctatttttttttttttttttttttttttt

SEQ ID NO: 95112 - DNA, 545 bp, Cannabis sativa
gaaatatttaatttattttaattggtgttaatttttaaatttgagcaaagtggtaaagtgataatttggtatcaagcccaattgaaagttaaaaagcccaactacatccataatttcgaactatacacaagcatatccattaacgtggtcttcaataatcaatttcagcaagagacattccaatcaagccatggactcttgggtccactcttttcggagcccaattaaatacttcagcttgtgagatgagttccgttcaaatttaatcacaattcaaaagatccaaactaaagtcttagcacaatattcggagcacttatccatgactccaatagccacgtccaaagcttgtcacactcccatgtattcagaatttatcggcattctccactctcacacgagtcagcagcattattctcacgttttttttttttgatcaatcaggaaattcattaccaacaaatacattacaagctaacagcacctccagccgaggcctgcattttaatctatacagattgtttcttctattttcctccatattc

SEQ ID NO: 95113 - DNA, 678 bp, Cannabis sativa
ttttagtttaaattttgaaaatttaagtttctataataatattataattaattttgttttataagatactagagtgaaaatcattttcatcttatcattatattttttatcattgagtaatttttgtattaaataaaaattttaagagtttgtaatttttgtaatgattaagcttacataattatttgttaatctgtattaattattgcattaggtcaactataataaagagaatttatgaaaaaaaaaggtataacagagaggaataaaagaaagttcgtagcgctataaaatttagatcaacgtatattggatattttaacactcctaatagcagcaaatgtcttttacttttttttttaacttttcttgttttgtttcatatagtttgacattagtggttatcttttttctctctcataaaatatgatatttgttgactcagtttttagccaacatcacgaagtcacaaatacaataataatggtttaataattaattaaagagaaaataatatagtataataagaatgggatttatagagattctataccaattttaatggtaatagtttatttgtcttaacttttctataaatttcttggttcatacctagaataatatgaacaagattcaaatgagctttccaagttgagaacaggggcaaccctggactaa

SEQ ID NO: 95114 - DNA, 767 bp, Cannabis sativa
taattcatcaagaagataagaaaccaactccagagataatcaatggtatctctgatgaggcagttgccctattaccagaaactatgtaaaattcttgataaagaactacaagaaaaatttccctatttgtaaagaaaatgttcccaagaaaaacaaagggggaaaattcaaacaatttcaaccacccgttgaccaaaagaatcgaggaatcaagtgcagacagtgtgaccattttggacacatttaggctgagtgtgtaaacactctcaaaaagaagaaagcacttgttgcaacctggagtgatagtgaggaagaaaagagctctactacaagtgaaagttatgatgaggacaaataggtggtagcattcatggcccaaagtagtcattcagttgagtctgaagatgatggagtctccaattcatcagaaggggacagtgaagataggcggaatgtgtacgtagaaatatttgcccagtgggaatacatgactaagcatattagaggtctgaaaagttccatggagcaactggagactgatacaattaagaatctcaacatgcttcttgatgagaagaataatgaaatataaaaacttactactgatatggtgagaactaaacatgcacttgaatttattcctccaagcacaactgctatcaattaggctctacaacttcagaaaccctatggtgatcgaacctccattggatacaaaatgctgtacaaataagggaatgatatgtcagttaaggatccacatactt

SEQ ID NO: 95115 - DNA, 1513 bp, Cannabis sativa
aatttcactgtatgttttcatgtactagtatcgacgacccgttcaagatattattcccttctaattacatatcgactggagttttaacattttccattaattatgtattttttaggacagtaattcggataaattcgtcagcacatgttctgaaaaacctacatcttctacatcagttacaactgcttcaatccttccctcactacaacatctcttgcagcaaaatgcattacaaagggtgcgtactggaatttgttttgttatttactgtttaggaaattatgcttttcctcttcttcttcttatttattttttatttttcaattacaggaactaatattgagatctattaactttgtacaacaacaaattgctggtatgtgtacatatttttcaattctttattctcatagcatataagttatcatcttcttatcttataatgtatttttctaatttgcatagtgaaaggtagaagcagagagttggcggaaccagtaggcaacaatgagctcaatcaggtaactggatatactcggttttgcaactatggagttttactatcctctcctttcatcctaaattatccatatatcttactctctctcgttcgtaccaaacatagctttaagcttgacaatgacggattataatgaaaccgaacatcttttaacactaagacgacactttaaaatggtattaatactaagttgaaatgaaaaccgaacatctgttaacaccatgacgctttaaaatggtataactaagttgaaattgttaagtgaaggagattcataccatatatgcagtaaaattttcttccattgaaaaaagagtgactgctatttggtttttctatgtaaactcgacatgttttatcttctcaagtgtctgaaatgagaatcgtacgtaggagtaaagaaatgtgtcgtgttttgcagaggtttgttactaacagcagagagagagccctcgaaactcaagtactgttattggaacaaaagtaagtgggattttccaaaagtaattttcaatagatatattccattcattttgtttactctctttatttgactgtcgaatctctatgtttataaatgacagcaatgagagactagttaaagagttgcagatgcaaaaaatggagagcctcaaggtttgagtttaattactgaattatctcttttagattagtactgcatgatatgattgaacataaacaaaaaaaaaagaaacatgacctgtattcggtttaagggaaatgtgtgaaacccgattcaaagccttatgattctaattttgtctcttaatttgttaccagctggagaagcaaataaagacttttaacaagtaaagtaggagctgcagatatgggttttactcttttctttttcactgggataaggtattacttagacctgcatatattaacacttcactttttttggttgtgccatacgtaaatgtgtagttcttgatatttgtctcttgtaaataacattttgtatccaca

SEQ ID NO: 95116 - DNA, 722 bp, Cannabis sativa
gattcctgaaaattgaccatccggaattccggttggtgcagccttgtaccatccggaattctggttcaccacaccagaaactcgaaaaatttcaaatcttcaatgtcccaaacctaaccaattgttctcaaacttcacaaaatagttctataacatgtatacaacatatctcaacactcaaaaccaacaattaacttaaaaccacaacttcaccatggttgagtaaaaactaaactccttaaacattatttcttccaattcatgcataacaaccctaatatccaatccaactaagcttaaatcatcaccaatttcaacttaaaaacatgtcttaactccagcaatcacacaaactcgaaataaatataaaccccaaccaaaactcaacctataacataagaaattcatgagaaaagaggaagaactcacttacaccttgagcagcacttagggtaaataaatttagcttaagcttggtggaattgatgaagaaaaaactcttggttgttgctgatttttagggctcgaaagggttgaaagaaaagaaagaatgaggttatattttttttttgctttgataatcttcttatttcctaggcaatacataaattaaaacattatatcaatttactctaactttctaattcagcctagaaagcactaaaggataaaaccttggtaaatgactattttaccgtcactcaaaaaaacttaagttattt

SEQ ID NO: 95117 - DNA, 636 bp, Cannabis sativa
acgccttcgaaggtccacggtagaccaactatcatcagagtactgtccccctattccactgtcctggttaacggaatcattgggcggtttttccttcccctgggcctaggtactttcgcaccaggccctttttgcgcaacaggacctttcagagcagaaggacgtccaagcccggaggcattagtggccttctgcgcctgcaaaggtctattggttttattcacgctttttctaagaggtacgggagctgtcaagttttgagggtcacccaccttcacttccccttgtcctttgcaggagctgaggtttcagcgttaatagggttttccctgttgtttccgttgaagagttccaccgaggcatcttcttcagagtcctcttccaaatcttcgagcttttcttggaggcgcatcatcatactctccatcttttgagaaaacttctcttgacgggctaacttttcctgggtctcatgcagctctttggacactcgaactacttctaggtcttgttcataataatacccatatttataatactcgtcgtcttaagtttcacagtcttcttcaccccatttgcgatgcttgtctaagttaccctctcagttgtcaacttctgatgcatccccttctctcg

SEQ ID NO: 95118 - DNA, 1701 bp, Cannabis sativa
  modified_base (689)..(692): a, c, t, g, unknown or other
  modified_base (1611)..(1611): a, c, t, g, unknown or other
tcggatgctaaaacagataggggtgcatcaatatatccattttaaggggtacattgtagaattttccaaaaatgtatacaaagcccaaaataaataaaacacattttgaaccaaaaaatctactccatgcaacccgatcgatccctatcctaaaattttgacgtgctactcatacagcgcgcccacaaaattcaaaatcaaacctagaattgctaaatagaatacaaagttccagttcaggtccaacaattgaaaattctcacccaaatcgatcgaaattagggctcaaatttatgtatctttgagcaataatgatcagattgcaaacaaatttctcccaatacgagtcataaacaaattagggctccattcaatatagggaaaaggagggattatgggaatttgatcggtaaccgagactgagaagccagagaggccctttcgccatttttggagtctggtctaggatatgaacatcaagccactgcaaccataatcccaacgcctttctgttcgaacaccaagcccgtcgaaccatgaatcccaccctttgtcaaccacaaacccagaataatttgaacagcaagcccatcgaacccaaaaccagtcaaacacctagcttgtcaaacccagaacatcatcaaactcgaacaccacccatctgcacaaaagagagagagagagagagnnnnagagagagagagagagaataaacagagaagaagatcagtttatataccttggagtttcattcatggggtctcagatctgcagtcgcgtgggcaaggaagaaagaagatgaagcggagatggtgaggtttggagttgtcccttcagcgccgtctaggtttggagtcgacgaggggcaccgtctgggttgggaaactggtggtgccgtctgggttggggatctgtcgagagaggagaaggcagagaaagattagggtttaatttttattttgtaacttgttttctctcttgactttatgccttttttgtaaataaattttattgatttttttttaaatcaaaattaatttattatcattaatacaattttgaaatcagtccctattaaatttcaaaaaaaaaaaaaaacagaagaaatgtccctattaaaaaaaataaaagagtaaataattaataattaatacatggagccagctgtattttaaaaaaaaaataaaagaataaaaaataggttaggatataatgacgcgctatgaaagtagggacacgtttacccattcgtgctaagagtgtcactatatactagtattttttataaaaaaaaaataaaaaaaaatatggaaataattttttagtgacacttcttacatttagtgaccctgatcctaagacgctaacactgaatttttagagttattttgtgagagtcactaaagctcatctctaattctttagtgacacacaaaaaaatgtgtgtcactaaagtgtgtaactaaaaggtaaatttgtagtagtgaatgttaaatgagattgagtaatatagttgttatttgtatatgaattatttaaattattatgtatggaggttgtataggatgaatattaggtagtgtagtatgatgatgttgataagttgataanttggatgattggtgggacaaggaagagttatgtttttatttttatgtgtgtaggaaaagaggagacaaggtagtatgttagtagtaaaag

SEQ ID NO: 95119 - DNA, 1248 bp, Cannabis sativa
aagtatgggaatctgacttttatagaaaaaaaattctaaaattaaattattaattattctttacaaaaaaatataaaaaataaataaattattaatgattatttatgttaatatttttttctaaaaaaaataaaatataaaaaaaggggtagtaaaattatgtatataacatacatattacagagttgaaattaccattcgatttcagctgctgtgagcctgtgaattctctctctctctctatagctccctctctctctaaaattctctgcggttctctctgagctcttttgggaagacaatcaatggcgaatagtaatcttcctcgaagaattatcaaggttattcttcctataccttccgatcttttgatttttcaataccacaaaattatttttctgtatgctttgcatgtagtgacgtatatgtcgatttctcatttttttttcttgtgtgtttccgtaattgcgtataggagacgcagaggcttctcagtgaaccaggtctacttttctttctcttttattatagtttatggaaaattctccgtattctggcactttttttgatggttataattggtttactcttgttattgtgagaaaaatcacgagtgatttattatgttaatcaagcttttcttgatcaaggattagtcatttgtttatctcttctttcattcatttcttgaaattcgtaattcgacactttaaagattaattctatactgtctttgaacaaaatatagtagcctaacctcaagtcatcaagattttgtgggattgaatttcgaaatggatatatatatatatatatatctgatggagttagtatttttattttttatcacgggatcgtttactgtttgatcagaaatgggtactgtagtaggaaaagattagagaatggatgagaagtataaacggggagagttatctctttccaatttcatttcattaattatttcatggtttcgcccaaacttgtttcctaaatgtaataagaaaaacttttcttattttcacttatcatagcagctcattacaagaattagcaaacttaatttttgggaagcccagagataattcaaaaccttttgtgctcttgatgaaataataattctattctaaccaagaaccatactttctgttttttgtttttgttacattaacgaatttggtattattaaaaaagtcactacttacatacatacatttataactttttaattaagttgcaatttatatg

SEQ ID NO: 95120 - DNA, 590 bp, Cannabis sativa
  modified_base (533)..(544): a, c, t, g, unknown or other
ctaatatctaaaattaattaaaataaaattaattaattttattttaataattagattttatatttgaaaaataaaaatctaaatacaaaatcacacaaaaaattcgaattaattttatgaaaaagaatgaaaagataaaaaaaaaattttaaaaattgcattgggctcggatggtatgcagtgcattccatccgcgcgcgcaagatgggtgcacaaccgagttttaccgcacacgcacactgcacagctggatttctacgtccggaaggggatttcagacaaggctctgtgcgtgtggcttcggacaaggcctatcctaatatgcgtgcacactaagtggtaactcgagtccgcgcgtgcatgagggtaatgccacccctgatttttttttttaaataactaattcaaataaaatcaaaatcaagttctgtaaaaaaaatcttcaaatccaagaaaaataattccagaacgaaatacttattattttacgtaaatattttgcaaacatcaatcaatcatcaataaacacatannnnnnnnnnnntcatatccaaatcacacatacatcgttttaaattcatatttcttga

SEQ ID NO: 95121 - DNA, 546 bp, Cannabis sativa
tgaaatgggttttatttaggacacaaaacccaacaactcttccccttgttagataagaattctttaagatgtacccatcgaaggagcccagcaacttcaaaacgcagagctatccatttcgctgttgtgtgaccatgatcgtcgtggaattcacaccatttggttttgtctctctgatccgctagcttcttcatctttttgggccacttgaccttgttccccattcctttcatgatagccacgatctgtgctggttctacatttaggttgtattctaggtgggtgccttctcttgttctcttgctcttggtgaaggaaacctacgcatgggcccctttccttgcctattgttctcgaaagttgggtatggctcatgacgcgtattatacttgcgttccactctccttgtgctcctattttctcttgagtatgagtaggatgcgggagtatgctggttagactcgtcctcctcccacttgagagatatgtcttctgtttatttagatgtactttaaaacagtaaggatttcagtatcccttgatgag

SEQ ID NO: 95122 - DNA, 1655 bp, Cannabis sativa
acccagcattctttgtttgattgatactttcgtctaatacaacttttggccaaccacccagcaactatcgtctaattgtgtaagtgatagtgtaagaggtattttgataattaaaaaaaatacataaaagatatataaatgttgtccacaccttataccttataaaagtacttttgtaaataaaatatcaatgtgtactttccatttaataattccttaaagaaatccatagtcttcccgccgcattgattaaagaaatcgtttgtgctaataagttttggtagggtggtgataatgataaacgtaaaaagcattggtgttcttgggataaattgtacttacataagagtgataatggaataggatttcgtaattaatcgaaccttgttcaactaagctctattggctaagcaaagcggcaggttcataatagttcagaattaagagtgtttgcagtgtatgtggtgtgggttgtaattcttttttcaaattaaactgtatgtgcaatttttataatttttcagactacaatctaactgtgagattttaaaactacaaaaattactgtaaaaatatgatgtaatgcagtacgatttcaacggtttatacttatcatcgttattaaatattatctaagtgtttcatcggtcattcttgtatagcacatcgagagttgttgctctattgatcaataacaggttcaaatattcaatctgaatactcctttctattctctcatttgatctaagcaagcgaagagtcattagaccacgtttcaaattcacaaattaaagtcttgccgacacatggagcaattgtgaccattgatttttcctagctacgtcggatcacatgatctatgcagtaggatttcaaaatgaacggcggaaaaagtaataatagaggatagatactattactagtagtgtatagataatgaagtgtgtcattaaaaggggggtcatgcacacgtgggaagatcgagcacacacacgtgcgacaagccgtcggcagtgaccaacttgaagttgaaaaagacaagacagagtacgaaagatgagatagagcatgaggtgtctgctagctaggtagctttggagtttgtacaaaaatggtcactagacaaacaagtagaagtagtagaaaaaatatgtatacatactatacagtttgctttggactatgtgcttcatcattacttggattaataatagattagatgggattatacatacagtgaaagaggatatacaatcaaccaagtcttttcaaacttaattcttttcactgcaaatacttttttcttggacaacatattctttcttctttttttttttctattttatcttttgacggtaaatttatttcaacttttatcttttctacaactttgcatgatgatttttcaattgcaataattgcttccagaaaaaaaaaaattgcaataatttctaaagaagaacacgctccaaatcgaatgaatgtttagctagagaattatgaaatttaatgcaacataggcaatctcttgattaaataacatgctgtaattacagtttcaccgcaaaaatacatttgtaactctgcaccccctttagcatgcatttgaacctttcaagaatagtcatattcattctttctgttaatccattctg

SEQ ID NO: 95123 - DNA, 624 bp, Cannabis sativa
taaatatcttagatattcatcgtagtaaagtaagttctgcagctattttaattgtggttggatggatggaataatatgcttattaaatgagtttgattatcttaaatattcatccgtaacgaagtaggttctgcaattatttacactgtggttggatgggtggttatttttttatcgttatgtattattttttttgttgtttatagtaagcttaaatttttgaggaactagttaaattatagtcgttatgctgccaaaattttggtaggataacaactataatttttgttgtcatgttgattaatgttgcttgattatcgacatattctcgataggttctcgatagtattaattagttttttagctgtcatgtttggtgattactgattatcgatgggttctcagcaagttctcaatatgatttagtattttttatcatgtttgctcttacgtttttttattattatattgtttatcttttacagatagctccagagcttattgttcccacttcaatcgaatttttcaggtcgtgtgacatatagagggagtggaatattcacttctgaaaaattgagtttttgcaaatatcaataataaatacgaaattataatatatatata

SEQ ID NO: 95124 - DNA, 525 bp, Cannabis sativa
atatatatatatatatacacatgtgaccgatgtataaataaacaaaaataaaacgattgctacaaataaacaaaaaaaaaaaagtatatagaacgattatattaaccaaaaagtgaaaaatcttggccggagaaactttgtagtcctatctaataattagttgaaagtgatattgatcaattggtataataatactgataaattaactagttttgaaaaattctggataaaattaatatagtatatatgagtatgatataattggagaataatcattaatgataatattaactttcttatatagttaattaccgatatttggcatttcactttttgtttaagggtgcgtttggaagtaactgtataattactaggtggggtaattattaagatggtaattacatagtgcagtaaccatatgaatttctaatagcttgtttggcaaaatacttagtaattacacgggaaaataattttttttagtagctaatgtttaatatggaaagtttttagtaattacacagt

SEQ ID NO: 95125 - DNA, 2525 bp, Cannabis sativa
cgtattctcttatctgatcattatgtgttttttcctttgattcttgatcagtcgatctgatatttgcattgtttgcagtatgactggtactcctgctgtcaatggcccccctgggtttactctaccaggacctccttcaatgatgggaactgcaccaatgatgacttccctttctgctccactagctcctatgccggtccttggacttgggggtggtggtcttcaagctcctaccgtcgctgttcctgctatagatacaattggtgttccaagtgaatgtttgctcctaaaaaatatgtttgatcctgaagccgaggttgatattccttgcttttctaaattagttcttttttagttttcttttattggttgtgttacaagcaatattttctttcttgcagacggagccaaatttcgatttggatattaaagaagacgtacaggaagaatgttcaaagttcggaaatttgaaacatatatttgtggacaagtgagcaatgaaaattcacctgtttcttttccccccttcttttccttaaatcatcattctcaccaaaataccgactcgttattttcaatgaacaggaacagtgttggcttcgtatatctgcgatttgaacatacacaatcagcagtagctgcacagcgtgctctccatgggagatggtttgctgggaagatgattactgcatcatacatggtatgtgtatattgtctcggtctcggctctgtacttacatatttctctcatttaccttttccttgaaatttccaatccttctatgcagttaccccaaaactacgaagataaattccccgaaagcagataaggttgtggaattctgtacctgtaagatgaaatgcctgcctattttttggtggcccttatcgtcatttttgctactcactcaatggtgattatattttggcgattttatccaacaaaaagtatgttcatcccccataccgcgaattgcagatgacttgaaaaaaaaaagtcacaagttattttcaagaatctagctgcacatgagggcagttattattgctagtgcaattaaaatttacagatattgtttgtaggtgaaaattgctgctctctttttattaattttgcaggcctttcgatccatgttccgaatatattttggaattagttgcagacacatcagttctcagttttgtttaatcaagttaaggacttggctaatctttattttgataattaagttgtatgttatatagatatgatttttgtggacaaatgctttgttaaacgaatttggtgtttggtcaagctgaaagagagaaaatggtaacagtgacaaatttgatacttgaagttgaagcaatttctacagattgatgtatacttggtattaattatgggtatcctttattgtggtttcagagataaatttatggtcgacgatgcttctgtggtcgaattgtagttttttgtcgttataatattcttcatattttcacctccatatttggacctctaaggctaagggtggacttgcagtggagaggaaacgacatatgtaatgatttttatcaaacgaaagctgtaacttagttgttgtgactagtgagagcaattatcgtttgtttggtttttgatagatcacacaaaacattgtatttatccaattactaaaatgggataacaattaaccttgattgagagaaaggtaaataaattgagttgcccactattttgctaggcatgcttgtttattcacgttttgttagatgatcaactaatcgagttgtccactatattatcgagttgtccactatattgttaggtatgctcgatatctatttggtcatagtattcttgggcataacatcctctttggactttaggctattttgtattttgaatgctaattaaatgaagttgatattttatttcaaaaaaaaaaaaaaccttgattgagggaaagacaaacaaaagttacaaaaccaagtgaatgatctcagttattttcaaattttctttcaaccaatttataatttactaaaagttttaatcatcgagtctcaatggaaatatgttagttattttcaaattttctttcacccattaaaaaaattaagtttgatttcaaatttaagacaataaagatgataattacaattttatcaatattagggtacttttattgcaaaaaaaaaaaaatcattagatctatcatgtacaaattcaaaattttgagcaattatattgccgatacaatataatactttaggtgacgtttagttggagttaataaaattgaatggaatggaaatgaatcaatcttcatttcattcctttgtttggttgcatattaaagtattggaatgactattctattttgaaataaaaatagaaagaaagaccattccaagaataatttttttttttatgtattttaaattttattccattctatttatatttttatttttatatttattcctaccaaccaaacatcatctcaattttgttggtagcagccagaaaacttcac

SEQ ID NO: 95126 - DNA, 696 bp, Cannabis sativa
ggcataaaacccaacaactacttccaggaatggattggtacgggagccaatctcttccaccaatcatatgtagatttggtaagggtgagggagaaatacaaacacttggcatcttcactcagcctgacctcttgcatcatgttgttgtctttggctagatgggtctttagattggtgcgtccatcatacaacttgattagggcatcttgaagttcaccgggagtagagcttttgtgatccttctaatgcatggcttttggtcctcatcctcaaagtcgatgagggccccactttgtttttgaaccgatttcgttagtgtagcaattttttgttccaatattttggtgtcactgtttaggagatctcttccacgaaccttatcattaagatgattcctgaggtcattactacatggcctcgccttttcactttttgctttttcatacttggcatccaagcgccttctgagatctattgtggacaaactgtcatcaaaatattatcccttggtcccaccatccaggttgacaaaatcactagggcagtatttccatcgcttgggctttggtacttttgtaccatccctttttggcgtaacagggcctttccaagcccagaggcatcgatggtcttctgcgcatgagaaggcctattggtcggattcatgcgtctccaaggaggtataggagcacttgg

SEQ ID NO: 95127 - DNA, 608 bp, Cannabis sativa
  modified_base (527)..(528): a, c, t, g, unknown or other
tattctaattggttaaataatgaatgaaattaaaataaattagtgaacatataaatataatatatattagtagttattatttttcttttaaaaaaaaaaaaactactatttagttatattgatattattttttaaaaaaacaattgatgatgacattaataatttgatagagacacatttcaaaacaattggccaaatacgcactggtgcaaggtctcccataaaaaaaataataaaaagtaaaaagaagagatcttgaactaatcaattttcatagagcagcccctgaccatacttaattttctctgtaactctagcatagattcatctaaaaaataaagataaatatcactaaattactatcctcatagcatggtgagagctcatgcagcaacaaaaattaaaataatgtttgaggaagaaaaaaatgtgagagagagcctaacatatataacctgtttagtcctaaaaaaatagatgaagcttaaaattaagctaacaaattagaaatttttacactaaaaatnnaaaatgataaatttattacattaatacctatacacggctaaaccaacttttttacacatcttttatattttattactatt

SEQ ID NO: 95128 - DNA, 514 bp, Cannabis sativa
gcaaatgaagaacacgcccactaattggaaaacgcagaagttccttctcccaatcttggggcaaagactccatcctttcaagaatcaaagtcccataattgaggaaccaagggctcttgaccaaaattctgttcagatcttgggcagatttgaaagaaaaaaccaagaaacttgagtttttattgctgaatttaatttcaactccccatttattatcagcgattccccagacccgacctaaaatcgtcttcagtagaggacgactcgtcagcctgttggagcagaaccttgctctcgcacagtgtcccccagcaacagctcccccagcctcattgatttctcagccatcttcatctaacacagtaagattcaaggctttggcaagaagatcatccatggtagtttctggcttttgcagcatttcaaatacggaaggctcttctccaagagagagcataaacggaccttgatactttttgttttattgacgtggtgactttttatttatattaaa

SEQ ID NO: 95129 - DNA, 913 bp, Cannabis sativa
agagagagagagagagaataaatctgtgtattcaaccattaatgaaactgtcacatttgtgttcttatatacacaagtgattgtagttaaaacacaaaatagaaagttgttatacagtaacaaactaacaaactagctatttaactaactttaagtaccaaaactaagtctccttaagaactaagaactaagaacgtggctcaacctacacaacataattagaagaaaacaagtaaatccagtgcccaaaataagaagtaagaacgtggctcaacataaaaagaagaagaagaagaaagctacatttttattcaagtcagttttttttcagtcctcaaacttttctataacttgaggcagatccaaatctatgtccattctcagcttctgaggctggtctatatcaatcaaagacatctgtttctgtgcttcatttggatctttagcgaagccgttggtatgctcaattccattagaaaattggaaggagaaaggtgtaattgggattggtgttcagtagtggaatgatgctgctgatgatgatatcccagaatagttcatggtttggtttcatacataattaagaaggcaaagagatgagagatacgagggattcaactgagtgcacaggtaaaccataaaatattgtatttcatttttttttttttttattataaaaatatagcataagttaacccataaaaatataaagatggttgaaaatccacaacctaagtgtaaattaaaaaaacatgccataaaaaaaaaagcaaacctttaaatttatcctataatttgtgtaatttctacttttttttttggattagatggatccaatttaatctaatagatactggatctaaaatattggataaatctgatccgattcaataaataatagatctaaaatatt

SEQ ID NO: 95130 - DNA, 821 bp, Cannabis sativa
  modified_base (27)..(28): a, c, t, g, unknown or other
aacataaataactgctaatttccaaannaactaagcgggctttacattttctctttctagttttttctagggtttcttatgctctcatgggcgtcgtcacccgaatctgggttggtggcgtccgggaacccaacatctctctgtgcgacaacgaagctcccgttatggtgggttttggtagtgcatggttcgtgtgggtgttagatctcactccttgggactggctcgattagggatattcataaaatatctgatccaatttagtctacacgatccaatccaatcaaattcacaaagtgcggatatttgcacttgtacgaattggattagattaaaaaatttaaaaaccgcacttgtgagattgaatattgattgatatgtaaaaataatcgatctaatccaattcacacatatttatatatatttttaaaaaattatatatgtaattaatattttaatgcaaaaaattaataatttaagaatctaatacatatgatataaatatatttcaaaacttaatagatttaatttatattctattattatatggaaaaaatataatttaaaacaaaattaatcatttatttctagatataattttttttcttctttttaatttgttattttattattttaatttgttgttgggagacataaaagaacaacaatttattttgattttttgttagttatgtaaaaaaaaaatatattttttaataagtgttaaataacttaatattattaaaaagtaatcaattcaaagtaaccgatccaatccgcacttttttggattggatcagattggatttgagctattgtgc

SEQ ID NO: 95131 - DNA, 977 bp, Cannabis sativa
ccattggcactagtgatgacgtggaaatggtccatcatcagggactatatgcttagagcaatgttaatggactttaacaatgagacttaatcatttgaagttctcggccataagaactctcacatggggacatgccaaatattcaatcaagacaaaaataattcaacgatataaataatcaaacaaggtattttaaaaattacatgtgaaagaacccattttctaccaagaacaagcctagccgtccactgccatctttgtggcacaatgagtggcagtggtcggccatgaagaagggggatgagatttcttgccaagtatgtattttcatcaataatatgtcaaaaccaagtggtgtggaaaccacttggccgaccactgccacacttttgggacaattggtggcagtgatcggccaccacgtaagaggaggagtttcattggccaaattatatttccaaaatctatgtatcaaaaacaagtgagaaaagtcacccaaggcttcataagccccttatgcaaccactgcccccttttcttggcaaaaatggtggcagtgctctcctaagcaattgtctaagaaccaatgtgaccaaactggttttctagcatccatgtgattgaaataagcaagaaacaccatacatggatttccataagccatggccaaccactgccattttctggctccaactggtgacagtggtctcccgttagggtttcagacattgaaatgagattttgggatctcgggacccccaaaatatgactcaccatcaaaaaactagtcagaacacaccccaaggtgtccgagaacatgcatggccgagtagggctgagcatgggttgggttggccgggttgaggctattttaatgacccaacccaataacatcggcctagaaattttcaacccaatgacattctaaattttttctaacccaacccattttttccttttatgggttgggttgggtt

SEQ ID NO: 95132 - DNA, 1784 bp, Cannabis sativa
gaaagagagagagagtttgagtgtcaaatgagctagggttagctgtgattgaacatggttttgttcaagtgagaacgacaaatcgttttgttcaaacgatctgtcgtgcaggaaagaaacgacaaggttctttgtcgtttgatacatttgtttaattgaattttctgggacaaatttgtccctgtcgttttaacatgctacttgagttggtgtagggcaaacttggaaattcacaccaagaaattcctacagaattcttcatttttgttgctgttacagtcactggtttcttttaaatctttgaaactctagatctttttggaataacccaagtttctttattactttgcaccttcttatcctcttgtttttgtggagcattctccccatgtgcctcagctgaatcaacttcaaatgtttccatctctatttccatttaatctatgacatctcataatggtagaaaacattgtctttcatagggtgtaattatttcgatctaattttaggaagaatggtggttgagggtgctaaagtgttgtgggtaaggacttgggagctgaggaaaagagccgtcatttctgcttgttgcatgccccgtaacagcagagctattagctggtgagctagttttttgggaagcaacattattatttcttagttgttgagtagccatggcgaaggcctaagattggctttgataccaagtaaaaatacaaaagataatattggtaataattctcagctcaagtataaaaagagctgaagcaattttagttatagatataggagtacaaagaataaaatatgatcgtttggtcattcgacaactagtaaatcttgcataaaatacaagagaatattcctaacaatgattatcaatgattacatcatattcttgggatcacaattgataaaatacctctaacaaactttgtacaagagatcaatttcttatggggcaaatttctaaaaaagatagtagggaaatcctgtcatgagctgacttggattgctggtgtgtggattcgtgactagggagattaagctaattcttaacatctccttacaccaataaactgaaacactcctcttccaccctagctcttcacctccatgtacatgcccattgaaaaaacaattctacccttcaatattacaagtattattttttttcttttgctggaaataagtaaacttaattactaatactatctacttgcaaaatgacacttgtgatgtatcgtttcatcccttttttcaaagatactattttcttgtcaggtcggttaagtgatagattatatcgtataattttattcatgtgctttactttgagtagcttgaatggtctagcccatggtcggtctctcagatttgtgggagttagaaaaaataaattattgggtactttattaaaacataagtaatattttcaaaataaaaaatgcatattttacaaatttttacattgagaatgggcctaagcggaagcctagcctgtcttagtccaggactagccttggcctagactaaggggacatgaagatggtctatgagaaagttggatttggtgccacaaagacccccttttgccaaaaactttggtgtgaaatccatcaaaatgacgaaaaggttgtccatttttactcttttttgttatccccataatgggaaaattgaacttggtgggactaagattactacttcaactccttatgccattttgcatacttctatctacaatgttgtgattgatggtcttgtaaagagggcggtggata

SEQ ID NO: 95133 - DNA, 694 bp, Cannabis sativa
gattatgtcttcctttgcatttttcagttcaacatcgccaagtttaccactgggtgccaaaagaagctcgagatccacgatgaccagaaattgttagtccttccctgagacttattttttagttagtgttttgtgctcatatatcagtatctttaatctttgtctttggtttaagtgaatatgccttaatttgtactatattggcaactaacgagtgaacttgtggcaattttgttttatgatattctgtattaaaggagactttttgtcactctatatctcgaagggtgaggggttatagtactcattgtatcaagaaaaatgtccacttaaagagtgaatttcttgcctagtttagtttttcaagttcctagctcacttattattttcaattataaagcatacacaactcctctgttcttttgtgatgattggctgaacttgtatctcgataactaccgtatgtataaggattctgatgtttactcagagagtaacgaaatatgctgctctgcctatcgttttgtttacatgggagagaaaggtacaagcacagctttgatctttacctctatttccttttagttatgacatttttctgtaaaaaaattaacatttgatctcaactgaaattatctgcctttctgttcggttaatattcaatccacatggaagtacctgaatttaattgtta

SEQ ID NO: 95134 - DNA, 684 bp, Cannabis sativa
atatatatatatatgacacttatataactaaatttgtaatataataatttatcatgatttcatcaaaaatatttgaatgataaaaaaattatacattttaaatttgatgtaaatatttttaataatttaaagagaatataaaattctagtaccacatttgtaatgatttaaagagaatatgtaattctagtactatattatttctctttgaataaattaagtatttattgtttaattaatattattttaaattttaaaagattatttagggttaaatccaatattatatattttttacaaatttttgtaaataagtttttgatataaaaaaatatgtaaataaatttgtaaattctttttaaatttagaatatttataaaattaattaattaatttttaatttatttttttgttgaatcgaaaaattcattcaaaacacaaaatattaaatcctagcagcacctttttaattaataaggcatgagtgttctccttttctatacaatctattataaatttttataaagagtcaaaccactctttgtcaatgctagctactcagtaattttgacataacaccttcgcactttattttttacatcactaccaacattatgaataaaaatttaaaggaaattgataacagaaacaatatcaaaatgataaaaaaagaaaaaaaaaaaa

SEQ ID NO: 95135 - DNA, 674 bp, Cannabis sativa
cttttttaaaatggaatagttattcaccaaaatggtggaaaggtccttccattataataacattccaataatttaatatgcaactaaacaaaaaaaataaaatgaaaattatttcatttccattctattctatttcattaccttcaacaaaacgttatgaagcaatacttgtttatttatttatgaatataaatcataaaaataattcttattgaacacattaattgctgtagaatttgtgccaattgtatttcttcctcttcctcatatatatttctgttttttgattaggagtgtaaatgggttggggtcggatctgatccggctatgattcgacctgatctagattatgtaaggatctgccccgtcccgccccgctagatcagatactcggatcggatcggatcagatctgactcgactctttttttgtttaaagaattttaatacagtattaacttacaattttatatccattttaattttgtattactattattaaatacaaaactacatttggtatgacatgtattaatagattgtgtaaagataatatatttttaataaactctaccccaacaccaacaacgggtcgggtccgggtctaagtttaggtccgactccgagtttgggtctgagttagggtcctgggtctgagttcgagtctaggtccgg

SEQ ID NO: 95136 - DNA, 670 bp, Cannabis sativa
aataccctgacataagagagtcacatggagagtatcttgaagtgttagatgcgaaaatggtacaatgtttaagaaaaaggtaaaaataatagactttaaaaaagagggtaaaaataaaagaggacaatatgaaaatggtatagagtgtaattttctctatatataatcatattcaaatgatacactaatagctaaattttttttcttaaagatcaaaatctcaaacccaatttaaaaattaaaaaaaaaaatgtattacctaattaaagaaattaaacatacatatattgcttaacatcaactaattgaacctaattaaaaaaaaattaattataccattgtacgtaacatccactcattattacattgaaaaagaattacaacactaaaaatagcaaaccaacattataatagcaactaagagttggcatctgattcaatttaatatttttctcctcattcgattcaatccaattagtaattggatttaaaaaatcatcattcaaaccaatctaattagacttcaaaatccaatctgatccaatccaagtaattggattggatcgattgtttaattaaatatctaattacacacctaaattttaatattaactcaaaaatgtgtagaaaaatacgtgtaaactaaatatcaccttttatttaagtttaa

SEQ ID NO: 95137 - DNA, 511 bp, Cannabis sativa
cctaaagtcgtgtcctattcgtccgcagctgaaacacatgtatggcagtcgctcgtagcgaaacggaagccatatctttgccccagaatttggaaaaagaaaccccgggcatagaggattttcaattgatacccacactttgaaccagaaaaatccattcatagtaattcttgttacctcctctttttgtatttcaattacgtcgcccgccattgatgctaaccttagcatattgtttcttgtaatggatttggtaggaagattcaaaaccctccctgttaatgggaaacgtttcaattcttcctcccacttagttggaagttttgaaaatttctgaaggattagcattccattgttcaacaaccacggggatctcttctcaattcttgccagatccgcttcattcttgaaggagaatatcataaatgtggcatctgttgtggctttctttatcttcactccccagtcgacctcatctaaaccccagattcttcccagaatcgttctaatt

SEQ ID NO: 95138 - DNA, 566 bp, Cannabis sativa
  modified_base (339)..(348): a, c, t, g, unknown or other
ttacatctgcatggttttgggttccattaatttaataataagttaataaagaaaccttcatatattcatagaataatcttttttgtttgacaatcacaagagcttaattataattttaatttcttattcttatataattagcgagagtacatacaaatcatttaaagaagaactttctcattggattttgtagagaagctttttccataaatgacaagtctaatgaaagcaactatatatataaatatataaataatacaaataaaatatatatatatataaaaacaatataaatatatataccagattaaaacggctttttttaattttttttttttnnnnnnnnnntaataatattacaaaaatacttttagctggctaaataaacaaatctacagtctaaatgaaataaaattacaataataccatttacacacaccttcaacctaagatacatgcttcctgggcaaactatcgcgcaactacgcagcaacccaaagcaaccgaaacgaaaattcaaccagaaaaacaaccaccattaattccagcaacttcacctgagaaga

SEQ ID NO: 95139 - DNA, 568 bp, Cannabis sativa
aaatataaaactagaggtaaatttgattaattgattaataaaagagatatttttcaacttagcccataattatttttagattacgaactaaaccacatcgattataaataccacaagtataagtatgatttatggtttaaagatacaatagttgtaagtggtaatgaaaactttattgttaaaaatgataatgttgtaattttaaaaattatatacattctaagatatcttctagttgtagctaaacttcttctttgttcactcttaagcacaactaatcgtgatcacactaccaaaaaaaaaatgataatgttttaatcacaccattaattttttatgattaaatgtaacttttagtcttaacaaaaaattacttgtgactaaaatatagtattaaacatagtatttagatacaagttgtcactagtttagtttagtcacaacaaattgtaatttttaagactaatgtcttggttactttttagtcaaaaaatatgaattattatatataattaattacaatttttttacttagttttgttgcgactaaaaatgagattttttgtag

SEQ ID NO: 95140 - DNA, 896 bp, Cannabis sativa
  modified_base (254)..(256): a, c, t, g, unknown or other
ttgctatacgacttgccgattcattaataaaactttttttcctttttcttcttcgtagatttttccttttgtagagaaaatgattgcgatcaaaatcgactaaaattcttacaatcaagaggcgaaataatactcaatattagtatacctatatattactctcgaagggttgactcttgaataattagcatcaaatatcagtttaaatattaatgggatttgttttatttttattttattattttattaaatannnataaaaagtcacccatgaatttctatacgcatactttatatagaatagatatatatatatatatatagaataagagtaatttgcggcataatctccttaaatactcaggtttttgcaacaaacccccaattcaaaaaattttggtggtaaaatcccttaaactcgtgttcacttagcagtttccatccatttttagctgttaaccgacatggtggaatgtctacatggacatagtgtacacgtggcacaattttatatgtccatgtaaataaatatttaaaaaaataaaaaattaattatttgaaaaataaaaaataaaaaaaaattctttttctttaaaaattaaaagaaaaaactgcaattccctagtcctcctcctcctccttcttctatctatttcactgctaaaaaaaaccctaacttaaatgtaaaacacatttctttcaccttctctctagttcttcttctctttaaacctttggttcttcttccccttcttccttcttcctctgcaacgcttctttatctgaacccacatcctccaaatcctgaaattcatcgttgaaaatcgaaaacgagggcaggcgctcgggacacccgagcatcctggacgtgtcagggctgctgggtatgctattac

SEQ ID NO: 95141 - DNA, 890 bp, Cannabis sativa
  modified_base (257)..(270): a, c, t, g, unknown or other
gtgtttttacctacaaaacacgtggcattatcagagatcaagtggatatatatatatatttttttaaaatgctaattacaatttcctattacaatttcttagttaaccttcacgttcgaaatcacatgccgaaatatatatatatttttttttcatagatgtattcgttatagttacagtatcaaccctctatttttttcaaaaatttcgaatagtttatagtaccgaaaatagagttcctgatattccagtttacnnnnnnnnnnnnnnaaaaacttcaaacgtatttttggcgctgtaaactatttgaaattttttaaaaatttacaggaatgatgtgttgtaagcataatgaacactccgtgtaaaaaaaatttgaaaaaaaatattccgacatgcattttcgggcgtggaggttgactaagaggttgtaagaggagattaacagtagcactcctttgtcaaaagaaatagtattatgatatatgttttagacatttaaaatagtaggagaaatgattggtgtattgattaaaatattttataaattattttaaatatatttttttttacataaatggtataatggtaattacatgacattataatttttttttatcaatgacattataagttttaaaactaaactaaacaataaaaaaattaggggtgctatacaatgcatcccaaaaaatgatgcactaatatctcttttactgttttaagaagaaaaaaaatattctaattttttttgacctcatatatgttaaaatattttgtaaaatttagaataatttataatatagagagcaatattcaaacaatttattttacatttgtataagataaataagtcacgtgtgcaataaatttttaaaattttataaaat

SEQ ID NO: 95142 - DNA, 558 bp, Cannabis sativa
tttacatttaatccatgtgggacaatgttctccaataatcagcaatccttgcagattgctactagttcatggggccacgtcctgagataaaattcattagtcgaatttcaacaactacaaagtaattaacttaaacaaaatatagactccttctaatgattttgtctcaagcttgatgtacttctatttgctgaatgaatctctttaagacaccaaggcttgaattctatttaaattacttgatgaatgcttgcttcctcccgatgcaagacttgtagaaattttctcccgaatatagcgatgcttgcttcttcctagatgaaagacttgtagaaatcttctcccgaaaatatcggtgcttacttcctctcgatgcaagacctgtagaaatcttctcccagagataacggtacttgcttgctatcgatgcaagacttggatgaaccttctctggaaggttgttgtaataccctagaattaagaatggattagcaaaatcctaattagataattaagaataattgaggaattatattattatatagttcaatatatgag

SEQ ID NO: 95143 - DNA, 678 bp, Cannabis sativa
tcttataatttcatttaagggcatccctagctaggttcaacaaaaaatagttgctcaatttaccttatttaacacacttttaattcttagccaatcacaatttatttattttttttaattaaacatataagaagttactggtgcttaatatgaaatctttttcttcaccactcccttctctctcctaccatttaatataatatgaccaatcatccaatccaatgacaaccgatcgcccaatattagatattcaattgtgatcggaccagattagatgttatttttaaatatccaattggatcggatcagatattggatagattgtccaaaaatctaatacatccaacatccaatcaaactaattaatattttcattaatttgaatgagtaattagattttatattgttatacgtaaaatatatatgtatataaaaattaacgttaaaattttactctttttttcttggatgggatgaatccaatctaattcaatatatacatattggacctattaagaaaatattaagtctaaaatattgaataaatctaaattaaaccaataaattatatgaaatacattcaacggatagaactgatccaattcaacatccaatgtatatttaatcgattggatgattggataggatcggatggtaaaatctaacctctaatatata

SEQ ID NO: 95144 - DNA, 610 bp, Cannabis sativa
gaggagcccttcgtgtgagtgagtaaccatggagattacctaagcgttcttcatgctgcaacaaacaagagagaccctctgagcagatgagaaacagatatggagacaaagaacagccttgccgaagccctcgagaaggtgtgactgagccagttaattctccatttaaaaggaaagtaaaattgttcgttgtcaaacaagtcataataagtgacgtccattcattagcaaatcccattcggtccattacagctttgatgaaactccattcaacccgatcaaacactttactcatatccaacttcatagcagccactcctttcctacccgcatttttatgtttaataccatggattagttcaaaagcaaccaaaatgttgtccgtgatgaggcgacttgggaggaaagcactttgagtctctgagatgacatgagggagtatttccttgaatcgaacaaataggattttggtgatgagcttggagacaacattgcacaagctgattggtctgaaatctttcataaattttgcttttttgatcttcgagatgagtgtgataatagtggaattcaagggtgaagggtcggctccatcatttaagacactcag

SEQ ID NO: 95145 - DNA, 966 bp, Cannabis sativa
taacatcctgggaagttttctcaaagagtatacgagtgagaaacacttgctcgtgtatatataagccaagcaggaatgttacaatgaaatattcaagtaatatctaattagtttctaagctaacaaaatttagaaaataaaacacgttatattaagcatttaataacatactttgagatcacgtgaacctttataaaattctaaaataagagttacatatagtcgtgtggtacatttgaaaagggaaaaaaaatcattgatttgcgtaaggattttcggtggcaccaaaagttataataaacaatacttttttctataataagaaataattaattgaaattctaatattatcaattataaataaattaacgaattggttggttttcccaaatatcaactgaaatagctgtagtaaatgaagatgttgggatagtaggtgacaataaaagtttttgaatttaggaaaaaaccaaaaattaatgatagcttaaacaatgtggttattgaggagcattgttattggttattagtaatctacaatattttttataggtgatgtcttacaattggttagtaatattttttaaaaattatttatttaattatatcaataacagtataattctaagaaaaatattaagtaataagatgttactttttagtaattctcttattaaaacttctctctaatttagattttaatgttaattattgcttatacaaatttgaagaaatgaaccttgatacaatttatcataatcatcattcatggcaaccaaatacccaaaaataagtggggaaagtagaaatgttgagagaaaaagcaaaagtaaatgtatggatgtgatgtaaattgaagttgatgatatgaatgaactagacttggggatttgaaattatttcccaaaaaataaaaaaggggattaaaagtaatatgaaaattgtgttgaaacaaatagtcaaata

SEQ ID NO: 95146 - DNA, 507 bp, Cannabis sativa
gataaaaatgatagggtaaatagcggtctaagtacccaaaattttatgtttgtaagcgacataaacctaatgtttactacggtatattaatttttagttatacaatatatcaaatactaatatatctatttaatgatataatatatttatttatttttattataatatactattatgcaataagaaaaaaattatataacttaatttaattattatataattttttttaaaaaaaataaattaatatataataaaatgtatttttataatttttattaattaatttattttatttgaccataaatttctaaatttaagatctcgatccaatctaaaatgtcatttattcttatctaaataggtgtcatgagttaaaatataatttacgcactctttatcgtatcaaattaaatgtaaaacttaaatgtaataagtattaattattattaatatcaaataataattaaaataaattttgatcagagaattctctatacgaaatttgaa

SEQ ID NO: 95147 - DNA, 784 bp, Cannabis sativa
agaccttagcctttggcttcctaaaggatgtgaccttggtaagttatcttctctcttttgatcgctctagaggatttatctctgctaatcgtgcaacttttgttctaacttgtaatttttattcttagatgtctctgaagtttgggcacacttatgcccgtctcaaggagaccaacgttgccaccaagaagaggattgaggacttggagacccagctcggcgaggtgaagaaacagctgcttgttgccaacaatcaagttaaggaactcaagtaaaaaattgaagacatgccatccaccgcaaagttagataaggacttggaggaggcaaagaggtaggtgagagacttgacggaccagaaagagtctttgggttggctgctagttcacctgtatggggagttgctaatcttaaggaaaagctagaggaggtgaaataaacccgggctacagagaaggaaatatatggcaacctggccattgagaccttctacgagttctggaaatagaatcccgagggtgattacggatacgtgagctttgagttgctcgaatccctagtagcttagggaaaggaatttgagggatctaaaccctctggggagaataactccgttcaggttgttgtctctttcggccaccctactgatgatgcgggatagattgttgatccagtggaccctcctgtcaggctatcttcttaacctgctgttcaagactaggtcggtgataatatgaacccactacttcttttgacatttcagagctttgaagctcttactttg

SEQ ID NO: 95148 - DNA, 1022 bp, Cannabis sativa
atgagatatcaaatttcataaattgcaaatatgcaactatgataatatgataatattgcaggtataaaaagattaaaaggaaagtttcctaagcccaaacaatcacaacatcaagaccatgttcccatgcttttccttagcaatcccatattcaacacaacatggaattaattttagcaattatatttgtatcatgcaaccaaacttctactttatgtgcttctcaacctaaaacaatcacttgcccaggagattcattatctgtcgttcatgtgcactgttaaactaagttggagtttaaataagattgaatgagttgaggcaagtaccacagcaataatgaggaaatagacaatttttaatcatcatcttagtactaaacattgttaaggtaaatgaaaaataaattccgcatagagagcctaagttgaggtgccttcaaatgttactttttatcaagtgtattctttaaagcagaattggtcactcaatctgtcccccacactttcatacataattatttaaaaccttcctccaaactcctttattgttcttgaatcaatttaatttatatggactaacttcacaatctcaacaggagcatatcaagtaaacgtgttaaacatacattaacacatttagttccactacaatcaaaacatctggcgggaaaagaaaaattgtttataaattagcagagcattaaagcaggcaccataattatttgatacacaaccgtagatgttataataacaagctaactaatttgtagaatacaatagctaaaatagcacttctattatgtctccattttatagattcaacttcatttccaatattacatgaaggcctcccgaaaccaatcaaacaacattagccttagcaaaaaggccatcatcaaaattaaattgatttaacattctcgtaaattggtatactaatcaatagtgaccaagagtgacttcgcacacagtgggtagtgtaataaagatggcaataatacattctctaattttctaaaa

SEQ ID NO: 95149 - DNA, 577 bp, Cannabis sativa
tacatccctacttgtaatgatattgctcgtaccttgactaaacttgctttatcggcacataattgtattgtttggtggttagataatcttagttgtattcaacagttgttgattgctaaagctatctttgaatatatcctcattggcaccttgataaagtgcttgttgcgctaattgtttggtggttgagatatttcttcaaaaaaaaaaaaaattacttttaattattagtaaaagaattctaaattatagatatttatttatttaaattttaaataaagtacatatattttatttttttattgtttatatattaaaataaatataaattataaatattttttacaaatatattctataaaaattattaaagtactccacttttttaatcactatattttagaaaagcattgaaccaaaattatgttacaattataactaacaaaaatgtattttatttagagaaaataaaatgggaaaaaactaacatttgcttttaattaattattaaataattaaaataatcattaataaaaatttagaataactatcctaacaaaaaacttctcctattttt

SEQ ID NO: 95150 - DNA, 594 bp, Cannabis sativa
cgtaaaaatccttctcttaatttcttacaactcttttaattctcattattttattggttgccgaaaacctcggtcaacaactggtattcttacccaattggacaaacgtccgcttcgtaccaatccttcaatttcatccctcagatagtcacactcattggtggttgccttatatcaccatagtattcacacctcttgttcggattatttttttatcttccgtccttgtacatcgacggaggcttcttgtaacggaccatattacaagttgtcttataaatattctctcgagtatccacaaggcttgtgtactcagagtatcttaactcttgggtccttcctttttccgcagaatcatgtcggcttggaccctttaaactcctcttgctccgcgattggcttacattggactctggagcttctactttttggttcgattgtccaggagcggcactaaatccaatttgtactgctttgaatctgaaaaaactagcctgtgcagctagctacgtagaagcacttggtccataaatggtaggagttgtaaaggcagttgccaaaggaaaaattgatggagtagtcatctgcaaagtt

SEQ ID NO: 95151 - DNA, 1224 bp, Cannabis sativa
  modified_base (1197)..(1198): a, c, t, g, unknown or other
aaaagacctataaacaaaaaaataatatataaattagtcaaacttaaatgtgccatatttatcataagaacttttaaaatcctatagtaagtgtaatttcctctaaaatttaacaatcatgcaataattttaagaagcccaaagcccaacaccaaaatgcaactaccaaaggaagacttactctcttcacttaaaaagcattgtccaaccactaaaactaaaaactcacaaattaaaccaattaatggttcagcccaataaataagatgaccccataaaaactaattatataacatatatataaatcaaatgaataagataaatattattattataataaaatatatttattatagtgcatctaaaacaatatatttattactgtgtatctttaatataggaaaatttacattgtatactaacttttattatttttttacaaaaatactgttaggcggtattttttacttttttactgtgtgtttttataagtttcatactacagtatactgtgtttattttttagtttttgtttgtttgttttagtgttgttttacagttattttccataatttattttttttaacgtcgatttcactgttcttgctccatcttgctggaattaatgattgttttctaggtattctcgtagtgatgtggtagttctatctgtgggtgtggaagatggaggctataaatacatttcttgttccttctccgtggttattttgtggttatttttttattttggttctcctaaaaatacatttgacgagctcactagaaaaaaagttttaaggtgtgtggttcttttatgctttttctttttttttttttttgaataatttttatgctttttctaagtggttatatctgcttattattttacatttatttttttttatggttttagtagtttttgttttgatttttttaaaattgagcttgcaaatataactgctattgcattgggtattgaggctgtgcagaatatgttttagtttttgggttaatatgcaaaatggccctaaatttggtaattaagttagtaaatgtcaactttttaaaaaaattaagaaaatggccaaatctaataaattagctaataaaaattataaaaatacatttatcacatatttttttaagcaaatatatataataataaaattaagttacataatttttttagtattgcannttattatattgtaacaaaaataaata

SEQ ID NO: 95152 - DNA, 1751 bp, Cannabis sativa
ttttgtgttctttcctatcttatcatagttctcatgaattgagaatataccgtgattataaaattatactcatctgattagatctaatagcctactgtattcctaagtgttgatactgacctggaagattgtggtgtgaactctttaacaagttattggattggatgttcgataaatcaatacgaaaagatagcgaagaaaccctgataagaggtattgtttctcttttcatgtagtttagatttaatctatatatattatgttgagatccttgaaattatggttcatattggatataattaattttaattaaattcgcttccacttttctaactctgatatggaccataaaaatcaacaagtggtatcaaagctatcttcataatcatataaattaaatactgtatatatatatgttgatatattatgaatggatggatattttttgcatgaatgtgaatcgttaattatatggtaaaattaggttagcaattacacttttttattagaaaaatttgtacaccatatttgcggtataagaattttccttgtaatttacgctaaatttatttgtaattttttgttgaataatgtaaattaaaaattctacatatcttccattgatgagtgagctcaggtttaaggagtaaatttcgagctcattgagacgatgttttgaacgtcaaaacaatgagccacaaaccccgaagggtgcggctacaagtcgtaaggctcgaaactgagacacgtcaattattaattcacgtgtgcatcatgcacgtagaagttgaaggaggaggtggagacatggcttagacccgactcttcaaagtctaacaagaggatcgatcggtcccatggccactttatggtggtcgactgaacttccttagtccactggtcaacgtgaatggctggtggggaggacatttttgtcatggattttttgttctgtttggactcaactcgggtcgtatagacctgttctcctattggagctcctcaagccacctcttgatccgatcaataatggtggccttagggttgccggtcgaggtcgtccatcctccttagccacacctctgcctcttcttggtcgaagctcctccatcgtgtatatatattataaattatttttatgaattaattaatttgattattaattttaaaaataagatttgagatatttgagataactaagttgaaaatgtgcattaatcttttatgttaataagttaaaataattttgaaaagtaggttattattttgttatatatatattatttttaaataataaaaatatatagatattttttttttcttcaaattatatatattgtataaaataacttttttttttttttttgaaaaattgctacctgatattttaaaaatatgattaaaataatatttgtttgaaaagtagttataaaattataactatatttgttaattataattttgaataaatatgatagttattttataaatattatttatgattaaattaattatttttctaaaaagttgttataggtaggttataacttatttttcaaatttaaattaaatattattttaactaacttaaatgcacatatatattgtctttagttagataattaaaaattatttttaaatcctaactatgtgttatttatagggtaaataacggtataaatacccaaagttttaagtttgtaagtggcataatcctaatgtttatttttagtggcataagtacctaatgt

SEQ ID NO: 95153 - DNA, 586 bp, Cannabis sativa
  modified_base (534)..(561): a, c, t, g, unknown or other
ggaagatcaccatcttttgcttacgatcaatactagctgagtacttggacaagaaattcattccaagtatgatatttaaatccactaaccccaattccactaaatcaattgaaaaattaattttatttattttaaaaattaactatgttgctaatatatttgaaaaaaggttaaactattataattagcctaatacaattatttaaataaggtaaataggttttcacagttggggtgattcatgtgagggaaggctggatttagtgtgtcgtacccactactatgcccccgtaactctcacagaagaccaaaaagagtagaatttaatctttaattaaataattgttacaaattgaataagcccaatactaattgagtctaaataaaataatcaaagtgattattttattttagcaacctagaccattttaatatccaaaagtaaatgggcttcctatatgcatctaggcccaattacaaactgttatcttgattttttcccacctgacgtggctgttggaaattattttaccnnnnnnnnnnnnnnnnnnnnnnnnnnnnttattaacatcctaaataagaactt

SEQ ID NO: 95154 - DNA, 530 bp, Cannabis sativa
tccttaagctcgtgtcccccgtcattcactaaggcataactacgcagacacagcgaggtacaagaggtgttggggccaagcaaagaagctaagacctgatgcaattacgatgaataacttacgaagggtcatcagatataacgactttatccagctcataactccagcacttgtgctgatgcaaggaccaaatccattgccaacgactacttcccctacctttttgctgcgtcatgaagttgatcaaagaccgacgttgcgagatcatgtagtgacgacagctcagaggagaccagtagtatcatcaatgcccactaggtttccattcaagcctggtgtggtaccattggttgaagggtgttgctaaggcaaaccatttttggaaaagtttgctgacagtgatctctatcattacgatgtaactttaacaccggagttacatcaaagaaaataacttgagccattaaaaccagttaggaaatatctaccgaagtagcgttcatccgattggaggtccaagcctttgcctt

SEQ ID NO: 95155 - DNA, 570 bp, Cannabis sativa
tatggtataaaacctttaaacatggcaggattctataagaactcaaaattaactaaaaaggggaaatttcgagataattatagaatccttctagtactctctcaacgggagtactactcctgccttgatgtgcttgaggctccaagtgcttattccagacgaggcactagtactagcttgcttcaccacactcttctcggattactctttctggtggaaagcagctaaattcccctggagcgacagacctaatgcgacatcctctctcttgtttgatgccacaaggctttaatacattaccaacataagctcctatggatcttactttggattcaatgagttctacctcgaaagtaactgtaggatcttgggggggtctttgatttttgagcttgagtgctcatgactttgaagtctaagtcacctggtgaaaaagtaacagtgactcgaggtaaaaatagaggtcttgctagaggaatagaagataaagtttaaggttcaggccaagctgcatcttgcaaataatgacgtttacccttggttatctcttgtaaaaatcgcctatagcga

SEQ ID NO: 95156 - DNA, 714 bp, Cannabis sativa
  modified_base (85)..(88): a, c, t, g, unknown or other
aagcaaaaattttaattaatcatgttttccataaacctcgttcattagcaatgagctgcccagtatgtttaaaaatcacgtaatnnnnctatgctagttagggtgtttcatggggaattcggttaaagaaatatatagagcttttaaaagttggcaggagatttgccaacccaagcgttgtggtggtttgggtttgagaagatttagtgacattaataaggctatgatggtaaagctgtgctggatggttttaacgggcatggataaggcttgggttaagttgatggaggctagatattgtcatgttgtggatgcttggagagtggagaaaagagctggagattcaagagcttgggtgggaattttagaggctagaaatatatgtactgctggggctggtgttttgattggcggtggggagtcagatctttgggagagaccgtgggtccctgggaaatctatggaggaggttcgagataattttaattactctaggagacatgcttttgtgagggtctcggatcttttcatgaaaggctctagattgtggaatgaagaattgataagggaaagtttcgatgaagaagtggcaatgtccattttacgaattaggcctttggcgactagtgaagacatcattttttggaaaggatcaaagtcagggatgtacactgtcaaaagcgagtattggttaagtcaacacagtagattcaa

SEQ ID NO: 95157 - DNA, 827 bp, Cannabis sativa
tatttttcttttttggttcattttgggaattgccatacatgtttagcatttaaagaatctcagaatgcataagaaacttcattttgtcatgcaacttacttgacatactgatagtgtattcagttgattgctaaaattaatttataaaacaaaactagtttttacccttccatttggttattgttgttcatccatttcttcttattttgtttttattcttgatcttcttttattgtcacttgcattcttgtttgtcatgagtttcaattggtttcaaatcaattaatttaggggtgttcagtaatatttttatttttaattcttttaattataaaaatgaaagtaaaatttgtatttttataattttatttttaaaaacagaaaatatagcgtgttctataatttttatttttgattttatttaagttaggtctaagtttaaaattgggatcggaattgtggttcatgttcgtgattggagctgaggctggagtctgagtcccaagattcaggttggggtcaagttcaaaatatatatatatttttttattattaaaatttaaatttttagttaaaaagtgaaaataattttataaaacatatttttagaaaatattatcatttttctaattaaaaaacttgaaaagttaattaaaaaaatattacaaacgaacttttagtttataaaaataaattttaaatccacgtgagaaatggcaaaaaaatttattatgtgttataaaataatataaaataatataaagtagaagagaagaaagaagaagaagatgaagagagaaagagaaagtgaatgagaatttctgagt

SEQ ID NO: 95158 - DNA, 697 bp, Cannabis sativa
ccaagacccatgagctcaatgtagtaattttaatggtgtttagtctccatcaacattctcctattaacaaggtaaagcaatgaaaactaattttttttgtgggttttttttgtacaagctgtatccactatccattcatatatatatatatatatttgttgatctttattttgttattgattgttgatttctgtattttgtatttaggtcaaatagatttgtgaagaagaagtttggatttgtgcttatttttaaaccaagagcagtataatttcttctcaccatctccttgttttatttttactgcttctctccacaaaccctccccttgaccttttcctttccaatctttgtccaagacacaagatattgatgtagccaatttaatggtgtgtagtctccatgggtatgtcattcctatgtacaaggtaaatgtgtaaattttattttatttttctgattgttaatagataatgtgaagaatatatataacgtaaatttttaatggtttgatattgacaatataatttataatgagatttttaattttgttcaacttctgactatttatattaaatacccatttgtgcagtgagtctaattgctgcaaacaggatgttcattattctctattgatttggcatggattgtgctaatttattggtaattcatgtgtaatttgggtaaatttgtacct

SEQ ID NO: 95159 - DNA, 708 bp, Cannabis sativa
  modified_base (572)..(582): a, c, t, g, unknown or other
tatttagatttaattttatctttgcttataaataataattagtatttatggcataatagagaaaaggaaataaaaagttaaaaaaatgcgttaaatttggaatggcccccttctctaccagaaactccattcccagtaccacatcaaagtcatccatgcgaacaactacaaggtcaagttgcccctcccatccgtcgatcttgacattcaccttcccggccactccaatcgtggccatggccttcgaattgactgctttcatgcaacacacatcttactccagctttaggcccaccctcttggcttcaatttcgaaaatgaagttatatgttgcgcaagtgccaatcaacaagctcttggcctgcttacaatttaaagtggcctccacaaacatcaatccctttcgaagggctttctttcctcttgtgccatgcttcttaagagctgccatcaatcgaacagctctcatgtgcgccaagtcttcatcttcatcatcttccccacatccttgctcctcttgagcaatagatgcctttatggcactcaacttggattggtgggggcaagcagcnnnnnnnnnnnggccttgacaaagccaacacttaaggggcttcttccccgttgcagcatcacttttagaggaggagctagattcaggagtcctcttgtcccctgcctgtaacttccccgcttcaagcctccattggg

SEQ ID NO: 95160 - DNA, 503 bp, Cannabis sativa
agaaagcttgatgattgattaatgacgaaaaatacacaattattgatcttaaagtttataataaattaagtttaaattagtattttcatgaaattaacgaaatatatatttatgttaaaaatattttatttgaatttaatatattgttattttgtaggaattaaagtgtatttcttttgttgaggaagaagaagaaaagagaaggaagaaatcaaagtagtaaatttgaaaagaagaaaaaaagaaaaaggggatttacatcaggacacgtatgtattcatttaattacaatattaatgtggttcttaattttatgtcgttttaatttaaattagtcttctttttggttcatgtgttgtaggagacgtcaaagtatgagtcatcacattaatcatgttcccccacatctataatctcatatatttgcttacatttctttatataatttaaattatggctctttattttatatacatttcagtatgctacatagaaatataaaa

SEQ ID NO: 95161 - DNA, 504 bp, Cannabis sativa
attaatgtattaagggtttgtttagtaccttttattataatatataatattttaatctaaattaaaatataacatagcattattttaaaatattacatataatcaaatttaatataatacaatacaatactatacaatctaatacagtatacgaaatgagccttaaaagtcaaatttctcgtatgaagttagcttgtgaaattatacattcattcccatgcatgaacaattctcatttctcacaagaaaaccaatcaagtgggaaatttaaattaatgttataataattttgccacataagcaaattcattttatatatacagacctagccttattcacaatataagcttacaaacttcctcacaatattttctttttagatcatcttctttctagagatcgaaacgaagagctgcgaaaaaaatgacaagcgtgtcaaagaagatgcagagcaatgaaacgtcgtgttgtaaggctgggcctggttacgcttcacctcgagaa

SEQ ID NO: 95162 - DNA, 820 bp, Cannabis sativa
  modified_base (52)..(56): a, c, t, g, unknown or other
ttggaaggtctaattaataaatatttaaatggtaattttatttaataattannnnnaattattaaatagataaaattagtatttaaataattagaacagaaaatagcattactaaagaaagataagtttgcttcattaaggaagcaaaataatgataaaaatctaactcatgagccttatagggatttcggccatgagagattattttaagctattggatcttttaaattagcccatttagttctaaccctatacctaatgaattcctataaatagaacataatgatccttgattcttagaacaccttttagactctctcttgtctggcaaactgaatcaaaaagatagcatattattttctatctatattttcaaaattctcttgagtttttatcacaaaaatttgtggttcttggtgttgagtaattgcctacacatttcaaagcaatacttagcatagtaaagaagattgtgtaactcaaatttgttagtccaagatatgttttcaagagagggtgaattgaaaattaaactaatttggtaaattaaaacttttaacacaaaactatgcgattaaactcttaatcaaataaatgtaaataatataataagcaataatgtataacaaataatcaaacttgtaaagtaaagaatttaaaggtaaaaaactgcaaactttcaatttttacaaagttcggtaaaattaaaccatctacgtctttggtcttttggtcttcaaagttatagatgtagctttgagattaataatataagagtaaataccattttggatcctgtgttttgcaaaagtcgcagatt

SEQ ID NO: 95163 - DNA, 691 bp, Cannabis sativa
tattcttaataatattaactatcttgtatccttcttcccacgagctcagatcgatcatgtttcacgatctgctaacacttatgcccatactttggctaagtttgctcttacggtggatactgattgtatttggttggggacttttccatctccactaatgactcttatgtaattctattgaattaatataatagtcttttctcaaaaaaaaaaaaaaaaatctataaaaatattacaaatatatatataaaatctaattatttattttaaacacgttttactattctgcttaaaataaataaataaaattgaaaatattctaatggtattaagaatgagaatagaaaacgaataaataattgtgtgtttacttatggaatcaaagaatgattataaagaataagatttattaatttatttacttctctaattttgttaaggaaagtgaatagaatatgtgaatcttacactaaatttaggattgaaaaattattgacaatctcatgagcttgaggggattaaaattatgaagtgtcatttttactcttttttaatttttttaataaaaatccaaataaaactttaataaagggtatttttgtaacttaaaataatctattttgattctagagtaatgtaaatatatcaatagaatattgcttattctaattctgattcctacaagttaaat

SEQ ID NO: 95164 - DNA, 770 bp, Cannabis sativa
  modified_base (702)..(710): a, c, t, g, unknown or other
gtgcttttgaaacaggttctgctccagcaattaaatcaataacaaaatctatctcccgctgaggtggtaacccaggtaattcctctggaaatatgtccatgaattccttaactactttaacctcttcaggtccaagtaacacaggtttattggaatccattacaactgttaggtatcctatacatccactgcataacaaatccctagctttcaatgctgagattcttggaacacgagaaccttgaaccgaacaaccaaagacaaattgttccttattctccggttcaaaagttaccatttttcgtttacaatcaatactagcaaagtatttggataaaaagtccataccaagtataatgtcgaactcggccaatggtaactccacaagatcagcgctcaattctctatcttcaattctaattaacactaatctaacccactttcttgaaataattaatgcgccattaggcaacagggttccaaatcccatttcaaaaatatcactaggtctatcaagttgattaagaactctcgataacacataagatcgagtagcacccaaatcaaataaaacagtatagaaaaaaccgttgattagaagctgaccagtaactactgaagggttggcagcagcatcagcctgagtaatagcaaatactcgtgcaggagcaggtttggcctcaggctttggttcctctttcnnnnnnnnnggacaatctttcttaagatgtcccactgaaccacactggaaacaggctctccggttacaa

SEQ ID NO: 95165 - DNA, 682 bp, Cannabis sativa
tttttttttctgattgaaagacagttctttgtttatttattttttctttctttttatttgttttttaattgttcttctgttaattttttatatgattagaggcttttttattttcttatttgcagcacattgacattattttctactatcttcgtaagaacataaagtactctgctgaaccgaaaatcaaagtcaccacaactgattttcttttttgttctatcataacaaacttgtatgataagtttgttgagaaaaacaatgatatatctgtgtttctcataatgtggcccagtacatccgtggtggtaaaatattatgtgccactccttggcatttggttgatcatgttgttatgcctattaatgtaaaattacaggatcattggatttgtggtcgtttaaacatatctgagcagtggatatatctgtacaattcattgcattctagaaggtatatgacagctgccaaagaggcttgcaagcctttttctgttattttaccctattatttctctatgttagactttagaggccttcccaatgaatctaagtttagcacgatggaaccgttcctgattgttgttgtggatggtttacccgagcaggtcacatcgtaagttttgtgtataattttcaatgttttttactgcttttgtagtgttatgttttgttatgtgatt

SEQ ID NO: 95166 - DNA, 782 bp, Cannabis sativa
  modified_base (251)..(251): a, c, t, g, unknown or other
atgatgaaacgatttgtaacataatttctttttaaactcagagtatagttgttttagagagtcttttctgatgcaatgaacaaggaagcaatttggctcaaaccaaaaccttctagcttcaactagtgtgcttgaatgagtctgttgtgaaaatgcaaatgctacaatttcaagaattgcttcttggttcattaggtgtgcagaagctatcaaaaacgtgatatacaatcatatatttatatatatatatntatatatatatatatatctacaataacaccaggtcacagaaatacctgatctcttgcgaagttcccactgaaaatgcgttggttgctaaaattgaggctttaaatattgctgctttttcacgtaaagcagaaacttcatttctggttgttcgcaactcttcaaggagattttctactctgtttgtaacatcttcagctttcaccttcacagaggttgaaaaaaatgctgagtattttgctgtttactggagtttgtagaaactatgaaagagaaaggaaaaaaaatacaacaaggcatactttgagagtggagcatagattcttcatatgataatccctggaatttacatattcaatgaaagcatcacctgctacagcttctatacgtctaactccagatgcaatgccctgttcggatattattttgaatccacgaatttcagcagtgttgctgacgtgggttccaccacaaagttccatggatacacccggaacttctaccacccgtacctacatttacaagagataaga

SEQ ID NO: 95167 - DNA, 529 bp, Cannabis sativa
tcagtgaaatcgatgggttcaattctcaaaattgcatccatcgacttggttttcttgacatctccagacgaggatggacctcgtttcttcacaggtttctggttcttcgaagtagatgctagttttccatgattctttgacctcgtttttgccatggcgccagctcgggagctgggagagcaagaaacagagaaaactctattgtgtattattttgaaatttagataacataaatattaaatatatgtgaatgtatgcttgtgttaaattttacactactaacactaattatttgtatggatttaagggtgttagtatagtgtagattttagaatagttatagtgttaccaacacgagtatcaaggagtacgccgtgcatgtggtacaacacttattaacttccgggggtacaataatgactttaccaacacgagtacagggttggtactttagtgcatttggtacagtggtcgtacttcccttaagaacgttcttaaccatttggggatgggtgacctcctgggaagt

SEQ ID NO: 95168 - DNA, 566 bp, Cannabis sativa
accagagtcttctcatatgaatacagatgccaggaaaacacgacctggaaaccaaaaaattccacaacatgttgcgagaaatgtaggaaattggccttgaataggtcgacccccatggcatccagaaaggcctaatcacaacgataaagacagtacacacatttacttgagtagggctcatgtatcaaatctcttctgaaggagaaggccaatgggagaagagccacaagagaaaagatcgagtacagatccaagtggatcaaggttaaggacccgcgggcatagcagatcaacttgaactcatgcctatgacaagtcaacgcaagatgaaggtgaattgcgacattattatcgagaagaccaagagagtattagtaacactcaaagctaccaatccaaaagttacttgggaacagggtttgtgagtaattatgaccaaaggcgtcacgactctgatttctgcgagcagctaaatcgtagacaacctgacctatgcaagcatttaaatcgtaatgcaccaaatcttcacaatcaattaaataaaaatataggtaggcaacaatcaa

SEQ ID NO: 95169 - DNA, 617 bp, Cannabis sativa
  modified_base (341)..(358): a, c, t, g, unknown or other
  modified_base (509)..(525): a, c, t, g, unknown or other
tcctcaagagatagaggacatgggaaaagttccttatgcttttgcagttggaagtctaatgtatgcaatgttatgtactagacctgacatctgttatgcaaaaggaatcgtgagaagctatcagacaaatacatggaggcaaaatacatagctgctgtagaggctgcaaaagaactagtctggctgaggaagttcttcacaggtctcagagtcgtgcctacaatggaaaaacctctagttttgctttgtgataacactggagctatagccaacagtaaggagcctcgaagccacaagagaagcaaacaaatagaaaggaaatatcacatcatcagagaatnnnnnnnnnnnnnnnnnntactggtggaaaaagtggacacagcagacaattagctgatccattcaccaaagtcttggcagtaactgcattcgaaaagcaccgtcagaatttaggattaattgagatttagtgattagtttaatattattacaagtgggagtttgttggnnnnnnnnnnnnnnnnnaaactccatttcaatgtaatccgtattatttaagatcaataaagaaacagaagtatttttaattcatttgtgtatgttttggttcacattat

SEQ ID NO: 95170 - DNA, 514 bp, Cannabis sativa
ggatagttttatgggtcgagtgcaatcggacatagctaaacaagtgtgtgttagagaggcgttgagttgggttaaggctaacaactgaagttcgtttattttggatatattttgtttgaaagttgttcatgcttttagtaatcccttattggagttttttcattttgactgtaagcatttattaaatttatgttatgtgaagattgtttttgttaaacgataaactaacaaagtgactgtaacgtcacttgcttcaagttttcattgggcacttacgcacacatgaaatgatggctcttttacacgagtatgtcactctggttgcttaccctacaaaccaacatgagtgcttctagcgtgctttgtcctcattcgcatacttcctgggaaaacttcccaggaggtcacccatcgtaaaattatccaagacaagcacgcttaactgtgaaattctttcgtgttggctgggctatcgaaaaacaagatgcaccttgttgatataggtagtaccaat

SEQ ID NO: 95171 - DNA, 2499 bp, Cannabis sativa
atcggatgactcaattcaattggattagatcggatagcaaaatctaatatccaataaataattggattggatcggatgagtccaaattcattggatgtgaatatgtgatccaataaacactcctacgacccagccgcgttctatacatgtttttttcaataaccgaattgtaccgagccgagttcggaccaaatccgaatcaaatattcagccttttttatcagtatagcccttttgtatagatattacaatacatttgatagggttgcatgatataagatatttttttcttgctaaggggcatttttgtgcctaacaccacttaaaagtcttgtactttattaatgtaattttaaattttaatattggattctgtattttttcagttttaacaattattgtagaaaattatatatgtcctatcgtttttatttagtcagaagtcgaacccgattgcaagataactataacatacaaggcttttgtactttcggtgtttacatacaaggcttacaagctataaatttaatcacgaaaaattgttaagtaggtcattaggtatcacaagtaattttactttacactttttttcctctttattgaaaatttatttttaccttacacttcacatgaatttaatcacgaaaaagtattaattaggtaattaggtatcacaaaagtatttttactttacactttttttttcttggtttttttatttttttttaaaaaaaaaatagaattttacctccttcacagggatccgaacttgacattgacttatctttttatttcaaatacgcacaagtagatagataatttattaaaaaaaaaaaattcaaaccaactcaaatgtgtaaaaagatagaataataattcacaagtcaattatatacacatattattacatttgaatgtggaaatatttttatatataaaaaaaatagagttgtgttagaggaacatggaaataactccggtaagaggattttatggtcatctgaaactaatctaagcaaaagatactatcatatatataccctctacggcttgatgtccataatttcctcaacaaaacaactcagaagcttatacatttccccacctcttcatctgataataagctttttttttttaataccaaattatctctcttctctatttatagatctaaaaagaagctgcaaattgctcatacccacataattcaagtgaaccaaattttagaaagaaacataagaagattttgcacataacccctaaattattttaccagttcgacccaggtatttagtggtttttatattttgttaaacacctcaaactttgtgttttactaaataaataatcaaattgatattataagctcaatttcgatcaaataaataaattgatacccgagttttgtttttcaaagttgactcaaaaataaatcatattaaaaaatttatttgattaaaattgagctcaaaatatgaatttgattaatattgcaaaacacatagttgaaaatgtcgtttagcaaaatataaaagcggattgtatgtatattggcattaaacacatgacccaattagtattttttttttttcccaatatacattataatatatttttatttttattttaatttttacccatcaaatgtgtgagttgaggaaagacgaaaaaggtcatatggggcccaaagatggtcaacggaacaaggtctccttgagtccaaccgtaaccaaggcttccctttcccactccaatgaagaaggcttattgggcctggatgcagtctcctacattggccctctaaattatcacctccaagcccatgttggttccacctatggtccacggccttaatatctccggcccaaaccaacaaaaatggcggcaaagaccccaaatcgtatatcctcttcctcttctgtacggccatccagtcctccattttctgcgtatactcacctcctctccatctctttagatccaccaccataacccctgtgttgaagtagcaaggtttccttccctcgaatgtccgagccatcttcgggtccgaccagaactcgccggagaagtagttcgtgaagttggcgtggcagtactccggtgccgctaggaccttattttccatgtcgacgttccacagcttggcgatatcgtcgactaagaccagatcggagtccaggtatatcacgcgtttcacgtccggcgggatgatctcggccaggtaaattctcgcgtagtttaggggttgatctagggcttggcggatcgatttagagatcttgcctcggactcggttcgaattgaatcggtagactcgaaaatttaggttcgggaaggtcgatcggatggtggagtaaacaccgggatcgtacctcgcccaaatgaagtggaactccacgtcttcgggacacgtggagtgtttcaagacggagagcacggcggcgattgtgccacggaggtaattcgagtccagcgtcatgctgacgtggattctcc

SEQ ID NO: 95172 - DNA, 627 bp, Cannabis sativa
  modified_base (187)..(189): a, c, t, g, unknown or other
cctttctcaatcaaattctaaaactttggtataaaaatatagaaaaacatatatttttttcccatttaaactctgattgggcactacaaaaaatcttacttctactcacaactaacgataaaaaggttgtaattataaattattattattctgttgtacaatgtctgtgactaaaagtattagtcannnaaattacaatttgttgtgacttaatgtatttttagtcacaaaatatttgttgtgactaaaactaaattagtgacaacttataattaaatactatgttttagtcacaagtaactttttattgtgactaaaaattaaaattaatcacaacaaatttatgttgtgactaaaatattgtcactaaaagtaacagttttttgtaatatgggttatatagcttgagccgagttggcaccatctgaccgtctagcaatataaataaatggtcagttaaattaatactcatcaggatcattgaagttgcattttattttggtttagtttttggaatttgtaatggtctaatgaaaatttattagaaatataaagactggtatttgagacaccggccatggcattattaatgatgtatgagagtaggagggagccgccattgataga

SEQ ID NO: 95173 - DNA, 573 bp, Cannabis sativa
tcataaagcatgcacaaggtgatcaatcttgatagaatgtgtgtttttagttcttttgtttgtaatatactatatgctcttgttatattaattctcagtgagtatgctatatataataagtttatttcttctagcttttaattttaatttcatgtcaacacattttagtttaaaaagcgctttaagatttataaaaataaattaacagtattctctagccaacaaattaattttgaagttatttaagtacaatattatttttaataattatatgtggtgctcattgtataattattggaaacatatgaacattcccgaggcgagggaagttagttaggcgcgtaaaggatgaacgtaaagaggtccattcccttgcgagcctaacttaccatggaagttaccaacattctcacaagaaggagtgataatttctcttactgatgttcttcacacactaaatatgttaacctggcctcttcccaacaacaactacgtacgtactttttaatcaaatatttgtacacatgtaaaggtttttgaaacccaaaaattaaacactgtacagagatacaa

SEQ ID NO: 95174 - DNA, 749 bp, Cannabis sativa
  modified_base (681)..(687): a, c, t, g, unknown or other
atatatagtatcaccaaaaggctaaattgtagtactgcgactctgatatcaaattgtaacaccctactagttaaggcacgttacagtatttttataattattgtgctaatatttgctaataaattaattttaacaaaaaattgtgtttaataaaatttttgtaataattaaaacttaaataaacataaaatcttttataaatatttaaaacctgagatcccacaatttatttataaaatatacatataatatatacataatatacaaaatgtcatctaacgacacaactcaaaaaggtaaccagcagtgtctcgaagattgcaatcccctaggcttagacgactcgatatatacagtcttcatcaagctcagctctcactgtgattcagcctagactttgactttatcaatacaagaaagtatatatgtgagtcgatagactctgaacaaaaataatcacatatacaatatatatttgacttgtaattgagtgccaatacactcaattaccataagtttactaaccgcatccaatgcgtataaacagagatatgaatgttcgtacctatagcatggttaaccataataccaaccaaagctcagtactctagtcgtagtgatcttggtagcattaatccaaactatgtaacatattgcccaacatattagatatcagtatcnnnnnnnaactctatgtacacccataccgctatctctaagcactacaagaaatgtcacttttgtcagta

SEQ ID NO: 95175 - DNA, 564 bp, Cannabis sativa
  modified_base (536)..(537): a, c, t, g, unknown or other
ctaaaattaaaataaaatacaaaaaaaaaaaatcatacctgtaatagcaaaaagatctttctctctaagaaacaactttcattatcatgctcttctcatgttttcattttcgaatctgagaacgaaggaataacaaacaaaaaaatagggagagagagagagagaggcgagatacatagagagagaggaaaagagagtcatataaatatacagagagagaaagagagcgagaagaagagacttacctgtaatggtgaagttgaagccatggaaactactctgaagaatgactaacgagagagagaagtaaaagtgtttttaaaattttttaaaatcatctaaaatgtgtttttaaaattcactcaattctgttttttaattttaaaaacaaaaaaagaaatggagttaccaaacacaattttcatttgtatttctaaatttttgattaaaaaaacaaaaaacaatttttataatggttaccgaacatacccttaatttcagaactacttacattagaataattttcaaaatatatnntattttattttattaatattttttcca

SEQ ID NO: 95176 - DNA, 891 bp, Cannabis sativa
agcttggaattatttgttatctgtttaatatatcaaaataattgaatattaaataagattttttttagattatgaatgtgcaagatatattgattggtattacatatcttttttattcaatttcaatttccaaattctttattcttcacaacttcttggttatcatctgttcttgcttattcttcttgatagatcttctcttgttgatattagtgattgcagtgatgcattagcaattgctattttgtgcaagctctaaggtctgaatatttttcatcaatggaggattttgacgaaggagttgctctgcgatcagtcgactgagaatcgcaaatagttgtatcgtgttttttttgttgttgtttgattatgttctgattactaatcgttgctaattcgctgaagggtttttaagctagaagaatctcatcaatggaggttatcgataatggagttttctgcattttggcgatggagatttgcgactgtcagagaattttctaggtttttttttttgtttcgaatgagctttaaaatgaaaattgaggaatttatatgtttcgttgtagactgtgaatcacgcgcttgattcctgcttttaggattagcagttgattttagtttgaaggttcccgtgaagaagatgatgatgtgtcacgtcattatgtgtttgatatatatttaacgttatttttgtaaaaagtttcctaatatagtatattcctttgaataaaatgtactataaattgaccaaaccaaataacgtacactcctaaattattcgtccaggtagttacctaaacatcattttcgtctataaatcgctcgctgacttattctatgtttactaagtttcttcattatcatcatctaccaaaggtaaaggcagct

SEQ ID NO: 95177 - DNA, 661 bp, Cannabis sativa
aaaaaataccatataaatttgtcaaacttaaatgtgccatatttatcataagaacttttaaaatctcatactaagtgtaatttcctcatatttaaaacacaaaaagtagcatctaaagaattttattattattattattattttcaaaactgctctaaaataaatctcacaagaactaattctagtaaagagaaaaagtcaatagtaaaacttgtgataagagataactttactaaaaattgagcaacactattacatactaaacctaaaataactaaaaaaaaaattggagaatattaaaggatatcggtattatctaataataactaaaaaaagataaatactattttggacattttgtaaaagttattgattaaactttttattttgttaaatgaaaaattgaaccttgtattctctaaaataatactaaaaaataaaatttaataataactcgatctaaatgtattatgacaaactgattacattttctgcatctatttctactaagaattatattcaagttgattatattaaaaaaaaaaattgatactgaggttatggtcttatttgtattattttgaaaaatacaaagtttattttattataaaacaaaacagatgtttcaatcaataacttttgcgaaacacaattaaaaata

SEQ ID NO: 95178 - DNA, 712 bp, Cannabis sativa
agacatcggaagtatctttttggaccggtggcactttcgctcacaatgaatcacaaacgactttttggatcggtgacactttgaacttacaatggatcacaagtagctctgataccatatcagtttagaatccattaaaggagaaaataaagaaaagacaatgctaatctcatcgtttgtcttcctagtgagaatgctccgttggatgatgctcttataaggtactactcaaagaatgggaactacactgttagaagtggatacgaagtggccttgaaccaaatcgaaaaaattgatactgtgaaaaccaaggctttgtggtcttctatttggaagttgagagttccacctaaagtcaaatactttttttttattgaaaattatttcttcgtggctttccactaacaatgtattttcttttaaaaaaaatccactattggtagctgctgcttcaggtgtaataaggaagctcctcatgatgcatgcatgccatttggaggtgccctcttcaagtatatacactactaaaaaacaagagaatttctcaaaatttaaaaacggttggatatagtattattatcgatctttatgattgacgtctattcgactatcgcaaaattgagtggaataagcattgtagaaaatcgtcatatatgtctatatcctaattgtttaaaaccgttagcactaattgatactataattgatagtt

SEQ ID NO: 95179 - DNA, 853 bp, Cannabis sativa
catcatggattctgtggaaaccacagagcctggaaaagcctatcgaagaaaatactaaggtaaggatatttatagccgaccatgatgaaagattcaaaggctatgcaaagaaatgtgataaatgccaaagattttcaaagataccccgtgcaccgcccgatgcgatgagctaactcagatgcaagtccttggccttttgctatttggggaattaacctaatttgataattgcctaaaggtaaagggggagtacaatatgcaatggtcgcagtagactattttataaagttgacggaagccgagccattggtaacaattacatctaagaaagtatttgactttgtggtgaaaaacacaatatgttgattcgaacttccccacaaaatagtctcagataatggccaacaatttgataactaattgcatactgatttctgcatgaatcatggaatgataaaaagtttctccgtagtggcacaccctcaagcaaatggtcaagtcaaagcaggccataaggaacttaaagatactttgacaaaacaacttgaagaagctaaagggaactggccgaagtaactaccaaaagtactatggtcataccgcacaactgaaaaaataacaactggacagactccatttgctatggcctatggctatgaagctatgttgcccgtagaactagaacctttgtcccacagaagattgacctatgatcaagaggctaattatgcccttctagcagaatcacttggcgaaattaaagaaaaacaagcctcaacaaacctaaagttggtagcccatcaacaaaaggtggctcggtagttcaacaagcaagtaaaggcacgaaattttt

SEQ ID NO: 95180 - DNA, 655 bp, Cannabis sativa
acattaattattatttaataaactaattattatctaaaacacaattttaaatttctaaaaagaatactaataaattaagaaaaagtaaatataaattataaaatattactaaaaatataaataaaatactaaacgagttcttgtcggggcaaggagtatccctgtccccaggggcggacgtactttatgagatagggtggctctggcccccctgaaattttcaaaaaaatcaatcaataatatataggtatagctaaactcaattaactagtgttataaataaatattaatttagatatgtataacgatataatgtaccgtcatatatatatatatatttagcaatttattattatctttaccaacttattattatctttctcaattaaagtatataattaaacatttaatttaactagaattagatcacaaatattataatttttcttttgtaatttctactataatttacagtaccggaaataaagtatacacaattatttatcacgcatataaaaaaaataattttgagtgcaataaaaaaaattaaatcttattttgacactataatttagaatttttaaaaaactttcaagtgatacgaaataattacaaacgtacaagaacataataaaatagaacaacaaattttttt

SEQ ID NO: 95181 - DNA, 691 bp, Cannabis sativa
gggtggaagggggtaatgtccctcctagcaccatcctcgtttcttaatttatgctcatattcccgcccctaccttacttttgggttcggagtggaaaaattcccattgagtatgatgactaattaggtgctcattaagattaaaacaataaagggaattaccctatttattattattattttaatttttaagatttgagttgtttcggtaatttttatgtgggtcgctatgtaattttggattgtaatttaaattgttccgttaattgctatgtaaatttatgtaaaaaaaaaatactttggaatgtgaaaatgaaaaacccccatataataagaaaatattgtactgtaatttaaaatgaaaataaaaaataaaatattgacttttaaataaacaaatattctacctattaaaaagtttttagtatacattaaattaaggaagattattagtcaactttgttagtatagtcaataactttatttcataataattaaaaaaactatatatatttggatcgatatgaaatgggttagtatcaccctaatcccacttcaaacttgctttgggtatataaaattgcaccctacccccactctattacctattaaagtggataattctcgcacaatttagagtagggccgttcatagaaattggaaaatcccaatttaaattcagagctcgataa

SEQ ID NO: 95182 - DNA, 1589 bp, Cannabis sativa
tacactttaaatttatttgtttttttttattatatatttgactctttttttctccttttttctttttttgattctccaagattttcatttatttttcatatttattatgtaacgttatacaaatattttttattatttttctctaaaaaagattttactattaatgtcttattatgctttgaaacacgtgttataaccgtccatacatgtaatgtaacctacaaataacaaaaaagaaatttaattagttaccatatttgatatttattcctctattgaaaccctaataccacattctctatgaaatttgtgaataaatagtaccacaaagtgaactaaagaagagcacaaagcattatttgggatatgttgtctcccattttggcacactagttagctagtttctcacattagctcttgtttttattttctttttcagctcaacaagccaaaactatgaccagaaagaaggtgaagttggcttacatcaacaacgacgccgctcgaaaagctacttataagaagagaaagacaggtctgataaagaaggtgagtgagcttagtacattgtgcggtgtagatgtgtgtgcaatcatctataatccgttcaacactcagcctgaggtgtacccatctttaccaggggtacaatgtatagtggaaaagttcaagaagatgcctgagatcgagcagagcaagaagatgatgaaccaagaagttttcctgaagcaaaaaattggcaaggtgagcgagcagatgaagaagatgaagaaagagaatcgcgatgaagagatgaatcgactcttgtatggcaatctctctggtaagatgaaccttcaaggcttgactgttacagatttgaatgatctcacctcgctcattgatcaaaatttgaaggatattaataagagaatggaaaaaatagccaaagaaactaagattgctcgaatgacgacagatgctgcagcaacaccaaatgggaaagtgaaagctaatgtggctgcttttgctactacttcgacgacagataacaatggtcgtggcaggggcatgcaaaagagaggagactcaaacacccgaaatcaagctaatagtaacaataacaataaatcgatgaagtttgggggaagggatgagatttttccattgaggaacaacaacaacaacatgaactttaactaaatattatctaatcgtggcgattattttgtgtttatgagttattgtgttagtttggtgtttccttttattctcttgttgttgaagttggttaaaattatttttatgttgttttaattaatgttcgtattatgtagtttttatttcaatgaagtttcgagtttttattttttattttcttatgttgttctttaaaaataattggggttttgtttagattgtttggttttattattttattataattttttatatatatttaatatatttcatgaaattatatttaatcacaaagctattgtaaacataaataaaagggtaaatactattttggaccctgtgttttacgaaagttattaattgaatcatctgttttgttaaatgataaaatagaccctgtattttctaaa

SEQ ID NO: 95183 - DNA, 661 bp, Cannabis sativa
taggggtaaaattggtagaatgattgaaaaaagagataaacataatagattttgaaaaagagagaaaattaaaaatatcaagttaaaagaggtatgtagtgtaagttcttcaacttttaaggcgtatttggaaagtcacagtgtcattagatttgtgtgtaatttgaggtaattacaccatttgacatatttgtctgaccatgtaactacattataattaggtaattgagggattccaattatactttctaattttcatagctactcataagaattgagtgcaattatactatgtaattactaaaaacttttttattttaaatattaaccactaaaatatattagttttccgtgtatattttaaaatataatgtaattaattgactcggtaattacaaaattattttcaaacacactcttaagtaatataaaaattttctgcacttaattttacatgcgtcacatgtaattctcttgctcacatttccatacaaactaaaactacacccactaaaataccatcgtagaatttgtaaaggtatattatgggtatgagttatccgttactattttaggtagatacaccaaatctgtagcttcagagggtttgatgtgatgtttcaatatcatgatgtagcaagggcttaataattcaaatttg

SEQ ID NO: 95184 - DNA, 564 bp, Cannabis sativa
tacgcaatcgtaataagtaataaaagtgataaatcgagtatcgtctccagagagattgaaaattagaaattgatttataaaactaattactcacaaattggtttcaataaaaaaataaaattaaataaagtgatgagaatacgttaaaaaaattaacaaacacaaactatgaagaaaacaagcttgcgttaacgcctcctgacctcgtttttctctctttccatggcgaaaaggaaaaagctgggtcgaaggccgggattgaaggcggcgcttgacgtaggatgctcgaagcagtaggtagacctagagagggggagcgatgcgggtttgaatgcaaagctggagcagttcgtggttcaatcgactccagatctgaacaatagggaagaagttgaatccctcaagtctgcaaggagaagttgggcagaggaggttgaaaacttgcagtcggcctcgcatcaccactggcagcagtttaccggaggtaaggctttgaactctgatgctaaactctcatacactgaacctgtggttagggaaggtaggaaaatagctcacatagac

SEQ ID NO: 95185 - DNA, 997 bp, Cannabis sativa
  modified_base (56)..(67): a, c, t, g, unknown or other
gtttaacatcctaattatgaatttataaaagaatgtaatttaaacacatataaagnnnnnnnnnnnntacattggttgcagcagaattaaatgactccttccgctcagatctcttaaggggaagaaaatgacatcgaactcgggagtccctactgttgccaaagtggttcctcccaagaagcaaaggaaaaccactgcccataagaagaaatcactggccgagcgtattgttcttgaggtttcagacaacgagatccaagagcaagttcctcctccaattattcccaacgccaatgctcctcatccctaggcgaccggcgctactgattctctgagtcaggccattgagacgctgtcggtcgcagctgggaaagctgggtctgaatttgcccaggcatatatagtcgcatgttggcgcaaacttcaaactctccttacccctgattgggattttctcaatcttagagtccaaaagagatgctttcaaggagcttagactgtcacttcatggtatgtcgactttattattataactatattatctttttatacctctttcatattcatctgtttgtaattctccaggcttcttttgcttctaatcgactactctctgagtggctcgagtatttgaagggcgagactcacaaattagtatcccaatacaaggttgtgagtgagcaacgagacaatgcccaataggagattacccacctcaaacaagaggtcaagaaagcgaaggaggaagcagagaaagcaaagaaggaagccaaaaaggcaaaagaggaagctgagaagacgaaggaggaggctgagaagaccatcaaagtccaagccgatgagtttgaggagaagcttgctgaaaaacttgctaaaaaagaaatcgagaccatagaacggtgcgataaagttagtttttgcgctatatatcgggcttggctttggaaccctaacatggataccaactacttggaggagaaggaagaggaaactttag

SEQ ID NO: 95186 - DNA, 623 bp, Cannabis sativa
ttttgtaaatattacttacttctaggacttttgaaatttaaatacttaattaaccttaattaattaatttctttaagaaatctgaatgtcttagtaaatttaaccttagttaactacgaagcttgaacttctaagttaaattaacctgagttaattatgaagtctgaacctctaagttaacttacctatgttaattatgaagtttactaaaaaaatttatgtataataaggcagtggcttatttcctgttccctggagttctagtttcatgcaatactttctactcttaacttgttaatttagctatattttatgaaagatgtataacgttttaacgatataatgtatgctacctcccaagtgattaagagtttagacttttgatcactttttacaagatagaactttgaccaattaaatatgaaatgaaaattccttctttattcaaataattgctgccttgaggcatgcattgaaattagacataaaaataaaaaaccaagaaaaaagaaaaggaagctggcaacccccattctactgatagtatccacgcaggtggtcaacgttccatgctttgggaattttcgttccatctaatattctcaagtgataggttccatcac

SEQ ID NO: 95187 - DNA, 752 bp, Cannabis sativa
agcaaatcattgacattgtcagtgaaccatgcaacctctgctaagccacatttataatgcccgcaaagggtactcaacacgtcaagttgcacacccacgttcacacgatgttttgagatgtctattgttgtcaaaggagaagataacaaacgaagaatgtctttcatgcattcaatcacaaacctcttggtatgctcattcaagttagagttggtgattactgaaactgacattgtcaacactgggtctagtagaggaataagcaaatctgagggaacaactgatgatggaacatctgtctttgctgagacaatcggttctggtggaatggttggctctgtaggcaatgcctcgttgtcaaatcctttgttaacataatcatcaaacccatcaaaattgataagttcttcatccctagaactagaagctccaaagcaagtaacagatggcggcatctctgaactttgagtaagtgggaaggatacatcttcaatacgattagaatcatcatgctttgcacgtttcactcgtttgaaatgcagagctaaagaatggtcattttctgatccaatgtccgattcagtatcgacatagttggcatcagtgatggcatagtcagcatcagtaaaatcatgctttttaggagtacatcttagaaaaacctcatcaagggtggaataaattgctcgaatgtccttaatgacatacttaggatcctcctccaaatagggtttcttggttaactctaaatg

SEQ ID NO: 95188 - DNA, 696 bp, Cannabis sativa
ccttcttagaaaacatcaatactaatcacttaggcgaggtttcgtcaagctgagtcaacatctgaaatggtatgtctttgtttatttagaagaggtcctctttacaaatccggaagcataattttcccaaaatcttagatatagaataagatcttactaaaaagggaaactggataatttaaaatcaggtaattaatgtgtcattgattacccataaataggatgcggtatgaataactaactacatgataaggcctccacgtcagcatacacaaggtgtgttatgtgtcgggcttcatcagataagcccaaagtgaattatttaaacaatctttcaaaaataaaaaagtgaatatattatttgtaaactccccattggaggaaaaagggtgactagaaggacctctacatgtacactataaatactaaacaaatccttcatgcaaagggttagaaattcttggtatacttgctcaggcaaagagtagaatgcacatacttactgtcatcccttaagctttactagcaaaataattaattatattgacacttggactacagctcgttaatgccccaactgcgtaaaaactctaagtgttcccttcatttatttctctctgaattatattttttttaacttttatatttaataattagttttctaaaaaaatcaataaaaagaatatatatatatat

SEQ ID NO: 95189 - DNA, 598 bp, Cannabis sativa
aaagaggaaaaaaaaaagacaaagctactgatgttattatattctaatattttttcatataacaattaaaacaatattaaaaatattatatatataatatatatataaatatttccatgaaggtattttttttttctttaaaaaacaaagaaaaatataagaatttaaagttcataaatctcatatcatatatatttttaaaaatattattaactaaataaatataatttagtaaaagtgagaagatgagatataaaatcaaaaaataaaatatatcaatcaatttacatatatcctttaaagaaaataaagatacattttataattagaagtataataattttatatttcgattttatacttattttaataccaaacaaatataaagagagttactatcatctttatccatcactgtccattcttctcaaactctctatctttctaatatatagttttattacatgtaagcacaatattcttttttcctaattttaaaaaagaaaaacaaataaaattttaaatgtacagagagtttgattttctagaaagtacaaattaattaataaggtggcatcctattttttattttgtggta

SEQ ID NO: 95190 - DNA, 619 bp, Cannabis sativa
tctctcaaatatcaaacattgacaataattatctcaatatttaaaaatgaagaagattatgcattcctcctaaaaagactctcaaattttataaatctatttcactaaagtatttttataggtttcgttttctacaagaagccaacatgcaagacaaaaattatgatttctctatataaacaagacaacgaaggtcttttacaggtatttttatttgttcttatttcttaatttgtacattcattttttctcattattaatgattaatatcatgatattttaaatcttttttattttatgttggtagcattacatatgatatttctaaaatttcttatcaatatattgctaagattttaatttttatatttttatatttttatgtgattaatggaatgggtccaagttttttttctttcgttatcatacttgaaaaaatatttatctttccttattcaagtgttatatcttttattttattttatttatagtaaattctcattctttttattgttgttaaaatttatgggtttaatttattatttttttttatatgtagtgtgacatacttgataataaattgatgcatctcacgaaggaaccaattaaaataacaaag

SEQ ID NO: 95191 - DNA, 903 bp, Cannabis sativa
ctactatcttgatatttttaaataaagtactaatgaaaaaattacgcacaagtttttcttctttcttcaattttacagtttatatttaatgcatgttcatcaaactggctacactaaaaaagtttcttgtactgtatcacactgcataaaaaatacggtttgaaactcttcgcagtgtagttataaacttatagtttgtgttatcgctaaaccgcaaggtgcactgaactttacaatttttaatttaatattaataattgcaatttaaatcacaccacactaatttttataaatttatataaattacatatttctaaaagtaaattttgaattaagttttaaaacatattgagtaaaatcttatccaagtttattgttaagtctatacactaagatttgaagtttttttttctattttttttttttttgttttaaaagatttatgtatatattgtctatagtggagaccttggttttgtcctatggtagggatacttttctagctcttgattattgatctaatggtaataaagttaaggagacatgataataataatggaacctagcttatagtatttttacacctttttttgtctttacactattgtctttttcttcttcttcttcttttttttattttttttatttttttaaactaatttaatagttattttattttattttttagtacacttaaattacttaattagtattttttttttatatatattcttctaaagatatttttttaatatgttactttcaaaaattatttattttaataagcttgttgatgacttttcttaaaatttattttctaaaaattatattttatgtatttcttagatttgttttctttataataaaatcagtttttgagcaatacaactttctggttcataa

SEQ ID NO: 95192 - DNA, 813 bp, Cannabis sativa
taattagggcataaaacccaacatgtcagcccaatagccttattgtgtgctcggagtactcttagcaacttatcaatctccacatcagaaagtgaagctgacactatgactggaagctttttgtctttgcccaaaaactcataccgtaaatgatcaggaagcactttcaactctagttctggtggtttttttgtagatggcacatgcttctttagaacgaccccaaactcttcaaagtattttttattcaatggcccataggagtcaagccatttggcgaaacctatcgcctcaattccaatcttgctcattcagatcgtcttctgtcaaactcacttctaatgaatcttccatcaactttttcttctccactatagtgtccacgagatccccaaagaaacatttatcacttgcctttagaaaagtcattgccttaagaacattgaagaccacttcttcgcttgcactcccaacttcaattcacccttcagaacatcaaccaatgtttggcctgttgccaagaatggtctcccatgaataattggaacattgttgtcgtcttccatttccagaactataaaatctattgggaagataaatttatccactttgactagaacatcttcgatgaccccccttggatgagccaacgaccgatcagccaattacaaggtcactatagtaggctttgcttctcccaactgtaattttctaaaaactgacagaggcatcaaattgattcttgctcccaaatcacacaatgcatttatcccctatattctcttgatagtacaaggtatggtgaaactccca

SEQ ID NO: 95193 - DNA, 595 bp, Cannabis sativa
ttcacgacatccaggatcccgagtccaagcatcgagaaagcggaacggggtgaagaacctttctctatcaaacaacaagtctaacagaattggggcatggtccgagtccttaataggcaaggttctcacccccgccttcgggaaagacatgatccacgaagtatcaccaattactctatccaaccgctcgcggataaggttctgaaaatccctaccattcgaccaagtatagaagacccccacactccccaaatccacacccccagtgatctcaaggaagtcccgaaggccttgacagtccgtatacgagagcgaagttccaccaaacttctccgattgatctgtcatcatatttaaatcacccatcactatccaaggattatcagcagccgccacttccagggaaagggagtcccagaaagttgcacgatcacctcgaacagggggggcatacacgcaataagccgtccaaaaagggccgttgaggaccccactgaactgaaatgaaatcactgacagagagttagagaggatttccaaatgaactccctccttccaacagaggcataaaccaccagctgtaccaatagaacta

SEQ ID NO: 95194 - DNA, 619 bp, Cannabis sativa
taaattacataaaaattaaaatagtatacattatttattattcaatttactaattatcatctaaaatacaacttaaatttttataaaaaatacaaacataaattataaaatattattaaaaatataactaaaatattaaacgagttcctactggagcagagagtgtcattcccgatcttgtcccatttaacatttagaaataaaaaaaatgattcatgtccccaccctgttctccatttgaacaggaaattccaacttggaggaggttcttgcgggcctcatccccatatgaaaaatgtgcttccctagcctcaacattatcataaagtgtcctaatattattaatgtaattaaatgttaaatcttgcgtattttaatttagtaactaatgtataaattatttttcttttgagagagcaatgctcatatctatacatatttaaagaatattattatgtattagggtgtttagcaccatttaaaggtgacactctatgattagttaacaatattttttaaaaattattatctaaacttaatacttaattgcataaataacaatatgacaccgaaaaagtatcacacaacactcatgtcttttaacatttctcatatttat

SEQ ID NO: 95195 - DNA, 606 bp, Cannabis sativa
ccgttaaagcaagctcgaataagctccaaataaacttggcttttctaacagcctcagtaactacttcattagaggcaaactttgccagctagtattaaatttggtggcatactctgtcaccgtcatactgccttgagttagccatatcaattcttctaccttagcagtacgaatagattcattgtaaaacttttcctagaacaaggttcgaaaggcatcccaggtcatattattcagatcatgaccctaagacacaatttctcaccaaatgcaggcatcttcccaaagtatgaagatagcacattccacttgatcattaccttcaacttgcataaagtcaaaaatggatgttattatgctcatccattgctctgccttaaatggattagcaccaccttcaaacattggcggattttgcttcctaaactgcttatacaacggctccagatgatttcccacgtcctgtggcactaccaaaggtgccagaggattaggattaggatatggagcacgtcgagcttgctgctctataagtctctaatctgatcattttgctgttggacgatctcttaaatcgtagcttacatttattcttagttttgtggt

SEQ ID NO: 95196 - DNA, 1242 bp, Cannabis sativa
tacacgaagcattgatgtttttttgttttatgctaattttgaattatgtgttttgcattttatctattcacactttgttattttaaataaaaaaatcaaccttcaaatcttatattatcttacgtgtgaataaataaaatgtgaagaatgtccacgttttattaactgttgtaaataaatcaatttcaaaaggaataattgccaatctatattcctataaataagggcataatctatgagaaaaagggacaataaaagagagaaaattttattattttaaatattgagattgtattttgtattcagaaaatatctctaataataaggactcatgaagagtatgtagattttaactacaaaacaaatatctggtgttatttattatcatttaattatatagtgtatttattgcaaaaaaaaaaaactatttatttagttaacgaaaatatgcgttaataatagtacttcattgtaattaaattttattttattttttatttgatttgcattaatctctctatttaggatttgtgatgtccaagaataatttgtaggtgaatttggttttaatggagtttaaattcacaatattaactaagacatattaggattttgtctgcacagatcaagatttatcttttcagaaaaaatttcatcatttaatgaaattttgtaaggaaacatttaatgtattctctttgttttcaaacctttagagcttagttttggatgtcatttatccctataaatatcacctaaaccagtagcttccactccttaatttcttttgtaaatgacagttgttttactattccttgttgatttgtgagtctttatgattacttttgtgtgaagtaaatttcaaagtgaagaacgtgaagaacaaccttgtggagaaggttcatttaagtcttgcatcgagatgaaacaaataccgctatcttcgggagaagatttctacaagtcttgcattaggagcaagcactgctatcttcgagagaaatttttacaaatcttgcatcgagagaaaacaagcattcatcaagtatttgaaaggagttcaaacattggtgtcttaaggagattcattgagtaaatatgagtacattaagcttgtgacaaatcattagaggaattctataagttttgtttaagtatattactttgtacttggtaaaatttatgcactattattttgttctataaaattcaatatttgatagaacatatttcacaagtact

SEQ ID NO: 95197 - DNA, 651 bp, Cannabis sativa
  modified_base (381)..(386): a, c, t, g, unknown or other
cccaaaccagcaccaccaccaccataaccactctctctctctccctaagacccccttcgaccaccgtctgacccaaagcgtcgaccacggtcaacctaaaaagccaacccaaaacccaaattcttttcttcaatatacaaaccctaattaaccctccacaacaccaaactctaattaactctaattcttttcttcaatatacgacagcctcacttctctctctcaagaaattcaaaatttcccaaaaatacttcttctcttctaatagctgcaccaaaaatagggttagggttctatggattttctattttcttcttcttcttgctgctaaaaacaaggctagggttctaatgggtttcaaattctcttcttcttctcttnnnnnnagttaggattagggtccttagattctaggttttctcctctaacctgaaataaaacccaaaaaaaaaaaaaaccagtatagagatcaaatcaataaaaacacaaaactcatcaataggcgaaggagacatgacgtccacgaagctccatcgttcaagccctctcatcggagctcctgattattcatcagtttctggccatggtggttatggaggtaactagaaggaagagacgaagggggagagaagaaaaagggtcggggtggga

SEQ ID NO: 95198 - DNA, 1228 bp, Cannabis sativa
  modified_base (289)..(290): a, c, t, g, unknown or other
ataccgtctggcagtatttttgtaagaaaataacaaaagttagtataccatgtaaatttcccattatttttaatttataaattggagttgggcctagattggtgttgtggtggacgtgtgaaaaagaaaagaaacaaaaagtcaaaatttttaaaaatgcatagtatttgaaatccttgctgatttttggggccctaatttttggtggtcctaaggcaccgacctagcttgtcttagcccagggtcgggcctggtcatacttgaatttcatgttatgtgccatgttccnnaacaactcatcctcatcttcatcaactaacgaatcgaccaactctttgtgaatattacttatcttaatgaagtacttgtttgcagttacataagtagacccactaaacttcaatgttacattataaaaggtctccaaaaatctcacaaacacacttgcattcaactagtcggtatcaatgggtggcccaacttttagttttccatctttgtcaatctcatcaaagtacttcatataaaatgcatttatttctgccatttcttgaaacgcctttttaaattttattacacagttaaacatcaagaatgttgagtttcaccttgttgggacatctaaataagaagaccgttgcattcaatcttttcttgcaccactacttccttaaatgctttaagcctagtaggagaagacttaacatatctcaccacatttttgattgcagcaattgattcatgtttttccttcaagccttcactaaaaattaagttcactatgtggcactacatctcacataaaagaactttccctttaaaataagtacattctatttctctttaaacttcctctttaagtatctattggcaacatcattagaagaagcattatctactgttatggtaaacaacttagagatatcccattctcttaaacataacttaatctgtttaccaatagtttctcctttatgatgacttgacaaaaattgataattctttgttgatacttctaagcatgatcaatccaatgagcagtgatgaccatgtaattcatattttgaatggaagtatatgtatcagtagtaattgatatcctctcatatctcaaaatatttctaaatatcaccttttcttcttgatacaacttcaaaacatctcaagccacagtcattcgagaaggggtctcaaatctaggttagagtgttttcacaaatcttttgaa

SEQ ID NO: 95199 - DNA, 889 bp, Cannabis sativa
  modified_base (790)..(808): a, c, t, g, unknown or other
tttccaacacatccttactaggagaatgtttcaaccaagatggaaacaagttaaaccatgatgactgaaaacaacgcttatgcgtctctttatttctacggtacttagaaagtatacattgatatggaccagctttaatgtacgctctgcgaacttcatcttgcttctcaattggatactcccatatttgtggtcgtaatcttggatctcgctctaatgaattgatatcaaacccttctataatttgaacttctatagacttttcagtacaatattctgaatgcaagttatcaagatctactaattgattggatgagtcattagatattggaacttcagtgctcttccttttaaagaatgaatcgattgtagatggttttttcatctgaagaaaaatagactaataaaactttaatattcataaacaatgtatttgagtgtcactaaatataaataagcctctaatcaatcatacataaatatatttaataaccacggtaaataattgacataatctatgacgaacgaaattataccatcataactccaaatacagaatatgttataaaaaaactccaaatacagaatatatttaaatgtgtacttaaattcacaaagtcattttaatacatattatatatacataaatataaaacataaacagttaattaatattattaatctaaagaagactattttttttgtaattcatatattagataatagtataaaatataatttgctttgtattaattataaactttacactataagaactccacaccaaatnnnnnnnnnnnnnnnnnnntattataatgaaatatgtcgagaaagaaataaaactaaaaaagaggtttcaactgggtgtactagtgagcaaagtaataca

SEQ ID NO: 95200 - DNA, 614 bp, Cannabis sativa
gagctgggcaaaatggtttagtgtaggttgttctcctcgacgagttgagtctagtggtgaagacgactcgtcaaacggacaccggaggtgaccgaacaatttgttcaaagtttgaatcaccaaacattgacttgcgatccccaagctaacggtggcgaaaggagcagcgccgcttgggggggtgaggtcgccggcactaggagattcattttgtccgacgtgtggggttagtcgttggccggaggtgggtcggcggagagtggtggtgatggtggtttgtgggtttgctttgaagcttgaagagagagaaagagaaagagaaaaggagagagggacacgataggggtggggttttttttaaaaaaaaatctaatattgattttttttttttatatatatattattttattcatttattttattatatatataataggtttgactcggtcaaaccgagtcttcacatgtgacctgggatagtcggagaacacttggggtggttagctgatgctgcacacaagagaaatagaaagggaaatttgaatttctatgcttacattaaggaataattttttccctaaacttaaaatagggaatattggtaaaatgggata

SEQ ID NO: 95201 - DNA, 569 bp, Cannabis sativa
ggctagtttctggtggaaatctaataactcctctggtaatggcagtggtatcatctggatgaactgggatagaatgacaaaacacaagttgaaggtggtatgggctttcgatgcttgagggatttcaatcttgccatgcttggtaagcaaggttggagattattgtttcggcatgactccatggttggtaaagtttttaaagcaagatactatccacaaggtgactacctttcggctgagcttgggtcaaatccaagtttcgtttggagcagtatttttgctgctaagaatgttgttcaagctggtttgaggaaaagaattggtgggggtttgtctgtgcaaattacaacagacccgtggcttcccattactgaccgagcaactccaatcccagccgtgcagggccttgagaacttctctgtcaattgtctctttcaaatgcactctagaagctgggatgttgatatagttagggactttttctctcctgaagatgcagccattattctcggcatccctttaagtttagatgatgccgatacttggtattgggttgctgagaaaaatgg

SEQ ID NO: 95202 - DNA, 531 bp, Cannabis sativa
tctatttttaaaaataaaaaacaggtatatgatgtcaaacatgtacttagtctcatggttatctaaaaagcaacatgttgtatttcaaggtcaagcacagaatctgagtacatgagatcttttggattgaatttctggtgaaagaatttaattttcctctttaaactattgttacttgttgtgataatcttggtgcaaatgctctaacatccaatcccatttttcatgcgaggactaaacatgatattcattttgtcagggacaaagtactcaacaaacagctagtaattagatacataccatcctctaatcaaatagcaaattgctttaccaaaggtttaacaaactcatcacaatttcatttcctaggaagcaaacttggagtaaggtttaaagaaatgaaatgaaatggtgcagctcataattaagtcactactgtagtctgcaatacagatgaacaaatggtatatatgtgcattggtgtcaaaagatgttgtacgtggtccccaaatccgttaaagagaaatcatt

SEQ ID NO: 95203 - DNA, 737 bp, Cannabis sativa
gtttcaatttaaggttgaatatcagaagcttggatacacaaccctatccctttcgaaacaggtcagtcagtctagcaaagctttgactatttaatgttcgttattaaacctgaaagccttggttctttaaacatatgttaaatgacgtattctactggcgaccgtgatgttaactattccaacacttatgaatcaaaatttgcagattcctgtacggcctttcaatcacaatgaatatgaacgatttataaccaccgcctttccctactatggagcttcatttaccacagtacgctctctctaaactctaagccacctggatctcttttgtgattcatttctcaattaatcaacatctgaatgctttttaattgcagatggttgggttcttcatctttagcttcatcttcctgtacaatagcaagtaaacctcaaatatttacagagaccaattacatggctcaaggatagttcttctaagatattagggaggcacatgacatggatcttctagattaacttttatggaaattttgagtgacaataatcttttttctcctcagagatattgtttgaaaggtaattgatatttgaaccatagtttgaaatatatctaattttggttacatctctttatttttgttacaatcacattcttctcattttctaggttgactttccaataccatagctataggtgtgatgtgttattaaatatgaatgaaatcaattaggac

SEQ ID NO: 95204 - DNA, 847 bp, Cannabis sativa
  modified_base (288)..(291): a, c, t, g, unknown or other
atgtgaaaaaaagcttatgaaatacaaagccatcgcatgagacaccgtttggaagaggcacacgtcgaaacattgagttagaacgtgaggcagcttcggccagggcgacacaggggatggatgctcaaaatcaacctgaacgtggaatgagaagaccacgaggaagacctcgtggatcacgaactaggagacaggaaagggcccgggaagaacaacctggggaaaatgagacaccccctgagtatcaggatgaacagccaaaaaggagacaaccgaaaactgatgaannnnaaatccctcatgaaaatgaggaggatcttgggactcaaccaggagaacagagatcaccagctagaaatcaccaacgttcttcccaaacccatagagtgaggactcgtacgtaccctgatgggggaaatacgacaaactactctcgggaggaaagaacagagggtgaagaagcaagtgtgactttgagacgattcaaaacccatagccgatcaactcaaagaggagaaagtactcaacgagcaaatgattgagaaagtatggggagcagtatatcaacgagccactcaaaaacaatgtctatgaataggacgcggtctatgagtaagatgagatctgccaacattactcccaacaagatatgcgggagcacttgaattggaagaaacctgaccttcgccaacagcttggtccaaagcaagaggatccaatttaattgtggataaacgaaatggaggacaagttcaggagatattaagtgggggaattagggaaattatctggatacgactctgacgaggagcttgagctgtatttcaggattcaaaaacctgcatgt

SEQ ID NO: 95205 - DNA, 657 bp, Cannabis sativa
gaagcaaaaaacagtttgcgtcggttttaaaatgaagtaaataacttgaatatttatgtctgtcgtttttacgtctgtttagacaaccgacacaaaatgtttatgtgttactttacaactgaagcaaaaagttatttttgtagtagtgaaaagactctaaatgaatgaatagtctttaaaatagcctaataaattataataacgataatcaataatttaaagaatcaatttaagaatataaatacattaattagttatatttataagacaaaatatcgacttatcttatcagactcatttagacttttattcaccaattttgcttgcccctttccttatggttgtatcattgaggaaaaacttgtaatgatcttatttatttcactgaagttgtttaatagattattgtcaaactacattccattatccgagacaatcttcataggaaagctaaatctacaaataatattttttgccacaaagtctaggaactttttcaaggtaattgtagttaatagttcaactttagtccatttaatgaagagcctatgtaagaaccttgtatttcatgaccgaactaaacctaattaaatctagtaccatttcattatagttacaaagacgcaagaaaattttcatattttaaaagttcctact

SEQ ID NO: 95206 - DNA, 864 bp, Cannabis sativa
aatattataatttagagaaaaaaatagagagaagatgagaattttcttagtgttttattccaatgggtgatctcttatttatacacatacaagagtcagaataaactaagaaaatgaaaatgttgattacaattaatgataataaataaaagatttaaacatcaacataattattaatatttataacataataataataatgaaaaaatgagattttttcaaagaccacattaataatgggacccactatttattatacctttgagaaaaagaaactaatcctttttaatatatatatatatatatatctatttttaaatttttaatcaattttttatattcattcatctttatagaagactttttatattatagaaccagtttattttttaaacactaaacatcactgttcatcctatttttctatagcaacaaatcaattttttttttttttttgtttgaaggagtggctacatatatgggcattaggaagtcttatctcacaatttcggtaatcttttgagtttaaagaagaaaaaaaagagctatgttatagaacattaattttcctatgtatatataatattatttatgtttattgttaatttgttatttgtatcattaatttattaaatataaattgtgataaaaaataattaaatttactatacatggacttattatatattacagatttaagttttattggagaatgaattgtagtagcaattttgatggaaaaacaagaatagagttgattcattctaaaattttacatgaaataataccaaaagtgggtatggagtttgaaactgaggaagcatatgatttttataataattatgcttataaggttggatttag

SEQ ID NO: 95207 - DNA, 691 bp, Cannabis sativa
ctcaaacctaaaatttcttctgacgttctcccccaaaccaccagaatacaaacacagagggcggtgatccgagttggcagtctggacggaacaaagaacagccttcgggaaaagcctaacccaatcaccattagcgagccctttatctaaagccgacttgacaaggttagacccagaacggtggttgtcccaggtcaacttgtctccctggatgggtagagaaataagcccccgggtattcaccagatttgagattacaggaataaattggtctctaccctttgatccctctcgttcagaactactaaggacaaaattagtgtctcccaatataagccacggaccaccgaacctatcccctaccttcattagtttctcccagaacgctttttttgcatgaaaatacgggggaccataaacacaggataggagccaagggtgcgaggggggatccgaaaacactaaaccagatatgtgattatgggagcactcaatacattcaaactcaaaaccaagtttccaagctaaaataatacctcccgcattacccacagccggaacaataatattcaaataaaaatgaaaggattttagaatatgtaccaaagaagtagcatcaacttttacttcggtcagaaagatgacatccggagagcgcgaccgaattagggacttcagctcacgaactgta

SEQ ID NO: 95208 - DNA, 863 bp, Cannabis sativa
atgattatatttaatgtataaattctattaaaatgtgtatagataaaatgtgtgttgggtcatcaaataaataagtcaaatctatgtggtctattttggaataaagtttatgacttaagggcataattgtcatgattttaatatgtggataccataaagataatttctaatttgatgaaggtccaaattagaaatagtcaaaaaaatgattaattactgttttttcagttattaataaacaggtattagtctccatttttttacatcgcttcacatatcgtatgtttactcttgaatccccatcatcaagaaactcaggtttcaaagagaaaattttgatgcgaaaattggaagattataccattcaaaatcaattctatggactccggtacacttctgctaatctataattctattgtttgattctcataaattaattagggttaaattcagaatttgcagtgttattaacataaatttatttatttaaatatatcacccaaaaaattaattaaaataaataatttagaagaaaaaaaaaagaaattatgaagtgaaatacacactctaggtgtgaggaaggagattacatatgatgttcataaaatagtcaattcaaacttatccacatgatttaatccaattcaatccgcaaagtaaggatatgtgcacttgtgcagattgaattggttagaaaatttcaaatttccacttgtgcggattggatactgattgacatgtaaaagtaaccgatccaatctaatttacacatatttgtataatcttttaaaaattgtatatacaattaatattttaatataaaaaaataataacttaaaaatcaaatacataaaatacaaata

SEQ ID NO: 95209 - DNA, 1352 bp, Cannabis sativa
tgtacaaataaccattgcctcatgggttggacctcactaaatcgacccaatgtcaatatattacttatatttaccccatgaatgggctatatttacatgcaaaccctaacctatgtatataaaaaaaaaactcttcatgcaaagggttcgaaattcatttcttacatgctaaaggttaaaattagggtttcataaacaatacaaaaatacgtgtatgatacttgaatgcttttttcagctaaataatattgacatgtagactataattcattaatacttgaatcacgtaaaaatccttgccttaatcataatatttatttatttttttagccttattatattttatattggtttccaaaaaattcagtaaacatatattttcaaaatgaactctgacccaagccctagctctaaatgccgacctcggatcccaacctcaacctcggactcaggccatggactctaatgccagactcagaccctcacctaggactcaaaccctgccttgaaccctaaccatggatcttgaccactcccctaaccccaaccttgccccagacgccgaaaccaaccttggccttagagtctgatcctggaccccgaccttaaagccaaaccacgaccttgaaccctgacccccatccccaacccccaggccctaggctcgaccctggaccccaacttggattttgtattttacaaaagttatagattgaactttttattttgtcaaacaacaaaatagatcctgtattttttaaaatggtacaaataggattttgaactcaatttttgacttttgttaatataactaacttaaaaacaattcctaatacgaatagatgcaaacaatttaactagttttgtcataacatctccaaggtaaattattattaagttttattttgataaaaagttagttcatggtcctatttatattattttagaaaatatagagtctattttgtcattttacaatacaaaatgtccaatctacaatttttacaatacacaggatccaaaataatatttaatcttaactaattaatgtgacaaaacaacaaacaaacacacttatttatcattaatctctcacacaagaacaataataatctcttaaaacaaacttatttcgatttgctcaaactttacattatcaatgatattcatattagtatagtttttacaaaaatcaatttattaatctaagaaacaagtaccacatagaaaatgtatggacaaccaatcttaataaaaatgctatataaactattaagtttaacacatgaaattaaaaattggttattgaaaaccaaaaaaaaaaattatagaaaaattgtaaataaattaga

SEQ ID NO: 95210 - DNA, 706 bp, Cannabis sativa
gggagcaaataagatattttggggtcgaaacagggacatagtgcccaggttgacatgcaacctggtttgcatgtttccaatcctcaaacacaaattttactccaagaattcttcttattttggtcaaaaacagggtagaagacctcgctcacaatcttgaatgccttagaagtatcaaaacgagctttgggaagtcaccggggaagcaccaacacccaggttgacgtgtgacctgatgcgctaggtattgcttgtcaaaatctgatttcgtcttgaccatttaactattttcttgtagtgaacgagcgctacaacttgtgacaaattgaattcatactttgatatttcaccttttcaacaaggtggaatattggcaaaattaggaaattttgagtctacctaatttcaccaaaaagctacatctccgagaactggtgaacaacttcaccataacaaagaatatgactaagtgatgttaacatatcacttaggcataaaaaaaaaaaaatacaagtatgggacattttttacttatccaacgtccaggttgatgtcaggatgtcaacgcgttagatgtcaacttgggcactgagtgctgaacaactttcagtaaaacgataataactccctcgttattgatctgattgacttgattcaacttgaatttagaagctattataaggatctatcaagtcatgtatgacac

SEQ ID NO: 95211 - DNA, 638 bp, Cannabis sativa
acaactttcttctcaattttatcaatcaggtctgggtcacttgcttctgagctcaagtgtgaatttaagggtgtatttcaaaagagttttcgctagtctggtgtgatcaagaatatgtatgctttttgaatgatgggatcttctatttataggtgagaaggaatgcccgcttccttctcttttcccgttttgatttgtccacgtccattcaatcttttatgtttttctcctttccgagctctgctctgtttctcttttattcagagatttacttttctgtctttaagcatcctgctctacttcttttctttagtgaaacagtgcgtttctctttatgtcctgacatattacaacatcagctctttttatcatttttatctcttgaaattacttatttactcttagaattatttttattttttacaatttcccctcagtactatggtatttgagctcttaactttttagtttgaattttaatgccatggaactagttactaaaaataatatcgcgcgtgtgtcattaatgtggactaattgacttaatgggtaatcattttagaaatgaatttgtgtttatgtttgggtttgtgtgaaaaattaagatttaaaacttgtatttcaatttatggcttgtg

SEQ ID NO: 95212 - DNA, 603 bp, Cannabis sativa
agttttagagtgaatttagaatgacatgtcaccgccttatacttctcctttatatatatatatatagattataaatatttttattgaaagaaaagagagtaataagattattgtatgtttttttaattaatcatccatgaatttgtatgaaggattgtattaagtatactttagggtttttcttatttatcattagtttaaaaaactttatatagcatatttgtttagtgattaaatgattatatttatggttttcaatcataaattatattgtgattaatgtatataaagtgagtttgttttcttatattggggaagggaaattttgggatatgagaaaagtgtgcaactttttagtttactaggttgtgtctatgactgctgttatcggaggaattcaaataacactaaataaaataaaggttttgattatttaattaaaaaagagcgagcactcaacctagaatgataagtattcaaatgaagctacgcagataaatagaaaaataatgaaaacaacgaacacaagaaaatatagtggttcagtcagattacggtatgcttagtctgttgggttttgtgccctaaataaaaccctttaca

SEQ ID NO: 95213 - DNA, 867 bp, Cannabis sativa
attaatattgaatcatgcatgcatgcatcaatataaagaaaaaaaatttacattatttttttttttttagagtcaaaatttttacattattaactacacatattataacataattacaataacacagttatatgtatatctgtgtgtatttatccatgtgcacaatctatattttagagtaaattaacatgtattaattataatgtactctctactcgttttgagtggtgatcaatagaccattgattattatcggagcaatctttaattccccctcaactgccaaaatggatgacataaactcaaattaacactaaacagaacccaacagtagttacgtactttatacagatactaagccacgtgcacgtaaaaattattcacctctaccctagcctacaaaacaagcagctaccaatatataattaagtactttgatctatatataaacaaacaatgaggacttcttcacacgctatctatatctacatatatatatatatatatatcaaagtacttatcaccaaataataacgacgcgacatcgtatggtttcctgtcttaaattttattcataattgtatagcactgccactgttagtgtgcatatgtaaatctcaacttaaaaaggttcactatataattatttttggtattaaatttttctctaatattatgaacgttttgatatgtattagaagcattgatcactaataacgaagtcaatattaaattagccatatggcgaatgtaattctgcatctgaaaattgcaagcagatctgagccaaacatttttcctgaaacaaaaaataaaataaaatatgtataaattaatgaccgaaaatcttcgaagagttttcagtat

SEQ ID NO: 95214 - DNA, 531 bp, Cannabis sativa
tccgtaaggatcaaaaggaggaggaggtggagccatatacctgaaccataccagcatgttaactaacaggaaacgcatacattaaaaatattgaatttataatgctagcaagatttctctaaagggaaatgaatattataaaggtaattagttgaactagtaatttttacccatgatgtgcccaaacaggtggtggaggaggatgaaaaggagatggacttgtatagccagcatgtgagtagtcgccaccagttcgcatacgcttactttgatcataagcatttgaatctgccactattcctataaattaactgagattagcagattttatcaaccaataataaaagataatagattgggtatcatttgtgttaaattttttgcagaaatcttgggcccgctaccattatagagcttaattaagcatgcttttgatgacatgcataatgttttgaaactcataaactaaaaaaaaaatagttgttagacctcaagagtagcggaatatggtagaagagagtaaataaaggg

SEQ ID NO: 95215 - DNA, 1308 bp, Cannabis sativa
ttaaacatgatcttaccaaacaaaaattactaaatagtatttgccggcaaataaatattatcataaacaaaatgagcacgttttaaaattttgattttaaaactaaaagctataaaaatatataagagtgttcacttgtcattacacaacttgtatctgacatataaatttaaaattactttactgccattgcagatcaaaaaaatctgacttttacagattttgtaaaggattttcattttgctcgtatcttatagataccaattttttaattttcttagtattagttttgtcaatcggatcaagcaatatgatattgccaaaaaaaaatgttagaagaatacaaaaatgaaaaatgaatgtattatgtaatttagatcaaaatttatatcaaatgaagaatgatataaacattggtataagtggcaaaaaaagaagagagagaataatataataataatgaaaaacgtgaaaaaaggcttgaaaaaagggtatgcagccaaatgaaaaagactatatatttctaaataaatatgtatttacgaagaaaaaaagttgaaaaaactttcgtaagtggatgtgttttattatgtgaaatagtggatactccatataagcatttaatttgaagaactatcacccttaaaacaaaataaaagttagttcattgtaatttaattaatacaaaagaaattaaagctttttaatttatttcaataatgttgttatattataatcaatgcatatagatatttttctactaaagagaagaaaaaaaaaaaaaaaagagggcagaaaatagaccccaatgacttgcattgcattatatatctaaaaccaataattataaaataagtgaaaaagagagcaaattaattgggtttggtgagtgagtggtaacaaccaaaaataaagtacaataaattaatagctaattaggagttttacaatttcaaacttttacatctaataaattatgtattttgaattttttttagttattaaatttttaaaaaaaattattaaaattattaaatttaagaatttttatttaattttgtttaatattagtttatgtattgaatggtacactctaaaatttaatacatataatagtttttgaacaattttaacggccttaaaacttaataaacagcatttgatacatatcaaaagtttagagacaacaaagtttaattagcctaaattaattattaaaaacccattacataacattataattaattaatttaattctaacacgtaaatatatataatttattattattattatttaattccagacaa

SEQ ID NO: 95216 - DNA, 2300 bp, Cannabis sativa
taagagtacaatcaactttagaataagtgtcctttgcaaggaaatgagccacgttattcgcaaatcgttttacaaaagtcacagaaacatttaaaagaaaagaaagcagatttttggagtcgttaataaggcttccatatggagagaacatgtggactttgctggtaattgcatgaacgacattaagacaatctgattcgacttgaacattctgccaattatttgcttttatccaactgagtgtttcttttattgtttgcgttagtcttttatgttaattaagaaaactattttaattaatcttttacgtcaattaggaaaactattttaattaatagatgattcaaaccttttaaaggttttgataaaaatgctattacattattgtttgtagagaaaatagttactctaactccattttgattgatacactaacttattttagtttggtaattgtcacctacatttgattgaaatggtatgaaatgattgtgttattgaccttctaaattgatggtatgatctagtcttatcttgtgtgaaagaaaataatatgctatttgagaaatgttaaagaatacttatgtgcttagtacatataatatcattaataatgtaatttaatattaaatctcacatattttactttaataaagattataaatggcaaacaaattataaaaagaaccatagatgttattttgtataaagggttccacagtaattttgacataaaataggggtgaatgtgaaattaaataatttgatgagaatggaaagaataagatatgacttattagggtttccttcatttgatgagactgagaggagagcagagtagccgctgtttctttctcagtttctctattctgtcatcggaaaactaaaatgaagactattctctcatcggagacgatggacatcccggagggagtggagatcagggttcacgccaaggtcatcgaggttgaaggcccacggggaaagcttgtccgcaatttcaagcatctaaacctcgatttcgagctcatcactgatcacaccaccggaactcgtaagctcaagattgaatcttggttcggtaccaggaagaccagtgccgctatccgtacggctctcagccacgtcgataacctcatcaccggcgtcactaagggataccgttacaagatgcgattcgtctacgcccattttcccatcaatgcctctatctccaataccggcacctctattgagattcgaaactttttgggcgagaagaaggtactccatttcattttcatctacaaattacaataatctattattagtacaagttcaaaggtactctcattttattgtctgtgtatagaatttgaatgctactaccattggtgaataataatggatagagaagttgatttgatatgctctgcttttgtattgttttaacttagacatggtggaacattgcacattacagattatctaaatttatggactatatatatgtatatgtatataatgattattatgtgcttttttgttttggatgcaatcaggtaagaaaggtggacatgcttgatggagtttctattgtaaggtctgaaaaagttaaagatgaacttgttttggatggcaacgatattgagcttgtgtctcggtctgctgccctcataaaccaggtccatgctttttcctctacatatgtatatacttttttttcattgataactgtcttaacaacagttttgttatgtttattatgccttttaataattggcttgcctatgtattggacacacatgaaatgaagaagtgaaattttgctaaccttaaattgctagcagtcattttctaagatttcaagatggtttttcttttttctttttgggtacagaaatgccatgtcaagaacaaagatattcgtaagtttctcgatggtatctatgtaagcgaaaagggatgtatccaagtggaggaatgaagagtaagaaaaggtgtgatagacacattttttgtagttttttcttcttattgttgagtttattatgtctaaaaagcctgttttggagaatggaattgaacaacatagcagttttgaattaagaaaattaaatacaaagatcttgttggtgaaaaaaaatatgctcctttctctttgcatttatttgacaacttttacttggtttttctcttcttcttcatatgcctctatttattgaatttagtattgtatgagaacggttactaaaatgttcttacaatccttgcttttgtgtcttcattttaaattcttcttagaatttaaatttatgttt

SEQ ID NO: 95217 - DNA, 570 bp, Cannabis sativa
ggttcaactagcatgggtgcttgaagccttgagcatatcagtgcaggggccacccttcctcttggggactacttcaaagactatataaaccacatcgaagttgccccattccagctgactcccatctcctataggattcttgctagtctgaaagtcttgtacaaaattatgaactgggagtgtcccactccagtagagattgagtatctttactcagttaaggccgtttcatcgaggaagaacggtccagtgggctttttctatctcagtactcaccccagcgaggctaaaattattgtagaattgccaaataaagtgtctttcaagaataacttcttctggacgtctggtctttcccccatcgtcacaaccacattttgcaaacttcgtaagtgattgttctcttcttacttatttacatcagtcttccttttttaagtttatgactaatgttttgtttgttctggtagctcttttgacgagacctactcctctccctgagatggttagtaagcataggcaattgttaactcttccttacagtcttcggtcatgcaacttccttttgag

SEQ ID NO: 95218 - DNA, 685 bp, Cannabis sativa
tccgttcaaaaatttaaagaagcacgaaaaaatctatttgaggtgtttaccaagagagagattttttggaggcagcgttccaagcaattatggctacaagcaggagacaacaatagtaagtttttccataagtcggcttcttcccatcatcgcaacaatttgattgccaaactcaaagatttgaatgggatttggcatgattgggacacgggtctgactgagttaatgatgggttattttcaaggcttgttctcatccagtggctctgattgatctcatatttttgattgtatttctccttgtatctcggctgctcaaaatgaggatttgcttaaacctgttgaagcagatgaagttaggaaaactctttttcaaatgcaccctgacaaggctccgggtccggatggcatgaaacctggtttctaccaaaaatgttgggacgtggttggcggggatgtcgttgcacaagtacaaaatttctttctgacaggggttctccctgctgggctcaataatacaaatgtggttcttatccccaagaaaaagtaccctagccacatgggcgatttaagacctatttcgctttgtaatgtgctactcaaggtcataacaaaagtcctagcaaataggttaaaggttgtgcttccttcggtaatatctaaaactcagagtgcttttcttcaag

SEQ ID NO: 95219 - DNA, 635 bp, Cannabis sativa
tggtttgtttttttttttttttaatctttatgtttttttatttgtttttgttttttttatataattatttttaatttttggtaaatgatttttttacttgctattgctattattgtcacgttaatgttgatataatacttaataatatgttagtaattttttggtcttttatgttaattagtaattttttttttttttatcttttgtgtattttttattttttaaaaactaatctttataatactataatacttttttttttttaatttttttaaaattattttattattactattgttatgtgacattttaaagtgttcaataccatattgattcacatacataataattgatgaacagtttttaaaattatttattaaattaaaatttatgggaagtactgatattgaaatacactaataacaatatgttatattttgtggtgcttagcaccacaatgcgctctttaacattgtcattattagtacatatctttattagtttcaattatcatttttttctttacttgttatgaatgatcttcgtatttttttttttggtaaataattttttgtactattattgttatgtggcaccttaaggtcctcagtaccatatttatgtagttaccaatt

SEQ ID NO: 95220 - DNA, 1199 bp, Cannabis sativa
  modified_base (1026)..(1037): a, c, t, g, unknown or other
gttcttttcatcttacacaagaatattgttatatgacagggaggacgaactgtacacacgttgaaatgctcccgaatggggagtggccaaaatggtgaggcgttgaactctcttgaaacagttttgttttggaagcatgcttggaatttcacctgatggttttactccaaactaactttgtttaaacactcttgcaggtgtaggacttgtggcggaagtggtcttgactactgtcctcgatgcctcggtacgggagagtataggtacgtaatgggatttcagttcatgaagagggatgttagtcacacccaagatcgcaacgaacgtcgtagtgtagcagatttctatgaagaatgatcaataacattgaagtgaaaaactcaaaattaattattgttattattattatttttgctgaataacccaaaattacttagttccataatctttagcgatattggccacattttgtgtatagctcaatgtcttgtagaaagagcactaccatacttacttgttagagagatagattagtgttaatcttagatagctcaaaggtattatttgtactgtatctactatatttattttattcatttatttgtgatttgtgcatctactagattcaggttatattagtttattttaggaaaatttgcagcaaaaatctttaaaaatattgatttgatacagattagtcaccaatcttcaaaatagcagtaatcgtctcaagcttacattttttgtaagtccgtcaatacctaatttaacagctttgttaagtgctgacaagaatgccccatgtcaaaagtttattggtccacgtcataattttaattaaaattattaaaaaataaaataataaaacttattaaaataaataaaactttaatattctttttatttctttattttttttggtgatattctttttatttattttgttttattgtttatgtctctcgtcttcttcttatggagattatgttgggttttgtactgtaaataaaactcattttaatatannnnnnnnnnnnaattaataaaagatcaaaaatcattttatatagcatggtttacatgatttatttcatgattatatgtttagcgtataaaatttattaaatctagaacatatggttattcatgattatagtattgtcaacacagtgaaatataatcatgattatatgtttcaa

SEQ ID NO: 95221 - DNA, 1421 bp, Cannabis sativa
aatttaaataattattattttttttaatgttaatttgaattgtattttatataggtatttatttttgaaaaataattttacttatgaattttgctattaattttttatattaatagttagctataataaaattaattacttaagtacttttgctatcaatttatttaaatatatagttctactataattatctttattaatttttttatcaagaaagataatttttattaatcaaaccgagccaattatatacatccacatgaagattcttttttaaaatagaaacttacaactcttatatttttaagaataatgtgatctatgctagacaactttttttcttatacaagattaaatatactttttaattctctttaatgctactatctatacaatctatttatacactttttttatttacacacaaagttctgtttagtcaaatgccattaattgaacatgctaacatattttgatgaacacaatatattttttatgacacattttaatatatatatattttttttcatctttaaattaaattatatatgtgttttttaaacatattttttttcaataactaaaaaaaaaattaaaattaacttaaagctaaaaaaaataagttatacatacacacgcaacctctttcttgcattttttgatttcgcatgtaaaaaaaaaaatactgtaatttttatttgaatttaatttttttttaaagatgtttgactttaatcttattctaaaaaaaaaaaaaaaccccatgtcatgaggtacaaaaaaattaccctatataaatacatattattaattatatatatgtacggtgcaaactttacatatgcacacacatatatgtcatatatgtagagagatagtatcaaaatatttcaatgctttacacgcaacgcgattgaaagacaaacttatatattgataaataattgtctatggatttagatttttcttgttaaatttaataatctaccagtgggatgggtattatctttcatatagcagaattgggttgacacttctcgctctaatggggctccatttaatttttttatttttttattttgtgatagtatattatacatatttcattacaaattttacttttattattttaatttggacaatctttgtactttaaattattaatattgtatattatttttttttttttatatttttataatttatcatctttgtttttttagatgaattttagtaaaaattaagaggctgtttggtttcataattttaaactattttctgttttttaaaattgaaaacaatttttaaaaactagtaggggtagtttgaatttttttttattaaaacagttttttaaaattgagttttaaaaaactagaaaacagaaaacatcaaaatgttgttttcaattttcaaaaata

SEQ ID NO: 95222 - DNA, 921 bp, Cannabis sativa
  modified_base (636)..(651): a, c, t, g, unknown or other
acacacactcaccacaccaattttcactactacaaaaaattctttttatgtccctttttcatgtccaacaaaaatagcattggacattaaaaatattttagggagttttctagtccaacattgttggacatgaaaaaaatttcatcatgtccaacaatgttggactagaaaacaaatagtggacgttatatgtatttttaatttttaaaaaattggtctattttcaagtccaactatgctggactagaaaaatgttatagaaagttttctagtccatctctgctggactagaaaataatttagagagttttctagtccaactatgttggacataccatttcttaaaaggagaattctatgtgcacccataaaatgataaatacaccttattttaaaaaaaatataaaattaaataatttttaaaaattacttttaatatttttttttaaatatttttctcgcattattttatattaatttcaatacttattttgattttatcttcataattttttctaattcatgtatatatatttttttttatttttttctaagaaaaattcatataattttttattttaatttttttatcataatattttaaatataatttatttttgtttgataggtatattnnnnnnnnnnnnnnnntggaagaaaaaagttaaaaaacttagtacaattaaaaatataaattttaaataaaataaaaaatattaaaattgagtgtctttaaaaaattttaaggtataaataaaatttcccttcttaaaaaataaataataccctattaaatataaaagttaataaaaagctaataattaaaataaatatgcccataataacttttttttgaatttatacccacaatcacaaagaccaagaataaaaactgtcacccaaacagtttggtcaaatttt

SEQ ID NO: 95223 - DNA, 547 bp, Cannabis sativa
aattactaaagcagtcattacaatggacctcaatttcttgggtccaactgtcgagaagatgttggcttatttcaaataaacagaactagaagagtgaggaagcattgaggaaggggaaggagctgaagtagtcgagggagaagaagatgaagttacctctaagtctcccactatgtagacttagtttaattttctttaatttttgaacaatggtgttttggccaagaatatatcttgcattttgtgggattcttatttatgtagttaggtttatcttgctttgttggacgaccaacttagcttttaatcatatttataatttatgctactttaagatatatttccttcactttttgtgagaaaatatttccaaatttgaattatcacaaattaattatgaaccattatttataggtagactcaatttaatgattacataacattttgtttaatttttcttcctctcctcgttgatatcatctccacttcatataattctaaatatcgtattttttatttctaatttgcctgagacactatttttttc

SEQ ID NO: 95224 - DNA, 527 bp, Cannabis sativa
tttttttttttgtaattattattaaagaaattttttagcatatacaaaaatacagttttatcatagaaatatatatttatatacataaaaatcgaatggaaattttttatttatctatttatttttttgaaagattatatctttgtaaacacccaaagggacaaaggctactctgtagctaataaagctgcagatatacaacttggaagagagccaatccaatgggcattacaaatttacaatattattagagtagcataattagctatacaattgtaaatactattatactcattccaattgcaataaaggaagaaattcagagacaagccattaattaggcattagtgttcttgtgtataaagcttggaataagtgtttgtgtgtgatgtgatcattgacttgtgaattttctttatcaaaaaaaaaaaaaaagacttgtgaatttggaaaattagaacggtcggacgtaaactctacagcatacctaaacgaaagaggtgaacatagagtgataattaggggca

SEQ ID NO: 95225 - DNA, 514 bp, Cannabis sativa
tgaaataaaattaaaacaattattaacattaacaaaagaaatattaaaacaataaatttatttatttttaatattgatgtatacttaggtaaatggtattttgaaccttgtgttttacaaaagttactgactggaccctctattttaataaatgacaaattgggtcatgtatattccaaaatagtactaaatagaaccctaaactgatttttctatcaaaataaaattaatgataacccaatctagagatgttatgacaaaattggctacatttactgtatttgttcatgttaagaattgtcttcaagttggttatattaaaaaaattatcaaaaattgagcttagagtcttgtttatactattttaaaaaatatatgatacattttatcatttgataaaacagatgattcaatcaataacttttacaaaacacagattctagaatagtataactagggcatcacatttacacctgaaaactcactcatgcggcaaacccaccggacccaaaac

SEQ ID NO: 95226 - DNA, 809 bp, Cannabis sativa
agaaggaccaagagtagaagtgatcttaaccatgaaaaatcactaagatctttactttgagtgtccaacctatccacatagagaattatatcggtaagcatttctttgtgacattcttcactaaagacaagatttttcgatcggtgctttattccattgcagctaatttcagacttcagtatcaaaagccctgatcttgacaccatatacttttccaataatttttttttcacaagttgtggagggtccaaatgcataaattgggatattctcttctccaaaaatggagtttatggtggcactcttgccaacacttgttttcccaatgacaaatatgtttaaggaaaattccaaaacatctcaagttggaaagccttagcctttgcactttccaagctaaattcttggccagcttgccttcccgaaacaagtgccaaccttacagaacctgccttgctatcaaatcttcaatcgagccacctacgatcttaacaaatcttaagtacttcacccttaactgttgaaacttgtccactctgcttttctcttcctcacttaagctcttctctgagtctcctccaactgaactagttatagtgatattaccattgtcattgccattgccacaatcagaggaagcacatgtagtctcattttcagtattattagttaggttttcatctttagtaaattagagactccatttccaattccttattcatcatcattatcaccgttctcaaccacaaactagattctaacacccgttcttctcctcctgagtgtcaacttcctcaaccagaacattt

SEQ ID NO: 95227 - DNA, 770 bp, Cannabis sativa
acaaaagatatacgaagtttttttatcaattttattgggtgaattttgttttgtagcaccaacagcaatttttttcagaaacatatactgaactgtcatcttacatttatttttgtagagaaggcattctaatgatacacaacaaaacaaaatacaaaaattttcataaatagtagttaaattatttctttttattaaaagaaaaaaaactcgaagtaatcttttaaaaataattacatcgatcatcagtcacaagaccagtttatcaaattcgaaaattattatcttcttcatttattttattataaaatcacattcaatttcgttattaattctacaatttttaatatttatcacacaattattgtctttctatatattttaaatataataagttatgtttctaatttctgtattatttttgtatataatatacacattgaattgttatattgtagattatatcactcaatataactacaaaatatatatctgtatatgatatatgtaaagattaaaaaaaattgaacaacaccgcgcgaagcgcggcttagttccctagttatatataatatagagacaattattaataaaaatacactaaatttcttttataaatatcgaaacaagtaacagtgcataagtgcatttttggtattgtgctacttccatatataagagttcctatcatgtggatgcatcatgcatgcccaataaatacattgatctacataattattataatttgttggatacactcttatatatat

SEQ ID NO: 95228 - DNA, 665 bp, Cannabis sativa
ccatgtggcaacacaactcaccaacaagaagatcaagtcagcacctcagccaacggggaccataacactcaaacgggacaacaagtgacagaccagttgtttcaaaagagctggctagccgcccttgcctctaagggaggaccctttactggttcctcctactaaaggaaggactcatgggcgacaacactcaggaataacaattgaatctcatctctggtattatgttggagagaaaggactaggagttggcgagccccatgtggacttgagagaagatctcaagttagtcggacttagagaagccatcggccaagccagcctaactgaagaaccatgtgccgctgattgcgatgtattcgctcagtagagacgtgaattcttgaggtggatggatgaccaagagtacatccttcgatctcaccaagtagagcttaatcactgcaatagagaggctagtgacctgataaggtagttcaaccagaaaattgatggaagaggccgagatttcaatagagattcactaaaaggaagactggttgatagatcttggaagatctatcgaaaaactaaccaacttggttcctgttacgataattatgaacaatacgcaagtgcacgtaatcaagtagtaaactcacgcaggtgaggtcgaaccacaggga

SEQ ID NO: 95229 - DNA, 572 bp, Cannabis sativa
taaagaaatatttaatcacaaaaacttatgatttttgtgactaacctttaccacgtaccttttaatttaattacaacataaaaataataattaataattaatcataatttttttacttttaattacaaatttatgactaaaaataaaattttttgtaatgaattttatcgctgaaaactataatagctatttctctttatataattaagtaaaaaagttgccaaaataaaagactttgatttaatattgatctcatacaattaaatttaatagcaatgctattcaaagaaacttccaaaaaaattgccaaaactgtacgcgttttctttataatattcaactctcaatatatataataataacaatagtgcaactttatttcaaaaaagaataaatattattacaaaatatatacaataaactctatcagttgtgaagatcaatttcttctcattcttcacaaatcttatccacagcctaaagattgctatggatgatgataatcagccccttgccatcttatcccaaaaaaaatatgatgttttcatcagttttagaggagaagatactcg

SEQ ID NO: 95230 - DNA, 1470 bp, Cannabis sativa
gcatcatagatattttttgaatggccaatttcttacaacagacttgggagcttgtccatctttgacataaagaagcatagtttggggaaaataacttttaatcaaaggactgcgatggaaggtgggcacatgtgattcaattaattgtaaagaagactcatggcttcctgaccatacctgtttcactccctattgctttaaaggttcaaatccagctctgcaaatttttgatctaattgaccagcatagacaatgggatttgacagctttatctgctaactttggccatactgacatcaacaaaatcttgagcattcctctaagtatttttcccataaaagatatcatggtttggaacgacactacttcaggagattacacagtaaaatcagggtatcaatttgctacttctcttgctgaacaaaagaaaataagcagcagctcttctcttgagagttggtggacaactttttggaagttaaaaatccctttggaaattcgcatcttcgtctggaaagcttttcatatggtcttatatattgctgcagaattgaatcgaaagcatattgctgcaactctaatatgtcccttgtgcaaaacacataatgaaaccatcaatcatgcacttttttttatgtacaaagggccaaataagtgtggcgcctctctcacctgtcctttaatattaagctggcttcaacaacaacctgtgagaaatttttactgtatgtttctgcaaacatttcagcataagagtttgaactttttcttgtactttgctgtagtatatggtatgaacgcaatgttgaataccatggtaaaccagcaaaatagccacttgcaattctcctttttgctactgcatatctggaaaaatatcatgctgttaaggctccacttatgaattcttcatcacatgctattactaatatgcctccagctgatatcacaacaggtccttcagcacagattcaatggatagctccaccaacagggaagctcaaactcaacactgacacaaccttgaacaaatgaatgggattgtaggtattggggcagtattgagagattctacaggctctatcactgctgctttatctaagccccttagaagttgtttcaaacctgaagagattgaagctctaagccttgctctaactcttaaatggcttatctctctccatctatctccagactacattgaaacagactcacttatggtggtttagggattgaaagctactaataacactgtcttgaaagatattaactttttcagtatctttttttccacgagcacaaatcaatcatgtttctagatctgctaatacttacagccatgctatggctaagtttgctctcacggtagatactgactgtttttagttagatgaatttccacctccacttatgactattatgtaatttattacaattaatataatggtctttctctcaaaaaaaaaaaaa

SEQ ID NO: 95231 - DNA, 511 bp, Cannabis sativa
ttttgctaagaaagaaagaagtatcatcttatagtcctgtactggaccttgttaccgtaattgcaagtccattagccgaaaaggaaaacatggcaaaaaatatacaagtccaactttttacacaatgaactacaaacctgcattactctcagcttttcaacatcctcaaaatgcaaataaaagggaaaaggaaaattaaacagggcataccaccaaataagctctacacataaaatggtcttaaggttagataaacatacaggtaatacagcactgcctatccgagctcatcactttgaaatttatctaaacatctgttgagccaatagaaaatgattatagccggagacatgatggtcttcaggctttcctgctgctgacgatgccagtctgatttcagacaatactagaatcaacaataatcaagtccacaaacatagaacagaacccaaatattgaaattgtgtttcaatcattgtcgacacaccttcagatactgaattagtctata

SEQ ID NO: 95232 - DNA, 526 bp, Cannabis sativa
aaataattatatcttttaaaactaaccccccgcagacaagcctctcttttatttacaagttttgtaataatttaataatctgtctacctcaatatatattatgatatctaagacgagagcacaattgcaaacccaacagtatagcaatagtttaggcaacaggtggagctaaaagacccaccaccgagatcgctgcagacactactcaatatcctgtaaagtcccaaaataatctctcaaaaacccatattacaacactcagaaggtcgcaacccaacattaatattaagggatgtttatataatctgcaatctatggttccaaaccccaaccaatttggatcaaaccatctgagattggaccaaatgaaggccagtgtgaatgatttaatcaatccggatcgttttaaagtctcttcggtcacaattttagaaatctcgatagcgggttcaaaccaaaccaattcgtataattattatatatattttatatatgatttttggataaaatattgatatttgagaat

SEQ ID NO: 95233 - DNA, 554 bp, Cannabis sativa
  modified_base (484)..(500): a, c, t, g, unknown or other
cgatgatgaagaccctgaactgtctgagttcgatgatagatggtgcttggtgggacgttttcttatgaaacgtaacatcgattttcaagcaatgcaaaacaaaatggcttctctctggcaaccaggtagaggcgtttatgttaaagaactcagccataatcattatattttccagttctaccatgaggtagacatcgaacgtgtgattgaaggaagcccatggacgttcgatcgtgcgccactaatctttgtgagggttaaacatggtgaaaatccacggttattagcattggaaaagcttgatctttgggtccaaatacatgatatgacatctaagttcatgtttgaaaaagttattaaggatgtggggaactatattggttcattcgttaagtcggattccaataatttccaaggtgtttggcagaattatttcagaattcgtgtttcagtgcgggtcgattttgttgggttttatgccctnnnnnnnnnnnnnnnnnatataatcagatttacttattaagatcggaagagcgtcgtgtagggaaagagtg

SEQ ID NO: 95234 - DNA, 591 bp, Cannabis sativa
tttacagcttgacttttaattcatgttcataattcatatcttgaaatcaatcaatctaaagatagacaacttggtaatttgaatcattaaaatctacaagttgcactttcagttaccattaaaataaccttcagggtctagaccatcaccaaactcatcacaaaagggcatttgtactacaatgtcaattctcaacatcatagtgttaaatttaggtaacacatcagctactaacaactccaaattttttgttagaacataagtcccaacctcactacgagtatccttaacaatacttggtaaaagactaagatcgatatagacattcttcttcaccaaagtcacaaaaaagggaacaaattcaacgagcttcttcaaaagtatagataaatataaacttaaatacttatcattacttataactttaggttgatacattaactcttcgtgtaattgtaagtcacttctaatatcaagtcatactgtactttgtcaaacctcgagttctttgtacaaaaactcaaccaaatgtgagtaggttctgtttgtatcaatcttgaatgtcaacttttttctgttgggttttatgcc

SEQ ID NO: 95235 - DNA, 668 bp, Cannabis sativa
tggtgagatactaacgatggtctttgcgcgaaggacaataagcggagcattccgcccctgattcgtaggccaccgagaagagaaggaagacagaagcggggctgtggtcatctcgggatgctacgttagggctggtggccggtgaagacccaagtgagctgagcaggacggatacgcgaagaaggagagcgagagagtgagaacaagagagacaaaaacagtgagaacaaacaaaaagttataacctagagattgattttctgggtttggttttttgagtttgccgtgagaaagatttgattagtgtttcgggtagaagaagagcaagaaaaccctagaaaagttgtgaccgtaaataaaggaagaagaagagaaagggaatgccgcagttctgagagagagaaagagaaaatttgaaaagttttgaattttttcaaattttgaaaatagatggctgccgtaggtgttgtagtgatactcacctcttcttgggctgaattgttattggaccaaactttgttgaagagaggaaggcagaacagaacccaaggggagagagaaaggggatttcattttttacaaactctaatcttttaaattaagttttttttttaacaatagtacttttaaatattaattttttgaagtattttaaatatttaattttt

SEQ ID NO: 95236 - DNA, 647 bp, Cannabis sativa
cacgagcaacatctttagatgtaactagagtggctataagaacataaattgtatgcaaaatttaagaagtgtgagttttgactatctcaggtgtcctttcttgggcatattattagtaaagatggaatcaaggtggatctagggaagattgaatccgtcagggattggccgagaccaaagacagttatagaagttagaagctttctcagtctaggtggtgaataccgtcggttggtagaaagattttctaagatctcaatgcccttaaccgaactcaccaaagaggataagtggtctttatggtcaggcaagtgtgaagcaagttttaaggagctgaaacagagattgattgaatctccagtaatagccctaccatctgatcaggaaaagttcgtagttcactacaatgcatccagacagggtctggggtgtgcactgatgcaggtcgatcgggtcatcgcttatgccttttttaagttaagggagtatgaacaatgatacccaactcataatttagaacttgccacggtagtttttgctttaaatatttttggcattatctctacggagagaaatgtgagatgtatactgaccataagagccacaaatacttctttacctagaaaaattgaatatgagacagaggc

SEQ ID NO: 95237 - DNA, 575 bp, Cannabis sativa
atatatacttttaaaaatagaatacttaatataataggtaacctatatgttttgagcaatgattgttaccgttaattttttattacaattttttatttattttttttatggtgctgttcgttataattacaatattatccttgtaaatttttaaatagtttacagtgccgaaaataagtttgaagtttttttaacacgcttggtaaattagaatatcaggaactctgttttcagtactgtaaatcatttggaattttttaaaaatattgtacatataacaaatactgctataaaaaaattgaaaaaaatatatcgatatgtgattttaggtgtggaggttaattaaaaggttgtaataggattttataattagcactttatgaggagcaccggccttaaagtgccaagcactacaagaaatgtcccattattggtgcaattcaatattgatcaagtctcatatattttgatgatttaataaatatttaataaataacgtaagaaactggtaattatttacaacgcgttacattaagatagtattaaataccttaaaatacctaattaattggcat

SEQ ID NO: 95238 - DNA, 684 bp, Cannabis sativa
tccttgctaataggcttaaacttgatttggacaaagttattcccccttctcagagtgcttttgtttctggcagaatcatttttgataacattctcctagctcctaaacttatctctaaggtccttgctaataggcttaaactacttttggacaaagttatttccccttctcagactgcttttgtttctggcagaatcatttttgataacattctcctagctcaagaagtggttcataaggcctttgatagagtgaaatggcattttttggaaagtctcatgtttcatttcaattttcctttacattttgtttctcttattatgaaatgtatttccatgactagcatatccttttcgattaatggagctattacaggggaaattaagcctattagaggtcttaggcagggggatcctctttccctttaccttttcattctttgtgcagaaggagggttgtcttcccttcttagggctaagcaggagagtaatatcttgaaaggtatttccatttctcgcagagctccttcgttaacccatctgtttttttgatgatgatagtctcatcttttgcaccgcggataagaattcttgtgctgctcttaatgatgctttgtctacttactctcgtgcgtctcgtcaagttattaatttcaataagtcctctgttaattcttttctcacc

SEQ ID NO: 95239 - DNA, 3980 bp, Cannabis sativa
aaaaaattaacatctaatgtgttcaatgttcatctcaaaattagatctgtcaaacacatagttgtaatatcaattcttgtccgcttccgttttagtatcctgactagttcaatgttcaatgttccatcttttaactgtgactgaatataatgactagcgttattgtgtcgatttttgactgtactgatgaatcggtcttttctatactcctgaagtccatacacgttgacctggtcatctcttattcatattatgcaaaactttggatattcacagacaacataataaaattgttgtccgttgatttttaacgtcaccggacatctctgttctttcttcttcccctgccaacaatggcgcttttctgctcctcacctctgctcttctttaccatgttcatgttatcattcatctttttgatgtgttattctactgataccatgaatttgatgaacggtcccattaaagacagccaaaatgagtctctagtttcagctggaaatagattcgaactggggttctttaccccagaaggaagctctcctaacaagaggtatttgggcatttggtattacaaggtatcaccaaagattgtagtatgggttgccaaccgggacaaaccactgttaaacaccaatggagtttttgtcgtttccaatgatggacaacttaaggtaacagatgaggaaagcggggatatgcattggagagccaacgttagtagtcgtttacagccttctgtcacgagggaagtgactctcatggattctggaaacctagttttgagtgatgtactttatagtagaggtgttgtgttaagcagaacacatgtatgggaaagctttcttaatcctactgatacatttcttcctggtatgatgatgactttgaagatgaagttgacttcatggacaagtcaagatgaccctaaacagggggaatttgctttcctgcagcttgatactaagagagaagagtacccgtacatgatacagagaggggtttcgaaagccacattttggaaaagttcaagtcagcctaattcagaatatccagacagttttggtggtatttcacccattgcccactattttctaacaaatttcactagagtatcaagtactaatacttcgaattcgtaccgtatgatgaaaggttggaagggagaggttatatcaccttatgtgtctaattacagtaacagtagactggtgatgagctttaatggacagatacagttctacatgtgccttcatagcgtagttaattgctctatccaattatcaccaagtgacccatgccatgtttatgaagtttgtggcgaatttggtgtctgcaatagtaagaatgccgtcttgtgcaggtgtttacctgggtttcaacccaaaaaccaaagtgcttgggactctggaaactttaaggatgggtgcgtaagtagatcagttatgccctgcaacaaaaattattttggaaacgatttcttacatttgaaaaacatcaaagtgggaaagcctggtaagactttaacagatgcagaagatgatgaaaaatgtaaggaacattgttctgacaattgtaactgtactgcttatttattcacaactgagggcagaagaccctcgtgctggatatggaccgatggactagaaaatattcaagaggataatgataatgatgctgaatcttacatcaatgttcgtgtggaattatctaaaacaggtatgtataaactcccctttattctccttttctcacgctgagtgaatcaatatatatttatatggacttcatattcatgtattaatcatcaaaatgttcattttggttatttcattgcagaaacatttaaaaaaagctgtaaagcttgtggtgcaaatataattccctatccattgagcacaagttctgattgtggggatcctttgtactccgatttcacatgtgacacaaattctggggaggttttctttcaggctctccatcacaagtaccgagtaacaaacatcgatccagtgcacagaaaattcactgttcagttgactgaagaattgggttgtacagcttccgtgcaaatgctcaatcagtccttaggctataccgtaagcaggggatgcagtagtttgcagagttctatcgttcctaatatgtttcccttctttagtagagcacaaataatagaactagaaattcagtggaataaaccactaagactaccttgtaagacaacttcggactgcgatgagattgtaaactcagattgcaatgatgcaaaagaagatggatcaagaaggtgcacttgccttaaacattttacgtgggattctgagagcttaacgtgcatatatgagggtactatcttaatacaaaactatcttgtatagaattatatattttccttatatgttagtaaagtaatcaagctgaaaaaatgataccagaagaaaagaatatttctatattattaaaaaaaaaaaacatggctgcttctccttaggctaacctctatctatatactgttaaatattcattaaaggaaccgacgtttctaggcaattgtttgagggatcttcatccaaactcaagtattatgtagtgttcttggggtttgtaacaattgctttgatcatctcctccactacttgttttgtatatttcctgagacgaaaaaatgtagccaacacaacaggtgagtactaagtatggaagtcaatataaacaaattgaatttctttcctccaaatgataatgagtaacttgttttatttaatcatcttaacaaacaggaactggcggaagaatcgaagtaaatcaagcccttcacttatatgacagtgagaggagtattgtagactttatgcagacaggtcaatttaaagaagaagagaagaaaaacattgaagcaccatttgttgttttggaaagcatactggttgctacaagttacttttcagaagataacaagcttggacaaggagggtttggcccagtttataaggtaggtaaaatgattgactcattcttagcatagtaaccacaaggctaaaatatgacctgtaattgttggttggtttgaactttccctcagggaaaatttccaggaggacaagaaattgccataaagaggctttcaagtggatcaggacaaggcttgttggagtttaaaaatgaggttatgttgattgctaaacttcagcatcggaatcttgttagactgttaggctattgtattgaaggagatgaaaaaatattactctatgaatacatgccaaacaaaagcttagacctcctcctatttggtacgaatttttattttgaactaaaagaaagatatatttttcttataatcattgtccaatgttatataatactatagtttctaaacatatttttaacatttgaagatcgaacattgtgtgtgctgctgaaatgggagatgcgctttaacatcatactaggaattgcaagagggcttatttatcttcaccaagattcaagattaaggattatccatagagatttgaaaacaagtaacgttctactagatgaagagatgaacccaaaaatttccgactttggcttggcaaggatttttggaggcaaacaaactgaggcaaccacggcaagagtagttggaacatagtgagtattgttgtagctaagacctacaccttaatatttgtttctttgtttttttttttcatattaaataatttaagttcaactaattatgttgatcaatatactaatgaataagaaccaattggtgttgtccagtggttatatggctccagaatatgcattagatgggtttttctcaatcaagtcggacgtgttcagttttggagttgtcatccttgagattattagtgggaaaaagaacacagggttttatcagtcaaatcaagtgttgagccttctaggttatgtaagtgttattaaaaacatcagtataccttatttttactctgatcgggactgag

SEQ ID NO: 95240 - DNA, 531 bp, Cannabis sativa
ccgatcagtgctggacgacccaacaatatgttgtaagctgagggcaggtcgacgactaagaagtcttgcataatagtagcagatagaggtgcgtcgcctaaagttattgcgagctcgattatgccaaggctagcgatgctgtccctggtgaacccaaaaagttcaccatacaaggctttagcttggctttttcgagccatatttttttaaagtttccttttaaaggatatttaccgagctcccattgtctattaatactctcttgatcattttattgacgagttgaatggttatcaccaatggatcgacgtgaggatatctcacatttttctcatcttcatccgtgaatgtaatgggaggttccccggttttcaccttcatggaaagttctggggcaaagaccgactgctcgttctttatctccttcacatatcttttctgggaactattgctttcccctgcgatatgtggccctcccgaaataaccaggatgtcctctccttccataggaataggttgtaacccctggtt

SEQ ID NO: 95241 - DNA, 792 bp, Cannabis sativa
  modified_base (257)..(262): a, c, t, g, unknown or other
gaccaacgtcaggttgggttctcctgaaacgagtggtccgagtgctgggaccaccctcaggttgagtcctcctggagcacgtggtccgtttagactgtggtttggaaggccttctggagcccatgggctctcttccaggacggtgatgattttttttcatgtggtgtattaatgttttctgggttttcagccatgaaggagacgagttttttttatttaaggagatttttttctgagctttttcacgaaggctctcnnnnnnagcaccaaactgttaacgcagatttttgttaaccaaaatttaagcctaaatgataaacttgcactgaataataaaaacagtaaaggaaaaagtgtgaacacaaaggagtttttacgtggttttgtaattaaaattctacatagtccacaagtcaatcttatcagatttctaatggtttttcaggacctttttttcttatcaatttttcgtccccctttcagtataacatgcctctatttataattacatagtcagacagttaattacagagttgactatgatctttacaacatttttcccctaaaattgtggggtttaattacatatcacgtagtataaatgcagttattatttgaatatcacacaactgtgattaattcgcttttactgggtcaaaatgatcgtgtattaaacacattttaagtcataacgctctgggatgcctcgacaggaactcagtaccaatgaccttgataacgagctggagcttttcccctatctttccgaggttgatgatgtacgcctcgttg

SEQ ID NO: 95242 - DNA, 638 bp, Cannabis sativa
tctagaaaacagaaggtagttgctaaatctagcactgaatcaaagtactagtccctctcaacagtattatggtttgacaatcaaaatgctcaatcctaggcatcaacttatgctgacatcttcaccaagccacacactttgccaaagtttaattttctatgtaacaagcttaccaatcttgaggggggatattgactattagaatacttagagctgttaagtattgttagagaggtcaaagttatgttagcttagttagctacaaagtagttgctaccaatcttgattaatcatattaagtggttaatcttgttagctcccttttctcttcttgtgtttttcttagacattacaatttaatacaacaaatctttctcattgctaactttatcaagtattccaaatgcaaaaatatacaatagatgggatgatcttacaaattttcaccaaaggaaaaagtcataagttgtgtacagtcgttttcatctctaagacaaacttcatttatcttctctagaaagtcatgtgtacaattagccagtttggtgctattatctaagcccaactaaatcttgtgtataaagaaaaagaaacaataaattaatagaaaaggataaagaaaaagccttgctagacga

SEQ ID NO: 95243 - DNA, 546 bp, Cannabis sativa
aaaagtgagttttaaaaaactagaaaatattaaaatattattttcaatttttaaaaataatttttttagtctaacatattatattttatatttttgctcgcatattggattctagacccgaaatcatacccgaatccgaatccgaatgggatcatatcatggtatgatgttaaaatattaatttttttagtaagaaaaaattttaaaaatagttttaaaaatttatgctaaacaccattaaatttttaaaatgacaaaaaattattttctattctcacttttaaaaatataattataaaaactgaaaattaaaaatacaatcaaacaggctctaactaggttctatgaatttttatttctgctaagttttatcgtaagtgctaacaaaatattgatacgattgtatgtgtctttattacattaacgctatatattcaaaatttcaaaattttgtttttagtttattattaactagggaactaagccgcgcttcgcgcggtgttgtccaatttttataatttatatatatatcatatttatattaaa

SEQ ID NO: 95244 - DNA, 840 bp, Cannabis sativa
  modified_base (60)..(60): a, c, t, g, unknown or other
  modified_base (456)..(469): a, c, t, g, unknown or other
ttctgaggcactgagtgccaaatagatttttgtgtacaaatatttatgcaggttatgatntttgggtttattcaaaatacaatcgttatgctcccgaattttctagaaaataaaaaaaatatgttcttttgttattcttactatttgcttgctttggttatactgatgagatccatattgatcattatttatgcatattgttgtttcacgacctagtctctgtgtcatcatatgtagatcaggtgtgcactcacctgtaggtgaaagacctagaatctatatagggagtgaattaaatctgagccttggtattatggtggatatcaggtgcgactacctagttttggatgccgttttctatggttggtattgagagctaggggtctagtggacggtgtgatatgcatttgacgtttgattttgtgattatttgtggtctctttactttgtttatannnnnnnnnnnnnntgatgagatattttatttttacaaagttaaccatacaagaattttactaaactaagggtcgtttgatattagttgttttcctactgggctttataagctcaacccctattttctcccattccaggaactcagtttgatgctagtggatgaggatggtaccgctgaggaagaaagtcgttattactttagtcttattctactctttaatcttccaatgaaactgattttgtatttaagttgaaatggatggtctgaatgacttatattaactaagtgtcagttagaaatgaagaatgatggatgctgttaagcaaaatttttacatttagaatattaaaataaatgcaaaacacaattttacctatgctaaa

SEQ ID NO: 95245 - DNA, 689 bp, Cannabis sativa
gatctagtggagttggaattaactatgtttgatattataattgggatggaattcttgttcaagtatttgaccagcatgattgcaaacagaagatggtaacttttcagccagagggtgaggtaccattttttatgtggggttcgttcaaggttctcaaattctgatcttttgagttttaaggtctaaggatttactatacagtggattgtaggatttttagcagttgtgattgactctagtagaccccaaacaatttggcctgagtatgtcagagttgtaaaagaattcctggatttatttcttaaggagttactaggattacggccacaacgacaaatagatttcatcattgacttggcacctggagtagagcctgtttcaaaggcaccttatcggatggctctgacagaactcaagtagcttttaattgaacactttagggcatgctggatctagggcttacctaacctagtgtgttgccttggggagctccagttttgtttgtgaaaaagaaggatgggtccctttggctgtatattgattattgggaattaaataagctgacaatcgagaataagtaaccattgcctaggaatgatgacgtatttgatcaacattagggtaagcctattttctccaagattgatttgcattcaggttatcattagttgagaatttgggaggaagac

SEQ ID NO: 95246 - DNA, 740 bp, Cannabis sativa
gaatgcagaggcggagattccagcagcgccggtgaattcagaggcgggtgatgacgattatcaatccgatcattttgctaatgatcctatctacgataatataccaggatatgaagaagaagagagttttgaatttattacacctaggaatcttgacaacgaaaatgataaccaaaacaggatcattttaattatcattttcgttgtcaagattcctaggagtaataaattcaaaactatcttcttcttcatatcttggtatattatcgtagataggatcattagcaaaatgatctgattgataatcgtcatcacccgcctctgaattcaccggcgccgctggaatctccgcctctgcattctcggaaagctgcttctttttactcttaaaaaggcttttgaacatcttttttacgactcctttaatttctttaagcgctcctaattttttattttgttcttttggtctttgtacatcattaaactcaaagtgatgatgaagatgatttagtgatatcgatgtatatctcatgctttgaattctctgtacatcagaaaaaaaagatctcctcatacttagagttctccgtacatcagaaaaagaaaatcttctcatatttgctgatatgtatacacaatttataaaaaaatataaattaatatactaacaattatactctattataaaaaataaattagatctattttaaaagttgtcattaaacatatcaatattggta

SEQ ID NO: 95247 - DNA, 734 bp, Cannabis sativa
cgttaagtgatttctatgctaacattccccctcaaacgaaatggggtaattcccattggcagtttggacctcaaataaagaaatcgttcagtagttaaagcttttgtcaatgcatcaacaacttgatctctagctgggacatatctaaccgagagttccttggtcagaatttgatcttgaacaaagtgaagatcgatctcgatgtgcttagatcgagcatgaaatacagggttggctgcaagagccgtggcactttgattgtcaacccaaattataggacagtgaggcatagaaacatacaattcagacagaagagatttgagccactgaatctctgctgcagcatttgcgagagccgtgaactcgctttctgtacttgaccttgcaacaacattttgcttttttgctgaccaactcaccaaattgtcccctagaaagactaagtagcctcctgtcgaacgcctatcatcgatgcagcttgcccaatcggcatctgagtaggctgtgagagaaagaaaggaacttggtttgatgtcaagcccatgagagagagtccctttaagatatctaagcacccttttgcatgcttcccagtgtgtagatgtaggagcatgtaaaaattgactaagtttatttattatgtagtcgacatcaggctgtgtgagggacaagtactgaagtgcaccaattgtgctacgataaagagttatgtcctcgagcggttctccatcatt

SEQ ID NO: 95248 - DNA, 547 bp, Cannabis sativa
  modified_base (270)..(270): a, c, t, g, unknown or other
gagattattattttagttgatttacattaataaaattttactattaatttttattacaagtgataatgtggagtacattgataataaagattatcatgtaaatctgtgggtcggtagtttcatgttttgaattggtatggtgttaaagacatttatagtctaaagaaatatctcccttgtatttggctcattcccttgctaagttttcgaaaacttggtgggcatattaatcctctttcatttcgcctttctctttctctttctctttcnctttctctttctctttctcttcgttaatgaaaattcttttatttcaaaaaaataaaaataaaatgaacacatgcatgcatataatctaagattggagcattcctattaggtacactaacaacttacatggagagtggtatatagcaatttcttgtactatttaattaatcaaaatatgcgagacgtaatattaaattgcatcaataatattatattatctattgtgatgcttgacaccttaagatatcctctgatattaaaataattaggtatttaa

SEQ ID NO: 95249 - DNA, 507 bp, Cannabis sativa
tattcttaatttttctatgtctagcaaaaaattcttgaaaccgagcattatcatcttctaccatctcaatttttggacttggaacttcggctcactcttcaattgatgcatttagatcacgttcatcttctgttatcatattatgcaagcataataatacatgaagtcattatatcatgtaaaactattttattccaaatacatgtcagtccagtaataattgcaaatctagactacaatactccaaatgtacattcaacatcttttctacatgcttcttgtttaattgcaaataattttttttggaccatgtagatcatggatagtttgaacaacagtagaccattttggatctataccatcaactaaataataacacatgttgtactcttttcctttaataacataattagtgggtggatcaataccttgagcaagattagcgaaaagatagaatacctccagcacattaatgtcattataagatcttggtaagccaaaatatgc

SEQ ID NO: 95250 - DNA, 542 bp, Cannabis sativa
tataacaacaataataatgaataatacttaacactatatcataataaaattatttttgaataaatataatatttatacatgtattacaatttaaaataaaattattaattctacataagtaaatttataaactatatatatattttattaaaatataattattcttatataaatttacattttcttaatacaataatatataattaattacaatttagatattattttttggtctaaattaaaacttagttttgtttgtaataaactagtttgtcatttgagcatgcaaattaataacgaataattctttgtgttctaatgtgcgctgttatgatttacagttgcttatcatgattatcatagtaactaatgttgctggatggtttattatcttattgtaaaattattttaaaagtaataaattttcaaaaatttaattacatatacatttaattttttattgctttaaaaaaaaatttgcagtgtaatttcttaggtgcgggcatgatttctaacttgtatgattttctatgtatttacat

SEQ ID NO: 95251 - DNA, 722 bp, Cannabis sativa
gcgataaatcttgcgtttgaagagaagaggcgcatgttcgccgaatggagggacaaggagatggaaacgttcagggctcagcaagtagtcattgacgaccctagttagtagaccactctattgatacaaaaagcctattagactactggacaacagcctgtaaccgtcatctccttgggcaagaccgacgaagatccaacgatgaatgcctctcagactataaatggtcagtcgtccaatcccgtagcaggttccacctgtgggccaagtggtaggtgggcagaccttgtctaataattcatccggagaagtcatacccaataattccaaccaagttaatggtgccagtcagcaaattggccaaaccaatcagtcactgaggcagccatgtgttctatatttgatagattggggacaactcaagatcttagaaaccatctgaataggaggagagaattggactaccaacttgacatgccaattgtgcagcccgaaacccgcgctcaaaatccagttcaaagagatgctgatgtgacttaggtcggccaagaggccaaacaggttagtccacccatgcaggcacagttggacgaactaaaatatatgttctaaggcctagccggtcagaggaaaaatgatcttgagttggaccgagcacgtggaacccctttctcccccgagattaatatcctagaatcgccccacaagtttaagatgccaac

SEQ ID NO: 95252 - DNA, 683 bp, Cannabis sativa
aaataacactaccgtaagccaattatatatgattatatataaaatcattgatgatcatataatatgattaccaacatgcctactgcttatatatttcatatatatctaaaacgtaataagggtgacgcctatatattatatagcgtgtctctgtatacgaacgtctcactgaagctacgaaactgatatgaccaaaaaaaaatgtatacatacaacccaataataaattcgaatatatatatatatatattactacgccgaaattaaccatatgaacaaaattccaacagtatatatatatatatatatatctataagaatccaagccattacgtatataattgaaaaaaaaaatatgacggtaatgatcgaacaatcatacaacaatatactcaatgtatacatacgcaattaatttttaaaaatccccaaatttcataaataaaatcattaaatcttcaattaattcaataaaggtggctctgataccacatgttaggatttataaaacactcaagaaatatttatatcacaaatctaaacatattcctaaaagtgctttagtatagaaaaccctaaattacaaatctataaaacctttgctaaattaaagaagaataagatgataaaagatgaacagaagcactaacctgaagccattgatggggaaggagagaatacag

SEQ ID NO: 95253 - DNA, 1220 bp, Cannabis sativa
gcacagtctattttgataccatgtgtgaccctattcatttagttaaattgtaattttttttttatagtttttacatttatatttttattgttatataattttttttcatttcacacattattattgtagatgtccaaaattatattaacagcagagctttcatgtataccttgtgccattactactaatacagttgcaaaatctaaagttaccatcgaatccccgctgagtgtaataggacaacaaagtttgacaagactatttttaaacattattcccaattggatcgtctcttggacctcgacactaaagggcttttcctaggcaccttagtcaaccagatagttttgaggagggtagattgtcaaaagaaggatgagttatggtttttgattaatggaaaacctgtgaggttttctctctaagaatttgtaatagtaactggattgtactctaatggtggcccaacaactgaagaaaaggagcttgtttcttctaagaacaagttaaagaaaaagtacttcaagaactcgatgtctattaaaataaaggatattagcagtgctctagataacatatttagagaagcaaagactagggacagagtgaaattgtgttttatctatttgctcagtgcatttctaataatggcaagtccttcttcgataataaatcttgaatggctacaagtagtggataatctaccaataattgacaattattcttgggagaagctggcatatgagaaaataatagagcaaatcacaaaaaaaaaaagatatgaagaataatcactctaagaaggatattatgtggaacctcttagttgtccttggatatttctaataaaaaatttgattatgattatattttattcagtttatttatttttggatattttttattatattttgagacataattttgatatgagattttctgttaaagatatggatttgtgaagcaatggccaaagctgagtgacatggtagggaaaagagtcccaggaaatcatattccttgattgcttggttggaaaattaatgataaacataaaaatgtcacatttacaagattatgagaagaaaaaaaaaagaaaataatattgaggtatttatcgacatgcaaaattatttattgtcatgtattaaaaaaaatatgatcaaggtaacttatgttagtttcttttctttgtgtattagttttttgtgcgacctaca

SEQ ID NO: 95254 - DNA, 1004 bp, Cannabis sativa
ataaatatacatttctagattttagcttttaaccatagtttttttataaattttttaataaattattttttaactggtaataaccaaataacttttaatttttttagaaagtgtatcaaacatacccttaatcttgtattattttaattttaatatgttgattttgaacatatatagtagtctaaatagtaaaatataactaaactgatcaaaagtgtcataaatattttgaacaaaaaaaactaataagaatttattatattgatggagatggagtaaacgtacgttgttagaaaagccaaatattctcatgtacagtcgaagttggtatataaaataacttaaaattaatgaaaaacactggaaaattatatattattgtgtttatgtgataagagagaacaagtctcccactccataaaacaaggctttgcccatgtgctcctactcaactcaagccacgtcatcaatctctgttttggccttttcctgatgatcattagattgaaaaaattatgattagatatatatacatatttaattaatttgttgatgttcttaattaagcacgagcttaattaactattatctagcttaactttcatcttattaatttgtaatataatttataatttattatatgcataatgataataactttcaataaaagtaattaattagttaggtcccgttataatatataaattaacttttattttgaaaaaaattaataatttgacttttcaaaaactgattataaagttagaattagttgatatattatccagtaaaagcaatcaattacttcttaatcaacccatgcacacaaatatatataatattcttctattatatctatttcccttaagacttaagttaaaatattaatatagctttttatcaagtatttggactaattaatgagatatttcaccggtttaattaaaggtgcgtttggtaatacttttttaattagttttttgtttttaaaagtagaaaagtga

SEQ ID NO: 95255 - DNA, 559 bp, Cannabis sativa
tttttttttttttaatttttattaaaaaaagttattctttacttaaaaagtctttaattttgttctaaaaaatgtatttaatttattgtgatatgcgactaagtggaaaatttattaaagttgtcaattattgaagtatttttttttttaaaaaaaaatgtgacaaatcttatgtggatgagatagaaaataatttttattttttaagatgatctgtgtattttagcaactataaatattatcttctaagagatgcgcttaatgtacccaacactacatcgatgtgtcattttatagttatttaacaatttctcatattaattaataaattaaaatgtgtgatatttaatattaaaatataataaagacagtattatcttatcttatagtgcttaagacaccttaaattacttctttccctaatattagagtaaatatatcacaaactttaatttgtgcttaatattgtagggatatgattttgtcccgttattgtactttcacggattgtaatccgtgatgtacgacagctgtcagatgagggagttatttgatttga

SEQ ID NO: 95256 - DNA, 605 bp, Cannabis sativa
attttgtttcttgtttttttttttggatatttaagatttttaaaaatgtctgattatagtcattatgctactaaaattttggtagaattaggataaatttcactaaaaatgcataaatattcaaaataaagttttaaattttagtaaaattcatatatttgtggtaattaatttatacataacgtaaataagccttgaggtataagccttaaaaactatattgaaataatactttagaatcctaaagatgaataaaatgtcacataataaatttcaaacataccataaaatatctcataacgatgattacaaaattatctaagacattatcgcttgtcgaattgtattgtaaattcctctcatcatcaccatcctcattgccaccaacattatcctcccattcatcttcatcttattttactatgctcgtttgctttcttaagaaaaaaaaatacaaactaatcaatatttggaatgggtaatataatgacatgattagttatacttatataactagtaactaattattagttactaattatgagaaactagctagtttattgattacagcttatataactagtaattaaatataattagttact

SEQ ID NO: 95257 - DNA, 507 bp, Cannabis sativa
gtatacccctacctcctccaccttcacggtacaagtcatgcattttatcatagatacaataacattctcaaaggtatatggaaacattcacattatagcataactactgacaatggacgaaaggtcacctaacgaaggtggttgtcaccccctcaagttgggtcccggggggtcacccaacgatggttgttgttacccccctcaagttgggtcccgggaggtcacccaacgatggttgttgtcaccccctcaagttgggtcccgacggtcacccaacgatagttgttgtcaccctcctcaagttgggtcacacagggtcacccaacgatggtggttgtcacctcccctcaagttggatcgatcccggggggtcacccaacgatggtggtcgccacccccctcaatgagggtcccaggggtgttgcccccaagtatgagcttcatctccaaaggcggttgacgaccatgtcacacctctcatcgtcactagctccttcaaatgttcaa

SEQ ID NO: 95258 - DNA, 523 bp, Cannabis sativa
aaacatgtaaagcatgactttcaagatttttaaaaaggcaaagcatgcgatttcccaaatcgacaagcatcacaaaaggagtgtgtttcaaatgctttacattagtagtttttaagacttgatgtaaaacaacattggatggatgacctaggcatctatgctgggaaataaaaagttgatttgtagacttggactcaattgctacaccagaatataacttggttagaatttgacaaggttcttcacctacagtgcttgagaattgacactatccatctttaaaggttccttgcagcaccaccttccctattgctcaatccttcacacaacagaaatcagagaaaaactcaataaatacatcattgtcacaagtcaatttagatacactaatcaaattcttagttatcatggcacatgaagcatatatcttaagattaaacgcactatttccaacatatttaattaagagttttgtaccatcaccaattgtcatatgctccttaccaccatactccactttgtt

SEQ ID NO: 95259 - DNA, 509 bp, Cannabis sativa
ataatctcaaggttcaacaagattaattacttaaagcaaattgtgttctggaatgatgtctaacatctttcgaacctaaacgtaatgttagcagcgtagtattcactacgagtgctagtggtcaaagtagtcaaatcactaaagatagactccgatcatcaaaacgagatgcttatttgtgattgcatgaagcaataaggttgttttttcaatcttaaaaatattctggaatgatgtccgacatctttcgaacctagacataatgctagtagcgtagtactcactacaagtgctagtggtcaaatcactaacgatagactctgatcatcaaatgagatgcttatttgtgattgcatgaagcaataaggttgttttttcaatctcaaaaatgttcaagaatgatgcccgacatctttcgaacctagacgtaatgctagtggtgcagtactcactacgagtgctagtggttaaagtggtcaaatcactaacgatagactctgatcatcaaa

SEQ ID NO: 95260 - DNA, 931 bp, Cannabis sativa
ttaggggaacaaattctccaacaattacaacttgtagattttaagtatggaaagacgcaaaaaaataaaaaaaacaaatggttgttttcaaagaaagtcaatcttttttcgtcttctatattggaaaagtttacttgtttgacattgtttgggtgtcatgcatgttgaaaaaaaatgtgtgtgagagtattatcggtaccttacttgatatttccagcaaaactaaggacggtctaaatagtcgtttagatctcgttgaaatgtgtgtgagagtattatcgataccttaattgatttaccttacttgttttacagtgaccatatggagctgttccattcaatagttccaagaaatcataaaaataaacaaaaatgggttgcagaccagtatcgtcaaactttcattgggtggttaaggaataccattatagcaaagttgaacaaaccgaatcatggagtatctgatgtattgagtcgtattgccctttggactaacttttgtagtagctaagcatgaagcgtatattgtaaggggtaaatgtttccatacaaagtcaagagatgatactcgagaggtttaaaatagtggcatacgtattgtcgtagaaaccatgcattttgctagtgcaaaagatagaaaccatgttttagatactatgacatattatcgggttattgaagaaatatgggagctcaattattttgcgttccgaattccactttttaaatgttcttgggttgacaacaatgttggatcagtaaaaactgacgagcttggttttactttggttgatttaagtaagagaggatgtaagaatgatccattcatcgtggctagccaagcagttcaagttttttacatttctgattcgactaatgataaatggtctgttgttttatcgataccaaagaggaggttcttagagaatga

SEQ ID NO: 95261 - DNA, 592 bp, Cannabis sativa
agttcggtttgggcggtttaaaccgaccaaattgagattcaaaacggtcggttttaaaataagttctaaattggttggtcggttttatatttgcaccaatctagaccaaaaaccgaattctgaattttaaataaaaaaaaaaaatcgaccaaaccgaccgatgaattggtcggtcggttttcggattgcaccaatctagaccagaaactgaattctggattttaaataaaaaaaaaaagaccgaccaaaccgaccgatgctcagccctacatgagaatttgctttgttgaatgtaggattttatttttattttgcattttttgatttaatagtcatttcacaaacagatatgtccatttttttcttttttcttattattattttgaaagagaactatcatgtctatttgtggtaagcattatcacatacaaattttacttgtttctactttccctggccattcattctgcttgtccttacgtccacaaaagaagttgaaacataaatggtgatgcgtgttgaaagattaaaatgtgagatggcgcaattttatacatatagagtagcagattctgaaaaaaaaaaaaaaaaa

SEQ ID NO: 95262 - DNA, 620 bp, Cannabis sativa
aacatggcatatttaaatcaaagttgtacatggccaccatttttcaagatactgaacctaaatgtctcaaagaagccttggccaatcctaagtggaataaagccatgaatactgaaatccatgccttaaaaaaataagatttggacacttgttcctccttcctctgaaatgacaattgtccacaacaagtgggtttacaaaataaaattacatgctaatggctcagtggagatttttaaagctcatttggttgccaaaggttttcaacaggtacctggagtggatttctttgaaacatatagtcctattgccaagccttataccatcatacttatatttactatggctatcacttatggctggaaaattcaacaacttgacatcaacaatgctttcttaaatggagaattaaaagaggcagtatacatgtaccagccacaaggctttgttgatcctcaatttcccaatcatgtatgcaaattaaacaaggaaatatatggtctaaagcaggctcttagagcatggtttgataaacttaaacactctttactgcattggggattctctaatagcaaggctaattctagtttgtttttcagcaacaaaaatgacaagttact

SEQ ID NO: 95263 - DNA, 556 bp, Cannabis sativa
acaatttacttgcaaatcggcttatctgtcccaagctttggaaagagcttagcattgtgcggttgctccgacgctctagaacaagctatggaatagcaaaattctggagaggcataagatcctttggtggtgcattctctctaatgcgcttcctattagagctgttcttggaagaagactccacattgaggataccaattgccctttgtgcggtttaggggaggaatctatggaacatcttttcttgtcctgtgatgtggcaatgcatttttggcgttcctcaccctggggcatatatcctatatgtaatgtggggattcgagtttgggactgggtcaaattcatctggaatcttaataatagggggattcgagtggaggaagtttttttgtatgcctcgtttgttgttgaaactatctggaggattcgtaatgagcttatacatgacaacattcgcccgaatattttgaaatgtattgacttgatttgtacttcttatgcagagcttcatgatgttgtctgccttccccatccccttccttggaggggacttgga

SEQ ID NO: 95264 - DNA, 1034 bp, Cannabis sativa
atgatccaatagtcaaaattagtgtaaccatcgtagttgtatatttgacgtaaccattcaataatcacctatatatatttaataaaaattgatatattattaattaagcaaattggctaaaaaaatagttggatgaactttgacacctacaacttcacctatagtcggctgaacataaccaagcaacaattttgactcaacctcaacagggtcgaccctgaattgaaatgggccataggtaattttttttttttttggatccttactataaagacaaatggtcggccctgggcctcaactacattaccaccactatcacgtgctatccaaccaaccccaaagttagggttgggcatccgatctaatttaattttttttactcatctgatccaattaaattagttattatatttgaaaagtcataattcgatccaattcaattagacctaaaatccaatttagttcaattattaattggatttgatcggtttttttaattagatatgtaattacacacataagttttaatattaacttaaaatataaagaaaaatatgtaaaaataaaatattaccatttatttaagtataatacttcgtaaaaatatcattgttacaagtgtagtgtaacttaaaatttaaaataattaaaacaacaatattaccaagtaataaaatagaacaaaacatcatgaaaataaataaatagaacaactaaatgttacaatttttttttttttttttaaaaaaaagatcactaatacatgatataataattatatatatgtttacattgaaaaaatagttaattgataaatagaataattagttattataattgatggtgatgtacttattttattattttttatgtatattattttaaattattgttttgaaagtttataaagatagagacattttatgtacattcaatataaaagattcaattaaagttggcggatgcaatggaaaagattgacttaatttatgtaaatattatagtttatatatattgccatattttaatttgta

SEQ ID NO: 95265 - DNA, 674 bp, Cannabis sativa
taagctcaatttttaacaattttattttttttacataactaactttaagacaatttttaatacgaatagatacagaaaatataaccagttttgtcgtaacatcagtagattagattattattaagatttattttgataaaaaaaatcaattcaatgtcttatttgtacaattttagaaaatacagggtctattttattatttaataaaacagagagtaattaataacttttataaaacatagggttcaaaatggtatttactctaaaaaaatacacatttgcttatacaagtgtcttttatttattataaaaaaaccagacttataaatttttaaaattattaaaatttatgtataaatctacatttaattatatatataaatagagcaatcttttttgtccttattagaaagaaccttttgttttctttatatagagaaattttaattcaatttttttcatatgatgttgtaattatatcattcattttactaattttcaaaaaaattaaaataatttatgatgtgaaaagtatagtacaaaatcgttagttacactcgtataaaaaaatttaaaaactaacatgtatgcaactaattggtcaaacattatttttaacactgtaaaatttgatatattttcaaacagcagtgggatggaatgtatgctataat

SEQ ID NO: 95266 - DNA, 652 bp, Cannabis sativa
tattatgggaaaaatacaaaaagtgtcatatattaccaatttttataactttgcatttaggagacaaatttttaggttatttaagcatggaaattcaaatttcccaaattaaatgaccaacttcatccgagataaatgttaaaataataggaaacaaacaataaaaaaaaaaattgagatattaatagaagagcatgagtaaattgctaaatcggcaattaactataaatatgataaaagatagtagagaaagaaagaaagaataaaaataatcataaaatagaatagtaaaaaaaactattctgttccataggcgttatttgtcatctattaaggtatccactaatgtaactcttcaaaagagtttgccacatgaattatctatttcttttaacagttaatatggataatagtgagattataaatgaatatatgtgaggacataaattaaaaaaaattgacatgtgaaataacatcattaggtattgtattgtatattagtaatattttataaaatttgggtaatgagaaaatttaaacaattattctaaactaattttgattcctactcttattattctaaactaatttggctttaacactacgaaaatttaaggttggcaagtggaaatgctctctaaggagcctactt

SEQ ID NO: 95267 - DNA, 604 bp, Cannabis sativa
tgagatctcatcagattcatttttttgaaagcagagtcgtatagaaacggttgaggcatgggttttcttgcatttttctagggttttggagtctttaatctttttttttttttgagataaagaaggctgcaaaagaggaagaaacaacagcaacaagcagccaaagaggaagaagagggacttcctctagctcacttctctagacctgagagcttcacgagcacaattatgggcttccatattaaactgccgaggaaggaactgcaaagaagcaccagggaagtttgagaagagcaatcgaatgcgagagactaaaccagaaagagcagagttgtcctgccaatctccattcacttttgagactaagtttagacagtcagagaaaactacttgtggtgtaagctgagcgtcaatgcaccacttgagactttgcaaaagtgcttggctttctgagaaaataggcgagacaacaccaggcagccgacggtattgagaagccaacacaatctgatgtccacgtttaaagacaaaaccagcaccagttaggccattacgatgatcaatggctgcatctacaaagagagcaggtgtatcaggtgacaag

SEQ ID NO: 95268 - DNA, 738 bp, Cannabis sativa
tttttttaaattaaaaaaatcatattagccacatatctctctaacaaaccgtataaaataataccttttttttagaaacataaagctacagactaaaactctattaatttatttatttaatattttttatattacttatttaaagtaacttgttgaattgtacttagtatttaaaaataaatagtattaaaaatagtaaataatagaagatacgaactttgcgaagtaaaaaacaaacgacaatgccaatttaacactgcgtcactcgtcgttccaatcctcgaaactccgtacgttttcaatctctctaaatttaagattcctttccttttagccatggaattaatttctattttttttctttttttaaaaaaaaaaattgatgaaatttataagtgtacgagactgtattccgatgtggttctaagacaacgggagcaaacccatttagaatttttagaaattacacttctaatggtacgtagaatgttcttacgtgggtttgacttttaagcttggcgtttcttttttgattaaagattgaatttatatttttattttgtttagaattgagttttatatgtatgattgtgttgtgtttgtatatatgtttgtgtgtattaaactatgaatcttttcctttgtttgtttcttgagaaaaaagggagagtttcttggaattaggaattttcaagaggttggaccattagacagaagcttaaatctaaggaattcaac

SEQ ID NO: 95269 - DNA, 681 bp, Cannabis sativa
  modified_base (589)..(592): a, c, t, g, unknown or other
ttttgtgaaggtatttatttgtggtgataccgtttgaaaaattttgggacgctatattaacattggtaagctacttaaacttttttattgaggtgtttaatattattaatttcaattatgtttagacattagtggcgatcttgtttgaatacgttaattggtaactttattagaattggtagattattaaaattatgttattaatatacttagttaagtttatatattatcgataatatatatttgtgtatatttagtttatacatattgatatatatataagttgataatagttataaagattaaagttttatttacttttattttaatttgatgagtttatagaaggaagcttttaattatatattttaaaaattttataggtttcgggttctttatgtggattgaagattgcacaattgtagctatatatattgaagtaaggtataatcactaagatttaaaaaaaaaatagtggagtttgaatatgttagatattcatccttactgaagtaggttctgtgattaattgtactgtggtcggattggtagaatatacatgttagatgagtttgaatatcttaaatannnntccgtagtgaagtaggttctacaaatacatgtactgcagtcaaatgagtagtaaatttttatatggctaaatattgttgtgattatttt

SEQ ID NO: 95270 - DNA, 731 bp, Cannabis sativa
ttgaaaactttagtatttttgttatttttgtaattttgtaaaagaaaagttaacccgattaacccgaattccgaattccagtatttttgtaagtttcccttattttatttatatttttgtaaaaataatctctccaaattataatttttttttcctaatgtagtcatgaactattgtagatattgtcccacatggaatatatggtagagtattcagccatatataagaatatgggctactctactcattaccaattagttttgagatggaatcccataattctcaacatagtatcagagccatatcgaacattatcccacctacgctacacataaaaattcttgaattgtgccagagtagcttcaaattagagttttatcaaaaaattatctacaaaaatgagtggaatgtaactaaatggacaagtatcataatttgagatgagagaactaatgtttgttgttttttttctttctgaatttagtatgactaaaatttattagttggatctggcaaatgagttattttatcatctaaatcatacgattactcgtgaggttgttttgtcgatttatgagttagtatttgtcctttttaggaatgcagttttagttctttttttgatctaaatacaatttgtgttcttgagttagatttacactacatgcatattaaattagttttgttagcatttttgctgaaatgggagatattcattaagaaacaaacaa

SEQ ID NO: 95271 - DNA, 973 bp, Cannabis sativa
ctttttcctatacattctgcacatgttgatagatttttccgaaaaactataatataaacatagaattcaggttttcctagacaaatatatttgttatcaataaagtcaaaagacacttgatcggaacaagtccaacgatatttgttgaatgagtcgcaatcttcaaactcgcattttcctttaaacaaattttctcagccaccaaaaactttcagaaatcaaactgcgagatccagacgtcaaaaccaattcaaaaaagacataaaaaaaaagagggatcaaccaataaatttaccagagtgggctctgtattcctcagagtcagcgaaactgttggagcttttcgtctctggcggagtgaagcaagaaacgaagactcctgcaatagaacgtgctgcatcggctacggagttccggctccgaacactggaagtgtcagagtaggccgagctcaacgccggcgagtatggaatccggtcctgcatgctagtccgtgaactggagctagaattccgccgtccgtgcgaggagtcggagctagtcattctagagagagaaacggcgggtacctgtgagctatatcgaggaggtgagagagagagagagagagaaagaaagagtgtcttctatatggtggtgcgagaagaagacaacgactttgagtttcaacgcagcaaaaagtagaagacgctaacgtgcgcggatgaaatgaactgtgtgtcacgacacggtttactactaaaatgcgccattcaatccaaacaatattaatgggaactaatactatttgactattttgtttgatatttttgagaggaaaataaatattatttcataacaaaatcggtattaaatattaattaaatggctaattagcaatgagctttagcatgtactaaattatgcttcctgaatttttttggccgttaaaaattccccttgaactattaagattgttaaatttaaggacttt

SEQ ID NO: 95272 - DNA, 1001 bp, Cannabis sativa
aatttagttggtacagttcttttaggaaataacaaagcctgcaagattcttggaattggttctgttgacatgaaaatacatgatggcataactctatctatacaaaatgtaaggtatgttcctgatctcaaaagaaatttattgtctatatgtatgtttgataatcatggttacactgttagaatagacaatggcacccttaacatctcaaaaggctcactggtggtagttagaggtagactcaagaatggactatactacatggttagcactgcaattacagggacatcatcacttgcaatcaataaagtcaaaaataatagcattcatttgtggcatttgagacttggtcatgctattgagataggtctcactgagcttgacaagcaagggttgtttcaaggtggattgagtggcaaacttggtttttgtgaagagtgtgtttatggtaaaagttgcagggttaagtttgctattggacagcacattactaaagagaaattggcctatctctggggtccatccagaatcaagacacttgggggtgcaagctatttcattagcatcatagatgacttttctaggaaggtgtgggtgtttctcttgaaaagcaaggatgaagctttcaatacctttgtcacttggaaaggttgattgaaaaccaaaccagatgcaaaattagaaaattgagaactgacaatggttgggaatattgctcaaagaaaattgatgaaatttgtaaggaacgtgggacagctatacatctaactgttagggatacttttcaataaaattgccttactgaaaggatgaatagaactcttattgaaagagtaaggtgtatgctaaagggtgttggtttggatagacctttttggggagaagctgttaagacaacctgctacgtacttagtgaacatttgtccatctgtcccattgaagtttaaaactccacaagaagtatggacaggtcatccacctaagctagagcacctaagggt

SEQ ID NO: 95273 - DNA, 1003 bp, Cannabis sativa
agacggtaatataataatctcacttgaagaaatatgtgagcatttagctcattcgcggccatcatgtcagcctcaattccaccagctcgttgtccaggatatacctttaccattcaaaatgctgtatcagttttttaaatatgtatttagtctagagaatctaaatagaactacataaaaagattccagagtgaaacggattttaataaaatactaccttaaatataactgggattcctctatagggaccttgagagactctcccttcgtaaagcctgcaaaagaactgccatgagtactatcaggaccaacaacagaagatagcagaccaaatagtttacattcaaatttagagccatgaaaatgtcattttcccattttcaaattttcaattaatgcataaattctagaaaagctcacctgatctttacactgccttctcccacatcttgaaccctcaattgccccatacctccagatgagtattcagtatccacaccagatggaaaccctgagtagctgttgcctcaaaaaaaaagagatatattgacaaattcccacatgaagaaaaatgagagacggagaaagacaaatggagaaaaccccaaaattaatttcagtagaaactatagaaggagaagaaaaatacaccatttcaaacatgatctaaaacattatcaaacactttctaaatgacaatgtgatactatatcgcacagtacaaattcatgtattgcattaacgtaatttgatcaaacaagttaaaaattagtctaaagatcgtttttttttccttttaagttttaatttatatcaattcaagagaattctaaagtcgtagtctatcaaacggaacggtgcattttgcatttagtttcaattcaaatttcccatcaaacaaaaagattaagcatgaatttgaattcttaagtaaccaggcacaaaatacactaatatgtaaaaatccaaacattgtacatttgttttcgaatttaaatgagag

SEQ ID NO: 95274 - DNA, 670 bp, Cannabis sativa
gtaaaatttgtaaatatttaaattactaattatctaaattaattaccaataaattattttaaagttatattttatgatatcttaacattatttaagatacattaatcaatattctaaaaaaaattaaaaaacggcaactaatcagtatatgattggtattatgagtaacttaatggttttttttattctggaaatagcaaaaaataattgcccatacacaaactaacaagtaacaaagaagattctacaacagaaaataaaccataactcatacccatgagctctgtgctctgtgaaaataaaagtagagaagaataagaaaaagaaaaaaaaaactaaaaaaatgagaaaataaaaacacaatgactgatattaacccctataaatactctactcactcctactttaaataaaaaaattgattataaactattacttactcatacaaaactaaacaactaatttttttctaaaaaaagcttacagattgtggcacgtaattccttgtggacatgatgggctaatggacatgatgggttgatgtcagaaacataaaataaaaaccaattaaattaaaaaacggtattaaacggtacaattttagtattataatggacccaccgtatttttgaaaataaattataattgatgtacttggatgtaaattttc

SEQ ID NO: 95275 - DNA, 580 bp, Cannabis sativa
aatttatttatataaatattttttaacactaaaaaacaaaaccaataaatttatattttatatattataaaaaaattgaaagcactcattaaaaagaatttactaatacacttttatttattttcgcatttaaaaaaatttagtcaatttttttttttttataatagtctatattatagttatttaagatattttacgaaattttaaaaaattttaaaaaaatttaacacgccaaaaataaaatttaaactgtctatttcacaagcatataaaataaaagagttacgtataactaacggtttgaatcctattttttagtgtgttaattttttttttcgaatatctcaaaattttacaaaataactataacatatacaaacatacaaacaaaattaaactctcaaatttgatttttatttaatcttatgaagtaaatattatgttttttgtttgaaagtaaacgaaagtaatggaccaaacgtgttacaatttttttttttctatatatatttcaagtcaatttgatgttaaaataataccatatttatttttttgtaaaaaaaataacaataaaaacatt

SEQ ID NO: 95276 - DNA, 721 bp, Cannabis sativa
cttaatgttaataatttttggagagatatccgatatgctacccccaagagattaagagtctggagtcatggtcacttattacaagacttacatggaaaagtataatatggcagaaaaattccttttgtttttatttgaaaggttcctaccctaaagcataccttgaaataaatcataaaataaaatgcagataaaagaaaaggaagcgaccaaccccagtttacagatagtatcggcgcacgtggtccgagttccatgctcttggaatttgtgagccatcaaatatttttaggaggtatgtgtcatcacctattttatcttaaatttcatatggcccttcttagatttgtccaaggagtcccactcctggctcctgagaggctagaaatactcctcacatatccaaatcaccatgttcaaactttcgatttttcaccttggaattaaaatgcttagcaacttttccttggtacatcttgagttgaacttgtgattactccgaaagtacttcaattaggtcaaaatattcctagagtcatgtatgattttgagttacgtcataaatttccctcctgtgggcagatactatggtttctactaggatcactgctttgcacccacaaaccatttaatatggagtctgtcatgttgaggttctttctattattctgtatgcacagagaacccttagaagctctttggacagtgtgctttagaagat

SEQ ID NO: 95277 - DNA, 502 bp, Cannabis sativa
ttgggttagtttttggacttttggttctattttatgcttgattcttttattttaggtccccagatgtttaaaggaagtattcacaagaatagaggaaaagagatgaaaaggttaaggaaaaaatgtgcaaagttcttttctgccaaagcccgtcgcgacgggcagaatctttcgccgcgatggggaaaaagcttcgccacgacgggacttggcagaaagttttccaagttgagaatgctccagccgtcacgacggggaataagctttgtcgcgacaaagccttctcgacgacaaaaatgggcaatttcgtaatttcacaaattttaaagagaaaacttggctcatttaaaagggaactcgtgatttatgatcaatattgagaatcagagccctagaaacaaaagagaagacttcaagtgtaacacccaaactagtctaggcgtgttacgtgatttttaaacgtactatgcagctcgttgctaatcaatgaggtttatggaaa

SEQ ID NO: 95278 - DNA, 663 bp, Cannabis sativa
  modified_base (36)..(41): a, c, t, g, unknown or other
  modified_base (286)..(288): a, c, t, g, unknown or other
  modified_base (619)..(620): a, c, t, g, unknown or other
tgaacaacaaagtttgactcgattcttcaaccgagnnnnnngaatgtgaactttcaggctgactcttttcattttctttcaatgagtctttgttcatttaagcatcaatttgacgtatgtaatcaggtttatcaataatttttccagacctaaggatagaaattgatttagcttcttcagtaggtctagatgtacttacctcgtactgactctttgaatttggaatgggctaactgggaagttttcccttttccctttcagctacagcagtagcaagctgacccannntgtttcaagctttaacagggattgagaatttgtgtgtaaagcttgttgggtggtttgcatgaactattgtagtgtatcctctaaagatggttttctttgttgttgaggatatggcatattaggttgggcatgactttgattgggtgtgttgtactggtgcttttgattcattggaggttgcaactgtctccatgaaaaatttggatgatttctccaatttggattgtaggattgagaaaatgggctatcagatgatttcccatacgtttgaactgtgtttacttcttcagaaaatgcctcttggtatataggcaatgatggacaggactgnncactatgacttgtactatagcataaggaacaaatttcattcct

SEQ ID NO: 95279 - DNA, 1096 bp, Cannabis sativa
cttcaactatccctaagggataagaattagtctgattagtattgaatcaaaatttgagttttcttaacgagctagatttaaagaagcaaaattggaataagacatattattaataattgctcataaatttatcatgcaataatcaaacctggtttgcattgaattgtacttgtcttaggtaacaactttctttggagaacaacgaaaacattctctcccacacttattttctcacctccattcaactttatctcatttggacacaactccttaagaatgttagtacaatgaggctcttctttgatttcctcaagacatggaatttctacctcgattttgggaagagctttaggaatctccttgatgggctcctctttcttagattttttcaatctacttggaaaaggtagaggagtgacataagtttgtacaattagtttgtatggctttttcagtgatggtagaccaactaaagtaggagattcaacttttgatggagatgatatttcttcaagggatgaattgttgactgctttagttggaattaacttgtgcacttcttgatgtggtggtaattcaagttgtgtgccactttggatagtgatgacattgacattctctattgggttatctccacttgtgaaggcatagagtttgacacaataaatttactaatatttatttctaatacctctaattattttagtacaattataagtaagggtcggttccacaatgattatgtttatttaagtattcaaaaattagtgacaaaaagttaaaaaaaaaagggagtttttatgcttagaagaaaatagtataaataaaaatagaaacaaattaaaagtgagactacaatatgagaaattagttaaaagttactcgccaccttaaaaaatcattcttaattccttttaatgaatgtaatttcaatttttaatcaaactattactcccgcaaataaagctgaataattaactcttttacctcagcagtaaatccactaagtatacaatgtatttatagagatagattaatctaggcaatatattaatgaagcatataatttatttaacttaggttctattcttcatca

SEQ ID NO: 95280 - DNA, 2753 bp, Cannabis sativa
caaacctattttttaatttaaaatgataacctatttcaaaaaataaattaaaatgataactttagaaagaaaaaaaaaattaatgacaaatccactctgttgagtgactttgtttagtttttcttatatatgttttacatccgcacgaagtaaattataactttaactcgagaagaaaaaatcattttgccatattatcgctagaccaacttgacatgattttctttacaagacaaagctaaatcacaaaaatgaacaagtgctagtattaatttcattttaagtaagaagtgtctttaagttggccaactctcttttcctttatgacttttcctgtatatcatcaattatattgtcgtacatatattaatttgattgttttgtgcttgtctttgacctgatccctttaacaaaccttttattttctcaattttattcctatagtatagtttttcaatacctaaaccaatcttgcagtctgtgtctacacaacaatgggaagctgtaatatagagatgttttttgtcatatatatatgttattgaagtattagctgttaggaacaattatttaataaaaaataattaaatatttactttactaaaatgaaattttaggatctatatatagtttaaaaaggataacccttatattaaaatttgaaaatgattaagtccttcacagttcccatgattatcttaaattttatttacaccccagatatttataaatataccaaatgttaataatttttattttatataaaatatatctctttaaatttaattattgtagatttttctaaaaaaaaaaaaatcttcaaatttatattttgaaaaatatatttatcaaaaaaaaaaaataaaatattttaaataatatgataaaaaaaaattaaaataaaaaattatatgaaattttaatagaaaaaaaaattacagatgtttaaaaaatataaaaataaaatttaaataagcatttaaattaacacaaaataatgtaagaaaataactttaaaaaaaatattaagactgatttttaaaaattattttaagtttattttttcaatattaaggtgtacttattattttgtggggtttgttggaataatgaacactatttcaattctctttcaggatcaatatttgtaggtaaatataatagggactccgaaattcctttctaatgtgaaagatcagtcaaagttggaatcacaaagtacatttagaatttttggatatcttccaatgcaaatagtactttacgaataataatcaaacactaaatgcacgccaataaattatctcgtggcaaataaaaactacggtaaaccttccactataacaatactaatgggtacacaatattagactttcaagttttgacaaacacttgaggaatacactcaaaactctcacactcactagtgtggtaatctcaccatctctctaaaaaaaaattctcacaattttgtaagaactctctttttctcactctcttagatttctcttactaagaggtagtctcactatttttctctcaattgattgtgatggttgtgatgggatgaacaaataaaatggataaacctctatttataggcctctttggatgtatgaataagacacaaaaactcaatcttacattaaatgtatagttaaatatgtgcatatgtctcaagtcaaaaattactattgtaacttttcacatggctgaaaaatacaatcacattctcacatggttgaaaaacaaacattacccatcaattttctcccttttcaatccatgaggaagaattgatcttgtatcttcatcatgaagaactcatcctagcaagcttggaacacaactcaagcttataccgagaaatcacctttgttagcatatctgatgcattctggtctgtatgaattttctatacttggaatagcttcttttcaagtgtgtcatgagtctagtgatatctaacatcaatgtgctttgttctatagtgctaagtagcattcttgcttaggtcgatcgcactttaactgtcgttatgaatcacatatagcctttcttgcttcaaacccaattcttggagaaaactctttactcgtaacatttctttcccagcttttgcaagagtaatatactctggtcatgtggtagataaagcaacatatttttgcaacttggactgccatgacacagctccccctgcaaaagtaaacatatatccagtgttgattttctaccgttaaaatcaccagccatatcagcatctgcatacccttctaagattggttctcctttcctgaagcttaggcacatttttgatgtccctctcagatatctgaagatctattttatagctccctaatgttgcttgctcgaatttgcaaggaaacggcttacaactctcactgcatgagcaatattcggtctcgtacaaaccattgcatacatcaagcttccaactgttgaaaagtaaggaatagccaacatttttctcttttcttcttctgaagaaggatatgacttcttagtgagtctgaattggccaccaagtggcaaagaaattgactttgcatccttcatgttgaacctctcaagtattcgttcaacatagttctcctgtgacatccataatctttgagaaggtctacacgaatgatttccattcctaggatttgtttggctgcccccaagtctttcatatcgaagactcctgatagttctttcttcagctgatttatcatcttaccatcctg

SEQ ID NO: 95281 - DNA, 508 bp, Cannabis sativa
agagttggatattattgatagtgggaggtttaatgaatttggggcaaagagtcttattgtttattttttgattcggttagaaataagattgcaaagaatcttgttaaaattaataaaggtgataatggagaaaaaatagatttttataggttgagaggtttggcctatatttttcaagtttggttcagtgaatgttgtccttacattgatggcattcattgttctaaattgcatgctcgtattcctagaattctgaactggtctaatatgatattgctccttctgttaaggagttcaagaattctatcttcagtgtttctctatctaaggtatttagtttttaaatttttgtttcaatgttattttgttgtttattttatgtgtttttgatgttgtttcatgttttatttttgttacaacttaaaattaagaatttgttcccaactgaggaggaattattgagcttacatttggatggattctttgtggataagaatctagatgacat

SEQ ID NO: 95282 - DNA, 565 bp, Cannabis sativa
aatatgaactattaaattttgatacatgataaaagataaatttgagtttttatacttaatttaattacttaattaattaaaaagatatcacttttatagtatatcaaaaatatatttatattttcacttaaaaaaattattttaaaaaaatctagcttaaaactcaacatttttaatctctctgaacccaacatcagcctatataacttaaaaataagagatttttttattattttttttaaatagataataaaattaagcataaaactcattgttttcctagtaatatttattaaaagaacccatattatataaaactttgttattgggcaccagtggtgcctacaacttttataagtagtgctctatggttactgataatttttgaaagctattttgttaagttatattagacccgatacttaattaatacattaataataatatgacaccgaaaaaaatactaaacacccgtagtactttttagcaattctctattatatatagttaattattattgagcaaacatacttgttatcaattagttattacttgtatatattaa

SEQ ID NO: 95283 - DNA, 621 bp, Cannabis sativa
gtgtatgaatttatagaaccaaataatttatttttgtttattgatatttgtagtgtcaaaatggacaacccacaccccgaccctctcctagtaaatgcctttgtgaatgaactctacagtgtgaaaatgcttcctggtaagagcattaattcacacttgttgatgatgaatctaatgttccagaaagaaaatttgctgaaattaatttatctagagaacgatgggttcaattcattcttaatagtcttcctcctgagtataatagatttgttctatcttatatgatcaacaattttaactcatccgatatggacaagctagaagcagaattgcatgatgatgaccagagcttacctgcaaggaggccattctccaattttgcagacctaagtaagagaaaaaggattaagtatgaagcttctaacaatgctacttcttcaagtacaaatcgtgaaacaattgatagtagtactcttcaatgttcaaattgtaacgagaagggacatcaggaagaacgatgtcccagacttctgaacgattcgaatgaaggtaatgcttcattgcagctgcttaaaacttgggattatttaaatccagaggagttaaagctcaaagttggaa

SEQ ID NO: 95284 - DNA, 601 bp, Cannabis sativa
  modified_base (316)..(318): a, c, t, g, unknown or other
  modified_base (357)..(373): a, c, t, g, unknown or other
tattattaataataataattaaagagtaatttgcgacataaatatttaaatttaacattcagttataaataaatacctacatttaatttttttgcagtaataatacttaagttataattctggaatttttgtaagtacttggttgtagtgttaagtaaattgtcatgtggtaatccctgattggtttaagtcattaaatttttatttttttaaaaaaaatagtttaaaaataccaataagaaaatgacacgtggataatgacttaacatttaacggttaggtacttacagaattctagaaatataacttaggtatnnntaccgccaaaaattaaacttagatatgtatttgcaaccnnnnnnnnnnnnnnnnnatttatgccacaaattactcttaattaaatggaaaaaagttattttattttaaaaaaaaaacctcaaaattaattaaaccgaagaaatgattttgtctagcacatgaggcatcaccccaggaaactaattgttataaggggattttttataaatacgggaaaaaaaaattaaatttacttttatatgatttaaaaaaatactgtaaaaagatatgaaattaaaaaata

SEQ ID NO: 95285 - DNA, 531 bp, Cannabis sativa
tattaacttatattataatatagtctgaaaataattccccatatttaataaaatatactatttatttatatatttttattagtattattattatgttttattaattttcaagatattacaaatgcatacaccatattacttaagttagcttttagtttatctattattataatgattattatttaaaaattatttaactccttttatcaaactttattattataaccacctataattacacatttattaacaaacaaaaaggtataacattccaatataaattcctattttaatttaatattataattaagtaatatattaattgaattttatatatttattttataagtgtatttttacttttttgattattcaagtattcaaaaatctttatatataaaaagtgactatttaactaattttttagtttaacggaatatattttaaaaataaaaaaaatattctgttaaattaatatataaatattaatatcatttattttagactaatttaaatatataatattaatat

SEQ ID NO: 95286 - DNA, 709 bp, Cannabis sativa
atcactaaccaactaacttggtttactaatcttgataatttatattcaatactaaaaagttgttacatatagtttttagcaaaaacttctatttttagtggtaaaattttttatgaacgatattatcatatgttttaaaaaaatttgatttttatgcatgactaatacttttagctacaagcttgagtaatgacataagtaatataatattttcagtcctaatgttcacaccaggtaaaattttttgtagtgttatattctcaaataattatgatatttgtatatatagtgttacacccttttttttgcatggtagtaattcccttgaattaaaacaattaaaaatatattttttaatttcttatatatataaattattctaaatttatcaaaaaaaatttaaaatatcttaaataattataatgtacaagaatataaaaaaaaaagttttagattaaaagattctttgaaatgacgaaataagtagagaatacatccgtgcattttctttaaaatgtgcatataaaagtacccaatctttttataccatcaatatgtatattataaagtaaaatattatagatgtaattgttggaaaattgttgtgctctaataaaaatatcgaaccaacaagattacaactcaatgacaaataatacaaaggacaaaaatatagattaaataatgttacaacactaaacaaaatata

SEQ ID NO: 95287 - DNA, 669 bp, Cannabis sativa
ttccattaactgatggaggattttgtatctcaataattttgattggaagtataaatatttgtttaatgaatttttagtatgcatacatttttgaggggaggctatatatacgtacgtgtaattgttctattagacacatgattaataaataattatatatatgatcaaatgagataatggtttccattaattcctaagcaccaatatgtgtgatgtgtgttttccattaaataatactttatagtaaaaagacgaaaataaataatcctcctgaatcactatataaatatatataaatcagctacaataatattttttgtgattaatattttcaaaataattattttattgcgactaaaaattaatatttaaggggcatgtaatgtagtgggggtttcgaacttgccactatctaaaactttgccactctaacacatattatataaaatgatatttttttaatataaagttaaattattaaataaataaataattgtatatattatgacaggtcttgattttagttacaaatacttaattatcatatatatatatagtaatataatttatatatattgtctgtaaaaatatatcaaatcacaataaatatttttgacgtttgtggcgaaatacttttagcgagacacattaataatttagacatataat

SEQ ID NO: 95288 - DNA, 565 bp, Cannabis sativa
taaaataatttccaacagtttaacattattttaataattaatcctttaaaataagtgaatctattattttaaccataaaagagaatttaagttagagaatcgcattccaccatgcgatgataacttcttttaaacaaatccatattcaattcttgttatgtagctttggtaaaaatttaaagatagaaaatcagaactgaacttatctttctttctttatttctctcacaaaatctcttattgaaacccacccaagaaataaaaaatgaagaatataaggtgatgtatatgtagttatacgtaccaatgatgcttgcgtttactacatcgtcaatgaggttgctctatgcgacacctatgaccactgtgtcaacaagacatggtgagagcgtgagctttggcgtcctttggggcttacaacaatgtgtatgtatccatgattacatattatatcatcaattattgttgtgtttccatggacttaaatgccttaccaatagttaaagaactagaacgattgatattgaccatcaggtaattaaattgctttttttttttttaaaaa

SEQ ID NO: 95289 - DNA, 617 bp, Cannabis sativa
atttacttgtttatttatttatttgttttttattttgcaccatgttttttctgcattgtatcattcttttatttatgttttaatgttttttgttttttacattctcttaaattgttcagtaacaaattttctaatttttcaccaactcaaatgtgtttataggttaaaactaattagtttttcgcttattcataatatatatctatctatatctatacttctatatacgctttatttcaaaaaaaaaaaatacttctataatggagaagtatgaagcggtgatgtggcactctaaaatctttctaaatctatttttgtcttctttccttaattctcttatttttaatattttattaaagtataaatctataaattagtattttactattattttaataaatttccattaaaaatacctaatataaactaattattttcttataagaaaaaacacaatacatataaatatgtacgtacacgtttctcttattattattatatctaatttaattgtatatatctctattaaataaaaatatttatgataattaattaataattaaaaaattaaaatttctaaatatctattcttcttaattttctctttttatgttatt

SEQ ID NO: 95290 - DNA, 751 bp, Cannabis sativa
  modified_base (169)..(173): a, c, t, g, unknown or other
  modified_base (292)..(298): a, c, t, g, unknown or other
gacggttggggttcgatttttgggtggtttgctttctaaaaaaaaaaacgcaaaagaagaggaagaagaaaaagaaagaaaaaagaagaagaacaacaaaaaattaattatttttaaatattttaaactatttttttaatatataaattattaatttttttttattttnnnnntttttttaaatatatataattattttttaaaaactaatactacgtggaccactaaaaatttgccacgtgtacaacggtttacacgtggacagtccaccgtggcacttaactgtgatttnnnnnnngaggtgtgcagagcaaaacagaaccagggtttaggtagtttagtcgccgaaaatttagtttttgtagttaaatgttacaaactgtaaagttcgtttacccgccaatatccctattatttatatatatatatattttagtggaagatagtggtattagtggaagatagtggtatcgcttaatgggcagtttttattggagaggggtctttgtgtaatgacttcgtatttcaaaatgatgttattaatgctctacaggagcttgcttcattgaagtattagagatttgctctttcgatccccttgttactcttcatcagtgttctacttctaattctaatggaccctgctagtgtatgtgatttatttgaggagtcagttcagatctcacaagatgatataacctttgccctcaacccaggagaggtggatgaaccccaggaagctaatcaagtt

SEQ ID NO: 95291 - DNA, 843 bp, Cannabis sativa
ccattattagcggcggaggagctccgccgctaatatccccgccgctaatgaggggatttcttgtagtgtaataacctaatcaattctttagttaatattaaattcctaaatcatatttcaataaaatctttgctaattaatttaaaaagaagatgaatatgatgagaggggaagcattaactcaaactcattaatgaagattaataaaatgttatcatcttctaagataactgttctcttatgtatttttttttatgggaaatgaaagaatacaaaaactcttgttatgtttgtgctatacatttgaaatcacacttgagaactaattcccaattcctagctcggttcagacattaccatgtctattaaactgtaatcagttaggattagtttatggtttgtattttgtctgaccattctgttaacaggttggtaatctgttattaactaactaattggttagttaatcttgaccaacttgtctcttgtaaatcaatttgagaaataaaatcaatctcttctctctcggtttctctcttggtttctctcaatgtcataatagaattatcaaaccctaatatgatagttatgaccgtcctctatgagccatgtctataaatagacttctcctcattcgagcttagaagattagagagagagaagattcattgaggaatgtaattgagatattagtgtatctgatctaatatcctcccaagtgagaaatcttttgtaatatgaagaaattttgtgagtgtattgaactgttcgtcacagtttttggtgtaattctctagttgatcaatcaataaagttctcaagcccttagaggttgtttctggc

SEQ ID NO: 95292 - DNA, 518 bp, Cannabis sativa
cacatcacaagtaaattctattttaccagcgcaatactaacttttgccagcacattttagtgcttatacgtatcatcactttgttttaaaactatcaaaagagacattattatcttatcactttagttttatcaaacacatacatacaccatgttttcactactacacaaaattctctcatcttcttttttttttttttaatatgtccagcactattttggacaattttgaaaaaaattcatgtttagtattatacgataatgaaaaatttcataatgtccaacgatacatatactaaacatgaaaagtagaagacatgaaaatttataggggtgtttataaaatagtcaattttatccaatttgcacgatctagctatatttgcatttgtgtggattgaattagattagaaaattcaaaatccgcacttatgcagattgaatattaattgatttgtaaaagtaaccgattcaaacaaattcgcatatatttacataaaattttaaaaaaatatatat

SEQ ID NO: 95293 - DNA, 817 bp, Cannabis sativa
  modified_base (329)..(330): a, c, t, g, unknown or other
ggtagaacaagagagaagaagcagcaaaagaaaataagaaatatgagatttctatcttcttttataaaaatatgacataaaaaagcccatataaatgtaataaataaacgaactcataaccccatgatattatttatttattatgtcataaaaaagtaaactcttataattttctcatatattgtgtaatttttacaaaaaaaatacataagatgctaataaaattatatatcatgtcaataaaaatatgatagaaaatagaacttaaatattatttaaaaaagtgatataacgtataacaaaaaaatatatataccattcaccaaaanntatatactaacaataataataagaaaaatatatatattactaatgtatatatgtgtatactatactaactaaattatataccactattgtatataataaaataataattaaatattattcaaaataaatatatattctacaataataattaaatatatgtagcatttatacatacatttaaatatttgtattatgttaataaaattatattccactattatacagaacaaaacaaaaaataattatcatctaagaataataatatactatacaacaaaacagaaatatattgtacaacaaaatctatataccaaaactcacaacaactcataaaaaattaaaaaaaaaaaatctacataattttcaaataaaagagatttttaacaaaacttatatagatataccacaatctttaagtaatttgcttctaattcttgaaaaaaaatatatatgaaaaaaaattatttttttatgtggtaaaagacaa

SEQ ID NO: 95294 - DNA, 745 bp, Cannabis sativa
aattctgatttttttttaatttttgaaagaagaatataatgtggaatatattgccaggaccctaaattttaatgggttataacaaaaaaaaaagggattgtttcacaaatatacaaaaataataaaaaaattacaaaaatacggttttacaaaattttaaacatttttacgattttttttattttatttacaaaacatacgatctttttatgttgtactcttattaatttattattaattttttgttatctatatgttatttttttattgttgttttgctgttatttttatattacttttatgtaattttcttgttgttttcgtgttgtttctatgaaaaatcataaaaatatatataaaaaaatatttaaacgtaaaaatgtaattttttttcacaaaaaaatagtgtcttgtgtaattatttcaaaaaaaaagttatactcttatttaaaaagaaatgtggtatttttaaaattaataaaagttatttttgggcacatgtctagccctcctatgcctaaaatcggtcatgtatacttctatcttaaatcctaaaatataaaattttaaatatatatatatatatatataaacatttctcaataagtattatttattgatgattttaaaaagaattataaatatcaattttaaaaatgctaaaccatttctcaatgtaccattaaagagaaaggaaattaaacttacctgagcgccacatcagtatggtggtggtggtggtggt

SEQ ID NO: 95295 - DNA, 1571 bp, Cannabis sativa
agcttccattagatcttgaacgtcatcaaggaggttttggatttgtacgaaagagccactgggcaaaaagttaatttccaaaaatcctccctgtacttttcgcccaatgtagaactaagagaccaaaccttgatttctgacttcatgcggatccctgttcgcccgtcctttgaaaaatatcttgggcttcctcaacacataggccgaaccaaaaagcaactgtttcattaccttcatgacaaagtttggggccatcttcataactggcggaataaaatcttttccaaaggaggaaaagaaattctcttaaaatcggtcattcaagccattcctacctacagcatggcttgcttccgtattccagtcgccacttgccgctctctcgagtcaaccatggcaaatttttggtggggaactaatgaaaacaaccgtcctaaaacccactggcaaagctggaacaaactctgtcgctctaagaaagatggcgggcttggttttcgctccctggtccatttcaaccaagccatgcttgctaaacaagcctggcgcatcctaaagcaaccaaactccactgtctccagaattttatctgcccgttactaccctcagtcatccttcctcagtagctccacggggcattctccgtcctttgtttggcgtagcatttgctggggaaaagaactgctccaaaaaggtctcatctctaaaattggcaatggacagaacacttgcaccaccacagattattggattccgggatgtcgacagatcaccactttactccctgtccctgacagagtagcctatttcatcaccccttctttatcctgggatactgctgaaattcatcgttgttttcccccccatgtggcccataatatcctttctatccctctcccccttaccccaacccaggatgacctggtctgggaacacacaacctctgggatcttctcagtcaaatccggctatcaccttagtttttcatctgctagctctcttgatatcccttcctcctcttctccctcgccttggtggaaaaacctttggcatctcccgattcctcccaaggtgaaacactttgcttttcgtgccacaaacctcaccctccccaccgctaaaaacttagccattaggaaaatcatccaatccccgggttgtaaccgttgtggaaaccatgaagaatcggtgtcacatgcattgttctactgtcagaatgtccggagagtctggaaaggtacgcaatttcaaccttatattttttcctgctcttctgaaattttgtttcatgatttagcttaccaaatttacacatctttctccaagaacgatgttgctctttttctgtgtatctcttggtttgtttggtttaacaggaataaagctctcaaaggtcaacctccagaccaatcgcatgcaattatcagtctggctcaaagctttttagcagattacaacttgacgtcctcagcctcgtcactctcaggccggccaattacgacccctgcccctgctccctggattcccccaaagcccggcactctcaagctcaatgtggatgcggcagttcc

SEQ ID NO: 95296 - DNA, 614 bp, Cannabis sativa
ctctctctctctctgtgtgtgtatacatataataagtgtatatttttatatctcattctttaaaactctttctctgcttataaaaaaaattaaagacaaccctccctatattgttctatcttttacatgattaataaaaacaacattttttttttggatattttgtagtttaggtaaagttgatttataaatgatttgcatatttttacaagattgatcttttgttattttttctgttaatgtataactgtctttttgttattttatagttattttattgttgttttatgttgttatttaagtattctatagctatttttatacattttttggtacaattgtttagtttatatgtattttttatcgtatatatttttagtttattctagataatatttttgttttatatatattattttattttttgctatttttatgttttttttttagtttttttaagtggtttccataatttttttgttgaacatttatttttttagttatttttttttattcatgtgtatttcttatagtgtatatttttattcccttttttttgtcgtatatgtgttgctttgtatatgtagatgcatacatttagtttattttttgac

SEQ ID NO: 95297 - DNA, 534 bp, Cannabis sativa
ttgatagaaaagctcgcctactcccttattctagcaacaaggaagctaaggccttattttcaagctcatcctgttcgggtaaacaacaaccaaccactttgacaaatactgcaaaagccagatgcctctgcacggttactcaaatgggcggtaaaattgggtcagtatgaaatcaacttccaaccccgaacatcaatcaagggccaagccttggccaactttgtagtggaatgcacaagcaaaaaagaaagcataccagaaagcaatcccgagccagtagcacaaccaagtatcaatgaagacaaactgacctggaaactacatgtggatgggtcagcaacagatcaactatctggtgcacgaattgcccttgtcacacctgaggggcaacacctgcacgctgtggtcaagttcagattcaaggcttctaacaacgaagccgaatacgaggctctaattgctggacttaagttagccaaggaaatgaaggccgaacacattgagatctgtagttattcacagctggtggtaaat

SEQ ID NO: 95298 - DNA, 630 bp, Cannabis sativa
ttcatgattttcaacatattttacgtttctttttttgaaaaggttcaacatattttacttaaacggtgaaattatttctttttttatcttttttttagagaatgaatttgatttttaattaatatgcttaatatcgccatcaaaatactaataaaaaagcccctaaaacttaagaaaatatttaggtagagtacacgtacaaaaaatatatgtacttagagatattttttttcattaggtcattttatattaataattaagtaatttattttagattatattatttttttttaataagttggtaactctaataaagaaaattactaatatttaagattgtgaactcttaagcctcatttacaaaaaaaaaagaattttttgaaaaaaaaaacttttccaatatttttgtttgatatagtgaaacttggagattgaacattatgaacacattggacatataaaactaaaatttaaatatatttgattgtataattaattaatcaaataacactaatgttttaccacagtttgtattactcaattaatatgactttcgataaatattattcacttaaaggttacttatgttgtatgagcatgcatattatttgttcaccaatcaagatgcaa

SEQ ID NO: 95299 - DNA, 851 bp, Cannabis sativa
tatctattaataaaaaatactctcatattatattttattaaaatgtatccactctatttaagtctagcacataatttacattaatagggagcataataggaacatcagtgacggacctagtagtgttaatgtgggggctatagcccccactaacaaaaatattgtctttgaaaaaattaaatataattttttttaatttgataattatagactaaaatagtaaaaaagctcccacaaaattaaataaatctagtaagagtgattatagtataggtataaatattttttaataataaataagcccccataaagtaaaaattctaggtccgtcactgaggaacatcatctataaaagtggatatatcttaaagaatataaaaataaaagtaaaaattaaaaccaataaagtaaaactgatatacaatggaatttcctttttaatatgagatattttgtaaagtacccccacaacaattacaccccaattgtttcatgcaaagcttttggtaaccattgtacacaattttcccagtctctacaaagcatttcctcctttttcaattgagcttttagtcaagaaaagcaagaacgcgctacaatttttgacctagctttgatcctatgtaccgactacataaagaacaagttccattttaggcatcatcaacttctctagctgcttacactattaatgctcctttcttgtattctccagcaaagaagttgaccttgattgttgggagtgttaggagagttgaatctttttgacattgttgttcaaaggatgaacacaaacactgaaagagaagactgaaaacagagagagaaaaaagaagagagtaacacaaaga

SEQ ID NO: 95300 - DNA, 1025 bp, Cannabis sativa
taccggtgagttaagttgattcgctagcaaaacttagtatggtgaggaatcattgtcgacatcctttaccagcgcaaaattttcctggcgaaactatgccagggagttatgtatacttttttcagcaagaaaactcgccagcaaaagtgctttttcttgtagtgtctagagtccaagatcaaatcttttctcgactctgtttttgtataaacaagcacatctgcagaatcatgaccatcagtagtaagactagcctcactcttgttgtctttttcattcttgtctttgctcttgtctatattattcttgttccgcagagtataacattcatccttgagatgaccttccttcttgcagtatttgcataactttctaaccttgaatttggattttgaatgactagagccattgctcttgtttatgtgattcctttgttgatttctacttgaaccattgtccttatgtcctttggttttatttgacctacctcgggccattagacctttaccatttgatccattcttctcatcaaacttcttctaagtttccttagaatttagtgtagctttgatcttggacattgtcaaagtctccttttcatacaacatggtgtcaacaaaatgttcataagatcttggcagtgaactcaataggacaattctttgattctcttcttcaatctcaataccaatgttgttgagtttaagaatgatcttgttgaactcatcaagatgtttcctgacttcaccagatttatccattcttaaggtatacaaccttttcttcagatacaacttgttggccaatgtctttttcaaatagattcaggacaatttattccacgatccaattgcagtggtctcactaaaaacctctcaaagaacttcacctccaagacttaagatgatagtacggtgagccttcttctgagtctctttaaccttcttcttatcctcaatgtattcaagaccttctgatttaatggcttctaatatgccctggtgcaccagcagagcacatatttt

SEQ ID NO: 95301 - DNA, 820 bp, Cannabis sativa
caaatagcccaactcaccatcgctgcttcctccatttcaacttcgtgcccctggtgaaaattcttaacaaccagctgctgaatgttacagccccagccccgacgcccattgtgatgcgatgccaagcaacctttgcaaacgagcattccaccaacgcatgttgaatagtttcagtactacagttacacaaagggcagtcggcattaacaggaacgtgacgtttttgtaattgaaaacaagttggaagcacacccgaagtagctcgcgataaaaaattactgatcttaggaggaacttttaatgaccaaagtcgcttccaaaaattagtattggcatcttggcaccaagcacacttagattcttgcaagaatttatatgcacttttgactgaataattcccacaagtctcaagtctccaactccaaccatcattagcggccgaatcactaagctgaatggacaaaataaggtcctgatcacgggcaacaaacaggttcctcataacatcctcatcccacactcgagtacaaacttgaaagaggcagctggtagatttattcacaagagcagggtgccgtgagacaacatagttgtttgaattatgtggaagccaaggatcattaagaatggagacatttttgccattagcaattgtcctttgagcacaggcatggataagattttaaccttcaagaatactacgctaaatgaaactaggattgtctcctaatacagaagaaaaaacattaccagtagcataatatttagccttataaagcctactaaccaaagaatcagcattaaccaacaaacaccaata

SEQ ID NO: 95302 - DNA, 1019 bp, Cannabis sativa
tctttcgggttctgacagtttgtgaacctatcttggagtgcttctatcttcacactaccagaccagttgaaatatttgttgatcaatcggtctgacccttcgcgagcaacctaggtagccttctcctcttctgttggccccgtggagaagtccaggcctgtaatgagtgcaaaattaagcactccgaatctgagctccttccgaccaatgtaaaaccgcatcctcaactcctcctgagcatcaaccttcatcttgtgcaaaatcagctggtgaaataacaccgacgagaatgtcaggggtacggcattccaaaagttgctgaaacggctttccttcgccgtgttattcaaatggaactcctcaaaccgagacttgatttttgcaaaagttctggtgcctctgcaagtaatgcggctagtaaaatgctcggatcctagaattatgagtctcggagccatctgaaaaaataaataacaaagtaatatcactgccaaaaaattataaaatggtcgacatcacgtcgacatcatgtcgatattctgtcgacattatcaaacagtaagcaacaacataagttgttcgacaacatatcgacataccatcgatatgctgtcgacattccaataaaatcaacacaacacatcatcacacaacattaccgatattgtgttgacatcatgtcgacatgaggtcgatacatcacacagaaaataactacataaagtgtcgacaacatatcgacatacaatcgacatgctgtcgacaacgaaatcaaatcaataaatttacattgtgtcgacaacatatcgacatgtggtcgacaaataaatttaaacactaaattcagatcaaaaatttttccactcaaaatatgtggacattctatcgatacaccatcgacatcctatcatcgatccactttatcacacagacatttctaatggtcattttgtcgatattatatcgatatctcatcgataacattgtttaaacaaatagacacaactaatgaacatgca

SEQ ID NO: 95303 - DNA, 1153 bp, Cannabis sativa
aatatctctctttttagtaattttccagcagcttaatttaatagctttcaaaatatttctataatcatatatattattattttaatctttcgttagttatttttcttatttttgggagttatcaattaatctttgcctttattttctacagttttaaattaatttagtttctccatatttttttaatttaattgtaattatatttcatttatacaggttctaaagataaaatgccagactattttcttttattactcttttaagagggtcaaattatctatataaatgattttaggggggttttcattattatgtataaaacaaagttttttacggttactgaaagattttttcattaatatatataactctttattttttctcaatattacaacttatttattatattacctaaaatatccactgattatataagtctcacttttatatatgcttataagttttatttatatataagttgtttacattaagacaatatataatacatttatatttgaagttatttgtatattgagttgttgtacatgttgctgtgagggttgcttaattatttgtaaggttgttgtataatttttacactaggttgttgtactatatatgttgttataagggttgctaaattatttgtaagggttttgaatgaatttaacaactcatacaacaaccaggatagcaactcaatctcatacaataaatgtgttaataactcttacattaacccaatctcataccagaaccatgttaataatccttataataaccacgtgctatcaactttcacaataacttaatatcatacaacaactatgttagcaaccttagaataataatgttagcaactcaatctcatacaacaaccgtattagcaacctttacaacaaccatgttagaaactcaatctcatacaaataccatgtaacccttacaaaagccatgttagcaactcttacagtaattatgttagcagcttaatctcatacagcaaccgtgttaataaaccttacaacaaccatgttagtaactcaatctaatacgaaaaccatccatgttagaaacacttacaacaactcaatctcataccataccatgttagcagtcatacgaaaatcatattagcaacttttatagcaac

SEQ ID NO: 95304 - DNA, 641 bp, Cannabis sativa
attaagccattttgcccagcccgctacttttttcaatgacatttttgtagctctacccattttcggtgactttccggtgatatcgtgtactgttttgacaaatagttggcatgggtgtgatctactcatcaagatcattttgatctatactacccctatttttagcgacattttcgatacactaatttctaccgccaccgatagttaatgtgcactgcttaggtgagatttcaaaattatatgtcgttagactcagtttttaaagtagaataaaatgatgataattatttagccatttgattgtataggtgagagtgatatctaagattggactaaacaactggagctcgggacatgagagcttaagatcgtcttttcgacaaagtttatcgacttggcagaagtagggactcaacttgattattggatttgatttttatatgtgttcatgaataacattagacatgttctattttttataaattacaaattggttgaaaaattgaaaacttaatctatatatttttttggactgttctgagtattgagtgctaaatatatttttgtacgaatatatatgcaagttatgatttttggatttattcaaaatacaatcattatgctatcgaattttctagaaa

SEQ ID NO: 95305 - DNA, 1304 bp, Cannabis sativa
gcctacttgtccccttcctacttctagaggcaatggaaaggctactgttagtgatagtagttcagatgattcctcgtctgaggatgatggtagttgatagtaccatctttttgctttttatcgcattaaatgctcgttacttgtattctgactttgttactttctttttgtaaatatggcttgcagattaagggatctcgcttaagagccttctagtggagcttattcaggtcgtcccaaggccaaggtggcctgaactacaaggtctagtgatgccacaaggtccccactgcttccccctcctctagggcctgctctagctactcagccaatgatcatagatcctcccacaaggaggatttcatccccatgccaataataaggcaagggggcctaaaagtctagccaagggcttattagccactagatagaggattattgaggctgctgatagttacattagcagaattctacccatcattgactgggagcttaaggagctagaggatgaggagctggagtgtctaacgtccagcaggcttcaagacttgacatttataagttgtatatttgattttactaaaattgttgcattgacaagggttggctagccatatatgaatcactaggaggttggccagccaaggttgcattaatgagcagttggctggccaggtcttcttctgccactaacttgcttttttcttttaatttttggccatgttgaagttcagccttacccatggtagagaaaagggctaatctggtgctcactgagagaaattgaaggccaaggagactaagcttcagacggagagggatgcacatacccagacacgggctcatctaaaaaagaccaaagatttgaaaaatggcctagagcacttgcatggtattaagagccaaaaggtgaccaaccatgctacaagggcctctaggtttgaggtggagcttgggaacaaggactaggtgttgcaactttctcttgatggccaacaagccatcaaggattagtatgttagcttgtccttcgatgtcttatatgagatttatctacataaccccaaggttgacatctcctacatgggatcttctttccatgaaagaacacttgtttaagggagggagctctacgagagcaggatgtggacaaaccaggttgaccagactgttgtccatcctgaggggtcctcatcaagctatcttgatgaagctatagccagccagtctatggaggaggtggctggccagcctgctgatcacatggtcgtccagtctgtagaggctatggctggccagctcct

SEQ ID NO: 95306 - DNA, 564 bp, Cannabis sativa
aacttaatctaaaattaatactaaaaataacctaacacactagtttgtattataaatttataatatttatgaacttagattttattgtaataaactcagaattagggtcatatagtcggtgtttgagttaaggttgaggttgggatcctaggtcgagacaagaaatcccaattaggtttaggttccagtcaaagttggggtccaggtcttgaggtcggagtctcttgatgtatgtgattcgaatccactcaaattggattcgcagtgaattagtttagggtagctcagaaaagaaaaaaaaaaaaaaaacctcgtttattattattgttttgagaagaaaaaaaatgaagacctttaatcacaataaattaaaggtttaattaatttgaaaataaaaaagctctaattgaaatctatttttaataaaaacaatatcttttgaagcgtgataatattgctcaaattgaatctacaactatttatataaaattcactaagaaatttaaatttaaattattattttattttcatgcttgagtaatttattaattttaatggtgtgaa

SEQ ID NO: 95307 - DNA, 978 bp, Cannabis sativa
agcaatagtctctactcactaacaacacaaataaatgagataattatcctcgcactattaatatcccaaaaaaaaaattaaaaactattttaatcttcatattacagtaattaattataagcacacctattttaattcattctaatttttaaataatttccaccttctcatattcttacaatatatatataaataaaagttcaatatattttaaatattaggaaccagaaaaataaaataaaaaattatatgaaattttataaaaaaaaatttatacaagatttaaaatatataaaattaaaattaaaataattattgatattaaaaaaaataatgtaaaagagaaaattttaaaatataaaaagtgatttttttaaaattaaattaatttaattttttctcacttatattatttcatattattcacttttaagtggtgtttgattgacatgaatgaaaatataagaatatgaaaatgaatttggtggaatcaaatttaaaatgtataaaaaaaattattagaatttttctcattgtattagaatgataatttattgaatagtcattccaccaaaataataaaaaagtcactacattgaaatgacatttcaatactttataagagcatcttcaagtaacagtgtgcactgtgcaaaaaagtaacgcaaatttagcatgcacatattaaatcttgtgtcaaatttagcataacactatgatgtaaaatttacatcacaataaatatactatttttttattcacattttcgtcatttatattattttattagaataatacattactatttatatttttttaattatataaaattaatgataaaattattagtttttatatttttaatatataaatattaattagatatcaaattttttattaattgtatattgaagtacaatactaaaatttaatgcaaatctttcacaaaataattttttatgttaaatataatacaat

SEQ ID NO: 95308 - DNA, 531 bp, Cannabis sativa
aagctgaccagccatatactcactgtcactttggttgtgagagcacccgaaggttttgatgtaaattgtctgagtgccaggaattttaggggcaaaaccattggtgttagcataattgagaggaggtttctttttttccttctttgggttcaatccaactgaagtcagtggcaaccgaaatccaggaggagctccactaatgcttccaactaacaaatcttcaatgtcctccatttctagagcttcccaatgaaccaaacctgttgtaaaaaaatagacttaaaaaggatacaattcacataaaggaaaaaaacaagaatgcaagaagcgacccaaacaaataagtttcaaacaataattcaagaccacctagaaatctatagtacgaacacaatcttgtagtatggccaagccggtgatgaagatattattaacatagttggtgagtgttccacatgtgatggaaaaacttatcaaatttaaagaagatacaatgacatgtttgcccaaggaagattataggatttgaat

SEQ ID NO: 95309 - DNA, 835 bp, Cannabis sativa
tctctagcatttgtcacattttttaacataggcctttgaatcctcgatcattgtcggccagaaataaccttgccttagaattttcttggacaaactctgcccagtggcgtgatttccacaaaatttatcgtgcacttcagacaaaagtcgttcagcttcttcttaggtaacacatctgagaaattgaatggagaaccctcgtctgtacataattccctctactacgatataccgtgcagccttccttctcatcttttaagcttcatttcgatcatctgggagttccccagtattgaggtaggctgctattggcatcatccagtttgtgaaagtatcaatcatttcgatctcttccgtgccattgatgctaggatcttcgaggaactggataggaaccaagttcgctttatcacttacattactactcgctaaccgagctaatgcgtctgcagtcgtgttttcttccctcaaaatttgtctgagaccgtagcttttaaattgtgcgatcaagtcatgtattttgctcagatatgctatcatcttttctcctctagcctcgtatttttcatatacgtgatttaccaccagctgtgaatcactacagatttcgatatgttcggctttcatctcccgggctagttttaggccagcgatcaaagcttcatattcggcttcgttattggatgctctaaatccaaacttgactacagcgtgcaggtgttgcccccaggtgtgacaagggcgattcctgcactggatagttaatctgtagccgacccctccatatgtagtttccaagtcgacttgtcttcactgttacttggctgaggtattt

SEQ ID NO: 95310 - DNA, 774 bp, Cannabis sativa
  modified_base (54)..(56): a, c, t, g, unknown or other
aatcacattatatacattaatctcatattaatatataatatgtctcattttaannntttaatctatcttatattataacaatataatataacagatttaatatgtgaaatttttaagtatacatttttttttctttttgatgaaaatgaataataaatttaatacaatatgaaacttttaagtacatatttttttaagaagaaatggtgaataaaaatcaatgtgaacttttaattttagtgttatgaaaaaaaatcatcttgtgtgtcatgtgtgtatagattattacatataatctattattatatgaataaaaactttatgtctttttaaaaaaatttaaatacaaaaaacaaataagactttttaatttatactatgtggtgaatcctcactctcaaaacaagttgttacagtagtaacaatgttcaaaaaacacaaatcaaaactaaaaccaatcacaaaaccaaaacttgaacttaattgaaataagacaaagaaaacttaactcaataatggatgagtagtggatctttattaaataggaatagtcagtagtacacaatagattgagcccaagattacaactcaacacagcaagtaattacaaagaaatgcctcatattgagggaaatcaattcaagagggatactccctttgtacatccctccacagacactcactatgatcttggactctctctctctctctctcaactgaatctaaagtatgagcattggagattagagatcagaaccctctccactcagacct

SEQ ID NO: 95311 - DNA, 571 bp, Cannabis sativa
ccgccgatcgcaagtttacttcgtcatcaagcgcctgtgcctactaaccatctcgggggttaggggtaggtctcgtcagaagagttgtcaaaataaacaacacattagtcaagtactaaaacaaggaagactgatgtaaataagaaagaagagaacaatcacttacggagtttgcgaaatgtggttgtgcatgagtgtcaagatagaaaaagccccctgcagcgttcttcctcgatggaacaaatttaactgagtaaaggtactcaatctctacaggtgtgggacaaccttaattcataattttgtataagactttcaaactagcaagaatcctgtaagaaatgggattcagctggaatggggcaaccccgatgtgatttatgtaatccttgaaaaagtcccgaagagggaggatggcccctgcacaaatatgctcaaggctccaagagcccatactagttgaaccactaatactggtctcaccactagttcctgggttactactagaaaagtgtgcagggggtagcaactgaattcaccctctcgttctgacctaacctgacatgattgc

SEQ ID NO: 95312 - DNA, 1040 bp, Cannabis sativa
gtgggttagggtcctgggtctttgactaggttcgggttcgagtcccagtttttgatctcgatatgagtctgggattagttccatgtctaagtcttgggtttcgatcccggtcttggtttaagttcagatctgggtgcaggtcccaggttcaggtccaattttgggtttgagtccaggttcgggtttggtcgtggtatgggttcgtgtctaagctcctatccttgtttggcttcaggacaggtttcggctccaagtctaggtatgacttcagattcccaggtctaggtcaagtcctgggttgggttcgagtcctggatttagatttgggtctgggttccggggcctaggtccctggtctaggtcccctatccaagtctggttcttaggtcctggtctaggtccaagttcgggtttgggtcctgagtcttggttttagtccaggtctcggtctggattcgggtccaagtctcggtcccagtcttggtccaggttcaggttcaggtccttgtcagggtttggatcctggtctgggttgcgggtctcaagtcttgacgagggtttaggaccaggtgaggtctaggtcccaatctgggtcccggtccaggttcgggtcctaggtcttgggtccagtcctagtcaagctcttagtctaagtatgggttattgtttgggttcggttcttgtcttagctttgggtcctagtcacagttctagtttttattccgtgtccaggttcggttccaagttcgggtcttggtccacattgggtcagggtccgagtcttagttcgagtccgagtacgggtttttctgatttcggtctgggtctaggtttgagtccatgtccaggtttgggtcctagatctgggtcccaggtttgggtctgggtctacgtctgggtccaggtcccatgttacgaagccagtctaggtatgggttggtatttgagtccgggtctggttcgtgtccatgtccaggtctgaatcccagtttatgtcaggggcttggtctgggtctgggatcgagtcctgagttcgggtt

SEQ ID NO: 95313 - DNA, 529 bp, Cannabis sativa
tcttctgatatacaaagtatacctcccagtaaaatttaggacataacaacgttctttgtgtcatgtttgtagtggggcggacaacaccatttttcatggactaatatcatgtccagaggcgcaatttttctagaatagagttggtattaacacaactttattaccaggcagttttttcttgaatggtggataacttctttcaaggctttggattcgagcaatgttgtgtcttaatcattgtttggtttgctatacaaggtgctaaaaataatttggtgtggaagaaaaagatgatgaggggttgttgacatagttgtatatgcaaaaagatatcttgatcaatgcagacatgctcaaaactctgagctacaatcgtcatagcttggtgtccaggcgtgtgatggggttgagcatttaattttactataggctaataggttaatgtcgatgcagctttgcgtaacagggaataatatttttggctattgcatagtggctcgagatgtaaacggattgaatggtgtgtaat

SEQ ID NO: 95314 - DNA, 516 bp, Cannabis sativa
  modified_base (358)..(364): a, c, t, g, unknown or other
attaccaattacttcagtataacagtaaatacaggtcaatctcacgatgactattatcaatttattattaaaaattaatgacaagaattgaaaaagggagttttgatgattagaataaaatagcataaataaaaataaaaacaaattaaaggtgagactacgatatgagataaatagtcgaaggttattctccaccctcaacaatcattcttaattcttgttaatgaatgtaatttcgattttctaatcaaactattaattccacagataacgctgaagcagtaaattatcttaatcttcctattacatgcaatcaaggcgaagcgctcaataattaactcttttacctaagcagtannnnnnnaagcatgcaatttatttagcttagataaagctttaagatttatgtaatagattaatcaaggaaataaatcaatgaaacatataatttatttaacctaggttctattattcatcacaattaaaatacctttgacaatattaaaaattacaatt

SEQ ID NO: 95315 - DNA, 1869 bp, Cannabis sativa
aattggaaaacaaggttcattgatcaaatccatacaggagaattccggtgcatctgtcagagtattgtcaggaggtatgcgttcaatgttcataatatcttatctcattttcataagatatatatgattggcaactacttatcattttcataagccatttacttatcatttattattttgataagaaccgctagtattttcatctagtgaagagacaaatctatttagagagaaaagattctttagtttagtcgttttgtttcctccaagccatatggatagtagccttctatatgtatcatgacttgagtagtgcaggatttgaagatagcaatttttccatttattgtggtttctataacgaatacaatttgcatatgagtttgtttggttatacactaactataacatgccagtgatttaattatcttgaagcggtgatacatataggcaaaaataggagcaatatagtttggtgtctgctgcttgtattgttatctttgatctatttgagatgaaactatatttgttccttgagaatctaatggactttgggttgaagtttaagtgccatgattttgtggagatcttcctttgttttctttggaaatttctaccgatataattgaaaaggaaataattattcttttaaggcatacataatacaacgttatttaagagatagtatttcttttcattatttttattgctattttattttagttggaagggccgtcgatttattttcggaatagaagttgtgtttcttgtcaggagaacttatgattgtcattctgagtacaccaatatcatgtatatgtaaaacactatagacaactctttgaatgtggtttgtactatttttcgatatgtggtttaaggtctttcttaaaaccttaggcggctttagttagaaactaagcttttgttgtgcatgtaatctcttactatttgtgagtttgaatgtcttttgacacttttgttttctttgcttaatgatataaagctatgtaaagtttgactagacccatggtttgctcctatggatttatcatgggatctacttagaaatatttaaaaatttcctatatttgaaagattgttgggttttgagatattttgtataaaaaatttatattcacctggccacatgtttctgatgtcaaattttgtgtgggttagctcttctttctatgctaaatttaatgacggcccttttttaaaaatttaatcatgctaaattttgtgctagcagatgaggtgccatactatgctgttgcagatgaaagaattgttgagttgcagggtgaagggttgaaggttctcaaagctctggaagcagtaattgcacatctgaggaaatttttagttgatcatagtgttcttccactttttgagaagaaaactgtaagattaattttcatttatgtatccctttacattttattgttttgtcatgttgtgtgctgataattggaatataacattttagtacaatgtgccatcctcacaagaacaacatgtagagacctgggcagacaagccattagctcacggtgcttctcaaactggacttgcagctaattatcctctatcagcaacgagggaatctttgtttcttgatcgtgaaaatcaattggaatcacagattccatcagctcgaatttctctatatggacaagatccgtcacttcctggaattcgttcttcaggccttggatcctcaggcctcggttcttcaagtcttagttcctcaggtctcggttcctcaggtctcggttcttcaggtctcggttcctcaggtctcggttcttcaggtctcggttcctcaggtctcggttccttaggtctcggttcctcaggtctcgg

SEQ ID NO: 95316 - DNA, 781 bp, Cannabis sativa
actccatgggagtcccaagctcttcatgctgagggaccaaattttctaaattttggatggcagaagaaggatcggaactcatgttttccttatcagcagtttggatggatttttttgcctcatcctcacccttcctcatctcgcaaaacctgagcatgtcttcacgaatgtcaccattaggataaccaaagttagcctcgaggttagctttccaaaattcatgaaactccttcgcagcgattgtttcatgacactcaacatctttagtgtgagcttcctgctcagcagccaatgcctcctcaagggcagttttctccttcaagaaagattcctctttttgcttaagggcctcgatcaactcgtaaacttggcctcttggctttgaagaagagttcggagtccctccctctcatcaaggagttcctgcactctcttggattcttactccacatctgcttcaagcttggcagtggacaacgtatgttctctttgttgctttatgaaattaatggacttgtttgcagcatcgagttacttgttaacctcgccaagttgttttcccttctgcttgacatcacttttggcctcttccaaggccttccttaaatcattggtggtcatactatttttaagatttgttgacttagctcgggaataggcataagccaacttcatattcgaccacaaaaagaaaataataaaataagtcaaattgtttggatgacataacccgagcaaaaaactttaaaaataaagacaccttggtgatttctttcaagac

SEQ ID NO: 95317 - DNA, 574 bp, Cannabis sativa
ttttatttttatattctttaagatcacttttatagatgatgtatttattatactctttaggttaatgtaaattatgtgttaaacataactggaaaatgagagtatattaagcaacccactcacaaaagtttgtacattttaataaaatctaatatgaggatgttttgaattaatgaataataaaaaaaaatattcttcaacttatctcaattttctttgagttgttctttccagcaatatcccttttcctaggagtcgaaattaaattagaagaatttacacaacttttaattttttttacttaaatatagtagctttaagtttggctatttttaggatttttttttttttttaattttaaacttattttatgatatttatcatcccatgtatatacatttagggtgtgtttggaagtaactgtgtaattactacgttgggtaattagggtggtaattacactcaaggtgtgtttggatatgaggtggtaattacatatgaatttctaatatcttgtttgacaaaatagttagtaattacatgggaaaaaaatattttttagtagctaatgttt

SEQ ID NO: 95318 - DNA, 802 bp, Cannabis sativa
atttttctaccaatgtattttaattttttttatttcaatattaatatatttattaaattaaaattactaatttagataaatctaaatataaattttaatttaatatttataaaattaaaattttggttgatctaaaatttattttccatccttagtattaattttcaataaatattatgaaaattactcaatttaagttggtccaaaattaattaataaattgatcttcaacttaaatttaattttctataaatatattaactaatttttcgaaattttaatatatttgaaaatatatatataaattcaaaatctatgaaataaaacaaaataaattgtgaaaatcactctaatttatgttgacctaaaattaattaaaaactaattttcaacataaatataactttcaatttaattaaatgtcaaaaagtatccaatatttaactatcttgaattttaaaagaaaagttcaacttaaatattaattttcatttaattaaatacttagaaaaattaccaactagtttacatagaaatcaattatctagaattatttcttaaattatgtgtatatttctctaaattaattcaaaaataatctattgagaaattaattttaaatatttagaattaattatattgctaatcaaattttattcaatgaaactaatataattatttaaacaagacaaatgagcttttacaatgtaggttgttcatgtgagggagggcggagttcagtatgtcgtacccactactatggccccctaactctcagacaaggcccaaaagagaggaattt

SEQ ID NO: 95319 - DNA, 769 bp, Cannabis sativa
ggcgcatttaatgggtgtcagtcgaatactcaaacgtttccaaccgccttgaagagctcttatcccaactgttagatctatagaaggcgaatcgattgctattctcaccgtacgatgatgcctgatcacagctgtttcacatccgttctggcctataaaagccaagcttcccatttcatttggttactttcgctatcttgccaaattttctcagagccttcacatagaggaaaattccagacaccatagattacttactacttttccttcgtcgttgccaatcctcattgtaccgacgatcaatacgaacttccagttctcaagcttcatgtaagtttttagaaaactttatacttgtatcactgtttgtttatatagcatgttttgggtatctgggttgatttttgaatttctgggaagtagtctcgattgaatttgcttagtgcgtagaatctttcttatttgtgcccttgctatttcctccattgcttttctggagttttctcttccgtcgaaataatattttcaaagtatagagcgattttagggcataaggcaattctcgtttttcaccccttctatcctttcgttttagctgctttttggatttttgcacccaatgtttgtcagagggaatccttaggattctcattgttggtaatcatccggagggggcatctttccagcggttaggggactcccattacctttttaaacattaggggttggtttgggacctaactgttggatttttcttaatttttacaga

SEQ ID NO: 95320 - DNA, 577 bp, Cannabis sativa
tacattcaacgaccttaccccgtatcataccccaccatggcccctcatttgtacctgaaacgttagcaataccacatacaacatacaatatatacaagtcataacaaccacaatctatacatcaattcacaactcatattgtgtccataccacacatttttcagtactatatgcatatttataataataaatcataaagcatattccaacacacaaagaattccaatttatgcagatataaacacatacaaaactacctaatttccttaccttaaaattcgaaagttagaatgacttcaactataatcctttagaatgcttaaaccgaaacaacactgctgcaattattattccttaattttaaaccatgataagaaattccaattagaagatgggttgaatagaattaattcttaacaagaaatttttaattaaacttaccttagctctcttaaatatatggtagtcgatcactactataaacctccactaagatatagtccaacgcttctctctatatggtcgccgagaccttttactcacacagtcttactttctgtaagtcactgaacacaca

SEQ ID NO: 95321 - DNA, 754 bp, Cannabis sativa
tattttcttatatataccaaagttaatctatatcaaaatatacaactttctcatttctaatacaagttcatataaagtttcataaccataagaaaagtaatggcttccagatttgaatttgcgtcaacaactctagttttagtcttagttttagccatatggctctgtcaatctcaatgtcgaacattgaacgatgcttcaatgtcagaacaacatgagcagtggatggctcgctatggtcgcacatacaaagatgatgctgaaaaggaaattcgtttccaaatatttaagaaaaatgtggagtttattgagtcgtttaataaagcagggaacaagttgtacaagctaggggtcaatgaatttgtggaccttaccaatgaggaattcaaagcctctcgtaatggttacaaaaattcttcctctagtgtttctaaatccactccattcaagtatgaaagtgtaactgcaattccatccagtatggattggaggaagaaaggagctgttactccagtcaaggaccagggtcaatgcggtaatgatgaacaaaaacgtgttttattaattgaataaaatagtatccctaatacatatattatatataatatctgctaactttaattaatttgatataaatgtattatacataggatgttgctgggcattctctgcagtggctgccacagaaggaatcactcaattgtccacaggaaagttgatatccttatcagaacaagaattggtagattgtgac

SEQ ID NO: 95322 - DNA, 713 bp, Cannabis sativa
ccccaacaaaaaaatatcttctaatggaagagcaaattttgctaaagcatgagctgctttattgacatctcttttaaatctttgctacaggaaaagaggataaaagataaataatatcatctaccaaatcatgaaatggtgttacaaagtttaatttttggttggatataaaaatttaagttttatttttaacagaattaatatgtttatttttggaattgtttttaggtatatgtttattagaatttagttttttattggtttaaattattgaatttttatttttatttaaaaattaattttaatatgttaataaaaaaaagacacgtgaataataattttatatttaactgcttgatatttattgatatttcataaatataactattataaccgtaaaaattatatttaagtatttatctacgataaaaatttaaacttaaatatttacttaacaaattactttagattaaaaattatagtaatttagcacaatagtgtttaatactaataaatgattaatgatattatatactagttactaaattaaattatgtaaaaattgatgattaattataccaataacgatataatatagttaagtagtactaataaaagtactttaaaatataaagattacaagaagtaatatattaatattagtgtaatttaatattaagtgttaaatattttagggcttttttcataaatgt

SEQ ID NO: 95323 - DNA, 606 bp, Cannabis sativa
  modified_base (542)..(543): a, c, t, g, unknown or other
attttcaattttttatatcatggtattagcaaataatcgaagtcatatattctgttttgacaattacgtaacattgtaaactattttatttcgtaaataaatatcatttaaaaaatcctaatatatagtttgttacaaatttataaattttgtttatagaaaagtaagtggaaaaatgatattgtatgaccactgactgtactcattttaattttgaataattagtattttattcccgtgaatttttaagagtatgtaatcttgcactctaaaatatacgacttgttaaaaattccctataaaatataaccgttatacaattatgttttttctgttagattctgttactttcactgtttaaaaattagtatttgtatctgttaaactttaatcaatacaaatataatagttatataaatttttattttcattttaaaatttattaaaaacttatttaaaaatctgagaaaatcccgttcttctccttctcttttgcgattcaggttagggggtcctcatcgtcttctgggaacaaggggtgnnaaccaggaggtcatcgtcgtcgacctacgaacaccccccatcgtcatcatcttcttcctcctc

SEQ ID NO: 95324 - DNA, 590 bp, Cannabis sativa
ctatgattcgggaatactcaactcggggatgttttccttcttgccacaggtcaaacatcgatgttactacttttagtgtaaacaacaacaacaataataattataatgatattaataaatgttattgaaaggagcaactttttttcaagatatatatcaaaacttatatgttaacctctttatgtgttatctactattaagccttaccattcaggtatgatttttaataatacttataacactcagctttgctggacaccgtatccgtgtagtatctagaaatgctcgacatgaaaataaaaaaaaaacagattaaataaattaaaatatgacattttatgcccctttgccttttttatgtcgagcaatgttgggtgtgatgaaatatttttcatgtccaacattgtcagtcatgaaaattcttcaaaacccttccacggcctttacgaaatatgcaggtcatgaaagagataaattgtagtaatggtgttttaaggggaaaacttcttttttttttcttgttatatatatattaatattttatgtttatatatatcattactcaatacaattactattttttttttttt

SEQ ID NO: 95325 - DNA, 1005 bp, Cannabis sativa
tgatgattgtctctcttgaattttgcttttaaagccagacatttatctctgaaatgtccctcctttttacagtaaaagcattgttttccagtgttacctcttgaatttgatcccctaattggaccttttgcatctattctagattggttagccttgtgatgattttgatttcccttgtagttcttgggaaattttcttttgacaatcaacagtcccttcccatttctatccccaccctcatcacctttcttttgattttttttggagttgagtgctgccttcacttcagtcatggtgagagtgtccttaccatacaagatggtatcaacaaaatgttcatacattttgggaagagaactaaggagtattgtggcttgatcttcatcatctattttgacaccaagattattaagatccaagataatcttgttgaaatcatcaagatgcttcctcaactctctgctttcatccatcttaagagtatataatctcttcttcaggtacagtttgttagctagtgatttcttcatgtaaattgaagaaattttgttccatagcccaagtgccttttcttcatcagacacttctctaagtacctcatctccaagactaagaagaatggcactatatgcctttagttcgatttccaagttcttcttcttgtcttcaatcagtttcatagcctcttcatcaagagcttcatgaattccctgatgcacaagaaaagctttcaccttaatccttcataaattgaaattatttgttccattaaaattgttcatctcgaatcttgcaacaaccatttagtttcaacagtctcttgatgtttgaagatcaatcttgaaggtttgaatgcgaatcttgaaacctcttcctgaaaccttgctctgatatcatttgtggtgaaaaactcacccttaattcacattattaatcaactaacagtaacaagattgatcccaaaaataaaaccagcaaagacaagaaaccatagaccagaaaatg

SEQ ID NO: 95326 - DNA, 809 bp, Cannabis sativa
  modified_base (459)..(461): a, c, t, g, unknown or other
ctcaagactttctcccttctatcaagtacttgcaccggttgttcctcgtatgataattctggctggagttacaatgcttcataactcagaatatgggatgcatgtgagacatactttcaaagcattgaaacgtggaacacatcatgtacaactgccagcgctgggcgcatattcaacctgtacgctacttgctgtatcttttcaaggatttcaaaaggtccaatgaacctcaggctatgctctcctttattaccaaagcgtttaatgcctttcatcgacgatatcccaagaaatatcatgtccccgatctgaaaatcaatgtcctgtcgctttgggtcagcataactcttttgtttgctttgagtcgcgagcattcgcgctctgactttatccactacctcacttgttttctaaacagcctcaagatcgaagaactttctttcacccacttcatcccannnaataggtgatctacatttccttccatataaaagttcataaggggccagcccgattgttgcctgatagctgttgttgtaagagaattcgatcaggggaaggtactttacccataatccttcaaagtcaagcacacatgcccatagcatgtattctaggatctgaatagtcctctcggattgtcgatccgtctgaggatgaaatgatgtgctaaacttttagctgagtacctattgctcgatgtagactctcccagaatcttgatgtaaattttggatctctatccgaaacaatggactttgggacaccatgaagacgaacaattcctctaacatataactcagcatact

SEQ ID NO: 95327 - DNA, 584 bp, Cannabis sativa
ttgttgttttatagtttacttatatttattgtaaggttgaaatctcattgttttttttttttaattattttcttacttttgaatgaaaaaaaatcatatttttataattttgaaattttaaaattatatttttgcaaataaaaattttagacagtaaaattgtaaataaaacattaaagaaaaaaagtatttttgaaaaaactacaatattataatgggataaatactattttaaactccgtgttttgtaaaattaactaattagaccaattgttttgttaaatgacaaaatgaaccttgtatttttcaaaattgtacaaatagaatcctgaactgatttttagtcaaaataaaacttaataataattctatctagagatatgataataaaactggttacattttctatatctattcgtgttaaaatttgtctaaaagttagttatattaaaaaaaaataagggaaattctataatgtactttcttcaaagggatacaccgatacatctctatctgttctagtatccgaaataattttttagtcaaattttttttcatgctcatgtaaattatacttatttaag

SEQ ID NO: 95328 - DNA, 638 bp, Cannabis sativa
aaaaataaagaaaagggggttaagtgttaaacaaatgaaacataaggaggtttggccgcaaatttctctttttttttaaaagaaaaatgctaaaaggtatttatagtggtagtatttttatgaggtgtaattaggttctaattattttaatttaataaaaataatagaaaattgctaattaattataatacttcatgttataagagtgttaaacaatttgatgcctcataataatacaatattttgaagttttttaatttatgctactacaactaaacttttttgtacaaatatagtaattttttttttctcatattataagttttttgcaaaattagagttaaagtcacacatcatatccaaatgttatgattccaacaaaaaaaaaaggtgttatgaaactttacctatggaatcatctcttttgactgacaaatttttaacaattattatcggagttattgatttttggctcaagagaattactgggaggaaaaagaagagttacgatttaggttgcgaatgggacatagttgagattgcaatatggtttaatggttattgagggttgcgatttggattgtaattgagtagagattacgatatggtttaagggtgatttaggattgtaatttacg

SEQ ID NO: 95329 - DNA, 514 bp, Cannabis sativa
caagaaaatgcgagaaattaagtgttgtgttcactctagtagagttaacttcgtttctttcatttgattttctgtttgtaatgacaacatttaaatttttcataattactttaaaatttttctatttgggttgtttgttgctatctcatatcagaaatagtattacattacataaatattttagtttagatttcttgccaaactctacataccatttttgtcaagagttataaacagtcatttaaaaaggtttttatatcaatagttgtaaaccgtcatttaaaataattttttctaacgattataaaccgtcttataaagttttgtatttttatgacactcacatagccaatagttttaggaaccgatgagaaatagtataaaagacagttataaacggttgagaaaagtcaattttgtagtagtagcagattattgttgccggaaaagataatccgaactaattggcatagtcactggagctggaaaatggaaaaggcaatcaacgatagtg

SEQ ID NO: 95330 - DNA, 1451 bp, Cannabis sativa
cttcaaaaagctattttttaactacttaccaaacacatttttatcacagtttttttaaaaagcagcttttagcttttctaaaagctataccaactggccctaataactccaagcaaaaatcttctccaataaaattattaccgtcatatattttgctaacaaaatactacataacgatactaaactcaacagtaacacatatacaaatataagcaacaaaatgtggtggcaacagtcgagaaacgacagtgatccaaacagaaatagagtcgacaatcgagactcatggcttcggtaaccgagtagtgttacatgcttaagactttgtaatgtaaaactacatctccaatgactagatgcagacgtgttttcgaaatcagctgtcatttttttctcaagaaacatgcttaaaatacagagcgtgagcctcacgactcccctaattaagcatcactcttcggcgagtcctccgtgatatcaccaagaacgacaaacatggacaatcccttcaatctcctaatggcatgtctgcgagtcataaacacatgatgaacctttggggaaagactacaagctatcgatactttcaagttctaagagcttgggggtaaatgttatcactgttaacggatgggatttacatggaacctgtagaagagtgccacgtaagatcatatactgatatcacggactctttcctaagataggattacataagatatcgaagtactcggaagaaggattcccttgagaaggacaaggtgattcttgaagttttagtctgatgctttcgccatttggaggcaaatggggagcacgagcactccaggataatcaagaatcgactatcccaagaaggccttggctggacttcctggaagctcccaacaacttaatccggaactacacccgatgattatgctttgtttgacaccaagtcagatcctgtcccttgcgtcagaccgtagttgtgtcctgtgtttattgtccgactgcttgtctaggatattacttttaaaggagaaacctttcaacgatcgagtctccaagatcgccaaatttgaaaaatatttttattcctcatatagctcatattacattcacacatgctatataaatcttcgtaatttagaaattatgcttatttattcacttatagcaaatttaattttttcgctgaaatagattacttattatctaatataatataaatataaaccctaattagtcaacattagacttattgagatattacaagcatcccctccttataaaaatttcgtccttgaaatttacctatataatttgggatacagtgcctgcatttatgactaattcccaagtctcttcctcataaaataagtgtgacaatcagtagttctgttatccataaggggaaaaatcaggtaagctatgcaatcccacaccgcctggggaaggtcaagtgggat

SEQ ID NO: 95331 - DNA, 1167 bp, Cannabis sativa
gatcccatctataataatctgaatagtattatcactagtatcaatacaactaaaagaggagtaggtcattacccgcaaactaagagggcaaacttctataaaaatccttgtcttatttactttattgttcttagtgtgtaacatgtggcaaatatcaaattaatacgacctcgctgtcagttggctacttttcgaagttaacagtttggtgctttcattaagtgcaagtcgatatcatatctaatcaaacgtcatggttaacacaagaagaaccccaattgcaccatctgcatcttcaggtcatcctcaagacccacagactacagatcctgatatccatgttccagccgcaactacctctcattcttcgactgactctttaagtcgatgtttctcactcttcgagactaagtgtttactaatctcaaaatttaactccatcaattttcgggattaacaattgcataataatgattcaataattttgtaagtagtacacatactattaccaaaaataaagctgaaaattgagaaaagggaagaggcgggtcattaaacacgacgtgccgtgtaagtaaaaatagctaatgatttactatctattaattaaatacgaatatacatataatatatttatgaaattagaatttattagtttcctagtccaacaaagattgttgaaaagcaatttcgaaaccagataggtgtcaccttaatcagatctggacagcctttctttctagataacataataaataataatcaaaacaaactcattgttagaattaaaatttgacagaagtgcacaccctgccattcaaatctagtcaatgggatttatttatatgtttggtctgcttgtgaatgtttcacgtgctatatataaccataataataataatattggtggatggataatagtaatataaaatacataatataatatatttacattttattttatcataaaatttgatctaattagctttttctttctaatgacaaaaatagaccgttttgtgtaatagggtggaggttataccaaacttaatgatgcagccatccttgaagcaaagactttcagagtctgacttctaatacaatgcaaactcctttgcgtgttaaagtcaagtaaagctaattaacttaattactcagtttcagttt

SEQ ID NO: 95332 - DNA, 614 bp, Cannabis sativa
aattatattattttgtttacataattaggaaaggtaatcgaaatgctttaatttgacaaaattgccattattagaatatgtaattattttttctttatagatttttaaggggtacatttgtctttattatttttaattaataaaattaaaattaaaataaattaagtaagaaaagggaaagacattctctataaaaataggaagagaacctttccctttgtttctccttaatttgtgtgggtcctactagtttccccttttccataatttagtaaatatgggaatcaatatcatatcatttaaccaaacaaatgaatggaaataaaattatttcctttctattccattccatttcattacctccaaccaaaagccaccaaaaaatttccatataatattcatccaaatagttaaaataaaacaaaacttaacttatcatatactgcaaaaatagaagctgagcaaaaataaataaatatcgtgctctcgccaaaaaatttataaatgggaaaattttctttttagcttttattttttctattttcatctaaataacaatctacattatagggaaatttcccattatagggaaaactgaagaaaaaaataacaat

SEQ ID NO: 95333 - DNA, 670 bp, Cannabis sativa
atagccttcaagatcataaccacgaatagctggaacgagttgagcgcgccacgagatgtagttaacacgatccagcttgacagagacaacagagttgagagtagaggcaaaaggagacatggagatacgagatcctcctgcagaggaggaaggcgaagcagagactggagcagaggcagcggaagagttgttcgccatggatgtttggaatctgataccaagatagaaaacagagaaaatacagagaaaatttggattgaatggagctcttttcttattgaataaagactcagattacaaggtatttatagagtaaatgtacagctgtaaacagtcataacaatacaacaaacttgtaacagaaactctaactttgacagctggaggttgaaccatcttctaacggtttctcaacattccccctcaagcgaaaaggggaatcaaccacttgaagcttgtctttaaatctgagaaatcgagctactgaaagtccctttgttaagacatcagctatctgttcagcagtaggaacatagcgaatgtcaatgagtttctgcagcaccatatcacgaacaaaatgaacatctatctcgatgtgtttagtacgagcatgatgaacgggattagcagctaaagacgctgctccaagattgtcacaccaaataattgg

SEQ ID NO: 95334 - DNA, 1204 bp, Cannabis sativa
  modified_base (37)..(52): a, c, t, g, unknown or other
  modified_base (732)..(748): a, c, t, g, unknown or other
tctggagttacagagttgtattctgtaactacggaannnnnnnnnnnnnnnncagtttcattattccgcatttaataaatcacttaattaaataattaaactgggaatattaaatacgaaatttcaaattgtattgctctaacatctgaatcaagagtggcaagttgataattctaagactcattccaaacttgcaaaatctggtatttaactgcactaaccacaactaaataaaacctcttctagattgattgcttctattgaacaaaataattaaataactaaattatagaaaaatgtgagtgtatataacaaaaccaaaaatcatgaatatttatttatgtttataacttggtagattatttgtattggatgattcaaaataactaatggcacatatatgtatatatatttttgaaattttttttatcgatttgtatgcagccaaactgatagagagagtaaatgagtgagttgtttaccatagatctaattcgccgatgcaaagtgagtggtccaattacccacattgatcatgtggagaactaagatgagtattgaattgtgagctaatagtgagactccgaacttattgttcttagtaagaccgacagacagaggaactcagagagaggttcaacaacggttttcagagaatggaggcaagaacagattcctgcagaaatgggatgatacctaactaaaattagaaatatattattattattattnnnnnnnnnnnnnnnnntattattattattattataagtaaaaataaaggaaacatcttattttaattttatttttaaagtagaatcatagtccaacccaaatatttagcataaatgtatttaaatattcctaatcaaaatatgtaatcaaaaaaaagtatcaaaccaaaaaattaaacatcaatttttatgctagcatcaaatcccaagataaaattcacatacacaaatatattcataactcttaatttaggactttgaatgatgaaatggctcaattagacataccctaaaatagaacgaaggctttgaatatcttcataaggcgaaataatcccagtctaaccagaggcaaagtcttccttacatctttggaatagctactaaacttaggggtgtacatcaaaccgctcaaactgcttgcaccgcaaaagaaatgcggtttgaaattcttcgcggtgcggttgcggttt

SEQ ID NO: 95335 - DNA, 550 bp, Cannabis sativa
aataatggttctctccaataaattgaaagaatattttcttaaaatatctcctaccaaaaagtttctattgtaacaaaaaatgaaaaggacaatatataagatgggtagaaaaaaattatgatattcaactcgatccatgatccgaaaccacaagatataaatagaaataatataaataaaataaacacaaacatacctatttaatagaatatgggttaacatgtagcttactccaatcagaagcttatattcatgcataaacataataatatatgattaaatacattatagctatttggaaatagattagtatttgttattgggatggatctctttttatggcagatattgggggtatatacttctttttttctagaatgatgcataattatttttgtatcagtctcctcctttagtctattgaaggtttggtaattatgtctaccggtccacatctatctgcaggatccccaaagtgaggatctaagtctgcctcctcgctttgggctaaacttttttgcccttggccggactcttcactaaagctctt

SEQ ID NO: 95336 - DNA, 642 bp, Cannabis sativa
tttttttttttttaataattagtgctcaaaagtatttttgttgcttattactaaataaataaataaataaataaaactttctcattttaaaaattattatctctacttagattaatcccgttgaaattaatttcccatataagcaacttcaacttgtttcaagacataaacataaggattttttctataatagacaattaaggtcatcttaggccaattaaggattttttctatatttttcctttctagggtaaatattttcacgtagtcaatacaagattagtgtcattaagtttttacattaacaaaagggtatattactctgaagttatgcctgatggacttaatgacaccaatcttgtattgatcccaaaaaagaaaaactttactgttatgtgtgatcttaggccaatatcaatgtgtaatgttctctataagatcatctcgaaagttttgacgaaccgcatgagggatctgattggttgtgttatctctgaaacccaaagtgcttttattcctggccgtcttatctcagacaatgttatggtagcttttgaagtcatacactacttgaaacggaaaagaagaggtaaaaaaggcttcatggctcttaaactcgacatgagcaaagcctacgatcgg

SEQ ID NO: 95337 - DNA, 540 bp, Cannabis sativa
tattatattatatattacactatagtgttggattgtattatattagtattattttatacaatacaatatttggtgacttgtattaatggttgtgtaacatactatctttattatatactctacctaacccgacccccacctcgacccttaactcggaccccatccccaaaccccagccttgcgggccctgctgggtccaaggtctgtgttcgtgtccaggttcaggaccgagatttaagatcggggttcagaccaagtctgggtcaaaggttcgagacaaatctaggttcaaggttcggggttggagtttagggtctgggtctagggttcaggtccagggtcaggttttggggttgggtctaggtccaaggtccgaatcttagttcggggccagagtttaggtctggaactaggtctggggtctagggttgggttcgtggtctaggtttgggtttcaggcctaagtttaaggtcatgtatgaggtccaagtccaaggttgggtctgggtctagagtatgggtccaggtctggggttgggt

SEQ ID NO: 95338 - DNA, 934 bp, Cannabis sativa
tttctttttctttctcagaaattcatggctaagacaaaaaaattaggtcatccaagcaagatggttgaaacagaaactgctccctcaaatgcttcacctgtgccttcaaaatcgcctcctattgttgcaactgcttcaactctaggtgattcatcgcctcctcggtgtgaatcaaagaatgtggctgtcaagaaagcttcttcttccattcccacttccagtaaaagggctctcaaaacactggctcaaaaatcagtgagaccgtccgattgcccaaatcttctaggtctgattcgaagtcttcatcatcgactactaaggcatctccttctcatgcctctgagtctcccctactgcaactattgttgcttctgtagcatcaactccaaagggcccttcctctcagaccagtgcctaacaagcttctcttgagaaggaagctcgcaccaaaaggcgtcatggccagcccattcttgctgccaaaaggcttaaaccaaatcctccctcggcctcctcaagttctgatggagaagaagagcccatggaagtgtcatctgacgactacgagaccaaaactgagtctttttcctctaaaaaagaaattctaaacgatgttgttgtctcctctgacagtgaggaaactgatctggagcctgagccatccttgccaaaatctgtagcagcaactcctcgttctgcttcagcagcagccaagggtaaatagcccatgaagagcaccttgtctggtaacctctcttcctctcaagctataaattctagattttttttttataatgataaccagcatgattggaatttatatgcttcccgtacgtttgagagtgaaagaaattttgatttacatgctcatagtcgtagagtctatgacattgtgaagtttgttcaatatcatcattggaaagatactctaact

SEQ ID NO: 95339 - DNA, 508 bp, Cannabis sativa
tttacccctcgtggatagctaatcctgttctcgtcccgaagcctaacgaaacttggagaacttgtattgatttctctgacgtgaataaggcctgcccaaaagactgctttccactactcaggatcggccatttagtggatgcaacgactgggcacgagcgtatgtcatttatggacacatattctacatagaaccagataaaaatgtatatcccagatcaagaacatacgagcttcgtaaccaacatgtgattcttcatctttagctacacaaattaattgcctcatctttagtggctgcaagaagaaccacgaactatcagaaacattgcctccccctgacttagcgggcttcgatgacggtggaggagccatttccttctccagcgcctgaaattgcaaatcaaaaacaaaacaaaaaaatgaaatcataaacgctgaagagagggaaacacgagtgagagagagagagaagttccaaaaggcatacctttatttttacgggcgtc

SEQ ID NO: 95340 - DNA, 531 bp, Cannabis sativa
aaaaaaaaaaaaaaaaactacttctaaatgtcaattttcaatagacgggtatttttacaccatttagcttcccttattatataacttgtaggaaaaaaaaaaaaaaagcctccaaaaggttgttttttagtagtgaagttgcccaatatacccttaccctctacttaagtctagcacatagtttacatcaacttaaggggtttaatggagacatcatctataaaagtgggtatattcaaagaatatgaaataaggtaaaaattagaatgagtaaagtaaaatgagtatacaatataatgtcccctataaatattgatacattaaattggattgtagtctaattggtttttttgttgttttaattagaggaatttacactcaatttgaaattttaaaagtcgtttacttaaatatggcatttttaggttagacgaatttatatagtgttttttttttaggtatttttatagtatttgatatgtcatatatatatatatgtaaattagattttcaaagctcatatttaatatt

SEQ ID NO: 95341 - DNA, 851 bp, Cannabis sativa
aataataataattacaagaagaaacttaaatacacatacataatacaaagcatataaatataaaaattaagttatatttgacttaaaaaataattttatggtatttttatatcaaattttactattgcactttaatacataattataaattttgatgtaaaatttaatatgttatttattacctacttaataatttattaaaaaatataaaataatactaataatacaaaaataaatataaaatttactaataataatataagtcatttatttattaactaaaattaaaaatagcataacggtaaataaaaatatagtatttattgtgatgcaaattttacatcatgctatgttgtgatttaaatttgaaatactttttgttatgtgacattggatcacaatttagcaatcattggattaaagttttaataaagtgagttatattttgcatttacatcactcatttacatttccattgaagatgctctaagtattgattaataaaatattaattaattatgatttttgtcccgaattttgatatgtagtaaatcatgttctcttaaacttttgaggtagttaaaaattctccttaaattattaaaattgtcacatttaagaatttttgttcaattttagtaagtaaagtttgaaacgtgatttagtaaatgttaaaatttaagagacatgattttgtagatattaaagtctgggagtataatttagtacataaataattctcgaattagtaaaattgaataaaattggacaaaaatctttaaattcaaatttcaataattcaaaagaaatttttaataactaaaaaatttcaagaacataattttgtacat

SEQ ID NO: 95342 - DNA, 633 bp, Cannabis sativa
aaacccatcgttttcaagaagaagttttggtatgaaaatgcgtggtcctgggagcctatgtgtagacaaattgttcaagccaattgggatagtattcccaatagtactctaaatgtgaagcttcactcgtgcagtacggcattggccgaatggagcagtgatatcactggtacttttaataaaaaaaataaagacttgctacaagattctgaaaaatctgaaaggtaggagtgatcaattggctgtctcgaaatacaaggagactcaatctcagctttgtgaggctttaacaaagaaagagatcttttggagacaacggtctaagcaattgtggttacaagccggagatcaaaataccaagtattttcatgcttgtgctagtaatcagcggcagaataatcagattgttaaacttaagaatagcgatggtgtgtgggttgattgggatagtggtcttcgggaggttatggtaaagcactttactaatcttttcactgcttcgagatcgaatgggcatcgggttattgactgtatcccggtcaaagttaatgctgatcaaaatcaagatttacttattcaagttgaggatattgaggttcgaaaggctctttttcagatgcaccccgacaagtc

SEQ ID NO: 95343 - DNA, 529 bp, Cannabis sativa
cagtcgtggtcctaattaacattgtattgggacagaaaacacaatgtcagttgtgtcataaacttgaacacacagctaagcaatgctttcataggtttgataagtcatttactagtcctaaatcatttcaacacttccctagcagcgctgctgtggctaaaatgctgttaggctatttttagcatagttttcaggtgttaattagagtcgtttttgagtcgtttgtgatgctttaggaaaacattatgcttattttttatgttttcaggtgtcctatagctgttaaagtttggggcttcaaaagtttgataagagaccaaggcgagtgaagagaaattgaaaaagcagcattcaacgcattcttcactgcgacggatttattcatggtcgtggccaagatttggcagaatggaagatttttaattggcccagtcgcacggcgaggccaatgctagccacggctaaagcaacactcgctgcggtagatttattcatggccgcgccgagaccttggcagggagcattaaaa

SEQ ID NO: 95344 - DNA, 515 bp, Cannabis sativa
gttaagcaagccgtcaagaagctgtacaaccatgtctggccaaccaagggaagtacataggtcggccaggagaagcttgcttggtcgaccaaggtttgagcacaagctggccgaccaaagggtgactgtcaaacacaaaagggcctatttgaccaaggaagcctgaccctttcaaggaaagttgtacaaaggctagcccacagttgccaaagttggcaggcacttgttgtgcaacctacatgctagcaaacacttgttctgcagcatacatcctagccggcacttattgtgcagcctacatcctggcaagcacttgttgtgcagcctacatcctggcaggcactgttgtgcagcctacatgttgggaggcacttgttgtgcagcttacatcctggaaggagtacaagtcctgaattgagcttcaacaacccacgaaaataggggataaagatcagttatttacctatttttgggggttaattaacatataatttagttattattttattatgtaa

SEQ ID NO: 95345 - DNA, 1180 bp, Cannabis sativa
taggtgcgatttggttggatttgtattttgctattgtgatttgatttttgttattgtttttagtcttgcctctacgttatgatttttaagtgttttaatcttgtttatatggcatgattatagtgttttagtcttgtttgtgtgatatgattttgtttcattgttagttcttttttgttcttcaatgactcaccatcaaatcgtttttagtagtatgaataataaggttgcataccttgcacaataattgagtgttcaagctacgaggttgaatgaacttgttgcaatatgagttcatactgttgtgtcttttaagaaaggtggatgaaattgaatatgtgttcttaaggttaactgtgatgttacaatttttttcatctaattttactttagtttttttatcaaattaacaatctagaaattagacaactgattatttaatttatttttttttaactctaatcctaaatgtttctccaacaaaaagatgttcggattaaattatatgttattattttacttaattaatattaataaaattacataatttattcaatatatatacacataccactcttccaagaaacctataaatgtgttgtattcataactattcaatgtgtgatattattcaccatcacaataagttgagaattgttattaaatatcataacacctaatagatttctgcttatgcgattcaatattaaattatactaataataatatgacacacctgatgatattgttaaacacaccatacgtgttttttaacatgttcgacaccttaagataccgaaatttgaaatgtaaaatcatgtaacataggtgcagcaaatggagaagcgagacaagtagtggaggtggaaatgagcataggaagtgctcatgtggagagcactgtagctgcaacccatgcacagtgctagagctggtgctgcagctgggcttgtcaagcctcgttgcacttgtggtcctggttgcacttgcctcacttgtgcctcttgatcatcatccaatcttctctataccactatatatatagatatattatgtatttgaaattaatataaataaataaagaaaaagtacgtatagtaattaaaatggccaactatacatagttggtgctggttatttattattattatccttattgtacttaattggttggttgtag

SEQ ID NO: 95346 - DNA, 508 bp, Cannabis sativa
attagcaaaagctgcaatctcccctagaacgttaatatcaccagcaacatgtttccctttgttaaagatgcacctatcccgttctagctcctctaaaattccccctagtatttttcttttttttttcaattcattttccccatctaccttatcatcacccatgtcaagatacaaggttatcttccaacctaataccacttgaccccatcagcccaacaatatggctcaaatttgaggagcccaactcattagagttaattgggcccaattgttctagtccatccctatgacccgtaacccatttaaccccactatccttcccataactgccaattccaccatgtccttcctccaaactgcttcccacattcacgaaatttccaacactacgcttcgtaaccccagcttctgcccgttctccgaccaccacagcgccaccacttcccccacctgccaccagctcaaccgccccatagggtaaatcatctcttccataatcatcattggc

SEQ ID NO: 95347 - DNA, 824 bp, Cannabis sativa
  modified_base (730)..(749): a, c, t, g, unknown or other
aagttggaattcgatcttaagatcccaattcattttttacgaacggttaataatttttttattaaattaaaatatgtaagatttgatattaaattatatcaaattaatatcatcttataatagctagtgttggacattatagatgttctttgacaattttcaatttttttagtgcataagatttgcacaagaaaataaagctcaaatctttgagtatatagggtaaaatttgaatatattaataaataaataaattttgaaaataaaaataaaaataaaatcacataaatacataaatatcatcaaaagaattatttttattttgaagaaaatagtgtagcttgtcctctcaatttccatgagaaattcttttgtcatttaatcttgactaagcattgctttgatccaaatacttttattatctcctaattttaataaagtactaattaatgtaaaattacatcactttaaatcatcaatacccaaattaaatgagtgtttggtataaacaatttttggccattacaatttctaaaataaaataaataaattcgtaccaaatatatattgtaaggaaattacttattaatcttttaatattttttaaaaaataatatttaaaaatttaaaaatttgaggaaaataaatatataatttaataatattaaaattgaacacattcccaatattaaaaagaacaataaaaaaataatgggtgactattcaatgnnnnnnnnnnnnnnnnnnnnatatggttacattttttttttacctgcaatagcaggttaccaatagataaaaattctatttttagaattaattaa

SEQ ID NO: 95348 - DNA, 1624 bp, Cannabis sativa
ttaagaatgtggcataattcttcctcctctgtctaacccagtttacccgcaagggcattaaatatctgtccgccctcttcgtcctctatgcttccctgaagtgggatatgcctcctccccgcgaggttaactagtgtttttgattagaagtccaccgctaagaaaggcaggtcggggtacttctatttctctcaaccagacttcaagtggttgacgggcaccgaggattcgcccatcaacaaaattgggcattttgttgatgagtacttcatggtggatggcatgggcaccacccacactcgatttcagtagatccccacatatcaccgccctcccctcactcttgctcttagggatagagctcaggagcttgctcagctgccgggggatgactggaatatcatttagtagacctctgaggaaaactttatgaagtacgggttctatccgaaggatttcattcctaagctagtgaaggggaggaagaggaaatctgggctggccgggctgagggagctgataaggagaatgagctgattcaagtgaagcgtgaggcttagttgaagggaggtgcaagggccaagcagtatgctcaggagcccttgaatcctgaagataaagctaaggaagagtacgtgactccgctcaaaaggaggaagaaacattcggcccaacccaggcccattgaacatgcaattcgcattagggagcctagttcacctgctcggccaccttctcccgtgctaggaaaagggaaagctattatggctgagataagagacttgtcaagtgatgatgaacttttgagtcctgctcgggcaatcgtcttccagactactccgtcttgactattatgctttatgcttctgatgtctttttcctctaaccatgttctttttgttccatgcagacatgtctcagaagatgcttgatgctctcaagaagagagttggaggaagctcaagcgcatctcctctggccaagaaatccaggggcggtgaggcgaccccttcaaaggaaaaggcaccagctggagaggttattgacctttctgaggagctaactattgcgaacctctctactcaaaaaactattaagtccaaagattctcgaggacgaagttcagacaggcctaagcaatcaaaaggtggatctgagctggccaacagtggatccgagcagatgcgggctcctactccacctttgccagtgcttccaaaggccaagaaaggcaacaagatgctcgcccattacatgaattggttggttcctgaggttagtgagcaactgcctggtgctggcaacgactcttctttggagctgctgatgggaggagttttgaaggatgtcacaaagttaagtctttcttgaccgtttcctttaatcctctttacttggctcaaattgtaacgtttttcctttgtgcaggttggtctgaagttggcttaaacttactcccaagctaagtctgctgtttcttgaaacgcggctttgtccaacaccatgcgggaagaggtggacctggccaagaaggatggcgatgatgctagggtggaacttggagctgttcggatggagctaggtgaagtcaacaagaaggtttttaatgctcagaagaaaataa

SEQ ID NO: 95349 - DNA, 614 bp, Cannabis sativa
  modified_base (567)..(569): a, c, t, g, unknown or other
tcaaaggaaaatctagataggtagattttcgagggtgtgcattttctctccagcccccttccatggcgaagaggcgacgagagattcgaaagcccgttattcgtgagttgagtgtggaatctggaacaagaagtgaggaagatagtcgacaggttggggtcgatattgttactgaagaagctggtgttgcagatgcgattgaggaagaaggagaagcgaactgggagaaagcagaggttgacctaggcgatgggcaagggcttaacgaggatcaaacctgggctgataaagtggagaccgaagaccttcagactcaatctcagagtcattggaggaaattatcggccagtaatttccaggaccaggaaggctgactgagatttgaagaaccaatgattaaggaaggcattaaaatttcccaaattgatgaagaggaggtggttatgcaggcggcaaactggagctctgcaataatttgtatggtgctaggtgcgaatccacagtttgcagtatttgaaggttttattcgaaggatgtggggaaacctggggattgctcagattgtgnnnatgaatggtgggttcaccatagttaagtttaacgatgaagctact

SEQ ID NO: 95350 - DNA, 550 bp, Cannabis sativa
ggtagccagagttatgccaccaacttttttcaataggttctgtttatggtgaaatagggtgaaaacaatactattttagtgtatagatttatgtatcgaaaattaaaaaaaaaattataaaaaaatgaggtaaaatggtgtgaaaatgaggaaaatatgggtgttttgagtggtggttggcaagaatttttggtggtgggtttcaaattttggtggttgttgtgttcgtaatgaagaagacgaagtgagggatcatctgctgaaagcgtttgataaatatcctctatgacgtcgatttttatcaaataactgacgccatatgctaaaaacgtaacaacatgtgtcaccgtgtcatatggcattggttatttgataaaaactggcgccataaaggatatttctggaaatatatattctgatcttaaaattgactctaaatggtacgtaataaatgatatagctacaatttttattaaaaattacctttaaatgttaattttgaaccaaacagatatttttatactctgtagcttccatttttataaaaatt

SEQ ID NO: 95351 - DNA, 983 bp, Cannabis sativa
tctcagatttcacattgaaatcataaaacatgtaattaatgatcaagcaattaaatataattaagtacgaatgaaatagatgcacataaaaaattggaaaagaactaaatcacattaattaaaatcaaaataaagtgtcaaacaatcttcattaatgcccttataaaaagtctacctactcataatcattgaaaacatctgataacaactaagtaagaatataagaaaaatagatgagaagaaagaactcttcgaaaaataaatgttgaaagtcttcagagtcgcttctcgcttctaattttcgtactccttaatcctttgctaaaaatgatcctttatacagccttttaaaaagataaaaaccctaattttcgcactttaaaagaggcgggcagcgacaccagcacttgaagctcgattcctagtgcaatgactgataatattttggtcataactctttcaacattgctcgaaatcggacgatttaatatgatttggaaagatgaaagagaaatctagaacttttattcataacatttttcgtcaaagtgaacgcatcatagtcaaaaattcgcttgaagcattagacttgattttcgattacaaacagatcgtcttaagcatccaaaacttaaaatttttcatcacttaaatcttagaactctaaattttatgataattcatcatattcatttcatttaatatgtttctttttattttcaattcacattatggattttaccatttaagcctgaaacaaatagaaaacaagtgtaattctgcataaatgaatataatcaattgaaacacacctctaaaatactttataaagtgcatctaaaattagtctatcaaactccccaaacttaacatttactcgctctcgtgtaaagatatacactaaactaaaaaatacaaacacaaagcaagccttacttcaatttacagcacaccatcgctactcacatgattcaattgttata

SEQ ID NO: 95352 - DNA, 827 bp, Cannabis sativa
gtagtagccttgtcatcaacagaaactgaatacatgattgctgcaaaagccatcaaagaggttatatgtaggttgacagagaagttaggttttcaaatatgagaatatcacagtttaatgtgacaatcaaagtgctttgcatctcatgaaaaatctaatgtttcatgtgaggtcaagcaggtggaagtgaagaaaataatcacatatgataaccctacatatatttttactaaaagtgtaactaaagacaagtttaggcactgtctaaacttattgagcattcaagacatttactgtcctcactcatttcttttggataagagatcaagtgggtttaaccaggtagaattgttgggaataaatccacttaatctgtcaaactcagtaggtctatctattcacccatcagatgaatttgaagaaagttgttgttagttttaacaattagctttaatacaaaaggggaacccactaataagtataaataggaatatctctactctttcaagagagttctgatctccaatctcccagactcatactttagattcagagacaagtttagagagagagtccaaaatcatagtgagtgtgtgtgaagggatgtaatgggagtatcactcttgaagtgattttcctcaatatgagatatttctttgtattcattcactgtgttgagttttattcgtggacatagtctattgtgtactagtgactaatcaagcaataaagatccatgattcattcattttgaagttaagtttattcttatctaattcaattaagttctagttttaattttataatttgttctagtttgaattgca

SEQ ID NO: 95353 - DNA, 1069 bp, Cannabis sativa
ataatttattaattacttcattcatagttacgttgtgacattaaattaatctgatcagtagtaataataattaattataaattaatctcagtagtaatttattatcgtgatcataaactatcactatgtatactattataagcaaatttatataatatatatacaatagtaataagaaagaataaatatatatctacaattatttatactataaccatccttctcgagttttatctttgatttttcttttagaaaaaaattgaattatagaatagtgttgtaaatgtctcctccattattttgtttttttatttaaaaaaaacttgatggtgtaaatactattgtggcgttaaagtgtaactcaagagttcaattaaaataaatatgtatgaatatatagtagtttaatgaagaattttgcagtataatattatttgtatatttaatatcaataaattagatttggctaattttaattaaatattttatcaataaatagttaacttaatacattcgtcttctaactatatctttaacacatgaagaaaattgttataaaaaaaagttaattaaaattcttttccctaagaactttgatgacatgtactgaatattattttttgaatttttcagaccatccaaaaatccccacatgctattgaaattattggatgactttcgtctagttccatttaattttactaataaatgtctaacgcgttgattgctcatatatgtactgaattgtatttattgaactttaacatgtattaaatggtaccatctgaactttaaaatgtactaaattgtgttctctattataaatattgaacgaaaatttttaaatctaacaattttaataattttatgggagaatttttaatggcatataaaattgacacattaaaaaaaaaaaaaaataagcggcaaagttttacaaggatcatatctatatgtactaattatatatagtaatagtatttttagtagataattttaattctattttttttgcattgtgacaatgtgtaatatagttataggagactcataaatttaattaacatcc

SEQ ID NO: 95354 - DNA, 800 bp, Cannabis sativa
gcttggagaggtcccaactagacatgctacttagaaacaatagtttcgaggaattattcgttctagacttgaaacccagaacaatgtacaaagggaaacgacacaaactggaatttgacctaaaacctcaaggattttgggcgaaaattaggctagcacatctgatgaaattcctaaatgcaaaattcgagaagtaaagcaatctataactcctagacctacctacggtggtgtttgtacagacgggaaaaccctaatttcatccctagacagagcatgcatatataaattaaagcgacaagttcataaagtacaatacacaaataaaaaggacatatctgatgaagacaaggggaggtttaaggtgactgttgttgggtttagcttaggaagatgaccacacctctcttgaagacgagaaacggaggtgatcagcgagtcaatttcctttccaaagtccagacttgtgatttcctctatagtagcagtcctgatcattagagatggaagatggggatattctcgagccctaattcttagcaataggcgaaggtagtaatctattgtgtcctccaagatgattcaccttgaatgcgattcgaagctttaaggatggtagggagtctgatgcgatttgagagtttaaaaatttgaaagagaaagtaaaagtggtaactgaaggttacaaagggtatttataccccaagacgatgatccacgtgaggaaggagtggatggccacgatcttttcagaatgaagtgtaatcctcatccaacggttatggagaccaaagatctat

SEQ ID NO: 95355 - DNA, 803 bp, Cannabis sativa
atagcattcgcgagccagcatttgatcacctcgtactactcccacacccattagtgtttgaaacattagggataagtgcttaattacactaactgcccctagtccaattaacgatggtcgtcccagcagcatgttgtaaacatatggcaagtcgacaaccaaaaagtctcacattattatggtggataaaggtgcttcgcccaatgttaatgggagctcaattattccttgactggcgacactgtcacctttaaatccacacagattgaccatgcaaggtcttaatctagctttttcaagtcccattttcttaagtgtatccttataaaggatgttcactgaacttccgttgtccaccagcaccctctttatgctcttattagcgagttagatggtgattaccaatggatcgacgtgaggatacctcacgtatttttcatcttcctccgagaatatgatcggaggttcttcagtttttcctttctttgaaggtttcggagcaaaggcagactgcacgttctttacttccttcacatgtttcttttgggcattgttgctctttcctgcaatatgtggccctctcgaaataaccaggatatcctctccttcaagaggaggaggttgtaatccctggttgcctgcgttattgggcggattgggttggttatgtacattgccctgtctttcacatattggttgaagtggcctcgcgcgatgagactctctatctcatccttcaattgacgacactcgtctgtcatatgcccaatgtctttgttgtacttgcaaaatttggttgcatc

SEQ ID NO: 95356 - DNA, 692 bp, Cannabis sativa
tgaatgatatacagtgatgagagaaaaattaacttccacaaggtcagcaaatatttcttttcatgtctccatactactatatccacaattagtaattgaaaacagaggtcctaaggataagcttaccgtcattgaccttgtgactgacgtacagtcattggttgttgtaattctgttattttaagtgaacttgggtagcaatagtagaataaaagtttaggaaattttattttcttttcaattatttataattataaaacatgatttaatgaagtgtgaaaagcattttgatgtcaaaagtgagtttgtttgaaagctaaatttctcaaaagttctatcttgagacaacactaactcaaagtctacacatgcatattatttggtatcagtgccaacctacataaaggaagcaagtggtcatggagcccaacccaagtgcatacaaatataacagaaatggtaaagtcgacgagcctaaagaaaattaaatttactgtgatgcaaagttaaactcatcatcaattagacaagaggattaatagacaactgatgaagtggttctaatttctaaagagtaaagccattcaaggaaagcaacatatcaactacatgtgaatgcattcaaaataatcaagatcaaggtgatgaaaattttcattaagaatcacgaaaggtattactttcttttaaaa

SEQ ID NO: 95357 - DNA, 998 bp, Cannabis sativa
aaatttcaaggagattgggatctttagggttttttttttatatgatggatagaagaaagtaaaagagaatagagaggtgaagagataaatcgaggcaatttcggatctgaggggaagatattgcatttaatacaataagaagaagaaaagacgcgtagactttgggggttaagaaggctaaaggcatcaaatgcacaattaatgtgctctataatggaatgattacttggaaggggaaaaaggagccatcggaaaccaccactcaacggctgaggatggaccaaaaacccatttagggtaccggagggaggaacacatgccagactcttgcatattctagagagctccattttttgttttttaagctcaatctccttatatatatacaatttgttatctggagtgagaaaaattttgtttgaaatgttagaagtatttttggattaaaagataataaaagtatagagtgtaaattttgaaaggagtggtatattaagagaacatacaacatattcatttatcatattttcctttcaaattacggattgcacatgtatcttagaactaaattagattaatgtctaatcgagagttttcactttattcacataaggctttcctaattagctacaacttttatattaatttaatggtagtcaactcccaacctctctagactctttgactgctccctttctctctctctctctctcaaacatgcagatgaacagggttcattcaacttcttcttcgtgttcacacttgcgcccagaatgtttccacatggtgaaactgatcctaagccccagatctagtgatcacggtggctctgactcatcatcaaacgagacccaaggcagctcgactaacccaagctgttccagttgcatcacacagggacgccccaaccactcgagtcgcatcagtattaacttcggccatctccccaaacctccgacctgtacggacattaatgaagctcttacagatattcaatt

SEQ ID NO: 95358 - DNA, 672 bp, Cannabis sativa
atatatatcattgagatgaaattaaagctgtagattcaaataatgtgaatatatatatatatatatggtggctggaacaactctgaatatccacatcaaacgacaaacgatttcaagcatgcatgcaacaacaatcctaccagataccaagaaagcacaccaacccctaaataaacttaattttcaagaaacaaacagttcctattttcttattatgaattaatgagtcgagtcacctctctatgtttctagggagagtaccagatttttttaattattgccattgcaaagctttacatggtatcaatcgccactcactcctctcacccatggcttcacatgacaacaactcctccacctctgaatcgaacagctcagtcatggaatctgtttgttcatattcactttctgcatctctcactgtgagattggatcgcacaaattttctgacatggaaatcacaagttgttccaacagtaatcgaacatgaccttgatgatattctctttatcggtgttccacctatccctcggacattctaacaaagaatcttatccatcaggttcgggaggaacttcccctccctcacctaaatggaccaactcacatagcacatgcatgccctgcttacgcctcattatcacttaaaactttattgcataatttcataat

SEQ ID NO: 95359 - DNA, 735 bp, Cannabis sativa
tttttttgtgcaaaaatatagtttattgtttttgaaaattttgttttattaaaaaattgagaaaaaatattaaaaaatatgagaaaaccacgtaaaggtaattaatcaccttatagtaaccagaaggctgagtaactagatagactcaggatttaaagtaagggtaacattttttttaaggtagggggcagaaataaataataaaataatttttttttttgacaaaaaatatatttttaatttaatttgaatccttgatctctattatatatatagaacttaatttaattattacactaaagtattatatatacagatattattttttattataaataaatattgtaatttgtaactaattaaaatatatatatatatattttttttccattttttaaaatcccttgttacttttatgtaggtccaccccgacaaataatatgaagattggaagactaaataatattacagtagatatatattaaaattaattacgtgtgaacaatatgttagaatcatcattctacatgaatatcatgctataatattttgaaaacgacacaagtacataggttcaactcattttaggcaatattattaggctaattagctacttagcgtagagaatatgacttgataataagatcatgtttattatatgcttatataattttatattgttacttaagaagtatatatattaaattattaattaatgatgagtttggccaacat

SEQ ID NO: 95360 - DNA, 953 bp, Cannabis sativa
cccaggaggattcccataatgagaagaagcaggacccaaggcttggctctgattatatcctgaggtagtggagaattgtacaccgctcattggtggagtagctgctggtagggttcttgggagctgaactccgggcgcataccctgctactccagtcggatagtatcccccataagccactatttgggcctcttctagattgatgtacttttggactctcttctagaaatcttgaaggttggaggctccttcttgctataactcgttctagaatggagtccctgtacggattcctgcttggaggagtgtaagctgttgtccgtcgtcaactttcttagtcttcgaggcttcttctttaaacctctttatgaagtttttcaatgtttctgtgggcagctgcttgatgttagtcagggtgctgacctcaagattaacctttctcgcggcgacgaattgcctctagaaactgacttgcagcttgttccagcagtctactgatcctggttccaacttcttgaaccaatcttccgcggaccagctcaatgtcagcaggaagcacaaacatttggcgtcaatactgactctcatgaccgtcattacgtggttgaaccatgacaggtgatcgctaggatccaagttcccggtataggttgccattttgggcatcttaaaatttttgggaagctctgcttccaggatgtgcctagcgcacggttcccgatcctcccagtcggagtctgaatcgtcacctttttttctctgcgagactcgtgtaatgtctttgcacaatatggcaagctcagccataattccttcgctcagtgctcccgcggagactgctggtgcatgtttcttttggtctagatgatcccgtaggtcaccaagcctgtcgttgatctgatgtcttagatcgatgggagggtatctcgggttccttcttcctttctccccag

SEQ ID NO: 95361 - DNA, 600 bp, Cannabis sativa
tagttagggtgttacacaagtggtccagatcgtatgattttatagtgtctgggaagagcctagcaggaaatccctagcttcggaggaggttacggagtgaagaagggctgtgagagaataaacaactagaatctcaaaagaagaagatggaggattggggtaagacaagattagggtctcggggcttagaaggattagattacagggaaatggaaaaagaaagagaagaaaagaaaaaagaaaaaggaaacaagaaaacaaaggcagaagaagtttaagaataaaaagaagaagtggtctcgcatatgaaggaagaaggagtaggaggaggaacgggggatgagggtctaaaggttccagaagaaaaagcaaaacgaaagagaaaaaagaaaggaaaaaaagaaatttttatttttattttaagggaaaagaattttttttatatatttttgtaattttattatttttttttactttttaaattattttatattttaagattattttaaaataatgtagaccacttaaattctatcacgtgtacatttgtgtatgcattagcagtacacgttggtatttatcagagctttttaaacagaa

SEQ ID NO: 95362 - DNA, 1090 bp, Cannabis sativa
  modified_base (433)..(433): a, c, t, g, unknown or other
tttagaaactccaaatcgtacgtaaatttgtaaatttaaaaatttaaaaaaaataatatatggaataattctcctttaaattataataaatatatacacttagtaaaaatatctctaggactaaaaagtaaataaaaatttgtatttttcaatttgtataaaaaaatatctataaatcttactaattaaaaaatatctctaatgaaatctaataaaaattttaaaaaaattaataatatataattaataattaaattctttctccatctatatatttaatattaataattaatatgtgtataatataaagttataatattttttttttttggaaacagttataacaatattaaaatataagtttatttaacaacacaattttatcaatcaatcatcaatatatcaatcatcatcaatatcaatcaatatatanatataaaggagaaatatgagacggtgacgtgacacactaaaatttctctaattagcattatatgttctctccttaattttctcattcttttaattttttttattaaagtataaatcaataaattaatattttacaaattattattaaaataactatatatactgtatattaattttctagcttattatatatatagaatgatataatacaaattattattaaaataactatatatactgtatattaattttctagcttattatatatatagaatgatataataaccctaaattaaaccacattataataactctacgaaagctaatgatatgtttgatttgtttgttgcgaactcagtatggcaagggagtagagaatcaacatctaaacccttcacctctggttgctctcagcattcttaagcaaatcaagaatgaacttgcactttcacctctggttgctctgagcattcttaagcaaatcaagaatgaacttccactctcagcattctcaacatctactaatgatactgcaaccgccattaatagaaagtaagcgaattgaattatataatattataggaaaattctataatgcactcccttaaaagggatacatccatacatctctatttattttagtatccgaaataatttt

SEQ ID NO: 95363 - DNA, 828 bp, Cannabis sativa
ttgaccctagacccaaactcgaactaagccctaaccacagctttggaccccgaccgcgaaacccaaaaccaaatctcgatcccaaacctggaccacaaccccaaagctagctacttgcttgttaaaggtgcttgcacaactccaaacccaaatctcgatcccaaacccgaaccacaactccaaatccaaatctaaacacgacttaaaaaaagtaaaaataaaaaataatatttataaaacaccctttatatattgctgctagtaagtgaataaatcaagttaaaaaaaaaaactataaattaataatgttaaacattccttttttatttggtaattaacaactaaattcatgttttaattttatacaattaatctcttgattttttttttgttattctcctctaattagttacacttttctttacaaatttaaaatcacgtcattaaacattaaataccaattagattgtcactatatacaactatttatatatgacatgtttttattatcttcgagattatacaccacctaaaaaggttgtttcatagacctccttatctatttcagcattcaaaagagattttaatttaatttttttttatgatagtatatgttatagttatttaagaccacttatatatttttaagagattctaaaatgtttaccaaactaaaattcaaacatttacttactacacataaattattcaaaagtttatgaaaatttaagggtttgattggtttgagatttgaaaattgtgttttctaaaagagtgttttggaaacaaaaatttgaattttgtaagtgaaaaattatttttaaaaat

SEQ ID NO: 95364 - DNA, 825 bp, Cannabis sativa
  modified_base (585)..(587): a, c, t, g, unknown or other
ttccttgtaccattgggagaattgaaggaataaatgcgctttgtgacttgggagccagcattaacttgatgcctctgtctgtttttaaaagattgcaattgggataagcaaagccagccacggtaactctacaattggcggatcgatcactagctcatcctagaggagtcattgaggtggtgttagtcaaggttgacaagtttatttttccagctgattttattgttctggatatggaagaagataacaacgtcccaatcattcttgggagaccattcttggaaactggccaagctttgatcgatgttcagaaaggtgaattaaagctgcgagtgcaaggagaagaggtggttttcaatgtgctaaaggcgatgacttacccaaaggcaagtgataactgtttctttgttgacctgattgacataattgtgagtgagaaaaagttgatagatgatccttttagaactgagtctaattgaagatgatttgacggagcaagagggaaaagaagcaatgggttatgttaaatggcttgattcttatgggccattgaacataaagtattatgaagagctgggagtagtnnnaaaagagcttgtgccatctactgaaaaacctccagcacttgagttgaaggtgcttcctagtcatttacaatatgagttcttgggggaggataataagcttccagttatagtgtcagcctcactttttgatgtgcagacggacatattgcttagagtacttcgggcgcatagcaaggccattgcatggacactgggtgatgtcaagggaatcagtccctcaactgtgatgcatcgaatt

SEQ ID NO: 95365 - DNA, 532 bp, Cannabis sativa
agtcaccttcacaaaaccttcttcgtctatctcaactttcttcctgttgtcctgtttcactacccattgtggcttcccattagagtgctttctgcattcagccgctgtatgtccaagccaagaacaatgggaacaaccaactggtttccattcatacttcaaattcactttggtagatgaaccaaactcattctcaaattccagaaattcttgaaaatttcgaaccatcattacctcaatcatgacccttgcatagctcaatcgttctctctccctagtaacctagtcaagcataaccaatttcccaatctgactaacaattttggacagagtaccttgtccccaatatttcaactccaactcctccagttgaatccatattggcacacacttaacattctctttcttgaaattttcatggggatcccaaggcgtcattatcgcatgccttctatgaaagaaaatataccctccgttcaagatctaatctctgaattctagagagcttaaccgaatgataaagactccatat

SEQ ID NO: 95366 - DNA, 1047 bp, Cannabis sativa
acctatttgatgcatcaccattagaaatacacttataaaattttaataaatgatgcatcattattatgtgagtgtcattcatatgaactggccaagtagcctgcaggtcaaaaattaaaatttagatttcatatggtgaatggggccccaatagacgactatagcaacaagtttaacaattatatcatgtctcttgttcgcaatacaattcctataaatgtttgagttcgaggacgttgaggatactgtcattcagaatatatgggacggaatagcggtaacattctaatttttattgtaatagatcaacaaaattattatacccaaaaaaaaataaatatatatgactttaatgtttatttttttccagatcaagtttgagttgacaactaataatcctatgatcgcaaattacgtcactaaatcaatgtcaaaagaattacgtgattagagaacagatacgaaaaaggcatggaaggagaatatttaaaaatatagggaaaaagaagcgaccaggagatcacgtccagatatggtgacatcggaggtgtgggcagaggttatcgcataccggaaagacccaaaacagtaggtattaattgaaagttataatatttaatatccattaacttatgattttttttctcaatttcctaaaaataaatttactttaaattacaagcaagagctaaacaaaatgtgaaaaatcgaggacagatgaagattcaaggtgatggggatctaagaccttaattggtcacattgtgagcggggtatgatattttcaatatggtaatattttttaataatatttttctaattttttatattgtataaaaataggttgtccccagatggaagaacttcccaatgttgtggatactcttgtaaagttccactgcaaggacaacaaatggcgtgagcacacacaataactacttgtaagtaattttatatttataataaactcgttgtatattttaatttttatttaaatctatcagtgtcataaatttttttgaaggccgaaattattgagattcgtga

SEQ ID NO: 95367 - DNA, 539 bp, Cannabis sativa
gctattggcatcaagctctctctgaaaagtttaacaattcctggacggatgtcccaaactaatgaagcgcaatctcgaaggaatacactatcctcaaccccttcctggagggtatagctagccttccagaattccttttccgaagttgactcactttccacgagacttcttctggatggacaagctaaccttctgaaactcctttttgaacgatgacttgctttcccgaagactcgacttgagacattttcatttggaggaacgttaccacaattattaattttgcaggtgtttggaggaagtacttataaattttttttctttttgataaattaaaccaaacatagcatttattcaattatcaaaattctatcatggggttaaggtttagtagctacgtactaagtgtaatataaacactacaaattactcaaatgagcaatgtggatcaacacagacacaaacatatatatttttttttggataaatcacaccaaacacagcacaaatcacacacaattataattagttattatcat

SEQ ID NO: 95368 - DNA, 998 bp, Cannabis sativa
ctcttggccttctaacatcagggaatggttttcgagctccaccaatagctttcaggggaaagttcttaattcaattgtgttggcgactttgtacaatgtttggatgaataggaactgttgtatctttgatatgaagtgtaaaacagttagagctatgagtaaggagataaagttttgtgttaaaactagatgtttaatgggttgtaatgggggaaaagggaaacttgatagacatattctcaatgtaattgcaaggtggccgtgagggctgggtgtgcggctgtctgttgcggctgctctgctcttgtgtttgttgctgtagcttttttgcttgtttgaataaagattttccttcttgttcaaaaaaaaaaaagtaagtgtttatattgattaagcaacatttttgttacttttgttactttttatttattttaggtaacattatgttattttattgtttaagatacttgacgttacctttatttgtagtaataaacttataaaatgtttattggcatataaaattttgtttgagtttttttatttgagtggaaagttcaattttttttattaaatatattagaaactagctaaatgattactttctcaaatactaaaatattcactttaaagttataaaagtgaaaaaaaaaagtctaagaaataaataattaaataagacatacattacattaacataacaataacaaaatctctcaaaaatattaaaaaaaaaaataaaaaaacaaaaacaaatagcatgataaaagctagtaaaaaagaacctaacaaagaaattctcaatcagaaaaaaaaaaattaaaaactgacgtgttgccaattgtgtcacttcattcgaaaaatgaaaagataaaatttttatttcaatatacataacataaaatgattacaaaatactcggtattctttcatattaataaagtaaagtacatttccataaataatttaaaaaaagtgtatcctcaagtaattttctc

SEQ ID NO: 95369 - DNA, 1030 bp, Cannabis sativa
  modified_base (41)..(47): a, c, t, g, unknown or other
ttaatgatttatcactttgtatatttttgattgcttatatnnnnnnntaggtcgtctattcatatattaggtttaagtattttttcaaaacatcttggtgtttcgtttaatactttcctacgaaatgtgagcccttagtattcagctttacacgtagcttatgagttatatctcattcacaacttttgattttcctttctcattaaaaaggttctttaattaaaaggtcattcacaattttttattttcctttctcgtcagaaaggatctttaatcaaaaacattaaaaaatttgaaattttttaaagtggtaggcttgcaatatatcatgtatttccataattattctggtgaatcatacatgtatgcccctcaagtaattttaaagaataacactttgtaattacttgaaagctgattaactttattaataaataaagttcaaaatattacattgagaatatgagttacagcatcagtttactggtagtagggtcgcaaatgttccacgttctagtagttctttatccgcgagccattcaaccgagccactttgtaaatcccggttcctactattgcttcaatcatataaggaaaagttgaatactcctgcaaatgcatctcttatatttgcaaatactcacctaagcaccaagtctccaacgttgaagagccactttttcacccttttgttgaagtatcttgttactcggtgttggtatgttgcattagtaatttgcgacttagtatgtttttcatcaagtagatacaaggataattttaaaagttcttggttttcttcttgattacaaaactctcgtctgtgtgtcgagatatttacttcaacttgcagtattgcctcacagccaaatgctaacgagaatggagtatgtccttttgctatcttctcaattgtcgtatgagcccaaaatacttgatgtatttcgtcgactcatctacccttggcgacgtctagtttcttcttgatagtatcctttaaggtctttttaacagcttccacttgtccatt

SEQ ID NO: 95370 - DNA, 769 bp, Cannabis sativa
  modified_base (383)..(386): a, c, t, g, unknown or other
tatctagagaaatcgtcaatgaaagtgacaaagttctcataacctcctctggcttttacatttagaggtcaacagacatctgaatgcactaatctaagaggttctttggcatgctctccctttgcagagaaagaacgcttagtcatttttccttctacgcaagattcacaaactggtaattcacctaagatgatgtttttcaatggacaatctttggttaacctgcgaagtctatcataacctatatgacctagtcgtaaattccatagatatatttcattattattataaatctcttttatttttatggtttctaggtttagcaatattaaaaagtttgttattaagtgcaattggtatatccggtctcaaaacataaagcnnnngttccatgtgagcaacacataattaaaagggaaatttttatatatatacattatatacattaatattacagaaaaaacgttatataaaaacaatccatgggtatgtcgtgacacgtcatcaagcataccgtgattagcttcgataattttggaaccaccggcaatgaaggagacgcgcccacaattccatatttctcgaccatctctgcgcgtggttctactgattaaaacagaaagctataaataccataggaataatacacgaaatcgaaaaacaaaaaccaagccaaacttgaacgaaaaaacaccattgacggaaaatagagacctcgacgaatctgaaaattagagaatcgatcatcatatctctcaaaactgttgct

SEQ ID NO: 95371 - DNA, 724 bp, Cannabis sativa
agcaaatctttccaagttatctgatccacgtgtcccctcttgactggtccacgtattttgggcaaattttggagcaacagcaacgatatcatcaccagctatatgccaacacttttggtaaaaccccggagtcataccatcgggtcttggaattttatcgggatgcatttgaagtaatgcctttctaattttttccctagtaacctcctcaatcaacattgtattttgagcatctgttatcaaagtcgggatacaatcaaccaccgctctgaaatcattagcagctggaagaaaagttgctaaaaataatcagctaccacagttggaagctcatcctcccacccgacctaaacaccctgtggattcttcaacttctgtatcaggttggttcttcttctcgaagtggctttatcatagaagtacttcaagttttgatcaccttcacgaagccataattgcttactcctctgcttccaaaaaatttctcgctgtaaaaggacattatttaaattcaattcagcagccttatagcaagtaatcgactgtgtatctcttcccctcgtccatttacaaatctcaactttgcaatctcgagttccttttttgaaattgcctgagtaatcttttcctcaatcaagtaacacttcaccacaacccttaactttctcaataatgttgctgccagcgtagcagtaccaaatgtcttcaacaatcttaaaataaa

SEQ ID NO: 95372 - DNA, 858 bp, Cannabis sativa
  modified_base (793)..(823): a, c, t, g, unknown or other
ctgaagatctaactatagagatggctgagacaacacctaatgccacttgaatgtgcgtccaagacagagacgacattaatccctattttggggaaatcaacttcagagttgttctaactgaggaacttagagaacttcccctcaacacatcaaacccgaccaaggttgtcaagattggagcaaacctgatggaggtcttgagtgagatgtccacaagctaaaggacaagtggaagcaggaaaccaaactcttaaggatatgctaaaaatgcctagagcaagcaaaagggaattggcatgaacaactacctgaattacaatggccctattgaacaacagaaaagacaacaacttgttagacaccctttgatctagcctacgagtacaaagccatgatacccatacagctcagacccccatcccactgaagacttacataccactagcaaacgaatcatcaactgttggacaaatccttggatggaatggaagagatcagagaaagatctaagcttagaaaggtggtgtatcaccaaagagtttcaaaacaaaacaactcagaggttaaagataggaaacttaagcctagagacatgggtgttttgacatgtattcttgaatacaatagatgcaatagcgggagtactcgggtctaattgggaaggaccacatgtcgtggttgaagcacttgaacccagaacttacaagttgacacactatgactaaaacttgaatccagtgctcgtaccaaggtattggaacatggtgcatctgttagaaattattttaccagnnnnnnnnnnnnnnnnnnnnnnnnnnnnnnnaacaacctaatatgaattctaaaataatgaaaaga

SEQ ID NO: 95373 - DNA, 532 bp, Cannabis sativa
taagttttgccacaaaattatttcttcgtcttgtagttgcagaagcatgaaaatatttgctattattgtctccttcttgcaaccatagttgcagaagcatgaagactcacattattagtatcataaaatatgaaagttataaaatatggaagttataagaaagtacaatattgatactatcaaataattcttattattctttttctctcttgactgaagactcggaaaaaacacatattcacttgatgttctatcatactatcaaattagtgtgcatccatccatctgaatcaatcaaaaataaacatataaatctaaatcaagtcatcttgttccaaaagatagaatttgtttttcatacaatgcaaactctaaatttttatttctttcaatgacgaaggcattattacaatttcaaaaagcttgattattttccaaacgctataaaataaactaaccatgcatgtaaactggatggcgctagagcacatcagacttcatgctctagaaaagcaatgcatcgcgcttaagt

SEQ ID NO: 95374 - DNA, 609 bp, Cannabis sativa
ttttttttctagtgtaactttattgagttataacttctcaattagaatataatttatttagtctcaagtgtattcttggatagagattctacggtattatcaaaggataccaaatgaatatgttccaagaattataaacattatgtatttaaatttatttttataattaagcaactaagttcgcggtgtagtctaattttttgtaaattatatatatatatatatatattatttttgttaagtgatataatttaaaatataacattttaatgtctgtattataaacaaaatcttaatattgaaattaaaaatataatcttaaaatacataaaaaagataataattttgtgactaatattaaatagtagaattaacaaagaaatcgcatgtgcttttataataaaataaagaaaaaagataatagcttctgaatttaataaactgagcttgtgactgatgatgtatttgagttgctctgttagtacttagttgctacatgggttgctatgtgaattttcgtaaaagtaccaaaaaaaaaactaatttgaaatgtaaaaatgaaaaaacccctaataataaagcatggataataaatattaaattgataaa

SEQ ID NO: 95375 - DNA, 639 bp, Cannabis sativa
agcatatctgatgctttcagaatcacttgtttaaatagtatatttttaaatgtgagaattgtatgggatacggggttgaagttgaagtatagaaagttaaatttttcatagaaaataaaacttctatttattttagaatattttgcggtataaatacttaattcctagttacgaataaaagtaattttttgcggtaataataactaaatattataattttacaacttttgtaagtatttgactgttaaatgttaactaaattgtcacgtgacaatccttgattggtctaaattattaatttttttttaaaaaaaattaatttaaatgtaccaataaaaatataacaagtagataataataaattgataactaaaaaatataacttatatattattcttcaaaaattaaatttagatatttatttacactaaaattaaacttacttatttatggcggtatagccggccttcttatttctcaagtctcaacccacccatcaacggaagtccccttctccgtacctttccgcgcctaagctgttcagtgtctgttaaggtccgttcaggtatttctttccctttactcttttttttcgaatcttttcattttctttgtaaatggcgagagaggatttctttt

SEQ ID NO: 95376 - DNA, 526 bp, Cannabis sativa
atatattacaattagcgtcgttttaaaagactcgctaatgtgttctctgtcattttcaaattgacgctacacatgttgctagtgtgataaattgacacaatacctcttattgttcacttactcaaatttcttagacccaagcaattcatttcgtgaactcttggtgtgcgattgagttgatcgaagaactctggcgattctcctccgccaatgcaccaaaccttcaaatccctccgccactccgtctcggtcggtcctctcatctctgccttctctatctcttgccaggttcctgtctcctctgccctttctttccctctcattccctctcagtcggtcaacctccttcttctccaatggtggtgacagccctttcgttcgtcctcatcatcttctccttaggtgagaaccatcgtcttcaatcatcatcctcaatatttttattcgctaagtataagttttaatctatattgtatataacctgtgtattttataatacctatttaggttaaatcaaattttattt

SEQ ID NO: 95377 - DNA, 626 bp, Cannabis sativa
atatatatatatatcttttattatattgtatgtgattatctaacgaaaattgttggtttaaggggtattttctttatttttctattaatgttaacagttaaagctaacactgttacatcaactaattaattatttttttatgaaaaatagttttaaaaaattaaatttaatttaaaaatatcaacaaaattagattatatattttttttatataaatcttaatttaaatttgaattagacgttaactcacttaattaatcatactttataataaatttattagttaattatattattttttttttttgaatgaaaataatttttattagacagaaacattcgctaatacaaaggccttaagagcaatgggagcatcactctcagtaaaacgacgacctgaccaataacaagcatcacgtgtcgtatagtgtgcggctttgttagcagaccgtttaacatgaccaatagaaacattagttaaagaagatacgataaattgacaatctttaacgaaaataccaaaaatagaaggcatagctaccgaactaagaatagcttgaacaactaagatgcaatctgtctctaaaatgacattcgacttattatgcctctttatccaactaagt

SEQ ID NO: 95378 - DNA, 561 bp, Cannabis sativa
aagcatggtagaaaatgtgtgtttaattgctaaagtttagtatagaaaaaatgcttattagcattattgtggcgtaagaattataatcggtacgatttgacgatcagtgaagtattgagcaacgtgtaatatctcgagattagtaaaatagattagcaaccctaattaaaataaattaactataattgagtagtcatattattatataattaattatataaaattatttgagaaatattttttataagaccctatttatgaattaggggtatttttcgtaattataattttgatgtatattatactaatagactatattattatacatagcatgttcatattgtcttagtgcatgtgattttaataagttggcacagtatagtcacattcggatattttgggctcgaactaggtttagggttcaaaattagtgcattgcgtgattatgtataacataatttatttgagaatatctcaatgtgtatatggaatgaaatgtttgaattgccctttaatgatttttaagtggaatagggacaaattggtcttttgaccaccttt

SEQ ID NO: 95379 - DNA, 709 bp, Cannabis sativa
  modified_base (58)..(58): a, c, t, g, unknown or other
aatgtaattaaatctgtttctttattgataattgaatagaatagattacattgaaatngagttttatttagggcacaaagactaacgtgaacaacttcaccaggatgcagaatctgactaagtggtgtcaacatatcacttaggcattaaaaaattaaagtttgggcactcagtgtcaacttggccatagggtgctgaacaaccttcagtaaaatgatcataactccctcaatattgatctgatttacacgattcaacttgtgttttgaaactatttcagagatccatcaagtcatgtctcacactcatatcgcaattctaaaaatttcaagtccaaaatttgttcttaacatagatacgattttttcagcaaattacttaaaaacgattcgatgaacgagattcaaatactgtagtcaattaactaatagttttgtaaattaacctataaaaaggcactcttaaaaaattaattgtgtatataatttttttataaaatatatatacaaatatgtataattttttttacctatcaatcaatatttttataaattttaaatgttttaatttaatctaattcgtaagtaaaaatatctacaattaaattaggttaaatattttatgaatactcttaaatttttttaaaaaaagaattaaagtcagtcagcatggtgccccgtcagtgaatcctgacacgtggcaatctaaa

SEQ ID NO: 95380 - DNA, 619 bp, Cannabis sativa
tggttagcattaagttaatggcataagtcaggtgcattcttatttagtcgctcgcgaagatcgggctgtcttcgattcaaattctcacgaagatctggttctctttgttcataattgctcacagatctcgtatctgagtaactctcagattgataacttctcgtattggtcatgctttcttgataaacatagcgtcgagatctgcttccttctcgcgtttgccttcctgatagactgtgtcctcgagacctcgagtgtcccgagctagaacttgcctcatcttgtaccagccttctccttcggaataggttagatacacgtcctctatttaggtatatgtatacaccttccctctcagatcgagaaggacattgggggtgcctaggtgatagcccacttgtcttaggttgagtcctaggatttctctcgttattacgagggatttcctgttccctagtttggggctgccttgtttcctcattcctgggagaagccactggtacattattacgttcattcccctgattcataaatccatgggatctttgagaaacttctcgatgttattcttagttattttgttgttcatccactggaacatccctagtacccccaagtt

SEQ ID NO: 95381 - DNA, 676 bp, Cannabis sativa
taaaaaaaaaactaatttttttttcaaataccgaaatagatataaatgcatcgatatatcccttttaaaaaagagtaaaatttccccaaactttatatatgtaatgctcataagaatattaacaagataataataataataaaaaactattaaaattataatgaactttcatatgttgctgcccaggatcgaactggggacctttagtgtgtaagactaacgtgataaccactatttgaactttcatatgtactattggatttgcccttggaaccttaaaccctattttcatattaaaaaaaaaaaaccttaaaccctattttcatattaaaaaaaaaaaaaaaaaaaccttaaaccctgttttcagacataattaagcagtaatatccttctctctcttcttcctcttcaataccttcttcctcctccgttcaagaacccctgaactgaaaccttctcatccttctcttcacgctgtcatctgattatgagaaccatttaattgaagtcaggtatagtttcttcttccaactcaaaattcatgctttaatggtattatgtcttgtactcatcaccatatactgcctctgaatctttcagaaagaaattgagacctaatatagcttcaatgtggagccccagaagcaaagtctgaaactttggacaagaaaagctt

SEQ ID NO: 95382 - DNA, 514 bp, Cannabis sativa
  modified_base (488)..(488): a, c, t, g, unknown or other
tttcgtgggttttcaatgtagattttgaaaaaacaatggctggaaggtagtttggactgacatgaatggatatgtgtaagtagtattttaataaataaaagctcattaaaaacaaaattgtttcccacaccttatggaggtatttttgtatataaagtgtcaatttgtatttttcatgtaaaaatttctaaaatttatgtataacatatatatatatagtaagttaatattacgtgcaatgcacatgtactaatttagaaactcaagtgtcgcaaaaaaaaatatgtgttcttagtttttattttggttatatatatttttagttgtataattagtttttttttttactgagtggatagggatgcacacggggcggggaattggcagggaatgcttctaccgttcccatccccgttaagtattttaatccccatcctcgcttattcttcatcgggtataaggcggggatgttgggttttatgccctanataaaactctttacaatctgattagt

SEQ ID NO: 95383 - DNA, 1152 bp, Cannabis sativa
acctttgaatttaccctggatccttccattcataagaagattataactagttccctttaaacaagtcataatccaactgatgaatctagcaggaaaacaaaggtgtttcagaagatcttctacaaactgccagtcaaatgtgtcataggccttgctcaagtcaatcttcataatgcatcttactgaaatgttttttctcgaataacccttaaggagatcttggaaaatcatgatgttgtgagcaagaagcctatttttcacaaaggccccttggttactttggacaagagtaggaagcacctccgagagtctagagcaaatcatcttcgagatgcatttatatatagtattgcagcaggcaatgggtctataatcacttgcagataaaggattcactaccttggggattagagagatcaccgtttcatttagacttttcggcagtcttccatcttagaagaaacccagaacaactgttgatgtatcttcaccaatttccttccagagatttttaaaaaaacctaagccaaaaccatccaatctaggactcttagaggagtgaatgctaaagagggcattcttcacatcactcttactaaaaggtctgatgagattcacttgttagatcaaactgaggctagctccatgatgaagacaatctgtattgattcggcaagtcgctgaacttttactacccataaagtgttcaaaatgagctaaaaagtgatgtctcaccttgtcaaaatcatcttcaataatattaccttgagaaaaggttgttattctgttctcaagctttctttttctcatagccacatggaagtaactagagttttcatcacaatacttgacctacgtaatcttgctctactgtgtgacaaagctagaataatttttctgcaaatgttgaagatgctgcaattgttgggaagctgcctattggaggcagatatcagtgggattcttgctcgcttcatcttgaattctgctttataaatccttggcttctctgtatttcaatgtgatgtcacccacttcactcttattgaactgaattagatcctgtctaacccgataaagcttctgcatgataccatccaaaccactcctagccataggactttcccaagcatttaacaccctttgcttgta

SEQ ID NO: 95384 - DNA, 540 bp, Cannabis sativa
tacagccctgccctataatacactacactacactatttttttttgtaaatttttatatttttataagtgacataaattaaatgattattttttagtagcataagtacctaatatttgtaataaaactgtaattttcgttcagatttgtcagtacatactctgttagtgtcatactgaaagattcttgttttaaatgggcataagcaacacactcaaagatccttaagtgatcatttaagtgatcatacagagcatgatttcatgtccaagctttaatggggcttttgaattttatggctgatgaagggcttctgttgatcaagtagcaggtgctacaactgcttctacccaaaaacttttaggcgaccctaagtacaataacatacatcttaccctttctagcactgtcatgttcattctttctgccaagccattctgctgtggggttttggtacagttaaatgtgtccctatacccatgtgattagtggttaaaaatacacttttatttattttaaatgataaaataaattgagtttta

SEQ ID NO: 95385 - DNA, 812 bp, Cannabis sativa
gcacttagtgcggattggatgttgtttgacgaaaaaagtacggattggatcggatgaacagccctatcaacatgtatgtctaatattactttctactcacaattatatatactacatattgtattaattgaactacattttcatgatttatcgggatatatatatatatacttgtattattaattcaaactaaatcatactaactcatccttcttcagccaacaaactattatagtattattataatttttttgtgtgacaaaaaatcaagtaaaaaggatgaaagacacaacgtcttttttttaggtgtttaaaggtaagatttgcttcaatgaatttagttatattctctataattttggcaatcattatgtgactgtatattatttaataggagaaggaaatcaatgagctgaggaatgtactgtttgataggtggacatcaagagttgttacttaggttcttttgtttgaattataagcattggactctttttcctctttggagttttttcccattgggttttactccttagaggttttaatgaggctttgctatatacattaataggtgctttttagtcagttaatttgtgtttgatttcaattattattgtaatgaattgtatttatagaaaatggctatagagttgggtgccaacctagttgggatgcttctttattagctaattaatgttgctcttccatttgtctttttcaaaatgaaaaattgacagaattcattcatttatgcttctttattagaaaatttttgaggaaaggtatgcacgacgttgttgaagttcccacta

SEQ ID NO: 95386 - DNA, 940 bp, Cannabis sativa
cagtcaacaaaggggaggaagtagctgaaggtgggcaagagcttctagcacataggaggacccaaatggttgagagattttgtgatggctgaaaggagttgagaagccagctggtagagccatttttacttttccattgcaatgtaatttgtgttttctttttcctgtttaacaaacatataaatacttggctgaaacaattttgggatttttgtgtggaatgaatttgcaaagagtttgcatttggagacttgtcctgaagaggaccttatctctatcattatggattttaaaatattagcttccatgatataattagagataaagttgatcttgtttagtatacattttaagtccttaatgtgatgcttctttagagagtttgcatcaagatgatgatcttcacaagcttgttggataaccattgtttgaaaccatggaagaattaatcttcttcccaagattgttggacagccgaactttttctttaagaaattctacattttaagagaaaattaacctttatacccactttttattttttattttaatttttacctttattttattactctttaaataatacccagttttataagtaatatccctattatgtacattaagaactttaattctgataaattatgtgaagttatatttaggactttaattataaaagaaatatttatcaattaaaattattttgatattatatttagttaatgtataattaaaaatgatagttttcaacttatcccattatttaaactagttgtacaacattccactagtacttctagttgtacagttgcagtctcattctttttcacaatcttcacaatccaaaaaaatcttctatcaatctgaccagcattttcacaatgtttctagaagggaaattcgacattttatgctaaaaaaatgcacatggtgttatttt

SEQ ID NO: 95387 - DNA, 1083 bp, Cannabis sativa
tccatcttaatccaaccaagaaagtatgaaatactgctaaaaaaattgatacctagaccaaaaacatcaaataaataaatttagtaacttcatacataaacgttaaaataataatgttaaaagtacgtcatataaattaataatatagcaaaattttgaagaaagagaattgtaataaaacttatcttttgaagtccttgcatcttgaccaagtgagtaaaataaaaatatacatatataaaatatataaaatttaattagcacactacttaatggtaatattaaaatgagaatttttatttaaacaaaaaatattcgaaatattatattatgaagaataaatttatctttactaactgcagaacagatcacatgtcactgctacttcacgacgtttttaggatacacacaaaataactaccactatatattgataccaaataaaacacactgaacgcatactactatacttacaaaaaaaagtcacaacttacacaaaaataaaccactttattttacggtacacaatcattttcaatagacattaaaaggtaaaaaattaaataatcaatttaaattttttgaaagaaaaagctaagttaggttaaagtaaaatggaagagctattagaatctttattataagggtttctccaatgggattgtaaaatcccaaatatagtagagtttttacacaatattactccaatgggactgcattagagagagtgcacagtgagtgcgagagggaaagaagaagtgagcgggagagagggagatctctgcttgggtttttggtgttattgatggcagaagaaggaaggaggaatgagaagaaggagaggaagaaagcaagaagacgaaggagatgaagaaaagaagaagaaggagtgggtgggtgtgggtatgggttctacgagtggaggaagaaaggagtaaatcaaaagaaaagaaaaaagaaagaagaaaaaaacaataaaaaacagaaaaaagaaaaagaaaaaaaaagtaataaaaaataattttttttaatttttatatatttttaaatatttataattattttttaaaaactaatattacg

SEQ ID NO: 95388 - DNA, 974 bp, Cannabis sativa
ttgttggttgatcgtgtgtgagtgggtacttgttttaagtttcctttttttgttcatttgaaaaaaaaaaaagctactttatggtggttaatttcaaaaaaggtatgtcttgtcttattaaaatttctcacccacattctcttacccacacgatttctattctcttcttcttcattgtgctttctctctaaaattgtgtgtgagttgcttgagtttcagttctttgcaaaaaggaaaaatggtgaagacccgaagaggatcatcgtccaaggcctttgctgcatctaaagtccgaccatcacaatcacctcaggcttcaatttcgacttaactgccacttgcgtcagctccggctacctctgttggtcgcaccaccaacaccaaggcttgcaagaaagcgtttcctttctctaatgagcatcccatggtgtttcaagacattacctctgatattggagtcaatgcaccaccatctgatgtggtggtgccatctcgagtaaaaaatgtttgactattttcccaattgaaaccctcagtggtggctagggcaaatgctaaattgggttcatcttcttcaaatgttgttggtgctacaactgggcttctcaaattacctatgaagccaagtcgatcaaagaaaaatgagttagccccacaaagaaaattaattttgaacacttcttcatctccatcttctataaggaagaaattaaaggctcatcctccatctccatcttcatcaccatctttttttgaatgtgagcccaaagaagaagaatctaagtcctaaactgatgagtctgatgaatcttttcctgctcctgctgatcctgaatcagaatctgatgaaatggagtctgaagatgttgttgtccctgttacagaagcagtgtctgcccctgcaccagtcacttcaccactgtcctcaaagggtaaaggcaagaaaccaatcactgatcctatttcttctctaa

SEQ ID NO: 95389 - DNA, 828 bp, Cannabis sativa
taaatgtgtttttctcaataaaaataaataaattggtgatcaattactaaaatataatttattttgtaaaaaatgtattttaatagtatgtgaaaagttgattcaaatttgccatgtacataaaacatgatgcaaaatttgtatcaaaatatatatattatttttaatatttatatctgtgccatttgtaatattttagtgttgatgaaagtattttgcatagtgatccaaaatagtataactaaagtttggtaaattatattcaaacaaatgactttccaaaacaaggtaggctctctatatatatatacacgcataaacatataaaaaatttcaaaattttaattttttacaaaaaccagtattattaaagagttattaacaaacaaattaagaaaataatagtaataacaatggagattattgggtggttataaaaaatcaacaggcaagatattatattaataaagtattatatattatttaatttaatatatatttgttaatacatatatcatatattaatactttttataaaaattcattatttaactttttgattcaaattttatgttatatttaagtattgttgaaatatatatatttaaaattttatttgttttatttattattagtctcttaaaactaaatacaatattatgcctaattcaatctattccaattcaattattatcagttcaatccaattcgatagcgtaccaaatagattatcataagcaaaaggtttactcaaatcatgggatttggttactaaaaatagaaccagaatcatcacctaccccattacaagttacctgtaactcatta

SEQ ID NO: 95390 - DNA, 725 bp, Cannabis sativa
attatataatttttttaaaaaaagttacacataatttaaaaaaaatatctaaaataaaattaaaataattatttaaattaacacaaaataatataaaaataaaaatataaaaaaaagtcgtgagtaattttttaaaattaattaaactttatatatatattaaagtgtattcataatttttgtgaagtgcaaataaaatacctcttaaaatttagtccatttatttaattatacaagtttatttgtacctctccattttaatataaattatttttgtatttatgtatttctaaatattttttcttaactttactttgctctacaatgagcagatttttcaggtctattactgttgtacaatatatttatttatatataatattatagtgggaatccttaatattatagttagtgatagttaattactactatataatatacaaatcttagttagtgggaaatctttaatgttttgtaaaatatgtacatatatgtcatcacataattatattatataataattagctccactttaacaatttgtgaatggataaatgaactataatggtacttattgttttattaattaatcaatacttgtaagtaattaacaaattaatctcattactagagattcctagaactttttaattatatatatatgtttcgatatatcttggccacaaaattagattgcaagagaactaatgaaactaaagttgttt

SEQ ID NO: 95391 - DNA, 540 bp, Cannabis sativa
agaataccataaaaaattaaaaaacttgtatataaatttgacttctatataatcaaaaccagttttgtaatgaagatactagtttattgatgaaaaaatcaattaaaattttttttattaaggcaatgaattaaaaaagcaaaattagtttcttaaagaagaaatcagttacgaataccaaaactcatataagatgtgtttattatgaaaccgattttctaatttaagaaattggtttctagatctccaattgcagcgaaattcgttcgttcttatgaggttttggtggtggagatctcttatctagggtacgtttgagccatcgatcgctagatgtgtgggtcgtcagtcgccaaatgtgtcgctggtgaatagaggtcagtaggtggacggttggggtgaggcaagaagagtacttcaatggaattgaaggagaagaaatagttttaagatatttttttttttaaaaaaaataacctatctacacatcgtaacaaagtcttcaaaaaaccatatgagtgtaatttcctttataactaa

SEQ ID NO: 95392 - DNA, 666 bp, Cannabis sativa
tgtaaaaataaaaaaatcccttaataatacgtgccaatttattataatcaaatattatttaaaaaatacaaattaaatttttgttccttacaaaattatatatatttttttaactttttaaattatttaaaattaatttgaaattttgtatctaattttaattaattgtgctaaataatatgatgattgtctaattttattcaattgtgttagttttattcatacttttgatatcttataaaattatatcctttaaattttaacatatattaaattatgtctttttaaattttttattcactcaaatttttttttagtataattaaataaattttttttaaatctaataattttaatattttgaaatttttttgtaagaatttaaaaaatttacaatataatttagtacatgttaagttactctgaactctttataatcacatctctattttttaccataatagccttctccgtgtactttccacaagggttttattgtaatttcgtaaccttgtattctcattctttaccatcaaccgaaaccttttaactttttcatctctgtaaacccatggattccatttcctgcttttcctacattaaaatattaaaaaaaaaaaccaccgattcccttaacacagccccaagaccaatagtcgtttgcct

SEQ ID NO: 95393 - DNA, 617 bp, Cannabis sativa
  modified_base (558)..(558): a, c, t, g, unknown or other
ccgagatgaacgcatattttaaaggaagccttatctcatggggatgtgtcgctaggaatggagccgagttaccgttgatggcgagccggtgcttgtcatatgactttccgagattgatattgctttaattctgataactacattttctggtgtcgagataatctttctcgtatgcatgccatcttacaacgagatagacatctcgctgtctgtcatctcgattcaccgaactatgtatacttagtttgtataccgtgtaatatacgctaagtgtttttatcattatcgtctctttttcatgcgacgaggcttcatgcacactttcattctcatggtttcttgtcaacacataagttagcagtttgtacgattctgtctcgtagaagactgttcagccagctgagttataagcatactctgcaaattgtgtctctaatgagttgttccatgccaggtgtacttaagattgcgtgtttgagttcttcgttcttcccagctcgacacgtgtcctcttccaatattcttactgaattttaggtataacaattgccccttaanaagttcttttttaataaaaagagccttttaatgattacaaagggtattttcgtcatgtt

SEQ ID NO: 95394 - DNA, 910 bp, Cannabis sativa
tcaacttgagcttgagcaaaaagatacttcttcttgttggcatacacgcgatggtgacggagtcggtcgagaaccaagcgaagatgagttgcatgagctgctaaagaagggatatacacaagaatatcatcaaagaaaaccaagacacaatgacctcagaaatcgcaaaatacctcattcatgagagcttgaaaggtggccagggcattggtgaggccgaaaggcacgactagaaactcttaattaccctcatgagtccgaaaagctgtcttttccacatctccaggtgccatacgaattcgatgatacccaaacttcaaatctagtttggaaaaaacggtggcaccatgaagttcgtcaagtagctcattaataacaggaatgggaaatttgtctgccacggctgctcgatttaaagctcagtaatccacataaaatcgccaactgccatctctctttttcaccaataaaaccgggctagagaatggactagtgctaggctgagcaatgccaatacggagcatctctcgaaccatcttctcaatctcaccttttttaatctgggcatagcagtaaggacgcaccgatatgggccctgtgtttggctttaaggtgatggtatggtcccgttggcgttgtggaggcagccctggtggtagctcaaaaacatcttcgtattgctttagaagctgactaataggagcagggatcggtgagtggtgttgatcctcagccacggacaatgccccgacatgaatcatatatgcctcgactcctttttcgactgttaacaacatagccttcaaagagatgggtgacttacataagctcgggtccccttgcaatgtcacccatgttcccgccatttcgaatttcatcaccatcgttttccaattgacttgcatatttc

SEQ ID NO: 95395 - DNA, 756 bp, Cannabis sativa
  modified_base (217)..(235): a, c, t, g, unknown or other
tggtttaggtttgagtcttggtcctaactccaaacaccaaccacatgtcgagtctagtttgagttctggtacgggttcaagttcttgtccgggtctatgtccgggtccaattccaattcccagatttagacacagactgtgggtcaggtctaagcctcgggtcttgggtactgggtctttggtctaaatcaagatcttagtccagttctagctcatnnnnnnnnnnnnnnnnnnngtctcaagttaaggtttgggtctaggtttgggtcttgggtcctcagtcattggtccatgtccccgattcaggtcagggtcctaggtcccggtctaggttaggttcccagtccgattgcaggtcccggtccatgttccgtactagtccttatctcaggtcttgaccttgtcagggtataggtcaaagttcggttctcaggtccttgtcccgatcctggtcctcggtcccagcccgagtacttgtccaaatttaggttcaggtctcagtgctagccttggtctgggtcccagtcatgatctcgatctaggtccaagtcctgggttcgagtctaagttatattacgagttcgggtccgggtctgggtttgggtcttggtctaggtttcagtctgtgtttgggtctgggtcctggtcttgttctttgtgtgggcctgggtctgggcctgggtcagggtctgggtctgggtcttggttctggtacgggtctaggttctagtgaaggtcctaagtcacgggtcctag

SEQ ID NO: 95396 - DNA, 1699 bp, Cannabis sativa
gttgatggctatgcaaaaatgcttgtgacttcagttggaatgaacacaacatggggacaaatgatgagccaaattagcagcgataaaaatgagcaaacacccttgcaagctcgtcttgacaagcttacttctgccattggtaaggttggtttaacgattgctctccttgttctcatagtcttgtttgttcgttacttcacgggaactaccaaagatgagaatggagataaaaaatttaacggtagcaagacaaagatcgatgacatagtgaatgctgcggtggagattatagcagctgcagtcacaatcgtggtggttgcaattccagaaggtttgccacttgctgtgacgcttacacttgcatattctatgaagagaatgatggtggataatgcaatggtgaggaagctctctgcttgtgagaccatgggatctgcaacaaccatatgtacagacaaaacaggtactcttactatgaaccaaatgaaggtcacaaacttttgggttggtaaagaatctgtcattgaaaattcttactcaaaaattgcaccatatgttgtagagttattccgtgaaggaatagctcttaatacaactggtagtatatataggccaaatttaggatcagaatttgaaatttcaggtagtccaacagaaaaggcaattctttcttgggctgttctagagttgaatatggatatggaggaagtgaagaaaagttgtgccattgttcaagttgaagcgttcaattcccaaaagaaacgaagtggggtttcgttgagaagaaagacagataacacaatatggattcattggaaaggagctgcagaaatggttttggccaagtgtacaagctactatgatgcttctggaatcgttaaagattttggtgaaaatgaaaaacttgagtttgagaaaattattcaagctatggcagccagcagccttaggtgtatagcttttgcacacaaacaagttgaaattacagagcatgaaggcttagaaggaaatgaaacattacaagaagatggcttgactctactgggcatggttggcattaaggatccttgtcgtccaggagtaaagaaagctgttgaagcttgtcaaaatgctggagttcacgtcaaaatgatcacaggagacaatgtattcaccgcaagagccatagccacggagtgtggaatccttaaactaggccaagacatgactggagcagttatagaaggtgttgagtttcgaaattacacacccgaacagagaatggagaaggttgacaaaatctgtgtcatggcaaggtcatctcctttcgataaactcttaatggtacaatgcttgaagcaaaaaggccatgttgtagcagttacaggagaacaaatgatgctccagcattgaaagaagctgatatcggactcgccatgggaatccaaggtaccgaagtggccaaagagagctcagatattgtcatcttggatgacaatttcgcttcagtggctacggttctaaagtggggtagatgtgtttacaacaacatccaaaagttcatccaattccagctaacagtgaatgttgctgcacttgtaatcaactttgtagctgcaatttcagcaggagaagttccattaacagctgttcagctattatgggtgaatttgatcatggacaccttaggagctttggctttggccacagagaagcccac

SEQ ID NO: 95397 - DNA, 514 bp, Cannabis sativa
actaactaactcttcttctttgattagtaattttgctctgttagggcaaaattgccttctttgtctttctggttattcttgtaggtcagctgattggatcttcgtggattgaaggagaatcagtgatcgtgtttgtctgaagggagttcagattgcattgctgaagggagttcagctgcatagaagcaaggggatcttggcttctgaagtttaaggatgcttagatgattttctgatttgttcgtgttcaaatcagtagggtagtatgaattatttgtagattacttttgaacaattgtaatcgaaactggatagtgtattcttttaatgcatagtgaaggttattaccctggtttaagggaacccaagtactagttgtctgaaatgaatttttagggttgatgaagcttgtaaatctctgtgttttcttattagtttcttgcagttaagaataagtaatttaaatcaactaagaagaaagtaacacttatagactttacattaatgataggaa

SEQ ID NO: 95398 - DNA, 771 bp, Cannabis sativa
tatttttagaaaaattagatcaaagttatatttaagcattaaatgataatgttaaaatgttgaggtttcttcctaccatgggggggcaattatttctagtatgtagataataaatttatgaatcttaatctttttgatagaaactttatagcttttcacatgctattaataatttttttaataatccaaaatcagtcaaaaatcttgttgcacatgtgtatgtataaattgaagttttctccctagcaaactagctatctatgtaaattttctattatatctaaaaaaatgatttttaccgcggttctaaagcatgattctgattagtcctgaatttatctaccagtttgcttattctattgctaagtcacgattatcatattttaatttggttaaacacatttttcattattaacatttaagtaagctgtatgtgtatgcccttggtttggaatatgttggttatgtatataaacatacataatacattatcacatataattgtgtggctttatgatatatatgtaactatcatatatttgttattcatattcatttgaattgagcaatatactatagatctattttttacgtgtacgattttcaaagctcattgtgagattaattccacatgcaatgtatatattgttgcgtttgaaaacgtcaaaagcatcttatcgttcagacttaaattaactcatcggctctttggagaataagtaagaaaaatcatgcataaatagtaagtaaatattaatccacttaaaagga

SEQ ID NO: 95399 - DNA, 600 bp, Cannabis sativa
gttaaggggagctttgtcaacggttgaccgagactatggggttttcaatagggtttttcataacattgctgacactcatgtggtgcaccacttattctctacaataccacattacaatgcagtggaggctaccaaagctgtcaaaccaatactgagagaatactattgtgttgatgagactccgataattaaggctttgtggagagaagtaaaggagcgtgtctatgttgagccagataatgaatctcctaagaaaggtgttttttggtacacgaactaattttaatcaagtaccaaaataatagtttggtgtaatgattcatctaatataataattagaccatgtccaataatagggagggtcataaataaaagtggtgtattattatattttaccacatttaaaaagaagtttcaatagtgctgtaaaaagtataccaaattttaaaattataaaactacttttcttattatcaaaaagtatttgtcgaggcagacaagaagaattttctgggtttatggagagattacttacggatccgggttaccttggatgtttccaaacctctcaaacgccgcaagaaaatacgcacagtagat

SEQ ID NO: 95400 - DNA, 632 bp, Cannabis sativa
ccaaaacgcctctcattagagaagattgcaccatcaacattaactttaatcataggaaattgaggggcggtccaatgctctagaacttcatcatccgaaccattaacatcaagagtaggaacgacattcttttgagcattataccaatcaataaagttcaatttagctaatgtcacaacctcactaacctcgggtcttttggagttccaaactagctcgtttcgatgcttccaaatggcccatactatcatagaagcctcaagcttctcgggcacagtccacacacgtagcccctcttcgaattatgttgcaaatgttatggcagcagcaaccacgctaggaacacgagacaaaccccaacagccttgtgcaaaaaagcatcgaacaaggacatggagagaggtttctggagccgaggcacaaaaaggacaatgggtattgatgggcatatgtttggttgaaagctgaaatcttattgaaagctgaacacacaaatctcgccataggaaatttagcacttttgggggaagtttcagctgccaaaggtctttccaaaagcccgaattagcctccattatgttgtttcccttgattacttgctgcaaagcataagcacttttaactgtgaacaa

SEQ ID NO: 95401 - DNA, 515 bp, Cannabis sativa
gaccttgatgatgttcttttttctggtattccacctccaagaactcttgtcaatggagcttccaaccccgaatatcttcaatggaacaaacgtgatcaacttcttcactattggctcaaatcttccatgactgacggcattcttgctgttgttgcctcctacacaaattaatctcagctatggcgtgctcttgaacaacgtttcacaagctaatctcgtgcccaattactccaactaaaaggtcaattctctcatgttcgtaacggttctttatccatttctgagtatgtggacaaagtccaatcactttatgattctattatcaatgttggttccttcatttctgatcaagacttaatacttcaattattgaatggattgggtcctgaatatgattctgttgtctcgggtatcacttctcaaagtgatgatctaactattgaagaagtgcaggcccttctatatggctcatgagagtcatcttgatcattataacaccgttactgatctgacct

SEQ ID NO: 95402 - DNA, 844 bp, Cannabis sativa
cgatgttacacatttcagcagcaaacgaacccaccaatcttcaaaacccagtttccttaacattgcttccaagaaaggccattcaatcctgtcgtacgccttattcaaagccataaagccttctttgcctttccttttccttttcaaataatgtagcacttcaaaggaaattagaatgttgtcggagataagtcgccccgggatgaaagcactttgagtgtcggcaacaatgtcattcatgaacggcttcatacgattcaccatgaccttcgtaattgttttatacaccacgttacagagcgcaatagggcgaagttaagtcatgtcttccggattcttcttcttaggaatcaaaacaatattgaccttgctacaatcactttcaaactcacctgttgaaaagaaatttcgaaccacctctacaacatctcggccaacaatgctccaacacttctggtagaaggccggtgtcataccatcgggaccaggacttctatcgggatgcatttggaagatggattttttgacctcttcctcaaatatagggacacgaagctcagcatggacaaatcaggaaccgacttatgcacacaatcgatgacctctgggcaaaaagaattggaagcttgaaagagcgatgacctgagagagaccattctcccaatcaacccgaaccccttgattattcttcaaacttacaatctggttgttccttttcctggttgaagccgctttgtgaaagtagctgctgttatggtcaccttccttcaaccacatttgcttggcgcgttgcttccaaaaggcttctctttggtcaagaacctgaaataactcgtccttaacc

SEQ ID NO: 95403 - DNA, 1131 bp, Cannabis sativa
ttaattatttaataatttggatttgagttcatattttaattgttcccaagtcaatttcatttattattcatttttttgcatttgatttttctataatagattgtttttgtgtataattgaatttgatttctttactttggattttctaagttttgatatgagcaaataatgcttggaggagaaaactaaggtttgaattcaatattatagttggtaattcaagccacctccattgtaatctaatttaatttatttactttgagctttttttttaatatctatttatttttttattttattgtagaagaatgtataagtctctaccttgctttagatgtacttgagttgtcttcagctaaataatttcccaaaattcaattgtaaataacttttccagatgtgttctctgcttttgttatagaataaattaggcacctttaactatatgattataattattttttaaatttatatgtatatataatattttgttgattatttatcttttattttcatttgatcaatatcaataactaaaaacagtgtaataaacttttattgtttgactttatttgtagctaactataagtaaatttatatgcttatatatattctttttggaattaaagttacatatataataacttaattttttttaggtctaatctctatgatgcttaagtattaacattttgtatacttcaatatttatatatatatatataaacatagttagtgtaatgataatatccatctttattttgatattgaggtatgaaaattttaatttgaaaagaattcttaattatctgaccacatagaatggtaattagagtggatctggtagtggttgagagaaccattatagtggtaaataatatatatatatatatatatatacatatatatgtgtgtttttattagacaatttctatatgagaaaagaatacattgttgacagaaaagattactcttttggtatttcaggagcaagactcaagagatcaagatcataaagaaaggattgaaaaacataaaatgatatttgacccaatttttagtttgggccaaatttgacatatattttacatcactattagatttaagttttaacaaaatattctaaaaaaa

SEQ ID NO: 95404 - DNA, 1345 bp, Cannabis sativa
tcacccccaagtgttagcttctattctcgaaggtggtcaacgaccgtatcaaaccttgggagaccctcatcgtcaatgactagttcaaatgttcaaatccataagaagttcaaagatagttataaactcacgaaaatagcgggatgttatcataaaaaacaaacttcaactacctctaaaaatcaaggagacggttgagatagctctgcgttggtcgcgtcttctgaagcgagaagcaccgaccttttctcctttataaagggtcacccatggcctggaaaagggatccacgattttgagcacttagaaaaaaaacaaacactttttcattctttgcaatcaagagcttgttcttgacttttgcaaccttgattaataaaacacaaggggagtaggctattaccgacatctggggtcgaacctctttaaattttggtgtctttctttacatttattgcaatttctggtgtcattaattatctttattgttacaattttggtttaaatctcatttattatgactccgcgtcggttgactaaaaatccaatcaacattttagtattttcattgagagctttaaccaaaatcttgaagttttttactgaaaaaaatggtgttgacccgaagatctcaagaacgacctgaggaggagatggataatgcccagcaagttccatcaacaagcaatcttgaacgacctctgcgttcggggaacagtgatacagccaccacccatacaccaccgctcaggctactgctggtcatgggacaactagccaaactactgccactgggcgtaccaccaacgccaccaccgcaggaggcgatgctactaacggcgccaccagaaggggtaatactggaaagtttgtcccacctactgctggcacgggtcaagctcaaactggtcgaggccctgacatctttaagccacaaaatgaaccccatgtggatatcaaaggaattgaccccaagatggatcagttacgagatgtgataggccgaatgtaaggccaattctaaactgtgcaccaagagcaaactcaagctagagtggcctttaactgaaagtcttgctaaccaaaggagagaattccaatcttggctggaagatcatgctcgagaaataaggaggcagcaagacgaccaagatcgtcgcacccaagaagttgtcgacttaatacgaagctactttaaccaaaacactcaacgttgggtactgacgcccacaaccaacaaattgttatttcactggctataattaatatttgattatttccttaagattaccagtaagttgtattgtggaaaattttaattgttatttctattatagaagtcaga

SEQ ID NO: 95405 - DNA, 733 bp, Cannabis sativa
  modified_base (679)..(685): a, c, t, g, unknown or other
tctgctaggagtatgtgattggtatcttgattgtacatcaatcttttgtgagaaggtggctcgagttctacaagcagcatagcttcatatccgtacgtcattgggaatggtgtctgtctggttgccgttttctcaggttgccgatatgaccatagaacttctggaagctcttctggccagtttcctttggcatcttcaagttttttcttcagtgtatccttcaaggttttgttgactgcttcaacttgaccattcgcttgaggatacgccactgcagagaaacttttgatgataccatggttcacacaaaagtcagtgaaggattggctgtcaaactgcttgtcattatctgaaactatcttgtatggaagtccgaaccgacagattatgttcttcacaatgaagtcttgaactttctttgatgtaatggttacgagtggcttggcttttgtccacttagtaaagtaatcaaccgctaccactgcatattgcactcctcctttacttttgggttatgtccgatcaggtcaattccccaaatggaaaagggtcgcggactctgcatctgagtgaactcgttaggtggaactcgaggtatctttgaaaatctctggcattggtcacacttcttaacataaaattttgaatcttcaataatcgttggccagaagtaaccttnnnnnnnaattttcttagataagctttgcccggcagcatgatttcgacagcatcc

SEQ ID NO: 95406 - DNA, 593 bp, Cannabis sativa
ttttagtaatcagaagatgaagaaaaagaaattgtattgaattgaatgaattacaacagaactgatatatatatatacagactcaagctcagtaacaaactgagtaaaacaaacagaggacaaagaggttaggaggttaagagaactaactaactccaacagaaataacgacttctaactaaccaagacacgtgtacacttcaccttatattctaagagtctccggaaaataacatatttgcatatgttatatataagaaaaacttacatatatgaacaaagctgaatataattcagaaaacgtgcagatggcttgctataagattctaccacattttacacacacacaccaaaaaaacaaatacagaaagaaataagagaacagactttcataagtaaaggaaacaagcaatccatagcatctaaacaggaaaaccacataaatatgcaccaaatgaaaagaaaaatacttgcttatcttaatggaacactaacagcaatagcaattaactctgaggtgtttggttgggaggaatgaaaatataggaatgggaatgggaatggaaataagaataggaatggaatggaataaa

SEQ ID NO: 95407 - DNA, 801 bp, Cannabis sativa
ttatacatgatttaaaaaaaaaaacctataaaaatacaatttgaaaaagaattgaaattaacacaaaataatgtgatttttttttagaagctgagaaaaaaattctaagaatgatttttaaaaattatttaattttttttttaaatattgaagtgtacttattattttgtagggtgcaaatagatctcctcttttattttttataattattttcttgtatgagaatattgttttctttttcataactagtgtaagaaaaataataacagaactagttaaaatatgatttttcttaaaataagatattaagtatcaattattaaaaaattagtattaactttattatttttcagttaaacaaatattcaacgaaataaaataaaataaataattttatttttttttatataaaacacactgaaatcaacgttatcaaccttcttttttacgagaattaactctataatgatggtcttgagggccctgcttatgcaatagtatgctgactcaaaaaaggccatatttggcgttttatggttacttggactgatgacaacgacagcgacacaggggggtgttgataatatcattagtaggactaggaatttggctgtcacacctgaggaagaatgggaagaaaatatagaagaagttgtggaatttggggagaaagtgttagttgggagagtgattgcccgaagggagatgagcgagcgactgtttaaaagtattttttctagaatgtggaaaaggctggtgattggaatgtgaagattcttggaatggatggggaacattcat

SEQ ID NO: 95408 - DNA, 975 bp, Cannabis sativa
ttatcttcaatagttttaagatcatcaatctcatcccaaccaagatcttcctcctctggcattgagggctgagttgaaacaactgtaacatcattatctttgttcgatttaccaaattcaatcatccctttcaaagctactttatcatcagctttggatacatctaattttttattacttgcttcagaatcaacaacatcttcttccaaatgcacactctgtttactctccctcactactctttccctcattcacattataagttttctcaacattcttattagtatcaaaggaactttctattccatcaaggaagcatttgaggagtcattttgcacttcctttgctactactacaccatcttcactacccgattccccatttttcttggcaatctttttcaacacaacatcatcttcttagtcattgtcatcaacatcccaactcaattcctcttcttatgccacaaatgttaaatcaaaaattatttagaatagtgctaaaattaaatatagtattatttaaaatgctattcttgcaatttcaagaagcaacttctttattaggaggctctcctatagatatttaaccactctcaaacagggagggatagcgggtgggtacagaaagactaatccaatcttttaatttaataagaagtatcaccagtgtgatagaatgtgattttgaatgataagacttaggatagtttgttaatcttgtgatggagtgttactaccccgaaattctctttattgatcgatggtactatgcatgagtactttgcttcaaaagagatctcagataaggagatccaatatcaaataagatccctttaccctaaaggaactaaaaaaattgagtatttcacattattaaggacgataatctcaaattaccaaaaatccccatatcagaattaaagtttcaagcttcagtgacattttcaagtaatcaaatcacaccaaatcaagt

SEQ ID NO: 95409 - DNA, 631 bp, Cannabis sativa
aatgctttcattttttattttgttgttttgttactgtagttgaatgcaaaaaacttgattttcagtgatgatgtacttcaaagttgatcagaataggcttgtcagctattgtgtatgaattagtgattgagaagtgtgcttagttttggttgtgcgccgaagaacaatatttttttaaaaaaactttgtttttatatatttttaaaactttttttaattagttttatatgtatttttcacgtgatattgaacattataattttatttaatttgtttatgtagtttagtacaaaaaaaataattattattatatttttaatttatacattaagtatttgtataattatattcttcttcttctttttttttttttgacaaaaaagcaataattgttagtaggttttttattaattgttaaacatattttgctacgatttacaagtataaaacacaattgtatatataatttaaacctacaaattttaactactgtaatttaacgtagaaacaacgtgaaattaacatatttaaaaagtaacaaaattaaacaacgtgtttacaactttaaaataactgtaaaacaacaaacaatatttttactaaatataaataatttttattcatatttaca

SEQ ID NO: 95410 - DNA, 770 bp, Cannabis sativa
ggttcataaaatgaggtatttcaacattgttgggatgttattttggtaaaacattcaacatctcgtaatacaaagatcttgtatctcctcatattacacaacaatgatgcatcacctagtaatacacagtcagtgatgcactacctcgtaatacacaatcaccaatgcattgcctcgtattgcacagtacgtgcacctgttcacaaataacatggtttgaccaagtcaatataccacttcaaagactacttctttgtattttaaatataaaatagttatttatacttatccaaatattcagttctacgtaaaacgtgggcatcaaccacctgtcaattgtaacttttcactaagataagattgagtaaccatcatcatgttcctataaataggagttcactcaaagggaaatgggggacacttctaatttacagaaactcggccaaattgaaaatacaatcaaaactcaaaaataatattgactcgtggagtatgtaaattttaactacaaaactacataaaaatatctggtgttcatttattattttgtcttttcttttcttgaattaataatcatcttagattaagttgacgaaaaatcacgtcaatagtttggtgctttcattgagagattcactagaaagagattcagattcatcatcttcacaatcccaaaactgaaattagttaaaattgagagtctagtagaaccctctactactaatgtcaatgtatacaagaagtaactttaaaatttctgcctactttac

SEQ ID NO: 95411 - DNA, 2534 bp, Cannabis sativa
tttacagatttgtacctaagaaaaggagaagatgaataccaaaagacaatgaaggtcatgcgtagatgaagagagacgtccaactgtgcttacggtggcagaaaggtctggctggtgctggtttccgtccaccattgaggtcgacgaagagaagggagattagcagaggaagacgagcaagagaaggaaaaaggatctctcaagctagtggtgagctttattttttttttttgacgaaattcgaagatggctcgatcagatctgaaagtggttgttgtgattgaagagagagaggaagaagaaactgaaggagagagaaagggtgaggttgagtaattttagggtttacttttaattttttgtagaatttaatgattttttaaaattatgattttttttatttatttaaaaaaaatcttattgaattaaataaaaaaatgagttggaccaattatgatgtgccacgtaggtactgattggtcacttaacggtcaggtacctacggatgcaacaaaagtgtaacagaatgtatttttaccgccaaaaaaattacttaggtattaatctgcaactagaagataaacttaggtattatcgccgcaaattactcaatacaatattatttttttgaggagtgttaacgtcaacctcctattacaatcttttagttaacttctgtacttgaaaaaatacgtcgaaaaatattttttaatctttttttcatgactgttatggtgagatataggtttagagatattactttgcaccttctccaaatagcatcaacagatggaagcaaacatgaacacctctttagtgtccaccccatgagcattgagacccaaagaaatttgacccaatcccaacattgagttctattatccttaataggaataagacctcattaggaggctctacaaatatgactagcaaacttacgaaacaaaaagatgtgtttagccatttccattttagatccacacattgggaaaattacatcatcaacatgaaatcttgtcccaatcacaacactagttggcagtgcattacagaggatacaccatcacaacactttaagtcgcttcgggatattagagttccacaatttattcctaagtgtcaaagagattgtcgataatggtgcatgctccgaggcttggaggaaataggcagacttagtgttgaatatcccattatgctctttggtccacatccactcatcctttcccagggcccctcgacttaccccctttcagaatagacaatacattatcatatgtgaagaaagtgtgaagcttattaatgttccagtgcccatttccatcaataaggtcaactacaactctaaatccatctctagggaacccccttagggttggtcatttcacctcaccaaaagggatccatggatctttcgaaaagtctatagagaaccatcacttatgaccttacaagcacctttaaggataatgtcttttgacatgagaacgttctttaaaaaccaggagtttgaactcttagaatcatcactgaagaaatataaattcttaaaatatttcgctctcaaaattcgataacagagagaattattttgagtgaggattgaccatccccacttagccataaaggcacgattcgtctcttttgatttttaaaatcctagcccaccccttgacttaggaagacacaacttatcccacaccataagatagagaccacgatttcccttttcatctctccatcaaaaatctagcccatcaatgcgggaggccatccgcttggataacttggtgatttgcatggaataaacatgtagcgaaatgccaactgatttaatgagagtggccttccctgccttggagagagattttgccttccacccttgaagcttattcgctaagcattcaaccacaaaattgaaatcaacatcttttgcctagaatcgaaacaaaggaagccccaaatatttgatattcctctctgggcccttgattccaatagcttcttgagtagcatgcttcgtaccaatactagtatttttactacagaaaagtgaagtctttagcttattcacttgttgcctcgaccagttacaaaacatttcaagacagtctcacatacctttaacttcctcaagattagattttcctataaggatgagttcattcgcaaaaaatagatgaaaaagtttggggccacctctactcaaatagataccaccattgcttcaagtttagacaggatttcaacgacctaaataaataaggggagatgaggtccccatgtctaatgccacacttcggagtgatggagccgcaaggactcccattgagatgaatgttgagtgagagagtagtgatacattgacaaataaccacgttgaatactgtcatatatttaaaaaaataaaattatctagatgtcaataacacatgaaaaaagtgcactaatacaccctatttttgggaccctatgtgcatgtttgacatcataactaaaaagctcttttttgtttttaaaaatagaaaattatt

SEQ ID NO: 95412 - DNA, 1541 bp, Cannabis sativa
tatagtattatactataaatctggttattggctactgaaattattattaaggtaaaagaagagtagaattattgagtttaagaatgagtaagtcaatatataagaaagagaaaagaaaaccatgaaaaatgtagttacttgaaaattgaaattgggttccaaccaaattcagtattcagacccataatatgtttattataaaagaaaaaagacagaaaaaatgttaaaaataaaaaaagatggtatttttaaaaattaaatttcttgagcccaaaaataaaatattcggactcaacccaataaaatttgaacccgatcaagcgaaacccgccatacctgacttgaaacccgacatacccgaccacccaaaaattgagttcgattgtacattttcaacacccgaaattcgaaaactcgaacccgaccacccgaaacccaaaaacccgacccaatcatatttttttttcgtgcccaatcatattcgtgcctcttaatctcatgtcaattttgtattgtattaaaatattcaatccgtatttattaataacactatatattactcaaattaaccaacgtacgttactattatattatttacttttattaaaattaaggagaaaaaagaaaaaaaatgaaagaaaaagagaaaaggagaggtaaggtaacacctacgattctctttgaccttaagcccacaaacaactactaactatatgaacgtgccaccatctccttaattaacgtatggattagagcaagatctatttgtacatatacaataatcaacaataatctttaatcaaaatctacaaattatattaaataagagttccattcaaatttatgaaaataaataattaatagaccttatccatgccatggtccacctataaaaactattcaatttcccatgccacacttctcttgaatatttcctctcaaaccaataatttaatgaataataacaatactattcaatatacttatcaaaatttcttattcaaaataaatttttattctttgtattctccaattcattatatattcacacactttattatttaattcttctatctccaaaaacatatatattcaattcaactgaattttaagaaaaaatggtgtgaaaacatatataagagcatctctataatggtcatgtacttaaattcagtaattggttaaaaaattatgtgaccagatatcacataattcttttaaagttagataatgtgaacttattatattcttgtaaaataaaatttaaataattatttattacatctctataaaaaaaaataattaatataataaaatatttaaaccttattaaacatgtagcaagaaaaaaaagtagataattttttttttcttaaagtactataattttttcataaaatatgttatcttaccatatataaataccatatataaatatgataaccaaatatatacatatatatatatttaaactagatagatgttacgtgccaagttaattttattttaatttttaatttttttaatatcataattttaaa

SEQ ID NO: 95413 - DNA, 504 bp, Cannabis sativa
ctttggtctaacattgcaagttgagcctcaattaccattttttttagcattggtattagaaactagtagtgcttagcactttttcgatatgtcgcgttgcgattggctagcgatatttcctaaaagctattatattaaactatatgagacctgatacttagttagacccataacgatattgacacataagagggtgctaggcaccacaggtgccctttaatatatttttttttagaccactgttattagacaataataattttcatgaccttctacaggttgggctcctaacaagtaatattctctaaaaattattttttttaaataaaattataaaaatctttaaaattctattttgtattatttttgtgtatttatgaaatagtcacttataaaaaacaaacaaatccaaggtatatttttctacgaatcaatagttagttagtactaaaaaagtgtttctagaataaagttagaaatatctttatatataatatatatata

SEQ ID NO: 95414 - DNA, 896 bp, Cannabis sativa
actataagaatacatatattatgtttcatccactctcagaatatacaatagtggaaactgttgcagcaagtttaaccacgtagcttgagcactcaactattgtgtaaggtacgtaactgcactactattatcccctttaattgcaaaattcttgttatacccaatcactaacagggatttaatagcaagtcattgaagaacaaagaaaaatcaacaatgaaacaaactcaatcacatagacaagactaaaatatttaaaatcatgtcacataaacaagattaaaatattgaaaaccatgtcgtagagacaaaactaaaatattcaaaaagatatcacagggacaaagttaatcgcagtagcaaatgacattagcaaaacacaaccctgaccaagctacacttaagcccatgaaaggccagttggcctggccagataactttcaatagctataaatttacgaacgagaaattctaatttttttcttttaacctatatgcatatataattacacatacataaaatggtgggttttaaaccaaaagaaaattttaacttggttggaaggatgcatattttattaattaaataaataatagattgaaggatgatttgttttaagagaaataaatggatgaatttctcaccaagagtatgcaaatatttctagttgttaaacaaaactgaaacatttattttttttttttagtgtgctctgttagggtttttcctttaaccctctgaaggctcctttttatttctaccgaccacggctcgtcggctattattggccttgggtgtggctctggttgggaatgtttatgagtgacttgactttctcagagtggatctttccttttcctttggtggtgtttttggttttttgagtccttttctc

SEQ ID NO: 95415 - DNA, 3767 bp, Cannabis sativa
  modified_base (454)..(456): a, c, t, g, unknown or other
aaaaaaaaaaaaaaaaagctaaaaaaatagtatatgagatagttcgccaataattttttttaaaaaataaagataaaagagcttaattttttcaaaaattattattattaataataaataattatgaggcgggaatattatacttaacaatttcttgtgtaactgaacattaataaataataggatgtattaacttatttttattagagatatattctaatcaattttaaaaataatatgcatttgattattccaaagtggattgtgtcttttcttttctcccgttatgatatctatgaacactattttatgattctctttaggataaatactattttagattttatattttgtaaaaattattaattagacactctgttttgttaaataataaaatgaactctgtatttttcaaaatgatacaaataggacactgaactgattttttgtcaannnaaaatttaataataatttgatttaaaggtgttatgacaaaactgtttacattttctatatttgttcatgttatgaattgtcttcaaattgattattaaaaaaaaaagttatcaaaaattaagctcagtgtcctattttaaccattttgaaaaatatatggtctattttttcatttaacaaaaccgagagtctaattaataatttttgtaaaacacaagatttaaaatagtatttacccttctctttattgcttttctttttttaagtaaaataatacactaaaaaaaatgaaaagacgtaaatgttactagttaccacattcatatagatgttaggtattattattagaataagtcatttgtggggattaaggaagttttcagttggttgaaatctcagaattattccagagtaaggctgaatcatatagtcttgttattcaagcgaatcttaaacgatagaagctgtcaattttgaaggcaaagttctttacagaaatagtataggaccgataataaggtgtcaactttgaataagtttgcttgcaaattatgttgaagattaatattattaatattattaatgccaaaaatcaaatttacttgattttagacatcatttttgctaacaatcaagttttcttgatactatcgtaaatacatcgttaaaatataattttttttggacgaaaaatcaagtcttttggatgtcatcacaattgcatcgttaaatcatcatacatatcatttatttaaatttttactaaaaatcaagttttcgtaacaccattactgacgcatcattagacattattttaattagcttagctaataattaaatttttatggcaccattgcaaattcatcgttttgcgtcgttttttgcaattttcaaagtaacaaataaaaataaataataaagaaaggaataatttaaaaaaaaaaaaaaaaacacacacaaaaacaacaaaaaaattacaaaactacggtttgtacggagtttttaatatttttacagtttttttttaattttattaacataaaatacgatcttttggtgtatttttatgttgtatttttattattttattgttaattttttattatttgtatatgattttttatgttgatttgttgttattttgatgttatttttttgttactttcatgtgcttttctggttttcttgtattttttaaaatatcataaaattatatataaaaaaaataaacttaaagatgtaaattttttacaaaaatttgtgtttcatataattatcctaaaaaaaatcgtttacaatagtgtttgaaatccataaattagtgtttattattgggctgaagaaaaaaatgaaaactgtgtagcactttttaaatgacatctttcagtttccttggctttcaggggagaatttcattctctggttgtgccagttgggcaatgtggaggtggtcgtgtttgctggttgtctctgggagatcatgtggcagtgaaggaatgagattttgttcaaaggtattcgatgtgatctggctaccatgggacgagaactgaagaactgggttgttgaattttcatgtctgctacaccattaaactgatcctactcattgggctgtcgctgacgaaggagcgggcctcgagcattggagcattggctgcaacctgtggtattcagttaaacactgccctggtttgtgtttcacgccattctgagagttttttgcagactcattggccgattggtctagagttttgggcactgttgtgtctggttgtgttggtgaggtagcctcccatttggctactgcctacaatgtaaaaagaagggtgacttgatctttggttaaggcttagttagacttaggagagatcttggtacaaacttaacttctaaaaaaacttaactatgacacctttgataattttacatcaaagcttaccaatccaatctaatctacaaaggaatatattatattgatatattgctgtattacggttttttgacatgattggattgtcaacataatgagattaattgaaaaacacttaaaaatttaaaaattgggaatttcattcttgattagtcgtttggatataggtcatacgtgaaggaatgacatttctcaaatatcaactcttccttgacgaatggaactcaataaaacgcctaaagaaaacagagaaagacattgtttaactcacatttacatataaaaatcacacttttatacatgtaaagagagtaattagtaggaatggatgggagtaagaagagtaaacatgaatcattactaaggcagttcattttaacacataaaaggctcctaatatccaaaataatcaaataaaaaccagtacataacgtgtccacatagttctgtgatatcataaaaagaagctatttagcaaaagccacacaaatcacacagtaaataccattgatatcttagtagttaagtaatagtgtagagaaataaaacaagcaacaaacgatgggttaacacataacaacaatacatcccttgttcttgctcttctccttgtctttattaaagaagcaatggtgaatttggtcatatatatatatatatatatatcatttcacggatgatcacttccatctcttgaacttgccaaacccaccatgcttccagcgcttcccgaacttaccatgcttgaacttgccgtggccgtgatggtaaccaccatggtagcccccatggtaacccatgtgcccatgtgaaaggcgatgtgccccataagcggccgctgcagccgtcagaccaccggctaacatgggccccattcccataccatgtccaccgccgtggtgatgtcctgtagtatttatcagaggaattcgtcaaaattaacaataaagaataaacacagattaagattaccagaattttccaagaaaactataaagaatttcaaagtagaaagaatgaagaaatacctggtgcaggatatggatatggagcaggaggaggaggatgaggataagcggaaggagggtatccaccgggaggagtatagggcggtgggtatgcggcgtgaggcgacggaggagggtatccagcagatgggtagccgggtggaggagggtaggcttgatgatgatgaggcggcggtggatatgcagacggcgggggcggagggtaggatccagagtggtgctgctgggaatagtatgcactaccaagatgagagaagagccctctgtctctctcatcgtaattgttgtagtcgtcctttcccatctaatcaatttacagaaaaaacaaacggatttttcggcagacagaga

SEQ ID NO: 95416 - DNA, 865 bp, Cannabis sativa
tgactcattcttcttgtatttggatagattctttgccctcttgtgttgctgcctatttaatggaagataagtctggtgtggttgcttaataagatgttcattttcaaaaaaaaaaaaaaactttattaccgcacaatttaaagaaaataattaatgtgaataaagattgtaaaacaatctatattataatatcaaggcttgaaacacttatctgccaaatctaaaaaattcatttgtagaagacatgagtacaaaaaacattccttgtgctcattgaccatatcccaatatactttaactaattagaggcaagtcataaaaatagcacaaacaaccataaaaggcatgagaaccatcaaaaaatggtgcaaaaaccagctgtcatcaaacctaaatatcactattaaactcgataatataataaaaactaataattaaaattagatacactattgaaataaaaaatcaaaatctcaaaataacaattagtgtatataattaaaattacataaaaataaaatatttttcaaaaaaattaatgtaaattattttaacaaaaatatatatataaatgatacctatataattattaaataaaattaatatacgatatataataaaattattaattaaaagattatataaaggattaaaaaggaaatagccaaaaggccatgcaaataatcaataatcaaggtacgtaaatggctaaaatcaaagctgaaattaagaacatttcaatcataaagatacaataaatagcgaaatcacgcaataaatcgagacataaatctggccaggtagtaaatctatttaaatatggaaaatcctcttaaatattttatacaatactaatctgttaact

SEQ ID NO: 95417 - DNA, 555 bp, Cannabis sativa
gaggcgtaggtccaggtccgggtcctaagtctcagtctgggtccatgttcgggtttgggtcctagtcctagtttcgattttgattcagtgtttggtttaagtttggttctgggcctggtttggggtctgagtcctggtttaagtctaggtccgggtttgggtccaggcccagatcccagtttgggtctttgtttgggttcaggtccgagttcgggtctcggtccggatctaggtcccaagtttcgatcccggtctaggtctggatctgggttcgagtctacgttcgtatccaaatccctatctagctttaagtctgggtctaggatcaagtcccaagtctaggtctgggtccatgtctgggtacacaattgtgtctgggtccgagtttcggtctcagtttggttctggggctaggttcgagttcggttctaggtttgagtccgggtcttggtcactatcctagtcttgttcaagggtcctagtctggcagttcttctttaggttcccgttttgggtcccgagtctgggtcaaggtcccagtttgggtccaggtct

SEQ ID NO: 95418 - DNA, 571 bp, Cannabis sativa
cctacttgtattcatgtgggggctatatctcatactaacaaaaataaaatttagtaaaaataattataatgtaggtataaatattttttttaatgataaataaattcccacaaagtaaaaattttgcgtctgtcagtggtagtgacaataccttttataggtggtgccttataattaattagtgataaactataaaagttattttcttaaatcatatgaaatttaatatttaattacactaatatgataccaacgaggaggagagtactagacacccataatttaggggtgtgcagaaagtcatccaatttaatcttaaatgatccaataaaattagatattcaatcatcattagatcggatcagatgtaaattttgaaaatttaatcggatcaaatcggttgttggatggggatggataactgaccaatccaattatcatcgaatggtcatccaattatatttatatatatatttataattttatatatttaatatattttatttgaaaatatatattaatttatatgaaattaatgaaaaaaaagtttagacctaaaatattaattctt

SEQ ID NO: 95419 - DNA, 623 bp, Cannabis sativa
aaccacaaactcaatacctgatttcgccatatttgtcactaactaagaagatatcatagttgtactaaaaacctatttgggacctttcttgcttagggcatccacaactacattggccttcttgagatgatagagaatttcataatcgtaatctttaattaatttcaaccacgacctttatctcatattcaaatatttctgagtaaagaagtatttaaggctcttgtgatcggtataaatttcacacttttctttgtagaaatagtttcactaaatcttcacagcaaggaccattgtggtaagttttaagtcatgattttagtatgctactcatactcctttaattggcgagaagcataagtaataacccttttagcttgcatcagaatgcatgccagaccctatcaagacgcatcacaataaaccacaaaattttcttgatctgatggtagagctaacacaagagttgtgatcgatctttgcttcagctattgaaaacttgcttcacacttgtttgtccatataaatcgttgattcttcttggttaactatgttaagggtgttaaaaatccttctaaaaattggcagtagtactcggggaaacccagaaaacctttgaattc

SEQ ID NO: 95420 - DNA, 556 bp, Cannabis sativa
actaggaacacacttgcaagagacctaaagtcgctatttatataagtgtatgtgagtcatgtatgaactatagatttgctaaaaaaatttagcattttgcttaggctttgacttttggcccaatctagaaaactctaaagatttttatttctcttcaattttgtagataattctaaatataaagtcggtgatgactttgacaaaatattattctttccacagaaataattttacttatttttttatacaattgtgatgtatttgtctgtctacttaatatacatagttgttgccactgattttgcccaaaatacgtggacctgtataaagacaacacgtggagatgagagaatcagctcttaaagaaatcaaccaagtcttgggcaacagacgagtgtctctgggaagatgactcgcgaagaagatatgagaatgatctttatgctcccagatgccaggcccatactaaggcagctccgggaggtactggactctattgaacaatcacctcgcatttaatgccgcatgggggaaacgtgttggaactaccataaac

SEQ ID NO: 95421 - DNA, 579 bp, Cannabis sativa
acttacacatattcattcatgtcaactcgaatattaacattttttttctcgttttactttcattttttatttttaaatttaatattcaattttcttttcttaattttttattttaaaaccacattccagtcattaattaccctttcaaaacccacgttcaaaactcactaaaactacctcccaaccataacctttgccatcttcttcttctaactgcctcttttatcagttttcttttatatatctttcatttcatatttataatggctattacctgtgactttactttttccatctctattgctagaaaaagcttcaaaaataggtcatagaatagttgctaacaaggttaaagagaaacgcccaatcgtcaacgatgatgactatgatttcgctccctcagctaaaggtggtcgtcgtccagtgaagacgaagtcaaaggtgtctttgcctgaaaaaaattccaactccgacggccaaaaggaaagaagtcaacttcaagacaattgtgatgaaactgtaatgcaacagttatatctgttgcgagccaactaataattttacatatttttttttttt

SEQ ID NO: 95422 - DNA, 1312 bp, Cannabis sativa
  modified_base (799)..(803): a, c, t, g, unknown or other
gtaagtcagtagtcagtactaaaattttttatttaaaactagtcaacagaatttacgctaacaacattaactaatgacgtaaatatatatatatatgtatatttttttttttaaaggtaaatagcattttgtattttgtgttttataaaaattacatattaaattttttattttattaaataataaaataaattttatattttttaaaataatacaaatagtatcttaaattaattttgtgtcaaaataaaacttaataataatctgatctagagatattatgacgaaactgattatattttctgtatctattcgtgttatgaattattttcaagtttattatattaagaaaaaaatatatcaaaaatcgagctcaagtattatttttactattttagaaaatataggattcattttgtcatttaataaaacaaaaaaatccaattggtaactttttacaaaacataaagtccaaaataatatttaccttatatttttattgtattataaaaaaatatattaattttaaaagagtaacaaacaatagttagtttggcaagatttaacaattttattaataattttaaatttcatatttttgttataaatttattatagggctgaaatataaaatgatcttaaatttaaaaactaagttagtaaatgtctctttttaaaaaaattaaaaaaaaaatggcaaatatgataaattagctaatacaaattataaaaatacatttattaatattattttttacaaaatatgtatctaataattaaattaagttatataattttnnnnntattgcatattattatattgtaactaaaactaaatatattagattattatacaacaatatttgatatattgtatcactgaaaattaataccacaaaatacatatatcatatatcatactaaattaatactcaaaaaatacatatatcatactagcaaaattatatatgccactattaaattatatatacataccaaaaaatttatatataataaaataaaaattaaattttatcttaaataaataatatattatagacaacaaaaaccatatatcatacaacaaaacatatttacttacaataataatgaaacaaaataatataatattataaaaaaattgtgtatatcatattaaaaaaattatatacaaccataagtataccatacttacaaaattatatatcacctttatatatagtaaataaaaattaaatatgcatgatctaaaataaaatgatatttatatattatataacaaaaaatatataccttacaatcaaaatatata

SEQ ID NO: 95423 - DNA, 2107 bp, Cannabis sativa
ccgtccctgcataaaagttttaaaattatatcgagttatatttctatatgctagttacaaaccaacattatgtcaatagtgaaatggaacttaccttcatcgggcgtatctgtacaaaagagtcgagtttcagttgatcatgtgacactctagtgatttgtcgcacaaaagttgcctcgacatcatgtacgagctacaaatgagacacctatgttaatcttagatattagttccacaaaagttttaaactttagcagattcttttcctgcttaagttatagagtaccatataccttcataatgtcaggatcattccatggtcctttgttagacctaagacaacctccctcggtggagcatgtacatgatccacccaggaagtcaggcaactcactcgggtcaatgacttcaaaaagtttggacaaggatttcggttccagaacctgacaaaataaaatgggctttaactcaacagcactaaggaaaagaaaaacacactcaaagaaatttatgaacctgtatctttgcaattgtcttagcatcaagaaacttctgtgcagcaggccaaagcattttcttaaagccaggaccagcattgacgatgtacattcgatgtagtgtctgaattcattacaaaaacaattacgcactgatttagcagcaaaaatacaataatcaccgaaatgattcaaatacctcggggtaataactattgtctatctttgtcatggctgccagaagatttgcagcagttcgagtgaagttctttattccctacatttcatcgaaaaatcgattcccattaaaaagggtcgcagtaaaaacgctaaataacaaaccttttaaggtgatatggactaaattcaacttaaaaaaaggcattgataaaaggtcacttactaagccattcacatctaatatagtagtggttgaacagatttgtttcttagccgcaattgaacaagctgggaatttctcatgtattgctctctcaaattcttggacatggtactttaaatatcgttcgattgtggttatacgcatgagtttactaggatgagctttacccaacctttcaatgtacactggtctgccttctttatcaaccccatgatacccttgaggataatactgcaacacttcttcaagctcttcaaattcaaaatcctatgtatggatcaataaaaaaaaaatgagctcagaaataacaaatctatattgcatttcagctacaccgattttactcgcaagcatacatttacagagttgtaaaacgttgacatctaacctccaaaatagtgtctgttccgtactcttttctccagtttagcatttcttcccacatttggatcgttttttcaatgttaaagtcccgagctttcaaaaatctgcaaaataagaggtaatcataagcaatcgcaacattaacaaaaaaatgctgcagtatagtacaaaatttagacaaaccttaacagagtatagtaatcatcgtgcctagacggtaacaaatccctgtcgaggagtctttggcgcaaatcttgtacagcactctcctctttttcatcccgaacatcctctatcgacactgagggaaccctgtagtcaatttttcttttccctctttttttaagtgaatgagtgaatttattagaagcatttatggctttcttcttgaggttaccgattttcgaacgcctcctctcatcttcagagttttcaaaatctgatcttctatctctaatgtcttcatgagtactcattccttccaagccttcaataacaaatatgaataatgatcaatttttttcccaataaatcttagcaacaaaggtcttcaatgaagtaaacagtacctggcaatgaattcatcttgaaaagacaagactttgaaccagttgactaatcttccaaaggaaaaaacaaattgacagaagaagattctttcacgtacatgtctccatatgctgtcaagaacagaacaaacaaacatcttagaaccggaccacacatgattaagaccccaaaccaagaccaaaaaaatatcaaaataataaaatgaatattcatagtatctgttgaaatggtaatctaataaaggattaggatt

SEQ ID NO: 95424 - DNA, 591 bp, Cannabis sativa
tttgccagcgcagtttacgaaatgcgctggtaaaagttacttttaccttaccagcgcagtagcgaactgtgctggtaaaagtgacatttcctgtagtgacacttcataaagggtgtatatgcaccataaatattgttagtattttattataaaaatagataatttactctactttaattttatttctggcttcacctctactttcgaggagatatgatagctgagaactcgctaggctagggacattatataattttgaattataatatgtaaattaaatatatgtaacatactaataagtgagtatatgaaaagttgtcatgcttttataacataagagaggttacaaatttgaaatgaatttgtaatttatgattcacatttgataaagatacaattaagttagtaattgtatatgtgagttaaataaattaaatggagatgtttttgagaaactgtcaaaatattcatttacattagctaaatgagttttggaacgttaggtgctaagtttactcaaagaggagttttgaagtcaaaattggtatgcagagttaggtccaggcgacacaatcgccaacattactaaat

SEQ ID NO: 95425 - DNA, 704 bp, Cannabis sativa
  modified_base (670)..(678): a, c, t, g, unknown or other
tggcttccattttggccgtggatggacggagacaaccctctgacgttgggccgagctaaacgcagagagagaaagaaagaaagaaaaatgagagagataaaggaatcgagttggattctttgagtcatggggactattcagatggtggtttggcttgggggtggtcgaagaatggatgggttgtggctgtgcgagaatgaacagagggagaaagtgggagatgcgactgaaagggaatggctgagagggaattaggtttcctagtttttaggtttcaaaattagggttttagtttttcagtttttaatttaattttgttttatattttatttatttcaaaatttattttttttcctaatttcaaattttttttatttttttaaataattatttatgtggactaattaaattgtgtcatgtgtacactgtgtacacgtggacattccaacatggcacttaacagccaaaaattgatgaaaatgttaaactgctaacagaatacgggttttaggggttttaccactaaaattttagaattaggagttagttgcaataaactagacacttataggggttatgccgcaaattactcttataattaatgatcttttttacttttattcacaagtttcgttataactaaaagtaaaatatatatatatctttatannnnnnnnntgcctatctaacggcaattcttggtt

SEQ ID NO: 95426 - DNA, 852 bp, Cannabis sativa
ttattttattattttaatgtatataaataatattttattattttattaaatataaataaaaaatcacacccataaatttctcataaaccaaaaattcatttataaacacactttatatagaatatatatatatacaaaataataaagtgtcttactcatactatatctgtaatctgtggatgcaatttttttttttttttttttaatgagagtggatgcaattagtttgattcttgaaattttggcgaaactccatgaaaatgaaaagttagtttctccaacagtaagtatcaaggtttattaccatcgtttcctgctaaaaatttatgcagtgcttcaccctctcccttcctcctttctttgaacgacattccatccactcttccttctctcttctcatagagcagttgttttaagctctctcttctttgtactttttccttcttcagtattgttttgttctttctttttctcctcttgattttgttggctaagagaagatccgcacgagactatataagaggggacaaaaaaattaaaaatgttagtttactcaaaatggttagctacttattattagttctaaaaaaaatgtatagctattttaagcaacacaaaaaatcactacactatttccatttgatttagcttttctttttttactttttcactttttacccttgttttttactactataactaaattaatggaagattgagttttgctctattagttttaattatttttatttttttcaatgaactttgtgaaatgtgtatgctacttattattagtttttaaaaaaaaaaaatgtatagctattttaagcaacacaaaaaatcactacacta

SEQ ID NO: 95427 - DNA, 858 bp, Cannabis sativa
attttttacttgattttgtagtatttgctactggttattagccagtgacttgataggctctcttgattagtacggcgacctacctataatgattgtcaatcacttcttgttgggctctcataatttccttctctcgatccctcaattcttcaaactgtcgtcattattctacaaagtcaaaatgtatagttgctctagtatcttgttgatcgtaatgaagagtgttattatggccttgtatttgccctagtgtagcttgcaagttctgtagttcggtgtcatcaccgattggccattgagaatttatagtagatgggattttagtagtgggggtagtttgctcggtctgagtactagtagttaaggtttcttgcacgaccagagtaaacccagccagtgggtaggtagtcactccttgacctatagtttgttggcctattggtggttgaggattagtcagagtggggtctgtcttggctggatctctagggtttgcaggtgtctgcacgtttggatccatagccattagattcgttgtttcagtctgatttctcctccgtatttgtacaaccatctcgtgtcttgaaaaagacacaaaagaaagacttgtgtttctttgttctcaataaaagtaccaaaatattgacctcgcagccaacgatagtgagtcaaattaaagcaatttaagaataatttgaactaacaaatatgagtaatatataataaagagaataccagaattataaaggttcggtctcttgatgatggttatagcctactcccttttagttgtattgacttgtgagtagatgaacaagaaaaccttgatctctctcaaaagctcttacaatgatctct

SEQ ID NO: 95428 - DNA, 559 bp, Cannabis sativa
tttttaaaaaaaaaaatgtgataaattttatgaggatgagagaaaataaaaaaatatatattttagaataatatgtgtattttgacaactataaatgtcacctctattagagatagtcttaatcttggacatctccaaaatgaggattgcccattggagttcttgtcacatatgcaatatgtgatccaattttcaagatcaatctttttttgacgtattttttcaagatcaattttatgtgaagtgttgcttaatatagattatgaccacatgacattatttatttatttattttggctgagaaaaaattactttttatcaaaaaaatcactaatttagtgtgatgtggaccctgatagacaatttttagagttgtcaattattgaagtatatattcttgcaaaatgtgtcaaattttatgtgaattaatgaaaaaataaaaaattatattttaatataatgtgtgtacttttggcaactatagatgttgtctcccgttaaaaatagaccggaactaatgtgagtgtcgaaatttcaaggctagttttttatttttttt

SEQ ID NO: 95429 - DNA, 666 bp, Cannabis sativa
tggattttaattataatttaggttgttatattagtttctatgtaggtttcaatataaatttctgtaaaaatataaaaaaatactgcttttaaagtgtaaacatgaattttttttttccaagtgaaattcttaaaaattatatttatcaaacagaaataaattagatttcaaaaattttatattagaaaaattaaataaaaactgtgtgaaatttttattaaaataaaaaaaatatacacgatttaaaaaatatatgaaaataaaattaaatatgagtattgaaattaacagaaaataatatgagaattttttttttaaaaatattaaaaattattttaagcttaattttttttttaaatattgggataaacttattatttttgtatttgtggggtgcaaatagaatttctctttacatatatttaagttttatttggatcatctccattgtagaatttatacttttggttcaacaactctaatgattcacactaaatatttgactaaataaatatattttacttaaaagatttcgtattttatattatttatattagtaacccaaaagaactaatttatgatataattataacacaactactagtaagaatttaaaatcttaaaataacttaataaaatagaatatttattaaatcaattaaaata

SEQ ID NO: 95430 - DNA, 1144 bp, Cannabis sativa
atttaacaatctcaatagtttgggaggagtttttaacggccaaaaaagtttaggtggcacgatttagtacatgacaaagttcgggagaaaaaagtactaattatccttaattaaatgacccgaaaacataatacaaaagaatatctacttttatctaaaaataccttattcaataataatttctaattttttatataaaaaaaaaaaaactaaaattctaatttaagtgagttataaatataagaataacctctaaaaatactttattcaataataacttctaattttatatatatataaaaaaaaaacttaaattccaatttgagtgagttataactaagaataacctctaaattataatttgttacacatttaagaaagtacaagaataattatatcttaaaaactatagacatatagtttataaatttatttatatacaattaataattttagtccaatttatacgacatatataaatattataattactcaaaaataattttataataaaatagtactaaaaattgtttactgttaatgttattacatttgatatttattacttaaattattttttctcatataaagttttcatggttctcacaattttaatttgaatgtttaatttatagttttttaatttatttaagatttattagataaatatcacttaaatatcatggtataactatagaacttttattaaaattatttttattttaaagttaagtcaatcttttatgagttattggtatatatattttattctatagtatatttcttttttaatgatctatatattttgttgcatgatatattattactcatcgtagtatataattttattaatataatatatacatttttttaataatattattttattttattttaatttttgtggatatttaatttctattgtacaatacatattttttatttcatagagtacatcatttattaaatgatatattaattctctatatatgtgtaatcactataaataaatagttagtttggcatgatatacatattttaatgttagtatatataattttgttagcattgtatataccttttgagtattaatttactaattttacttttgttaaaaaaaaaattgttgtatataattttatta

SEQ ID NO: 95431 - DNA, 761 bp, Cannabis sativa
tataggccgaacctcttcccttttattttcttctctaaattttcgaaatccttgagtgaatgagtgagtgcccacacacgtcaagtggtactgtgttctacagttaatttgttaggactcaactaaattcaactctatatttgtatatgatatttatagtatgattgtttagtgatataagggtgattatcttgaagatgcaatctgaccattttcaacttttatgctgattaatggatgttgaagttcaaaactacttggagcttgaaactaagaatttggtgttattataattgcttgtatatatagaattttatctaaatgagtgaccaaataatgtattgagttagataaatatgtagagtttagagcttaaaacttaaatattccttagtgcttttttttttgtaccattattgatatagaaaaatgattagaaagtatattattcaattttttttattaaaaatgttctcactttctaaacaggcactcttctggcagcaaaagaattataatgttgtgaatttaacaacattatatggatcaacatttcaagaacatttttcagagatccataataattattcctgtatttatttatttatttattgaccttttattgtagttgttatggatttaaaaattaagttattatatcactacagaaaaaaaaaattaaactcttattttagtaattggatggtgttctgtcagtattacaaagtggcatatgatttggctttcaattttatctcaag

SEQ ID NO: 95432 - DNA, 1500 bp, Cannabis sativa
atttagacaatgaataatgtttggaaaatctttaattttatggttttcaaagcaaaagtttaggaaaacatgcttttttttaataaaaaaaaaagttattttatagatttttttgaaataaattaaaaaaatatagaaaaattgtacaaggtaatggttacccttaaaaatattaaaagatacttttggtatgattaatttaaaaaagaaaaaaaaaatgtgtatatattgtcatatattacattgttcatgtataaataatttatggaatttatattacatttaggatatatactattttgaatattgtgttttgcaaaagttaccaattagaccatctgttttgttaaatgacaaactggatcatgtattttctaaaactgtacaaataggaccctgaactgatcttttgtcaaaataaaacttaatataataatccgatatagagatgttaggacaaaactggttatattttctgtatctattcgtattagaaattgtcttaaagttggttatattaaaaaaattaaattgttaaaaattaaactcagagtcctatttttaccatttaaaaaaatatagggtccattttgtcatttaacaaaacaaaatgtcaaattaataacttttgcaaaacacaagatccaaaataatatttacccttacatttattagcttccaaattttaacaattttcaagccaatagatcaagcaaatacacaacatttacatgctaatcacgagtttccctttttttttaacttaggaatttagcttattttagggtttaattaatgagaattgctaaaaactattattggtacttagtaatctctttaatatcatactgttattagtgtaattaagtaacgaatctcatataacttaagaaaatagagcactactatgaggcacccatggtgcctaacaccacaatgaaatattgtcctataattagttagtgattttctataatatgtattgaagtaaaacaagtgtgactagatatgagaatcgctaaaagacactattggtgcctaacaccctctttggtgtcataccgctattggtgtaattatgtatcgggtctcatataacttaagaaaatagcttttaagcaatatcgctaaccaatcatggagcgtcatctatgaaaggtgatgggagtagcaatgctcacccgatattaagttataccaactgcgatattacacctaacaaagatactagacaccatgtgtgccctttagcatttgtcaataaaataatttttagaaaatatatcaataattaatcgtaaggtatcacctagaaggtgttagacactactaatactcaataacaacgttataaattaatacttcatttgactcttatagttataatttgataacacaattttttacaaagattccactaattaatagtgagtcattcaaaattatgaattgaaaatatatatacatctattttgcaataatgagttattatacaaaaaa

SEQ ID NO: 95433 - DNA, 728 bp, Cannabis sativa
tagggcataaagcccaacaatatcttgaacccacaactggagatatatttacggcaccttttgttgattgtcattttgatgagacaagtttcttggctttagcgagaggagaaaagaaacaaatggaaaaaaaaaattacatggaatgcacaatcattatttcaattcgatccttgtacaaataaatgtgaacttaaagttcaaaggataatccattcgtagaatattgcgaatcaataaccagattcattcactgacccaaagaaaattataaaatcacatattccaactgaaaatgctctagctcgaattaatgtcccagaaggacaattttctaaagattctaaagcatgcatgaagtgtggcagaccagtcggttccaaagataaaaatcctcgaaaaaggaaaggataaaataatcaagatggtcccaatgaagaggctaaaaattttgaggaagatgttgacataaaaaattctcttgaagagatttaagtacctaaaagttttaaaaaattatgtgaactcaataaattaagtcaatacaggaaaagaatggaaccgactcgaagtaattgttgataatatttttgcttataatgtagcactagaaattataaatgaaaacgaagatcttgaacctaaatctgttagagaatgtcaaaatagaaaagattggtcaaaatagaaagaaacatttcaagtagaattgaattcacttgctaaac

SEQ ID NO: 95434 - DNA, 920 bp, Cannabis sativa
caaaaactgcttcaacaaattagagcaggaccttcaaaatatttaagacgacaatgggtaacgtgtattcaactattttttttataaagaaaatgattcaaaagaacaagctagataataataaaacaaccattaaaaatatgcatacaataagaaacaaaaaataagaaatacataacagcaacaaataaattaaaatgagcaaaagacatagatgaaagaaaaaaaactcagaacatctacagcaaaaaaggaaaaaaaaaaaacctaaaacaactgaaaaataacataagtaccttcagcacatcaagttcgaaatcagagtttaaatcttcaatgattgatttcaaatgttttgagtttctctttttcagagaatgaacaattgatttcattttcgaagctatagaagatgtagggttatgaaagttttctttaaaatatttcttatctattgctaattgactaataaaaataagagaaacaaaaaagaagaagaagaagaaactgaaacaaaaatggaagatataaagggagaaaaataaaaactaacactagaaatgtgtggatttttataaaaaaaaaataattaaaaagaaaagaaaaaaggaagaaaaagattaataagaaagagagaatggcaatatgaatgaaaaataaataaataaaaaactattataactacaaataaaaaaaaaagaccatttccaaaaaaaaaaactacaaataaaaaaaaactattggtggtggttcttgtagtgtcattccacgtgttgcgaatggtgtggcccacgcactagcaaaatctgttactagttccgttggggttgatttgtggacaggtgcttgtcctaaatttattagtactcctagctgatttaatttaatgtgagatatcctttcttaaaaaaaaaaaaaaa

SEQ ID NO: 95435 - DNA, 819 bp, Cannabis sativa
ttggatcaatgatgccttggcagtagtctggttgaccacattcttaattactccctaaatgtatatcatagcaagttctcacaatctgaagcaaacaatccccatgaattcacaaagatatcgaagtgactgccgataagagtgtcttcaacaccgcaagctccatctggtcatcgcccaaatcgtggcatttgcacactgattcaatcaacttcgacaagagctttccctccgcttccccgctaggatcagcctcgcctctcaagtagacatgggcaataagcttctgaacacaatcaacggctggatcgacgatcttaagaacgccggaggaggcgacgttaatcagaggactgagaatggactcagaatcagcgagtgagtactccgtcgagcctccatcgtgtaaggggcctgggccagatatctccctcggaatctacacctggactagactgttgtttggaactcagcttctcaatgacggatttgcacttgtgagcaagcttggcaaatacaataaagatttggtatttgtaggggttatttcaaatatatattctcacaataacgatttggtatttttgtgtatagtattttaacttgtcaaatatggaaaacacacacacatatatatatacatgtatttttttttttgcttaaaggagaatattatgtgaacttatactgcatttgtagtcacatagagtcgagacaatacagtatgacactctctaaatgacaaacctttatatgtttagaattgtaagattaattaaaaaaataagaacaactaattttgtttgcttatgaaatcca

SEQ ID NO: 95436 - DNA, 505 bp, Cannabis sativa
ttcaggggcatgatttagtacatgacaaagttcggggggaaaaattgctaattagccttcttattttatcaatgtatgaatatgcaaataaattcatacaccattgatgtacatgtttctctgagttgtcttattttctttatttttcttttgtattccttgtatgtctcttatgtgttagagcatctttaaggagtacactaaatttggtatcacattatcaccaaatttagtatcgaaaattatatccacttcaatcacaataccaaaaattacactaaaaaaactattctgtattattatattaattttttaataaaataaaaaaattaatattatattaattaactaaaatcaccacaattgttatatctaaataataatttaaataaatttcaaagacaaaatttggtaaaatatggtttggtaaaattaagggattaagaaccttcttcattctattagccaagattttatagatagtggtgcaaaggctaaaagggct

SEQ ID NO: 95437 - DNA, 968 bp, Cannabis sativa
ggataattatatatagaaatctaaaaatataatttaagtattattattttcaataattaaattaaaatatttatttgtaatagatagttaaatttaaatatttatagtgtaaattattttatattttagagagtgaggtcatttttaatgggacactaaaacactaaatataatgtaatttcacattatatttactctaatggagcactaaagctattctcataaatagctttgtttacggtgttccaccaaatttagtgggacactgtagactacactctttttttaaaaaagaagtttttaataattaaataatacttttttaaggaaaaaaaaagtaaataattatatatttagtattaaaatatttttattatattaataaaataataaaataataaagaatataaaatttagtgtaatttttagtgttgtggtttggttgaattgaaattgaattgaattgaaaaaaaaaaaattagtgttaaaataataattttttagtattgatttaatatcaaatttgagtttttccattagagatgttacgagggaggaaaagactcatttgtctcatctcaagtttcattgtcatttggttaacattcacattggttttgattgattttcctctttgttttgttgtggatatcgcttaagtggttatttgtttattgagactttgcgcatagaaattgtcttaagtggccgaactacgccattggccgccattatggactctgtagaattttggaaagacaatgacacgcaccactatgattgtcattaacatatttagatatacgtgtcaatcttattaaatttatattttattttttttttattggaacttgaagcttcattgataaaaaaagaagtacaaagcaaacaagtccttacaaggaaggtaaagaaccattccataataactctctgtctaatcttaaacctaacttagctaaattatg

SEQ ID NO: 95438 - DNA, 1497 bp, Cannabis sativa
gatattgacatgtatgaagctgctagtaccactggtaattttgatacccttacgcctattctagtaattttgcttcgagaattgtctttcgctaagatgagactaagagctgcttcaaaatgatattttaatcaaaagggacaagcattcaagccacactatcaaatcttcatagtttctactttctaatagaaactcaacatcaaaagtactaaacataacaaaatcaacaccatagaaatttgctgccacataccaatgaggttcacttttctcataacaaagatagaaagcagcttgaaaagagtcctatttgtttagtgattgagaaaatcatatgttgttgtcacaataaaaattgtcaaaaagcaaataaaccaccaaaaaataataataataaataaacactttatgctgcttcattttaagagtgcattcctcttttgtacactatttaccaaaataaacaaaggaaagaaatgtcataatgttttccatctttgagtaccaatcaatcaatcaatcttatcacttctaaagaaactttaaaaaagaaatatttttttaaaataataattaaaaaaaaaaaaacctattttgagtttaatggtccaattactaattgaaatattctcttcctgatgaagaagaggggattaaccagaatataacacaatattaaatatgaattaaataataataaataaataaaacttcattaatatcaaacttcataatacaataccatgaaaacccatcaaagaaaacttaagacatcacaatctataaatttctacaaatatatttttatctttatgaaaataagaacagagcagaataaatattaaataataatgataattaaaaaaaaaagtatattaatatcaaactaaactaccatgaaaaccaatcaacgaaaactgaaagtagaaccagatgaatgttgttaaaaattgatcttgaatttttcagctactgatgattctgcttctgggttttggtgaacttgttggcaataaattcaagcatcattttcttgaccaactttttctttggaggatttacatcacgaataatgggtttgaactctttcttcttcgttttcttcgtctttgctgtctcgtctgagtcggagacctccggtttatactgagatggggttggattcattttcattgcggtttcgaaatctgagattttgctttgtgccatggctctgtttggagtttttcactattacaaagttggtctctttgtttttttgttcttatggagtgttgagatggaaatggtgttgttgagtatttatagagtgagaaaatagaacgataagaaaggagatcaacaataaagtagttatatatttctagttttctttatgcgatcttttcttttgtttattgatagttttctcactgagtacagtggcacaagtgataatgtttgggggaatttcaatggacgaacgagaggccatggtgttaaaaacattaaaaa

SEQ ID NO: 95439 - DNA, 966 bp, Cannabis sativa
cttctgctgtactggcggcatgtctgggttaacgttcaggacatgggtaatcacatgagggcttatgcctgtcatgtctccttggcgccatgcaaaaacatatatggccgccattaatgcttcaataattttgtttctttccttcggctctaggttttttcccaggcggaggatcttggtagggtcgaggtcgcacactcgtacttcttcaatgtcctccataggatctatagttttttcagatcccacgcggggatccaactcatcttcttccaccaacgctaattcaatgccctcacagaccacaagcaccggcaaatatgctgcaacattatagcactgcctggcctctccctgatttcccctcacgatacctactctgacttcctgagtggggaattttaggcacaagtgtgtaatggatgtgattgcaccgaactcgaacaaggccggccggccaaggatggcgttgtatgcggttgggaaatctaccaccacaaaggtgcagtatttaaaagtactctgaggggtatccgagcacatggtcattggcagtctgacttttaccattgggataagtgttgtcccattgaatcctgtgagctgggagccgctgggcgacaaatctctgtccgtgaggcctatggccgtgaaggcttctttaaacaacaaattcacggaactcccattatcgatgaatattcttgctacaattttattggcgatgggagtctctatgactagagggtcatggtgagggaaactcatctgtttggtgtcctcttccgtgaaagtaatggactggtccatgagtcggagcctttgtgctgaagctgggtgacttcccacactttatcatgctttatggctccagcgtaacgtttcaactctagtctggtggtccccccaatatggggcccaccggagatcatggccactctctcattgggtcttggtgggagccca

SEQ ID NO: 95440 - DNA, 715 bp, Cannabis sativa
aaaagatttccacttccatacattgaattttttccatgtgttcttgcacagaatgaaacaccccgatttgatatgactagtgaagcaaggaagactcaaatattttgtttacttgtaatcatgtacgattttaagcataagaaaattagattcgtgtttagaaaccgtgtctaataaaaggttcaactttattttattattattttagatctacacaattttattttagtgatatttacaagtgtatcatattccaatataaaattctccatcttatatgttcttctttcattattaaattattctaaaataaaattaccattaattgtgattatttagaagcctttatacattctatttaacactaaaaatatctatatatataataccaaattgaggaggggcaattaattagcaagtgttctctaatatttactatttttttttttgttttggttatttaagaaagaaaatacaataccaaattatcttatattcatattagagttagagcataaatagtgtgattattgatttcaaatgaatttgtggctttaaacatggcttcaaggcttctagaagggtttcctaaaaaaaaatcaataaataaaagaagaaggaaaaaaagagagaaaatttgtaaattgtaatctctctctcaatatatacatactaaaaagctagttaagaagacttgtttttttttttttttttt

SEQ ID NO: 95441 - DNA, 1455 bp, Cannabis sativa
caatacataaaggaaaaaaaaatttaataaattaatatatatgtataacggtaggtttcggtttttcggtcggtttattaccaaaaaaaatcgactgttcaagttttaaccattatcggttctttcaatttttgatttcgtcagtttcggttccaacaatgttcggtaggtcgatttgaacggttttttcagttcttgggattttatgctcagccctattctcatggtcttgctcttttctggaaaagccttaggaaaatgcgtgttcctcaaaaagttaaatatttcatttggaaggcttctttggttccctaactctattaaatgtgaagaagcatgacttggagcctgatactacttgttggatgtgtaacgatggggaggaaactttgtttcatgcattatgggggttgtaatgcgcttgttaatgtttgcaaggagattggtcaacgttttcaggtgcctttggactgccatggtaacctttatgattttttgcttcatctagttttgtgtctcttgggaggagatggaacaattcatgatcctcttatggtataggagaaacaagttccttcataaaagaaatccttctaagcttggatgcagcaacttcgttctaacagtaggggttttagcgttggtgtccacagtcgaatctttcactaatttgaatatgaacgagaaccataaggactatattgcctttaattttaagtatttagtttttttactctaaacttgttaaattttttcccattatgtgtcataactaggggaagaccaaatcctattgaaaggcaggatatgaaactagagggagacctccttcccacaacattgtagccttacatctaaggcccattttgctaaataatgagctaacctattacaatttctagaaatataggacattcccaaacaattactagaggtcagtccctttttaatattcaaaattagaaatttatggtcacctctacttatagtagaatcattcattagattaattgcattgagagtcagaatgaatatgaaactcacaaatattcaaattctcagtaatagcaacgatttctttaacgacatgtagcttagccactagcagagtcatgggaattggccaaaacttgtggaaagattccacactcctacttgtatggtcacagataattcctccaatactagtgctctcttggttgacgtctatagccacatcgacattgatcaccatcttgtctacctctgtatctcaggaggggaccagcgctggttgcttgggggattgcttcctagtctctagatcaaccttcttcttgttcaggcggctttgatactcctgtagaatttttgtacctacctgaataatatccttacttttgggagataaattattgtgtagcgacaaatttctattgtaccaaagctacaaggacaccatcacaaagagatcaa

SEQ ID NO: 95442 - DNA, 1219 bp, Cannabis sativa
gttactaaatttgttatatttttgtgtactgttctagcatgttgtggtacacgtaatatcactggaattggaatgggaccaatttttgctttagtgattatttctatgacccattgataaataattaccccctttttttcattataaaagatcaaagataatttgtattgtaacaagtctagaatttatgctgcgggggatgagataactgcggcgattccccttaaacgagacaataaggcgtttggtacgaggtgttcaaaataatttaattatagagaatattatgaagaagaatatgattatagagaaatgtgtaaactgtgtttggcaatgtagggtaatatgtaatcatactgttaattaaattacactgtttggttgagtataggaatctcttatattataattttaaaaaattaaaataaaaaatattttgtattatatttatttaatgttaattatatataaaaataaaataatttattaaaggaaatatatttattaattagtagtaaacattaaattttattgtattttttattaattaaaatgaacatttttatatattttaccattatgttatttatttttgttcgctatgtcatttatgtacaccattcgcataaaatttatgtataataaatatatatattattgctaataatataaaaataactcagttaaaaaaaaaaccgatgtcacagactaaatatatatatatattgtaatattttatttataataaatgataatattattggtaattaaatttatttattaattcaaaaatattattcaaattaatataatggaaagtaataattcaatcctacccttttttaaggtatgaacattaccctcctgaagggtagttatattactaggggaataacattccaagcctaaaccctcaaaataaaaaaggtaatgtttcacattaccattacgttacttgcattaacctattccaaacagcccctaattctttggcttggcggttagtggggtagtgatagaaaacaatttcaatacttaaaaggaaactatattgtatacctattttactttatttgttttaatttttatttttattttcatgttctttaagatatactcacttttataaataatgttcttattagaccccttaagttaatgtaaattatatgttagatctaagtagaaagtgaaagtatattgaaaaacttacttataa

SEQ ID NO: 95443 - DNA, 543 bp, Cannabis sativa
taaacttatagttgatggaattaggcctcttttggcgaagttgatctcttcttactagctgcctttgtcaaagggtgttggattgttgaaaattcaattgttgcttaagagattgtttatgagcttcaacataaacaaggaaagttttgtagggattaagtgtgatatgtccaaagcatgcgattattttgagtgaggtttcattgataaagtgttccgggtctttggtttgatgatcagtttcgagagttgattcgtttttgtatctctcagtcagttttcaggtgctacttaagagtagttttttataaaatcatatttccctacaagaggccttcgtcaaggtcaaggtgactcgttatcactttatttgtttatactttgcttgaaggttctttctaagtttgttaacttgtaaaaaaagtgattaatgaaatataaggagtcaaggtgtctaggaatgacccttccatctcccacattatatatatatatatcaatgacaccttcatttttgtcaaagtaaattcaagcaatattgag

SEQ ID NO: 95444 - DNA, 680 bp, Cannabis sativa
ctcaatttgatcgtcgtgtttgaaatgataaatgttagttgtatttataagcttaggatcaagatcttaaaagttggtgcctataagaacttaagttgttaagttagttaagacttaacaaacttaacaaactctgttatgagagaaatctccacgtcagcttaagtatagttgcttccgggaatgtgtatcagagcttccgaaatcacggaccaaagcacccgtaggaggagctttccagataggaaaaagccggatgtagtcaactatctgaaatgcctttttaggaggaataactagcctgaggacccttcctggaaggacaagaaaaccttctaggacttactaccgcaagtcaataacttttcaggaataatatttggagatctttttatttagaggaactattccacagatggttatatgttattcttcttatagcataccatttaaatattttgataaaaaaaaaccattcgtgcgttaaaacttgtacatgttaaaagttatagtattatgtcaaatttggcacacaattaatacaccttttcatttacattattgtctgtcggctgggaaaatagccaactgactcagagtctaataaatgttgattattcactggtaaggaggttagaataataaataaataaaatgaacacatgatttatagaggttcg

SEQ ID NO: 95445 - DNA, 558 bp, Cannabis sativa
gcaataaaatatcaaatcacaattgaagtcaataaaataattctagcaaaaagaaaattaactcataatagattgtgaaaaaattacaaagtttaaaagaaaagagagatacaaataaaaacccatttggaccttgtcacaatactccaagttcctcttccaaatttcttttcttcttcctcttaattttttgccaatctttaaataaaaatactaaattaaaaccctaaataaaactctctctttttttctttcttttttccttttattcttctttttctttttcttcattttcttcactgtagggtccctggagtagcacactgccgcctgctttcctcaattccccttcttgtatgtaatgtaattcacccactgctccttcctcgtataaatatatatataattctatttaattatttttttttcattgaaaataaagtcatgggctgcccaaatttcttcatttgggcttttttttgtttttttttttttgtttttttgtccaacatcatggcccataatactaaatgtcaattttgtatttaaattcctaca

SEQ ID NO: 95446 - DNA, 822 bp, Cannabis sativa
ttaacttcagaaaaatcagccccactattcaaacaatccagtactgcattaacaaggtccatacctacaatgtcccaattcctttgataaaaataggcattaagaccatcaagaacatgggccttatcacccgaaatctgaaacacagcctattgaacttcatcaaacgtaaaaggctgattcaagaaatcaatctccaaatcctcaagagggggaccaaggcaatcaaggatgtgattcacagcctccgtatcacacccatcacaatgaaaaagatcctcaaaatacgagagcacaaaattacacatgtcctccacactgttagcaatattaccattgtcatccctaagaagtgaaatggtattgttacgtttcctcttagaggcataacgatggaagaacgttgtattcctatccccatccctaagccaattaaccctagccctttgacgccaataaacctcctctctatacaaaagagcatcaagttgtgactgaatatgtttaatgtgagaaagtgtgtcactatccctaggatgaatggattggagcctctccatttctttttgaagataagcaatcctaggcttaaaagaattcccaacagacctaccccaagaagtaagggaattgatagaagctttttgggaatgaagaaacccagagtaagcccctacagtggacacattatgagaattggaaccccaagcattgttaagagtggtatagaaatcagggttctcaagccatacattctcaaaatggaatcgcttaatactatgagggtgataattagggacattctgcgtgactatcactttc

SEQ ID NO: 95447 - DNA, 744 bp, Cannabis sativa
  modified_base (222)..(229): a, c, t, g, unknown or other
aaatttaaattttactattaaaaataattattgtgaatgttaaccatagaaaaaatataatggttcaagcaaaataaataaagaaataatagaaaaataataagattatttcatatatagggtactaaattaccctatacactacaatattgcaacaacccaacattaataaatgaatatatgatttcaaaaaaataacaataaatgaaggaatattaatannnnnnnnatgaaataagaaaaaaaaaaaaaagccaataatttagaataatacagctatgcaatatatatatatataatttattttatttttttgaattttgatgatgtttattccacaccaatgattttgaatagggttaaaccaatatatcacatgcacaaccttcatagttttttttttttaatgagtattatacttttataaattttatatacattttgtaaattatttaacaaaaatatatttataaaaatattactccttgtacatttgatgacattagatgatctctcaattgtaattatgatttgcaatgaaaaaatatttaatttttaaaaataaataaataaattattcctaataaataatataagaattttttgcaataatctatattaagattgtaattacttattaagatattttacaaaatttaatttttttttgaattatttatagttttaaaaacaaaattcaaataatttatttcaatgcttaaaaaagacacgtgtacaataaaa

SEQ ID NO: 95448 - DNA, 800 bp, Cannabis sativa
acatttaggatgaccatcttcattccagattatgataaaaactttttaagactaagaaggaaatgaagttattttctagacattcttcatttggaagtagtttaagtatcactaaccgggttttttcaaattcaagttaatgagtatcttcataaatataaatataatatattaatattggtaatttttaatccacgtattaataatatatttttaatcaatgggtctacttacatggtgttaatactttgaaggattaatttctatacactgatcctctaatgttaagcgtaggtgctttctagcactcgtaaatgtttgttggattttgtcaaagaagagaagttgaggaagtctgctgagaattgtagcagttctcataggcagtttgagagtaaagtctcacagtttaagcaaatgtttaatgagatacacagcaagatggatgaagttttctctagcagggcttctcctcctatcagggacttggaacagatgatcaaagatcaccagcggtttatcaacgaacaaaagagcataatgcagtctttgaggttagctttccctttcatttcaaccatttttctatttgttgtttctattgctttagtttatcaagctttcccatattagtttctgtttcataataatttcatcagatcagatgtcatagctgctcaatttgtttaaattttacttataaagttgaatatatgaatatctgtatgtatgttaaaaaaccgatgcagagtgtgattgatgcatcaatatgagtatgtgatgaagaggtttaatgcctc

SEQ ID NO: 95449 - DNA, 600 bp, Cannabis sativa
  modified_base (280)..(280): a, c, t, g, unknown or other
  modified_base (409)..(413): a, c, t, g, unknown or other
tgatgtatcttgattgtgttagtacaaagtaagtaacacagaaacaaatttttttaataaagtttatattaaatatgacttaaattaagatttttttaaattaacatatgtatttaccttaatattaattgattcactgtcaatgtgttgtgtttattttggagtgttaagggaatcggttatggttgttagagttagttagattagctgtcacattctgttatttctgtttgctcttaactgactctcttccatgctttgtatcatgtgtatatattcngtacttgattcccagtataatcaataagacacttccttttcttcttcattttttctctatcttttctctctctgttctttgttgctctgtttcttttcactgcatttggttatgcttctcttcattctnnnnnaatgtcaaggagatacaagtctcccaacatggtatcagagctcgagtttccaccattaatgacgaatatggcaacctctggtcctggatcaaatgcaaatggtggaattcctatcaatgcctcaactcgaaatcaaaacagagcatcagatgagaatgctcctgttcatttcaatcactcgatttcc

SEQ ID NO: 95450 - DNA, 723 bp, Cannabis sativa
aaaaagtgttcaagtcttggtgtaattactttttcaataataaagtaattacgttttcacgtgttgtggtgtccaacattaatgatcactatgctttcagaattaggttatgatgctaaatctaaacttttctatttccatcacgatctccaaaacaattagaatagaaagaatgtaattatgtaagatcataatagcctctggtgcaggaagatctctaagtatggaatattcctgtccaatgcaatgtgttaggtatactttactgaacgatataagtcgatgacttgggaaggaactgtctccaccctttgttcaattcctaaataaaccttttgtagatttcaccacctattcgcacaaaatagtggtgatgctggatcttgggttccagagaaccactactcaattcaaaatcactcaaacagcagcctgatgagctctcaaaggaggaacactggcttagcgatagtcttcatatagaatacttagtaaatcctcatcaatttagttgtcacctccccaatagtcgcacaggttcatctgtgcagaaaggtagagaaaggtgaacaactagagatcataaaatagacatggataaaaccacaagctaattagccaaaaactaagggtattaaccggacaacctgaagatggtgtatcattaaccgattagcctagatttgagagaccaagaaccgactagtttaaaattggttctac

SEQ ID NO: 95451 - DNA, 1068 bp, Cannabis sativa
gcctaatgattctccgtgcatctacactgagcagggccttaatcttttcaaaacctattattagtagtaacacttgagattcaactcaactgggctcgatttcctgtatcatgtttaaagacatgtcaaagcccaaataataccttttctctcttcttctgtcaaataatgctgtgttgtgtatttatacttttgttttttgtctcgtctcaaagaaatccgaatgaatgattttttatttatttaatttttttttcctgtattttcaccgactatttattaaattttgcttcagaaccaattaaaattgtaaaaagtaaaaaaaattcagaacaatttatttatagaaaatttttaaaaatattattttttttatattttatttataattttatagcttaaaatttttaattataaaaatacacttgtaaaatttttaatcataaaactacactttactcaataaatagtgaaaaaaataacaaaaaattaatgaaaaattaacgtcacagacatctataaattaactattaaataaactataaaacaataaaacaacaactaaaaaaataatctcgcgacaaatataaataaattataaaataaaaaaatagtttattatttatactgaaaaaatatatttttataaataaaaaaaattaaagagtaaaaatataaatatttctatcttgacatatttttgtaatttttttttcttcaaatttttagtttattatgtaaacttttctttatatttatttgaaacaacaacaactcatctttatagtataagaaactagcaaatatggaccagactttttgacatggtacgaaacaagaacgagctcaagaggcacgtaaatgatcaggtatgaataattatagacttagacacgacaagagatgatgttacaaattgacaggacacgagacgaaaaatacaagtttgagcataacacgacatgaaaatataagattatgtatgacaagatatgacacgacaagaataaaaaatatgacaagtaagtacggataatttatctaaaagcacaacatgttaaaaacctt

SEQ ID NO: 95452 - DNA, 563 bp, Cannabis sativa
gtatgctaaacattattataagagttgttgttagtacaatttaatattaggttttaggtattttgatttaatacatgacataagaaactattaattgtaaacacttataacgctccatatctttgtatggtgtttggataccttaatgcttaatagcaatgcccaataataaaaatgaataattctaataaattctatatatatatatatatttatattatcctgagatagagagttttttaataactattattcgttcccacctaactaaagttctaactgatattatatattgatggatcaaacacgtaataagttaaattcctccaaatttataatatacttatgcctttacagacaattaatcatgaagattggcttgtttatatatatatttataatcattagttagtgctagcttattatatgaatattgctatttcaataaggtgtggctaaattagtaacaatgaaaaatgaggaaaagcttctagagagttcggagtttcaacttaaaacttaactaaagttaattggagtataatccttctctaatgtcacta

SEQ ID NO: 95453 - DNA, 577 bp, Cannabis sativa
agcaatacgtggctcggcacgtacattcacctagtataagtatatacagttatattgtataattttttttttttaataaataggattttttgtagagttttgttccataattttttttttcttgttgcaacttttttcaagttatacaaatttttgtaaatattcctcttaagttacattctatttaacaacttgctatgaattatgtagccatgagttacatgtatattgactatggcccatttaacaattttgagttgtctcaaatctaatttataagcattaaatatacaaatattacctataaaaatgtatatacatattcacttattcattattagactgatatttatgtatttatttttttatctaaacaaattcaaattatcagtcatgttagtgttacaccaataaattgtttaaactaatgagcacataatataagtgcaaagggttatttacaacaatttttatagtttagaagaaatttttgtaacgaaaaaaagggaattaccccatatagtattttttaaacctttttttcttcaaatttacggtttaggtttctaaagtggtt

SEQ ID NO: 95454 - DNA, 523 bp, Cannabis sativa
gacaaaaagaataacctagtaaaaagacctttttgcccataaataataatcaaaagtttaaaactatccaagggtaatttatcattaatcatttcaactaattcccgacattatcaaaacctaacaatgatgccctaataataataaaattctataccctacaaaatgtgactctctaatggcccaatgtcactttccaccgccgccaaacacaattacaaaaaataagagattcacatatgtagaataattaatatatatcaacttaaatatatctccacagtatattataaataataattaaatctcatgaataaaccctaattattcaataatccaaaatattgatcttaagcggtctttacatcaatacagtacaagaaaccttatttggatgacaaaattagtagaaagcaatatttactcagacatgaaccaactaggaaactctttctcttgaatcgtgtgaagattttgatcacccttaagttgtatctcattcctatgctcaatacacataaat

SEQ ID NO: 95455 - DNA, 850 bp, Cannabis sativa
tatttaggttatattaatacattttagtaactttcaagtttattttcgaaaataatgagttatcatctagtaagctactattttagtaaactgtatcttaaaaaaatgtatcataaagaataattagtaattttacctcttgaattttcaacaatactgattattccccttaaaatatatggcttgttaagaatcttccttgaacttttatatgtacagaaatttagtcattctgttagatttcgtctcattattccatttaaatgttaatatgtctttgtaaattagcaactttgccccctaaaggttgataactattaaatcatgccccctccatataaaaattagaaaaattcaacatttttttagtaaatcttaaaaaaaatttaaatcttataaaaagtgatcattttgaatgattaaaaaaattaaaaaataaattaaaatttaatactaattaagcaatttaaagaattatttagcacccacaaatgatataaatactatcgttgatttagctttactcacgtcagtagcatattcctatgtgggccttagcaaaaaaaaaatggggtattttggtaaatacatttaaccaactctaatccctttacccattaacatcttagaagatttcacaaaatccttatcgtttagttttcgacttttcagaaacatattagctgatgaattagtgattgtttatgtttggcatttgctcatataatttcactaaaaaatgagccatattcattgttcctgtacccgctgttaaaattaggtctgcctgtttagggctcgatcttggtaccagtccataacgatcaaagtcaaatcgtgaacctattaa

SEQ ID NO: 95456 - DNA, 715 bp, Cannabis sativa
  modified_base (89)..(104): a, c, t, g, unknown or other
aattatactattttaattattattaaaataaaaaactaaaatattaaataaaactaacactacgtggcttggcacgtaacaatcacctnnnnnnnnnnnnnnnntatatatatatatttatatatttcgtaagatatgttattattctctatcaaatggtgattcaaattgattggcatggtaattggtatatagcatgacgattaacgggtgggagatgatgattcctctagcattctttgctggaaccgggtaattactcttcccttttacttattaaatctttatttcaattataaatctttgaaaattcatatctatatttgtatttcaccacaatttaaataagggaattttcaaaatatatattaaattgactgaatttgaaattataaaaagaaaatagaaaataattataagataatgatttcatgaaaagttatttttttaatgtgttattattttattttatattaattaaatattatttccttatttaattttttttatatataattatttattaaaaacactattattttcttttgtttttttttttaaaaaaaaaagaaaacatacattcacttctctttttttcttctccctttttttctctaaaaattcctaaaagttgctaattaaagaacctaaactcactacaaaaaatttatttttagtcacaacaaatttataactaaaaataaaaaagttgtga

SEQ ID NO: 95457 - DNA, 550 bp, Cannabis sativa
agttttatattatgattatcttttaaaatatataactaaatttaattcattatttatttatttaaatatttttttttatcaccatatataatatacaccataaacttcactagtaataaagactaaatattgtctctatactatttacaattttatttatttcaaatatgagagatatattattaaaaaaacaaagtagaataatgtagagaaaatattgtagaaatatacaaaaaataaaataaaaaacataatgaagtttttctctacaccatattctttcttcatattttataagtttatctattttaattttaataaataattctgtgaacctttgctaaataagtgacacatataaagtaatctcaatcattttgaagggcgaaatagactttttttttaatattagaagttaatttgttacgtccccacttcaaaccttcattgggtccttacacccacggaatgaatgactcttatacatgagtaagtcaatatggctgcttcatggactgacgactggccctacagaccaacacgagtattt

SEQ ID NO: 95458 - DNA, 998 bp, Cannabis sativa
atgtgttggcaaatcaatgttggtattagaacttttgccagcatatataaaatgaaaagcgctggcaaaaataatttttcctagcacgtaaatgcacggttaaaagttagattttagtcactataaatgtacgcgggtaaaattttgacctctttgccagagcagtttgcgaaatacgctggtaaaagttacttttatcagcgcagtagtactggtaaaagtgacatttcttgtagtgagtgttatggctctgataccatgttgaaaaccatgggattccatcttaaaactaattggtgataagtggagtagtccatattcttatatatggctccacagtctaccattaattctatatgggacaatgtccacaatagctatcagacctaaattaactcttaagtggtcaaagtatcaacaattttaccttgcttaattttgatcacttatagaggtaaagaatgtttcttttgatctagaaatatcagattagcaaccattgatattaaattaataagtctagatagaatctaaacttagcttgagtgacacacttagttagcatattagtatggttgtgagaattgttgatcttcttcatgaaaacttattttctcgccacaacttctttgataaattaatggagttttatatcgacgtgcttagatctctcatgaaacatgagatttctcatgaaatgtagagcacgttgattgtgatatcttctgacttaaagcctaactccttggtgaatccttttaacgaaatggcttcaatgatggctgttgcaaccctgtatcgctgttaggttatttttagtattaaatttagattaattttagcatattttttttatttagtttaaacatgtttggagcattttcacgatttttatcttttaattttgcagatttaaaatagatgaagagttggaaaatatcaatagaaaaagatagcatatcgcataaaaaaacatcacggtggaaaaatatcaaatt

SEQ ID NO: 95459 - DNA, 1505 bp, Cannabis sativa
gaaaatgaatttcataaagaaaaagaacaaaaaaaaaagtttgggagtggaaattacacttcttagaaaagccttttatttttatttatagttgaagtgaagcttactctgttgagtcttgattttaagtgaaatgtcgattttagccttgagtatttagcaacagtttgcagctgttggaaggataatgtgggaaagaagtgatttgtagagttttcccgggtttttttaaatgagaaagaaaaaatactctttacattatatttggggtcccttacatttacactaaatcccaataataaagtaataatttaaatttatttttaatattttaaaaaacataatgccatgttattttatattaatttcaacaaattttttagttttgtgttcttatttttaaataatgtatatttttttttgtgcatctaggaaaattttttagtttaattttttttatagtcgtgtactgtgggaaattttattaacttggtgtactgctactactagtctcatctagtgacctgtcagatgtagcaggtttgtctagttagttcctgagtttttttttttttttaattaactcggctttgtgtactacttctttagggagtatcgctagtcaatcgtaaagcgacacgtcttaagaatgctaggcaccattgatactcaatagcaatgctctataattaagtataacagtgattgattttagagttttgcaatgggtctcagcattatgttcaaaccatatacactacagaaaaacaataaattgctcaataattcttttgataatttccctgaaacgtgagtaaaaaaaatttgggcaactcattgattttgacaagtgataatcaaagtttaagttcaactattgttaaatagtctcacatcgttaatgtgtggaaagataataaaatatgatagaacataagaacagagcatggtttattatttcagtgttgtgttggcagaccaagcatcggggttcatttgtcacatgccgatgatttagagcaacatcaactagttgcatctcatgaaacgctcggcagaaaaaatgtaacgccttattagcttaagcgtgctacagtaatttttaaattattgcgctaatatttactaattaacgggtttagtgcaaaagtaattaacaaaaaaacttctataataaacataaaatttattgttgacttttcttttagtcaacgatagtaaattagatttaaaatgattgagaataattgaataacaaaaagtaaatagtataaagtaaaaataatatcagaatttataaaagttcgacttcttatagttgagaactcggtaatataattaaatgggagttttaatcatagatatggaaatcaatagctcaaataaacaatttattttgaagaaaaaaagatctggtgtttaatgttattacaactttgttttttcataattacactttaatgtataattttcacattcccaccatttgtgaaaattattgccct

SEQ ID NO: 95460 - DNA, 1440 bp, Cannabis sativa
ttttttttttttttgaaaaaagctatatttttacacaaaaattttgaaaactcataaaatttataatgttctcataaaatattgtaatttttcagtatatatagattaaaaaaaaaaaaaaactcttaatttaatgaaaattgtattattcattacttaaaattaattattacaatttatatacaataaagtgtatttgtattttactataaaccaaaaaagtggagaaagtggtcgaaaactcacaagggtagttccaaaaataaatttgatacttgttctttgtcaatagggattttgacaaaaaaataataataattgtaaagtgactcatttatcataattataaggttcaagatagtttcttttgtatagagaaaaatacctaattctccaagaaattaggattaatacattactaatattaacttaatgacaagaaaaaaaagacctttaaatgatttaattgttctactaatatatatgaccaaaaggaaatagtgacaataattaatactaatttaaaaaagagagagagagagctttttcatatcacacaacacagtacaatccaaagctttcactactactcatgtcttgactctctaacttcatcaccaccattttcttcatcagcttcattttctccagacatttcttccaaagactttccattagattcaggcaccaagaaagtgaaaatcattccaaaaaagttaaccacaccaagaattatcaaagtattccttactccaatcccttgttctgcatactgaaacccgaaggctccaattatagccccggcctttccagctgcggctgatataccatgacacgtggaccttagccgagctggaaaaatttcagccgggactacaaaagtagtagagttggggccgaaattggcgaaaaagaaagtgagtgagtagatgacaacaaagccaattctgttttctttcaatgtccaatggtggtaaggaatagctaacgcaaacatgaacaccgtcatgaaaaaaaatcccatcaattgaattgaaaacctaccaattctgtctatgaaggccactgtgaaccaataaccgggaactgttgaaaaaagggctattagggtttgagctttgccgattttgtaaacttcttcaagtgcactcattgtttttgcttttgggatccaaccaatggcgctaaaaatgtctttttggaatagattttggctgtagaaagctatgtctaataagaaccaagtacttgttgttccaagcaaatgtaaaccatgtcgtctaagaaaagctttcgaaaacaacccgaatttggtctcttcattttgagctaactcctcaactttctcttcctcagcttccacttcaacttgaagaaccttggacatgtctgaggctgcttgtttcgcgtttttcgctactaaagccgtgtaccgagcag

SEQ ID NO: 95461 - DNA, 661 bp, Cannabis sativa
  modified_base (338)..(342): a, c, t, g, unknown or other
ataatccaagtggtcaaattaatgggagaatatatattgagaaaaatataaattaaaatttaaaggtatcaaattagtggcctcaatctgcaattcttagctatgatcattagtaagaaactacatcccatgataaaaattgcagattattatttacttagcattaatattatatatatatatatataatatatacttttttaatataggtattaggtactacataaatttcaaaattattattacacgattaggctttagacttacaaaatttcaaaaaattgtgtaagatttcaaattttaaaaaatttaaaaataaacccaaaaaattaaacaannnnnttttaaattaaaaaaaatcatcttacccacatatctctctaacaaaccgtatatccccaagttttgatattttttttttaaaaaaatttgtaatatttatacagctaatcattatatttttttttcattaaaatttaaaaataaatccaataattaaacccaaaaaatatctatctcttctttactattaactaaatcatagcatacatagtttatcagacattgtttcacatctcattccattggcagtgaacaattctccattgagtgtggcagtgaacaattctccattgagtgtgtgtgatatatatcaggtata

SEQ ID NO: 95462 - DNA, 543 bp, Cannabis sativa
aaaccaaaaggagaaggaggagaagtacaagtgctttaccctgctaacagagaaacttgagaccatttacatggccactcaggctactgtcacatacagaaagccttctcctatcaaaaaggagatgagaaggagggacatggaaaaattccgcgaatttcacaataattttggccacaacacaaacaagtgttgaaaagtcaagagggagattaaattcctcataaggaaaaacaatccccacttgtgtcgttatgtgcagattgaccaagctttggcagaagctgctcagaatggagaccctatgcaaccactagtggcgggcttggggtcataattggcagaccccacattgcatgcaagactagtaaggctagggaatgatatgttgagactctccgtcacgagcctaaaaatgacatcctggtcgtcgaagaaaaaggctccaagcaactcaagcttggagagactgccatctcttttagagaggagatgatgcacaagtcaacttcccacacaatgatcacttggtcattacaatat

SEQ ID NO: 95463 - DNA, 601 bp, Cannabis sativa
tgagagaaagatgatgatgtatagtgatagtttaatctagagaaaatatatacatgggattatatgatggtggtggctgatctgtttagagagcttttgtggaacaagatatggggtgtagagtagcaaactttggtctagatagaatgtgaaggatgagagacaagaacatataaacccattagtgtgtgtgagagagagtaatcttgaaagtttggctttgaagtgataaatgaggaactaaggttctataaatatatataagactttaactaaccatactcatgctctccactaactacatcactaattatagttaaatttaaaataaataatgaattttcaaactaaaagtcaccttcaccgtagtgatctccctatgattcttttatcacttggtcaaaactaatgtgcatgatatatgctatctacgtgtgccgaaataagttggtacttagtctttatatgttgagcggataaatctcttaggatctcacgtgtaatacattttagttaaatgagtcatttccatgctattcaaattttgaaatttatctaaattttatgttctctttagttaaatcacacatgttgaaacaac

SEQ ID NO: 95464 - DNA, 541 bp, Cannabis sativa
actctaaaaataattctattatagtattaataattatttattgttattattgttacattaatattgtttgatatattttttttaatataattctatttagttataatctccatgtgtattcttaaatagaagtgtatatatcttatttcaagcaacataaagggtacattgtatattcttaataaaataaagaaagtacgtatctatatcatgaaaaattaacaattaccactattgatgacattccaccaataatatgatcaagaaataaaaatgacctgtctcaaactccctatcccaacaataaaaaattgacatttatcaactttattgattttatgttaactctaaaagctccaatagatttttagaacggttagtcataaaaaaaaaataagggttgagatgtaaaatgactctaaatttagtaattaaattagtaaatatccactttttaaaaaaattaagaaaatggccaaatctaataaattaactaataaaaattataaaaatacatttatcacatattttttttttaaaa

SEQ ID NO: 95465 - DNA, 757 bp, Cannabis sativa
aattgaaccggggaagttcttatgagattaatgattgtaaatcacatcactgatgtaatattttgaacttcagttgggaataaaataatcatttccttcaacaagtaattgtaaagcataactctttaaaattacttgaagggaatatatgtatgatcaactggaatttatctggaaatacataataaaatgcaaacccatcacttcaaaaattgaaaaaaaaaattgaaagttttttaaaaggtcctcgaccaaacctttttgatgaaagaggggtcgaatcgttataacgccccgatcaaacctttctgacgagaaagggatcaaacaactataatttttggtttaaaatctgacgagaaaggaaaatcaaaagttataaatgagatgtaactcataactcacgcataaagctgaatactaacggctcgtgctaaaggaaagtatcaaacgagacatcaaagtgtcttggaaaaatacttaaacctaacacgtgggtagaagatctaactactcatgtaagcaataaagatatatacaaagtgacaaggtcattgaaaatatattttggcttgaaataagatcccttctaatgatcgcgaggcggaatcaatgactgctcgcaaatcgaggatagggtagaagataagttgctcgcgtgtaaattaggttattaactacttaacgttagagagaaataagagcaatggaaacttctaataaattttatgcatatgattgtttaaattgtgaatga

SEQ ID NO: 95466 - DNA, 3122 bp, Cannabis sativa
ttgatcggaggcgacgaagtctaactcagaatcgaaaatggatccagacacagtttcaaaggcattcgtggagcacttctactccacattcgataccagccgtgcaaatctgggtaccctataccaggacgcgtccatgttggccttcgaagatcagaagttccaaggggcccagaacatcgtcgccaagctcgctagtcttccttttgagcagtgcaagcacaacatcaacaccgtcgatttccagccctctggcctagccggtggaatgcttgtcttcgtcaactgcaattttcagcttgccggcaaacaacacactctcaagtttagccagatattccatttgatgccaacaccacacggaagcttctacgtgtttagtgacatttttcgattgaattatgcatgaatgaaaacattctctgcaattcgaagaaaagatgagaaatgatgtctgcattgtttggaaaataaaccagtttgctattatcactctttacttttagacttctcaaatgaaaagttggattttctatttttatattttaaaattttttttaaaaaaaattgttttttaagttgtagtttcccccttgtgtctatgcttctgagtttttcttggttgtgattgattaaatggattcatgttacataactattaaattgaattcggcaagaaattagggttcttttttttatttaatttctaattaaatatttttttgtttggtaagggtatttaatattgcaaaaaaaaattcactatcatcaaaaacctcagattctcttatgccacatcattaaataaacgaaatctgtttaaaaacttcacaaaagggggacattaatatagtggtaatatattggggagattttttaacaaccagtatatttttttaacaaccagtatattttaagggccacaaatcggtagtgacataagttcaggggaaaaatttactaattattcttatttttatatagatatttattttaaaaaaaaataatttctcttacgaattttgctattaatttttttatactaatagttaactataataaaattgattacttaaatattttcgccactaatttatttacatacatagtttgattataattatcttttaaattaatttactttattaatttttttatcaagaaagataatttctgttaatcaaaccgaatctattacatccacaaagggattccccttcaaaagaaaacttacaattattttacatttttaagaacaattttatctatactagacaacttcctttcctgtacaagattaaatctacttttgaagctctcttattaatgctactatctatacaactcggattcatatattttttcttacgagaattgctaaaaggagccactggagtctagcaccctcctcggtgtcatatataccgttattggtataattaagtatcaagtctcatataacttaagaaaatagattttagaaaatatcgctaaccaatcgtggggcgccacctatagaaggtattggacactactggtgctcaatagcaatgttattttcttatttatgcataaattttagtcaaatatcataaattatacctgctaacacattcataatataatttttatgaaacattctaatgtatatttttatttttaaaattatatatgtgctttttttaaacatatatttttttcaataacaaaaaaaaaattaaaataacaaagttcattaacttaaagccgaaataaataatttcattaatgtatacatacacacgacatatataaaacagtcatctttcctactttttttaacaattttttttatataacagctgctttttttttaactaaaaaaaatcacaagtgtacgtatacactaccatatcatgtaacctctatttaactttaatattattggccaaaaaaactcaccatgccatgaggtacaaactaagggccttacagtaaaattacccattgtatatatgttcttttatttgttacttttacgtgtttgcactagtgtagatattggacatatgtatatatatgttctttataattttttatgatgaaagtaattttttttttgcagcaagataaaaataattttaattcaaagcttttgtaaaatgataataataaaactttgaatgtgtttgtgcaataatattagtagtttatttatttttttaattaaaagagtgataaatatttttaaaaacatgtgtagtaaaattgttttagtttttatttttaaaatatgaattaaaatttaaaaactgtcaatattaaaatttaaatgacaattgttgactgagatttttaataactacttgagtaaatgaaaatatgagctatctagaaaagaaaagagaatatgaagactatagatttttcgtggtcggacgttatcgagccttagttcacgagtcaaagataaagaagatgaatagttctctctcttaaatttagtagcattttggcttaataccaataaaagaaaaagagaagaatcattttacatgtgacctcattgtcatatttataggcagtcatagagtttatttttttatttgtctaaatgtttcattgacagaaggagatacattgatagacataaataaaacaggaattgctggtacgggcttgttttgtcttgtcttttcaattttattagaaagacttcctaacatatcacatcaactttattggaagttttatcaactagtgggtgcaccatcatttgtctttgttgacaaaaatagagacaacaataataatcaccctctattttttaaataaaatatgatattaccttgagccaaaatttggtcaaactcttactgaatatatttgagccaattttagtacaaataagtgcaaaacaaaaattagctgccaccttaggttatttttatatagtcgaggatattataatcttgacatttaagaagattcaattgataatacatggttttaaaattttgaaaattcataatccaactcataatccaactcgtatgatctctttatttggtgatgtaattagagagtgtcaaaacttgtttgtaaatttaaggggtgtatctatttcttttgtgaaacggtca

SEQ ID NO: 95467 - DNA, 630 bp, Cannabis sativa
ccattttgcactgctaaatccttttttttaaaattactcgtgtactccttcccaaaatagccaatcttttacacatttctctaattttccctaaaaaactttcaccttcctacccactccaacaatctctaacaatttggaaacacataggctctttaaaacaagcattttttaaattaaaatgataggagggaacaaaatcctgcaacacaacaagctctagaaacaaaaagggcaatggtttgaagaagaggtttccaaattaaagagattagcatcaggaaacaaaacagactaatatctacttaacaaagcacaatctgaacgaatttccacccatgcatcagtatcgcaccttttgtcccatgtaaatgaatatcccactaacttcaagtcaaccaaatcacaataaaaaacgcttgttgaaagccttcaaccacccaccatgggtatggattaccacattacttattttcttggcaaacaattttattgaaatcacctatgacgcaccattgaatggatgaaacaacaacaagcgactagagcaagtcttatgaattttaccttaagctttctcgtggctcaccatacagacccacagtctccaccaagcattcctttcaatct

SEQ ID NO: 95468 - DNA, 1769 bp, Cannabis sativa
  modified_base (67)..(72): a, c, t, g, unknown or other
tttgtaaaaaattcacatttaaaaaataaacttttttcaataataattatagcttatgatttttttnnnnnngcgcaacgcgcggcttttgtttcctagtttatcataaaactattttttgtgttaaatatagcacaattttacatctctcattggagattgtcttaactttgaataagtagtggatacgttataggcaagtattataaattttaatttgtaattaagtgtagttaaataattaattaataatttgaacatatgggcagcttagaaagtaaaaaggttttatcggtgaccgacaatattgtcgaagtgttggtacaactttataaaaatacgagtagtacatatatgtatatgtgtagcataaatagctagcaaaaatatttatgtttgggatttctctttttggcactaaacactagtaaagtaataactttactcttattcttagtacttattgtcaacactaccggaaagtagccagccaattatatgagcatgaaagaaagaactatgttggaaattttacttacagcacgtccagttaatttctttctttcttctcctaatacttcattttcttttttgaaaaatatctaactaaatctttttacaaacctacatggaaggattgtccagttggatgtaccgttccgcatttaatgcggatcgttagattatgtgtgtgtgattgatttaaaggctaagattgaataagttgtacacataaacataggagtgtttgcttaaaaaatacatgctaaccggttagctttttcaaaaaaagaaaaaattgatttttaaatactcgatgagatagttgtgtcagttattacttctcttaactacttatctttttcttcctctcacttcactcaatggcattctcttctcatcattttctttttcttcccaatcaacggtgtagagaaagcttaaatgatcagagctttagaatttaaaagcacttgggagttaatcaacgtaacatttctaaaaaacctcctcatatggtaattatctatgctctaattcgttagtttatatttattcggcattatacatatagagtgtttattagaaatatattttgttgattaagattttatgtctctatgctacattgtttttctataaacttagaaaatctagggctttcgattaaattatgggactctgtcctatattgtttttctataaacgtgaaaaatgtaggggtacaattaagattttaaatacataatgttgaccccaaaaattggtaaatataatttttaaagatctctagattaaagagaggaaaaatcctaaagtacactaaaagtatatgggcaagaaaataggagaccaactagcaaggggagacaccacacgagaggaagagctaggatgaggaggggccaaggagcgagttgagctcctcgtgcgaggagctagctctctgctccctctctctcctcattgctccccgttcaaccaagggagctccttgctccctccctcactttgctccccattcaaccaagggagctccctgctccctccctctatcaccccattgctccacgttcaaccaagggagctccatgctccctccctctttctctcctttgctccccattcaaccaaaggagctccccgcctctttctcccattttctcctcattcaaccaagggagctccactttcctaacacttagtcaaattaccaagtgttgctccctctcccaacacttagcaaaattaccatgtgttgctccctc

SEQ ID NO: 95469 - DNA, 662 bp, Cannabis sativa
atttgatatttgatgacgttttttgtgcttttttattatttttttatatttttataagtagttttttaattactaataatattggtaagaaactaatcagttacttttttataaaaaaacttcatttttatatctcatataatttgagatatattttggttagctacaaaattaatttgtatacatcttagtaattaattaattatttttaagttatattatagtagcttataatttaaaaccaattagttacttttacattaatgacattctgatttctttcgagattgaggaaccacacgagagacatcttcagatgattttatagcgtctacgagaacatgaactttatgataagtttaaaaagtgtgagttttagatgtcccaagtaagtcttttagggcatgttgtgagcaaggatggaattctagtagacctagcaaagattgaggtagttcgggattggccacgacccaagtttgctactaaagtcagaagtttcttagggttagcatgatactacagaaggtttatagaagggtttgctaagatttttacacccttaacagagttaacccgaaagaactgtaagtttgtatggactgataagtatgaaattagcttccatgagttgaaatagagattgattactgcaccggtac

SEQ ID NO: 95470 - DNA, 914 bp, Cannabis sativa
ataccctttctaatcattgaaaaagcacttttaaaaataattttttaagggcaattgttatacccaaaattcggctatacttcagaaagtgacacgtgtcaatctcgtggaatgtgaactaatagatataataacgattatatcattaaacacaaaatagaataactcattaaatatggaattaattgagtatattcataactcattgactgtacagtcttacgcaagacaaggatacacaaactatcaattcatatattaacgagaaaccatcttgcctcgaaaagcataatcccgagggagctacggataatgcatagcgagacatctaccttgctacatataagaaagtattgacgaggcgaattggctattggaacacttagcgtataattcacgttataataattaagtgtaacaacttggaaacatggaggacatgattgtgcagtcagcaaggccttatggtcaaatagcagttcttaagtttacttagtacactggtgctcatgccattgctagaaggcatatgaataaaccaagtcattcatctatgtataaagcgaaatgcctctagcgagatgctcctatcccacgtcagtgtccactaccttaaagataggaataacaaacggttatacgaatttttaactataaccgtgttaaaattggacgtcgtcaaagcccactatttgggaaaacagttatgtatttcaaattcaaatgtaaataactgtcaacctatattcctataaatagggacagattatacagaaaagggtacgaaaaatctttgagaaagagatcactgattgaaaaaaaatcataattcagtatccagaaatatctgaataagatagactcgtggactatgcagagttaattgcaaaaccacgtaaaaacttggtgtcatt

SEQ ID NO: 95471 - DNA, 795 bp, Cannabis sativa
ttatataagttcagtcatgcttttcttatgtaattaggctattaatatcttgttatatttattatattgtatgtcgtttactgcattcttccaatagtagtattttgtcgattgatgatatataatatgatatgctgtgaaattagaagtaagattcaatttatgcaagattaattaatttgtgcttttaacatatatatcttccagttgtaattaatagtgtagaattgcaactgcgttcgaattaatatcagtattagaataggatttgtataactatatttctaccttaccaaactctttatttgatcaactttctcacctcgtcgtttcattatttttaattcattccaatttctatctttttctatttatactaatctttagtagtaatttacctccctgtggatacgacatagcccgtttattaccgcgaccgcagtgtaactaattggacgacatcaatggatgaactattacttaatgactttccgagagtttacctcgcttgacccaaactcgagagatgatgcaaccttggcagggtctagtcgcatactgtgcctcgcatagtataaaataaggaggaccaagagaggattatacaactcgcgcatatactgagatatatgcgagactaggtatccttctcgcgattgagtaaagattgcttctttacataatgaactaatatggttagagctcttatgtgtcttgaacttatactgaatgcggttaatatgaatttcgtaacattttcggatttttttgatagtcgccaattaaaaggaaata

SEQ ID NO: 95472 - DNA, 576 bp, Cannabis sativa
agcttccatcaacatggagtttccgtgttagttctttgagatttttttggtgctcttgctctcgcttcttctctagcttttgctattctcttgagtcttgaggggtctcaagtgttgagttggtgcactcatctatgaagtctctaagggcttgaccctttatgattgttcttggttggtatgtgatctcgaattggccaagctaaatagcccatttaagtagttagcctgatgcttcaagtttttgtaaaaccttccgcagtagttgatcggtgtacacctttatggggtgtgcctggaagtaggggctcagctttctggaagctaaaagcaagttctaggtcagcttttccatgagtgggtatcgactttctacatcgactagccttttgctgatgtagtatacagggtgttgtacactgccttcttctcttgtgaggacatcactcacagcgtgctctgtgactgctacgtacacgcctagcttttcattgtctaggagtttagacaacactagtggttaggccaatttcttcttcagcttctagaatgcgttttcacattcctctgtccact

SEQ ID NO: 95473 - DNA, 710 bp, Cannabis sativa
ggatgccctgaataagggctctatcaaagggataaggcttagtaggggtggtcctatcctttcccatatcttctttgctgatgacttaattcttgttggcaaggctaacttaactaaagctcgtggcttctggcactgtcttgagagtttctgttcttggtcaggccaatacgtaaacaaactcaaaatctcaatcttctttagtaaaagtacttccaattgtttgaaaagggggattaaggaagcattggggattgactcaccagaagacaaccattaagtatttggggctccctttgttctgctctagacaaaaggatgcggatttaaacttcattttggataatctcacttataagttgcagggttggaaggctaagactttgtctaaggcggggagggcttctcttattgaatcagtgggactgtctcttcctttgtatgctatgcatgcaaacgaccaaattctctaatcccatgcatggtcaataagattgatgggatggtgcgggatttccggtgggattttgagaaaggtaaccacgggcttcacctaaaagtttgggataagctctgtcttcccaaatctcttgggggtcttggtttctggaaaactagataaatgacaggattttctggctaaatgggggtggagcattctaaacggctgccagtctttttgttgccgaattttggaagctaaataccta

SEQ ID NO: 95474 - DNA, 712 bp, Cannabis sativa
ctgcgtggttaccacattatccattatgtactttggacaggagccgtacaacttcttcctttaatacacatctaagtaatggcatggagaatcatcttctatacattatactttctactatgatgtatcgtacatctttcctcatcattttcgaagcttcatttctgtcatttggaagttctcaagtattgaggtaggctgctatgggtgtcatccattttggtgatgtgtctatcatttcgatttcttctacaaagttgatgataggttcttttaagaattgaatagggactatattggccttatttgttactgtgttgctcgcaagccgggctagtgcatcaacaattgtgttttcctctcttggaattttcttgaggctgtaacccttaaattgtgcaagaaaatcctgtatcttacgtagataagctatcattttctcttcccgggcctcgtactctcctgagacatgatttaccaccaattacaaatcactacagaactcaatgtattcagcatgcagttcccgagcaagttttaagctagcaatgaggtcttcatactttgtttcattattggaagctttgaatcacaatttgactgccccgtgtagatgttgcccccaggtgtgacaagggcgattcccataccagacagttgatctgtagctaacccatgtacgtgcaacttctaggtaggtttgtcttcgttg

SEQ ID NO: 95475 - DNA, 536 bp, Cannabis sativa
agatcttttattgaatcaattcatctgccacaaacagattacaaagaaagtgtttatatacagctaacaaccgactcaagctaatagaaagttagttagaaaggattacagctgtcccaactgcttaactaactcaactaatcacaaaacaaactagggtctcttaacagagagaccttctgccaccagaaggaaaaggtagggagataggggatcacattgcctaataaccctagaaggttgaaaaggaggggaaagatggttgttaatgtagagtttgaaactaacggtggaaatacatttcaggatgagggcaatgaaattaaataagctaggagtattgtttgaagatgttatagctttattgtctaaattttcgtggacatgctcgctctaagaatttagcggctcatagtttgacaaaacttgctctgcggttagacaatgaactatcctggttcgaggaggttctagcgccagttacggatatctgcgtcgtaaattcatgattgattctaatcacttcgtcaaaaaaa

SEQ ID NO: 95476 - DNA, 586 bp, Cannabis sativa
tgagaggcaggcgaagagatgtctcgaggtggtgacctttggttttcccatcgagggtttcaaaaaatgacggctgtaattatcacattttatcctacctatggtgccacatcacgaaactcctcgattatccggtaggcatgcccatggttaactgttggatgggatgaccttaggcattctcattgccacgtgtcataatcccaattaatgtgggtcattggtatttaaactccctgatacgaaacgattcctttacttttccctctcattttcattttcctcatttcatttgaaactccaaagacccaaattcttctcccagatttttgcctttctttttgaatcttctgggttttagtggcagtaaaaagacatcacagagagaatcgtcgaattttaaggttagttttcgaaactacttgcgaatttttgtttctgattttgagagaaacactctgtatttgaaatttttggggaattaaaaatgcatgttgttcatagggaatgcacatatagccttatttttctgcaagaactgattaatttccaggaaaaataaacctgaaatttgtacaatcgtgaa

SEQ ID NO: 95477 - DNA, 515 bp, Cannabis sativa
tccaaaaggcctctctttgatctagcactttgaaaagatctttttttacctcactgtaacgctgaacagaatcagagtcccttttgttcttcaagttttttaattcagatttgtacctccgaattttgaccttgaaattccccgtcacttcttttccccacacacttagtttatcagcacaaagtaacaatttttcagagaaatgagcttcccttgctatctgccagcagtctcgaattatctccaagcaaactggttctttaaaccaggcgttttccattttgaaattgcgattagggacaccattatgaacaacaaccggttccagtaatagggggcagtggtcagatgaagacaattccaaattaaataaggaagctaaagaaaatacctgagcccactgagcattaaccaaagctctatctagtcggacttcaacccaggccgtggtgcctctgcccttctcccaggtgaaagggtgacctataagttccatatcttgaaggcgacagtcg

SEQ ID NO: 95478 - DNA, 537 bp, Cannabis sativa
ttcccatattcgcttttaaggagggaaactgaggcgtctgaggttcctttgagacgatgacctcttttcgtgacttgcctataaataccaaacaacattggcccgtaaactcattttcatcacctttctttgctaagtaagcttcagagcgaaaagagagattcttcacttcaaagttgccgaagcaccttcatacaaactgcttgttggattgatgttgctcgcacctagacattcttcaaaccctatacccagccatagaatgatggctcgtacaaagaaaacaacgcgtttggctgacgcatctgatcctcaagtggctcggcatgccactttgcccagcgccaaaaaggatctagctgtccagatggagggggatcatgaagaggacgctgaggtccaagagatcgaggggcaggaagatatacgtcctggcggtccctccgaggcaaaggaagaggcagaggttgaacccccaaattacagggagtacaacgaggctggggagtcaggcgatgctgatggagacatcctagt

SEQ ID NO: 95479 - DNA, 507 bp, Cannabis sativa
actgtatttgtttaataatttttttaaactaaaagtattcatttctttttttcttattattttggggaaataataatatgttcccgccatatgtctaagtgggcttattgcaagctcaagcctttaaggcccattcttcttcatgtttttaataaattttgataaatatgagatttttaactttgtgcaatttttttttctgattgataattttatatcttcttttcctcttctcctgactttctattcttaccgtgtgagtgagcgaaacaaatagctaacttcaaattagataatgcaaaatagggaaagtgaaagagaaaattattattgatggaatgaatgattacagaggaaaaatagctatatatatagctttacaccaaaaacaggggaaccgacttaaagcttaacataaccacttgactaaactaacaactaacagttaagatatttactgacacaaaaactgaattaactaaaatatactaactgatattctaatat

SEQ ID NO: 95480 - DNA, 643 bp, Cannabis sativa
taacaggctataggggacagttttatactgttggggagtctacattagcgacggtttttaatcgtcgcctattttgcccattttgtgacggtcgtataggcaacggttatagaaactgaccggaatacttaaacgactatttaaaaatgctaggaaaaactatttttgtagtagtgagtggtgtctttgtagctttcaccctagacagacaatggttcactctcagctacgaattcactacaacaacccatgaaactaggggttcaacttcaaatatttacctattccttaagaataattaattgattattttctgtatatttaatatgtgaaaaaatgtgatgtctcctcattttaagagatattaatctacgttggcttaggtcttctgtaagctctcatctatataaagagcactaggctaaacttaaagctaagttctaatccctaagctcttgagttctaactctcaaaaccctagctctctcttctacacgccatctctagtgtactaaagaataagtctttctcatttcacacacttaagatcttccttacatctcactattgtaattcatagagagctactttagaaattacaaagcttgtgatctgagctgtattatctctcgaatcaatacaa

SEQ ID NO: 95481 - DNA, 524 bp, Cannabis sativa
aatacatacgttgttagatcaacacacagtaggaaagttgtacgcttgggccataaacactttctacatcagactcatctattccaaagatacaaaaaagaatttgatggcaacatagaagacaaaattgctcctgctcccatgactagtttgaaagtgtttgagaaagttagtaagttggtaaatcaattccggaaggaggctccaaatgtaaaagaaaaagaaaacatgaaagaaaaagaaaaagaaaaagggaaaggaaaagtgaaagcgaaagggaaaggggaatagaagaagaaagttttaaaaattaaaagaattcccaaaaaaataagaatgtgattgaagatgcttgttggaaaaaaaaatcaattttttttacttggagtattggaaacatctattgttgcggcataatctcgatgtcatgcacattgagaaaaatgcttatgaaagcataattgaaacttttcttcacgttccaggaaagacaaaggatagttttgcagcacgacaagatctat

SEQ ID NO: 95482 - DNA, 635 bp, Cannabis sativa
gaagcttaaaaccattaattagagaaaaaaaaaactatagagcgtaaaccataaaaatccttcagttgatttgaaagggaaagaaaaacagataaattccattaaaaaaaaattacgatatgtgatactcaccgtctgtcaaaattcagacggtagtgtgcggcgaagaacatggagtagccggaagtatcgtcttgctgaaaacacaaatcattccacccaaaattgacaggctgaggcacaattactttgaagtttgaacaagaaagaaggcgattgtaaattgggtgaaaagacacaaagttgtcgttttctgtatgaattcgcaggttgaaaagagaagatcttgagaatgaaattgggggaaggaaaccctagaaaggcattggtggtgtgtattgaattggagggatgaaatgagcaagaaacgattcgaaaagcagcgggtggagttggactgagctcaactgagctaaatcacacttcttttccgtcaaggctaaatccacgtttctttctaatttttaattcactaggatttttatccaaacttaaatatactaaatcatacgggtcttcaatgtggaactggtgcctagattttttttttgaaattaaacttcttataaataata

SEQ ID NO: 95483 - DNA, 1209 bp, Cannabis sativa
cctgaatacaccaaagacattctcaataacatcatcgatcgccttctcaacaatcactccattgaggtaaaaaaaattaaagggttgcaattgcttttactattgatagttttgttagctaattcttggggttttcaatgtatgatttcagagaggtttggctgaagatgcaaagtttaagttgcaaataggtgagccagataggaagtgctgggaaaagatctgcagaaatttcctcaaaggaacataaaattcaccttattttctctcttctattacccctacttttattggttatttttcatcattaattctctaacttgacaaacataacatggtcagcattgagaaagatatggtaacaaacagacaaacactgtaacttctgttgattcctcaaggctaatgccatagaagaaaatctaaaacatttattccttatgtatacatatatagcaaattggagaatattaagaagcatttcaaaaaaattcagttctacattgtgtattgaatgagaagcttactacctttgaaccaattcagttatcaaagaatagaatcaattcatcaataatacaaatcctagcactctgtaatcgttaaaatttgaatcaataccaacctaaaaagtacatggcaattcttaaactattgaaaaaacagtgatgactgatcacaatgcagcttctaaagaaggtgtgcatgaaacttttgagggaactcgtatgctgatgcaaacaaaaacatcgtccaatcatagtttcattttcatgcagacagtgaaacaatttttatcacctcaagatcaatgggatattagacataaaggaaaagaaacaacgaaaaagaaaggtagggtaaccaaagcaataacctgcgtagttcttgtatatcattattccttatggttacagtagttctaaagttacaacaaattgcaaatgaattgcagaaaatcaatgtgaaaacttgctagcatgtgctgtcttttggtgtattcaatacatgaaaatggccatgccagatgggagactaagatacaggtcaatttactagttctattacaatttttaagggcctatcaaaaggaatagaagagaatgcattattacaatatggtataatgctacatgaaaactagacttcaaacaaaactaaagctcaatgggatagacaactacccgagccagcattttattcctaatt

SEQ ID NO: 95484 - DNA, 614 bp, Cannabis sativa
atgaaaatattaggactgttctcaatggcagagccagccaacatttattgggtgtaaaaaaaaatattttgaaacattaataaaaaaatataatttttattaaaagaaatgtaaattctatgagaataaaaataaatatatgtgagaataaaagtaaaatatataaattttatggggataaatacaaaaatatgtaaggacaaagataaaaaaaaaaatatttttatagggtcaaaatataaaatactcaaaaaattatatacaaaatttatatgaataaaaaattaagaggaggcaaatgaccccacataccccccttccctccgtctctgaccggtcttaagctattttgagctaaggtctaaataatttttgttgggcctttacacaaaaacttttatggtcaaataatactaagtaagattgtttggtgtagtggtaaaaaaaaatttaaaagttagggaggttataagtttaacactctacgcctttttttttatgtttaacaaaaaaagaattaaaatattattgttggcattcgaactacctagcaactatgtataaggtaaaaatataaaatataattccggaaaaatcactttaagataatcaaa

SEQ ID NO: 95485 - DNA, 1018 bp, Cannabis sativa
actaaaaattcaagcattctgaaaattttttctgcaatatttaccttttttagtttatgattttcaaacacttacatgcctatgttgtgttatgtagcaaagagacttgcaaaaacttgcccatcaaaaccaaatgccatgagtctaaacaatgaagaccaaggcagaagaagatcattttgttgcttaggatgatcctaatcactactgagtttctctgttttttgttatctcttttaacatgtaattaagcttatttatttttttaagaaaacaaataatggcatgattattagatcgcaatggaataaaattaaatttgcctttttaatttttaattactatcaccagcaacaaaaccagattaattacagaacactggagcttatgaagaaagccagataaatatatttaacacaacttacaatatgattttcaaggttttgtccatagaaagaattgcatgagcttttataagtaatatatcacatccttggctcaaaaatatagtgtaaaaaacattaaataatctaaaatggatggaaaattttgaacagactagggcattattgtgtcaaaaattgaatgtattgcccacctcaacttctgtagctttgaccccagtgtgcgttgacaagtgactgaagaaagcatggaattttggagtcaaagattggccgctggtccaccatcagtaccaaagtcattgaacctatggtaacaaacaaattaatgattcaaaaccaagtatcgatatgattatttattttttttgggctaatttctaccattcacagtgtaacttaaaacagataacagagattaaaagaaacagcaataaatataattaccactgcgaacacattcataaataaaatattaactagactccagcaaagtctaatttagttttcacaaaaagaaaacgcctgtttcacatggaaagtacagccaaattaaaggtttaccatatacaaaaccaaaaaataggttcgcttcctaaacagattctatactt

SEQ ID NO: 95486 - DNA, 928 bp, Cannabis sativa
tacaaacccgccatgtcccgttgggctttggcaccagtaccggattggccagccattctcggtaatacacatcccgaatgatgccactggttagtagtttgtccacctctttttctaaggcttcagccttcactgagtcgatgggacatcgcttctgttggaccggtggcatgtccggattgacattaaggacgtgggttatgacgtgggggcttatgccggtcatgtcttcttgacgccacgcaaaaacgtccgtggcgcccctcagtgtctttattattttttctttttcctccaattctaggctctttcctagccggaggacttttgtggagtcgaggtcgcacactgacacttcctcgacgccctccatgggttctacaattttttcggatcccacacggggatccaactcatcttcttccgccatttcttgctcaataacttcatggaccattaggacggtaggtgggcagcaacgttgtaacactgcttggcctctccttggtttcctcttacggttcctatcccagcctcttgagtggggaatttcaagcacaagtgccttattgacgtgactgcaccaaaatccaccagggccgatcagccgaggattgcattataagctgttgggcagtccaccaccacaaatgtgcagtatttcaaagtgctttggggtgtgtccgggcacaaggtgattgggagcctcaattttcccattgggataagtgtcgttccgttaaaccccatgagttgggaaccgcttggtgaaagatctcggtccgttaggcctattgctgtaaaggcttctttgaataataaatttacagaactcccgttgtcgattaggactctggccacaatcttattcgcaatgagagtctctatgactagggggtcatgatgaggaaaacgcactgtcttggcg

SEQ ID NO: 95487 - DNA, 763 bp, Cannabis sativa
  modified_base (262)..(273): a, c, t, g, unknown or other
aatttttacattatcatacattaagttctttattttttttttctctgcattattaaaatattaaaatattaactactttttgtgccaaatataacacaatttttacttctttcattggagatggtcttaggagtaaggatgaccacacagtggagaatcccctaatgagggcagggacagggcggagaatcccttaataaaaaaataaaatttataataaaaaattaaatatatataaaaaaatattaaactacataaaaannnnnnnnnnnnacattaattattatttaataaactaattattattcaaaacacaactttaaagtcataaaaaggatattaatacgtaaactaaaaaaatacaaacataaattataaattgcaaaatattattataaatataaaataaaatactaaacggatccccatcaaggcggagagtgtgatccctatccctttaacattttgggataaaaaataattctcgttcccaccccattccccgtttagatagggaattctcgcccattaggagcgtggccccatccccttgggagtgttttagtgctctaaaatctactatcccattttttctatcccaaatttatggccaaccaattaagtagtgacatgtcatttaatttgacacatcatctaacggatggctaagaataaaacctttgttcacttttctctcaatacgaagggcattttcattttatcctatcatctttttctaccaattttatttattttataaaga

SEQ ID NO: 95488 - DNA, 581 bp, Cannabis sativa
ttcctaaggaaactccaaaggaacacttttttgggtttagcttcatattatacttctttaatattttgaagcatttcatgaggtccgtggtatgattcccagttttctctgactttaccaacatattgtcgacgtaaacctccatgttttgtccgatcttatttgcgaacatttcattcaccaatcgttgatatgttgccccagcattcttcagcccaaacggcatgaccttgtagcaataaagtcccatgttggttacgaagctcttatgttcctgatctgggacatgcatttttatctagttatatccagaatatgcatccatgaatgacataagctcgtgcccggcagttgcgtccactaactagtcaatcctaggtagtgggaaacagtcttttgggcacgccttattcagatcagaaaaatcaatacaagttctccgagttccatcaggatttgggacgagaacaggattggctatccacgagtgataaaacacctcgcgtataaagttgttgactaataacttgtacacttcctgttttagtgccccttgtctttcgaaatccaagggtctcctt

SEQ ID NO: 95489 - DNA, 647 bp, Cannabis sativa
tttatatattacaacaatacataattttaaactcgaagtcaagacttccaacacacacataatcttatggccactagtctcaaatggttgaaactagactacttcacaatagaaaatttacacttaaaagtatatttattttattaaatttatatatatgtgatgagttgtttttttattttaaaacctgtatcgttttgtatattatttttaatttaattcattttcttttaaaaaaaattgaaaaaggggactgagacgtgtgttgcttttgctgatgtcatgcatcacatctctcactgcacgtagagtgtgtaactgttcatgagcccatttttttgcaggtttttttaaatttgaatcgattatttagtattacaaatggttacatttcatattctccttttttttttatataaaaaattttaattattttatattagttggtttttaggtttggtcataaatagggaaattttcgttaaaataatcatttttagttttatttgctcggtttttttattttttgtcagagtttatgggtatgggttagggttttatcttctttagtagatactctagagtttattttaagttttagtgtgtgctattgaataaaagtgtttttagtgtatcattttagtttc

SEQ ID NO: 95490 - DNA, 554 bp, Cannabis sativa
aatggcttaagtccctccgtccctagtagcagataagtacccaagtcgtatttttggcagtaaaaatatcttccatcactagtgtggaacttccgtatgtacctgatcgttatgtgccaagtcagtgtccacatgtcactcgttcattggtccatgtcgttaaattttttatttataatttaaataatcatttaaatagttaaaaatgattttaaaaatataaaaaataaacaaaaaataattacaatcacttaagttttattttttatttaaaaattaatttaagccttttaaaatcattttaaaatttaaaaaattattaataataatttagatatataaaaactaaaattaaacataattattaataatcattttaacttcttcatacactgcccaaaaccttaatttcgaacccctaattctaataatttcatcatcaatcattttccataaccccttcctaaattgttcttcccctaaatttttcattgccttttgagcctgttgttggaattattttaccaggctctaagatctactcacaagtatgt

SEQ ID NO: 95491 - DNA, 602 bp, Cannabis sativa
atcaagatatacactacacttatgttaagaacaaaatatgaagctcaaactgtgttcgttaatttttttaacagtatttgcacacaattttctgcaacaatcaaagctgttcgttcagataattgccaaagaacttaatatgagttccctttttgcctctaaaggcatccaacattaccactcttgtgtggaaagaccacaacaaaactcggtggtagaaagaaagccctaacacattctaaatgtggctcgtgcactttgcttttaatctaatatatacccctatcctactagtcttacataatacaaactgcctcatacttgataaatagaaccccatctgttttgctaagggggcttacatcctatgaaattcttcacaacaagcctccatcatatgaccatttaaggacattcagctgccttgcttatggctccactttcgcctaaaaaagacacaattttacccctcgatgccatgcatctatattcattggatatccccatggaatgaaagcctacaccttgttggatatggaaacaaactaaatttatatttctagggatgttgttttccatgaaaactgttggaaatattttac

SEQ ID NO: 95492 - DNA, 607 bp, Cannabis sativa
atcctagagagaaggagtgaagacgcctataaccctactagttacgtaccactggtagaattagagaacagacaacttcgacaacgtttggctaaatcaaatcgaggaaacactaagttggcacgagaagtcgtagcgactagggctatacagggaacaattcctcaaagccaacctgatccaactgtaaggagacatcaaggaagacctcgaggctctacgaccaggagacaggaaaaaaactaagagaatcccccaaatacctgggaggaacaacctgggaatacaagggatgtcccaatggataatcaacctaatcaaagtaatacaaggaaccaagaacatcgacgagatgtcccacaaacttcccatggatttgcgaaccaagggaatgaacaaactaatatgcctgaatcagctcgcatgattaagaggcgaggcaaacttgaccaacaaactaaggatttcctcgtgataatgaaaaaacccttgaaaccaacatagctctagtggtctcctcctgagacatccacaacacactactataaaaatggttgttcctgacattttgaaatagccgttagaagtattcctgtcagttttttta

SEQ ID NO: 95493 - DNA, 565 bp, Cannabis sativa
gaaaaaattaaccaagcttgcttttccagtagcgcttattaaaacgaactaaactcttgaatcccacacctccttccacttttgattgagtgaaagctttccatgttttccagtttatgccagataaagaaaaattggaaccccaccaaaatttattgcacatggtctcaatttggttgataagagattttaatagtcgaaagcaactcatagcatatgtcggaatcgatcgtgcaactgttttgagtaagacttctttgccaccaatagaaaacagtgtctcttgacaagatgagagtgaatcccataatttctccttaattttaccaaaaaaaatattcttgtccctgcccaaataggatggtaatcccaagtatctctcgtgataaggctttatggccatttgtaagatctggtggaaattattttggatagcaggcaaggtattgggtgagaaagaaagtattgaattatccacattaaggcattggcctgaggcatgatagtagtaattaagggaacgtttgatggccatagcaaatcttctattagcgcgacaaagcac

SEQ ID NO: 95494 - DNA, 2331 bp, Cannabis sativa
  modified_base (643)..(645): a, c, t, g, unknown or other
ttagaaccaatagcaatattaacacatacataggaggatgttaggcaccactggtgtcttttaacatttctctattaataaagggagcattgctattagggaccagtgatgcctatagcagtacctctctagaagacgacatgttgttgcgagattattggctagtgatactctctaaaaattattacattaaattatatgagactcgatacttagtaatattaatacataaaagagtgttaggcactactgataccttttagcatttctcttttaaggtctgcactactaatgtcatcattaagactaccttaaaggtcttgaatgcgtataaattggaaaatattaatatcatttcattaattaggctatagaagttattattgtcaaaataattttcctttataactggtggagcaagactatttatttgtcataatagtatgatttatttaattttagagagaagtcataattcatatatctaccatttacatatgcaatgagtataaactacatgctagcttttatttgacaatataattaaattctcctacattaataatcaaactaaaattttctttggctaaataaggtaggtaatatgtcaaaaattataactattacatacctatatatatannnatatatatatatatatatctaaagtacaaaactcaacaaagactaattggtagtactaatcttcttgctctaaactcatagtatgtgttcggttaaaaaagaattgatcattttgggcttaacacaattatataaaatgatattagaaaaggtctaatttcacatattattactatcaattatgctagttgtagatcttaccgttagaaaccgagaatagctattgatgcccaatgttcgaatagtgtcttgggaaatagtggacccaagagtgtaagcatagtcattcacaccaatctcaccaacccaaaacaaagcattatcaaggtcagcagctctacaattctcatccaaaactttacacccaaaactttcctccaaatacttattgaaccatagaagttgagtctgaatagattgaggagtgatattaagagtaagattgttcttaacaaagaactcgtggtctatagcagtggaaccagcaacagcaaaatttaccccattaggtgaatttctcttaacacttatataaggaggcaagtaaggtaacgacagtgattgtgccacgaaatcaatcatcaaccgtccatctgagtaccgatttgttgggtggtgaaagaaagtgatcccatatggaagactagaaacgtggccaaagccacttggtcctgtaactgacacagtatttccagtgtcagtaaaagagtcaccaaatgcatagattttcttaaagggagatgggtttgtattggttttggcattagagattggagaagaaagaaacaagatggtaactacagtgatgataatcatagtcatgatttgatattacagaaagaaaataatgctttttgtattgatagaatagaagaacactttctgtatgattaatcttgttttgatgggaaagtttatttattgagtatggtgtcaaataagatgttgagatgaagtagttgggaagctttaaatgagcatggtctacctcctcacctgcattgagttaataagagaataaaaacatataaatatagcaaggaataatggtaatatataaaagtaagttattttaataaaaaaaataaaaaattgtacaaagtaatgatgtatgtacttataaggttagtgaacatttggtttttatacaatatttgtgcaaaaatataacttttttatgagaaaaaatcaaaaaaaataaaaaatatgagaaaattaaatagtgtgagaaaattaaatagtccattattatatatgaggatcttttataccggcactccccaaaataatggtataacttttttatgagaaaaaataaaaaaaaataaaaaatatgagaaaattaaatagtgtgagtagtttgttacccttaattgttttcctcatatttctttttaattatttccagttcccagaaaaaaattttaaaaataaaaattttcgttagtgaaaatattacacatcgagatatgacactaattttttaaaatactgcgttattagataaatttgattggtttaaaaaataaaaattgtcactctaatatttgagtacaattttcgatacatatatatagctactttaatagtaacaactaatgggttcactgttaaactttggttttacttttagtttttttttatgttaataaattgtgtcacgtcgtcatcgtgtaatattttata

SEQ ID NO: 95495 - DNA, 788 bp, Cannabis sativa
agccaattaatacattgctatgtttagtcaaagcagcaagtgggaaaattctttgtgtcattagtatatgcctttaatgatgaaaggaagagagaggatttatggggagagctagaggaaatggcacaaaaaatagatgaaccatggataataatgggggatttcaatgagatcttgaatgctaatgagagagttggaaagagagctcaaagactaccatctcaaagatttcgagacagtatggagaattgtaagctggctgacctgaagttttcaggttcattcttcacatggaaaaataaacaaaagccagaagagaggatattctctaagattgatagagcaatggttaacaatcaatgggtgaatagttttccatgttcagaagccgtgtttctgcctgaattgacttttgatcatagtcctatcttggtaactatttacgaagataaaagctatgggaaaaagccttttaggtattataatatgtgaaaaatggctccagattatgacaaaatggtgacacagtcctggaaagaagaagttaatggttcgagcatgtttagcattgtgcaaaagctgagaagattgaaggcagtgctgaagcagattaataaggcagggttttctaaaattcaaaagactgagatgatgacaaagacattgcttgcagaggttcaagggaaattaagtcatgatccgaagaatgaagatttgatgttgcaggaacagtgtgtaaggaagaaatatgcagaaatcagcagggcatttgcaagcttcatgactca

SEQ ID NO: 95496 - DNA, 616 bp, Cannabis sativa
tctcaggcttttttgttcttttcagggaatgaggtaggatttttcttagggttcccctcagaaggataccatatggggcttggttccctacacttgggcttttgggtgcttggtgaggactcttcttgtgtttcctctggtccttgaggcacaaccttaggatgcacgtggattccaaccgttttcatggccttttgcatggcgactattatttcttgcatccttctattttgctccttttgtgcggccagctcggcctcatgatcaactgctttctgccttagggccagtaactcggtatagctaccatcatcataagcgtcgtacccttctgggctttcttcgtattcctcatcgtttgattcgtctcgttcttcagaaccgacatttactcgtgaggttgcttcttcgccctctaggttctaaggatcttggtggggacgaagttggcgtgtgtggtttcgagtttccaccatcgtagcttagatcttctattgtcgtttttcggacaatgcttcccatagctctcaatgagagtttatggataattaatgcaggtagtttttacgtggttcaggcattaatgagccgtagtccacgagtctctgttattaat

SEQ ID NO: 95497 - DNA, 731 bp, Cannabis sativa
gaaaaacaataatttttttttaaagaaagtgaattgctaattaaagtttaatctgaataaaatgatcatgttaataattgagattcatggtttaactcaaactttttttttttggtaatgtgaatattaatgtctgacacatgacaagaaagataacatcttggagttgagtagttccgagtaatagcggtcgacttgggaggagtccctagccctgcgtccaagttgactctgagaactctacaatgtgtgttcagattctaatacgtcgtttcaaactcactctctttcagtattttgtaccaggtgtatcaatattcccacaatatttgttcggacagtatgtcgaatgagggtggttaatcttattctagctaaagttatcgggattaatgaggtgttgagttggttgaaagaaacaaggcgacataatgtagtggtagaatcggacaatttggtcacgatctaagctattcaaaattcgtcaaatatgacttttattttcgtgttctgtatttctgaatgcagagagattctttctaatttgaataatgtctttttaatttttatcaaacaattcgctaatcgtgctactcaccatttaactaaaatttcatgattaaatgctagttatacttattcagattctacaattctgaataatttacataaggtacttttaactgatttgagttaataaaattgcatcttaaaaaaaaaaaataattttt

SEQ ID NO: 95498 - DNA, 975 bp, Cannabis sativa
gagagagagagagagagagagagagacgagatttagggaaattttcgagctgagaagaggtagagacgtgggaaatttttgaaccaaaattttcgaaccaaaatttcccatattttcgagtcaagattaattaggtgtaaaatacatcttttcccaacagtttataattattgggtatattaagtactccccacagttataaatcgttgggtatacttagtattcccttagtattcccaacagtttcccaacagttacccaacagttaaaaaccgttgggattcattattttttttaaaaaaaaaaaaaaaaactatttagtattgccaacggttatccaccgttagtaatagctatcccaacagtttttttgcttcggtgctaaaccgatgggaagaacttccacttactttttccaacagttttcatagttgatcctcttctaaaccgttgggaatagcccattttgtagtagtgtgatctccatttgcaatgtagtatggatctctactctgatcaaaatgctgaggtgtaggatctgtatcaagcacaaagaaaggatttgcattatcactggaactgtctcgagcagcttgactacgagtaccattcctcgccatggacacaagcaatcaacaaagaagagtagcacacaaaaattatggctctgataccatattaaaaacagaatagaaaaacagagagagaaataaaatatgagaagaaatgtgtttttctaattaattgtcaaatgaagggaatacacttatttatatcagcagagctgataagatgaagtaacagaattctgttacaaccaactgaaaatataaaacacttctaactaactaacatggacaacacacgctcctaactaactcaacttttcctgtcttgataagcaatcccaaatcatataatgtaaaaatgagagattaaactatataattggagagagaaattaagctcaaaaac

SEQ ID NO: 95499 - DNA, 694 bp, Cannabis sativa
gaacttgaggtgttgtgaagcttcgggtaggtgtgtgtttgaatggttggatcacatcccaggaggtacccccaccataaccaactcattcaacattcaaatctcacaaaaatttcaatagtgattgcaaacccacgaaaagtagtaggatattaccacaagaattagacttcaaccaccttcgaaaatcacggagataattgagatacttccgcaatggtcgtgtctcttgaaacgagaagtaccgacccttcccctatacaaggggtcacccatgacttgggaagaagatctaaaaatcaacacttatagagtaaaaactaaaaactctgccatttttattccttgcatcaagagcatgttcttgactttgcaactacgattaataaaatacgaggggagtattactgacatttgaagctgaaccctctttaaattctagttttcttcatttgcatttattataatttcaatttaatttctcatttattatgattctgcgtcagttggttaaaaatttagtcaaaagtattgtattactactatttaatacaataatatatttagtattgacttgtattaatagattgtgtaatgttataatatattttcaataaattagaccccaacaccgactgtgggtcgagtcctggtccaatcaagatccggagtttggggtttggggtcagtcgtt

SEQ ID NO: 95500 - DNA, 900 bp, Cannabis sativa
caatatgggagatatgttttcttaactattaatgctctaaataaatgcttgcatcttggatagttttaagagcattattggattaatatttgattgtagtgaatgcaatggtctagcttgaatatacttttaacaatttagctataaattaataattttaataatatattaaatataaacggatcgttaaagacatttcttaaaggaaaacagtcacaacattctagcttttatgatttagttaaaaacatttcttattatttatcttctttctctaaagcttgtatatctcatgttagatgagatgctaaccaagccgctcacggcctggctaaacaaattttacagttggataatgattgtatatggatagaagagattatttctaccattttctctgttgttgtaaatgacactatttgatttataataacagctttttctaaaaaaaataaataataatatattaaatataaacgatcgtttattttatgtcacatgcatttattttaatctaatcaaaattaattgttataatcaacttgtcgtgttgtgcaattgccacccctacaaaccagtagctgatcttgaatccttgatgcgctagtggtcccctttacagggccgattatttcaaagaaaaacccattccttattatcttaaatgaagtagttgagtagatattgtataaaatatatccaattatgtagttgttgggataataattgcattattaatatgacgtaaattactataactagtaattttttcacccgaattttgataagtattaaattgtgttttctcaagttttttggccgttaaaaattctccccgaactattgagattgttaaatttaaggacttttgtctacttttagtaaaaaatttctaacatg

SEQ ID NO: 95501 - DNA, 555 bp, Cannabis sativa
ttacttgtgattaaaacataatatttagatacaagctgtcactaatttagttttagtcacaagaagtattatgactaaaaacacatttagtaaccacaaattgtataatttttgtgattataatacatttagccacaacatagaactgataattataattagtcacaacttttttacttttaatcataagttttgttgtgattaaaaataaaaataaaataaaataaattgtagtgtatttaaataaataaagtccatttaatgcataacactaataattattattttattttttggaataaaaggaagagttcttggcttttgggaagtacgtatggataattaagttaattatagtgaatgtattttgctatgcatataataataataataattaattaattaattaatattagctgttatgttgatgatctggatttgttgtttttggtgctctataaataggttacatatacaagctagttagctcatcacccaattttacatatacttatatacatttaatttaattaataataatgtcatcatcatcat

SEQ ID NO: 95502 - DNA, 599 bp, Cannabis sativa
aagactataaatattaaaggatgagtttcatcaaaaattaaaataaaataaattgaaactgaaattaattaagagaaaataatagcatacaaatatttgagagtggtgatttgtcctaaataaggagggattggtccatgaatattgttggcactaatgctcctgcaccacaatatcaattaaaattgtttatatatataagtttataatatagggtattatttttgtccctatcgataagaatatctatattttttttgtattttgagaaattataattcaattttttatatgtcgggttacattatagtcatagtaagcatgtcatctcatcaattttttcttcttttaataaaaagttagataatctatgatgtcgaaaataggatcaaagatttaattgtgtactacttatttttaatagggtaaattattctaaagttttttaagataaataaaaatatgtactataactaaaatggatataattatattaaaaaaaaattaattacagtttctcctagcactaaaaataaaaagtaaaaatgtccatactaataaaatacatgtattaattatgtacctataataatatgaat

SEQ ID NO: 95503 - DNA, 626 bp, Cannabis sativa
taaagttagtcaaaatgaggagagagctttagaattttttttcaagctcaagaaactacattacaagaattaaaatagtttggcagccttgacttgtatgagatttgggccttggggagtgatattggtgttaagcctacttctaaaataaatgctagaactactcatttcaagaaaacaaagttatatgaagcctctacttcttgtgtctctagacctcataagatgcttcgtaggcatcccggtgtaatatgcaattttccgtgggtatcaaaggatcaagacctggagacaaaagtggcttctgaagaaccctctgaggacatctcggattctgctagttgttctaatggcatattaaaaaaccatctggttgggacttttgtgattgaagactttggctcgcgctctcttataaccctgtggaggagaatgtcaaatcttctccacaggagccatgataggcgttgcttggaactgtagagggttaggatagacctttatagttctgaaattaaagtccttggtgagactgcgatccctggattttgtttttctgtctgagctcaaagtggacgctgctcctctggtacgcattctataatccttacattattactttcata

SEQ ID NO: 95504 - DNA, 3186 bp, Cannabis sativa
ttccctcaaatttttgtaaaattctttcttcttttctgtaaaatgggaaatcgatattaaggggttttgttttgtaagactgaaaattaatatgataacgagaaatgctaaaagaaactcatgatgccaagcatctttataggtgcaattcaatatcgaatctaacttatttcactttggtaatgattatagaaaaccgctaaacatttataggctaccacataaagttgttaagcatcatgatgtctcgtaacaatgctttatgataatatgaagttagaaggccataccttgatcaagcagcgctgaatcgctaccgttcatgtgagctacccttgcaagtggaggtaatgtgttgccctcctcatcaaagacaactctggttcccacgggtcgatgcacattgatcttcaacttctttttcttcaagactctagtcggtggtctgcaataacaatcaagcagaatttctttttttaaaaaaaacacctttaaagctcaatatgcactagcaaccaacaaagaatgaaaaaaaaatgacatacacgacatctgcgattttgcttgctgaaccatcttcaattttggtgttgtctacgagaaccacattggtgtcatccacttcctttgtcttgaattcaccgatatcaagttcttctccaggaagatcgacttcatcctcatcctcatcagtagaatcttctggttctacaacagaaggttttcctactatattattccctttcttaattttttgatttagaaaacgcagttttggagttaacggaagacccaatgatgctgaaaacccatcaactggcagtttcatcacatcgaaaatctctttgtctcgatttttaagaatagaccgtacatatgttgtgacagccctttgagctttaggtagcaactctggatacttgactagcaaagctgataacagccccgtaacttgttgcactctgtctagttttacctaaacaaacagaatacctgttactttaaagagataatacacaaaacaaaaccattcaaattcaaactggaatgaatatactgtacttgcaagtatagtaccttataagtttttatgggtattttctcttctcgcaatttatcgagcattgttttttctgatggcaaaagaaacataactgatttcccgcaagaatcatatcgagcagtccgaccaactctatgtatgtaagttttaatgtcatcagggcaatccacctatgcacaacaagacccatcttagatccaatcgaaattattcaatagaaaatttctgtttgaagaatgaattattatcctcacctgaacaacccagttaacagccttgttaaaatcaaggcctcttgaacctacatcggtgcagaacagaacagatcgtttttcctcacagaaatgagaatatatagccattctttttatctgcttcatttttccatgaagacatttcaagggtattccaggacggagctttttgaacgcttcaaagacaaatgttacctgcaaaaatagtccaaagagggtgaaaaaagagctaacaagtcagaaaagtatatcacattgataaaatcaaagcaacaagataacctgtttgcgacttgcgaagaacactaagatcttagagttaagatttgactttatgaaactccacaacatgtctaacttatgttctgcaggaacaataattgctcgttggttcaaactcgtaggagtggctgtatcagactcctcatgcacactaaggtactctggatcctttaaactaagtcttgcaaggtcttgaacagatttcgtttgagttgcagaaaagagaaacgtttgccttttcttcggtagctgtgaaatgatggcatttacagctttcttaaaaccgacatcaagaatgcgatctgcctcatcaaggatcaaaacctgttccctgggtaggaaattcgccccaaaattagcaataaaaagaaaaaatctttgccttaatttgtgcaaataaaccaattaaatgttggaaataagaacaataataacaaagttaagacctgaagttgtgagcaatcaaaatttacagtctgatccatgtgttgaagaagacgaccaggagtgcagaccaatatattcatatcgttcacatgctctttctccatgtctacatctttgtgaccaccaattagaagaccagcactaaaattatggtgccttccaactgatcttaatacatcaaaagtttgattagctaattcccttgtgggagacagaataatgctgccaactccatcctcacggttatatctctcgcgatacagtttctccaaaacctgaaatcaacagagttacagaatgtacaacaaaagttgattctctaagagcattgaaaaagagtttaaagaaatagacagaaacaaggaatagttaggaagcactaatcggcttctgatggtttcttcatgctaatattcttcgacaatataattaaagggaaaattctatggtacaccgcactaaaaggggtgtatgtgcgctatagttatttaatatatcctgcaaaatattgataaatttagaaaaaatttacacactaaaaacagggttcgaacaatttgttgcacacgtgactcttttatattatacgcgtgtggactttgtaacactacttctttattgtaaataattccgaatttctcaaaattttgcaagatgtcttaaatacctaaaacatacacaattttcatggatgttgaaatatcggagcaatcttttctggaccctaattaacgagtccagataataccagtaagccgtttctacccatgaaaaatatatcaccagattaagcaataatcagttatcaatattggcagcaatatcaatcactctcagataataaaactactcaagtactaatccataacaactctaattttctacatattcttgtgattacatacaatgagtgagttttgatccaaacactataactgatacgtaaaaattcctaatattcattgtcttcttctttctcatgctaattactataaacactcactcatttctcaaagttcactcatacttctcatttactcagcaacctcaaacactaaggttatgtttggaagttagattttagtgaaaaaagaaaaatacagagaaaaaaataagtttcaagttcgatatgaaaaactt

SEQ ID NO: 95505 - DNA, 647 bp, Cannabis sativa
  modified_base (570)..(611): a, c, t, g, unknown or other
ctttttgctgaaacttgttcttgatagcaacgattttcttccatggccaactgcaatccagtggagcaacataactccaccagtcttgatctttcaaatacaccatgtggatccattttataaagagacagtctttcttgctggctatgtcccaaacatatctccccaaggctgtaatgttccattgatgaatattttgaaagcctagtcccccagcagatctggatccgcatacatagtcccaggccactaaaccaggaccagctccttcttgagtgcctttccaaagaaaggatctacaagttgcttcaatatcttttaagagcttcttaggcaaaacaaaaatctgtgcccaatatgtatgtattgcaagcaatacaaagttgatcaaagtgaccctacccatataagataggtttcttgtactccacattcgaattctactagtcatcttttccaacaaactttgacattcagttctagatatcttctttgagaaaatcgggataccaaagtatcgaaatggtaatgaactcctcgtgtaattagtgttggatatttattttaccnnnnnnnnnnnnnnnnnnnnnnnnnnnnnnnnnnnnnnnnnnaaatatgaactttataaaacgataaattaaacacat

SEQ ID NO: 95506 - DNA, 596 bp, Cannabis sativa
cttaagacatgagcagggcaccctgttaactctaaatacttatctttttttctcttaacttttacctttttctttgaaaatttaaaattttcttatttttctcatcgcattaagattaattggattggaatcctaatcctaatagtaaatggcattcaaaaattagagaaaaaaagaagaagagaaaagacttatgatcttttacttatcatttatctttatgttttaattctctaattttcccttaatcttaatagcattaggatttcatgttaccttttaaatttggattcctattcctatttgcataggaatttcaaattccactaaaaaggagaggaaaaagatataattttatatcttttacttgtcatttaggtcttccttaaaagttttaaatttaaaagactctcattagctttaggattaggagattgaactcacttataaataagagcattgacaatcaaaatttctacacttcttcattctctccaatacgcctatacctttagagcgcctcttgaaatttcatcttcatcaagtcttcaagcgtactcttctcaaggtagaaaaaatattttttttttcgaaat

SEQ ID NO: 95507 - DNA, 841 bp, Cannabis sativa
  modified_base (462)..(463): a, c, t, g, unknown or other
ttattccgagtagtgagtaggatcttgctatgtgtatcaccttgagtagtagggaatgcatgttttagaagatcccaagttgtagtagtccatatatcatcaagaagcaccaaacacttccactttttctgaaagtcataaagcttcttggctaattcaacatcactcaagttttttatgtggtttctttgttcatctgtaggagaagtgaaaccaagtaaaattccttccaagacttcacgtctgttacattgctgagatattgatgcccaagcataacaatcaaaatgttctttgacttgaggatgttgataaacctttcttgcaagagtagtcttccccaaaccacccatcccacatatcgaaatcgccttatgcttatgaaggttctctttttcagtcaaaagggctaccaactcttcaatgtcttcatcgaatccaacaacatggttgtcttcaacnnaagaataagcttgcctcaactgtcttcgctcttggacatagcttgatgaagcttcatcagccttgtctattgatttttgtactccaaatatttctaattgcaacgtccaagtatcaatgttggatgagatctcctttatctttgatccaactctatacacatcaacaatgctaacacaccatttcagtgcacgcctgatggttccatgattagaagaagccactttgaagacataagtttcgataacatcctccaaggcataagaattttctcttatttgaacaaccaaaaggcttactctctcatcaccatttcttacaaaagcatctgcatctttcaagaaagccctcatacattgcagcttgatctttgcattct

SEQ ID NO: 95508 - DNA, 560 bp, Cannabis sativa
aaggtagtgatcgatgggtttggactaaggagccgagtggtttgttttcgtctaaatctgcctacctagtccaatctcttgatcgtgctccgttgtgcaatgttactcctgccttgtggaataaactttggaactcgaaagtcttggagcgtcataagattctttggtagaacagcctttcaaatgctctacctgttcgtgctctcctcgctaagagaatgcacattgagaaggtcacttgcccaatttgtggggagggtgaggaatctatggaatacattttcctctactataattttgcttaccacctatggaggtcttccccatggggtatcatgccaattctagactcgggagcttgggttcgggattgggtaacttttctttggaacctgaagataagaggagtggatacgatatggcgagcccgtaatgacaaggtacatagcaattcactgaataacattaagcattatattaactctatttaaatgtgttacacagattatgggtcttgtgattttgcctcgacgaggcagttttgcccctgtttggtcccc

SEQ ID NO: 95509 - DNA, 661 bp, Cannabis sativa
gagagtgagagtataatagacaattcactcaaaaaagtgagtatattttaataaaatataatatgaggatatttttaattaatgaatacaaaaaaagtggtgcttttcaacttatcccgtaattttttgtatgattgaagcttatttttctaaatagagagcgttagagatgctctaaaaaatagaaagtaccgttagagatgctcttatactgggcctatcggcccaattggttgaactgatcagggcccataatttgaccactctacaccttccacgtgtacacaatttttaattttatttattttagtaaatttcgagttcagattcagaatagtgggattttcaacgagcgtaatttaagggatgagtgacatcactcatatttggtccgacacgtcgttcgtcccaatgacacgtggcgcaatcacatcggctaccgacaacagacaatcgcggcgcacgttgctaacatgcgcctacactcctgtcaattatatatactaaactaagcacctctctcctcgctctctctctctctcctccgcttcactttgttcttcttcttctttctctctctaaccaaaaaccagaggaaaaattctcggatcgttatgaggcgaaccgaaatgtctccgtaagtatcctctgcatcattttt

SEQ ID NO: 95510 - DNA, 638 bp, Cannabis sativa
gaccttaaaagtggcgctcctttgggagtaacgggtgtttgtgtgccttattgagtaggtcgtggtatctatgtgtgagagggtctcgactgacaaccattttagggacagtgtataagctttaattgactccttggtagtttttgaaattaatattaaactgaaagagttgaggatagaatgtgtaccattgatcattttttagttataaatatatatattagtaagtgggtggccaaaatgtcataaacaaattaaagaggggccaaaaatatatttgttttttaaaatattaagtataactatatgaattttatttaaaaaaaattagaaggcccctctttgttgctcttggctcccttcttgtctagtgcccacctcatagtacaaagcaaagaatgcccaccattaggccaaatgctcggtggtattttttttttaatggaaaaaaatcaactctattcaccattaatttctgctaccaaacacgtaacaaattaattgggatatttctaaattaaaaacacaatcaggataaaaaataaaagctcgagcaaagtgatgaacaactaaattggttgatcgtctaacaaaaaaaaataaaaatatttcttatctcggaaagtaaatttttataa

SEQ ID NO: 95511 - DNA, 589 bp, Cannabis sativa
atttaattttttttagttaaatattgtattcttttcatttttaaagtagagtttgagattttaatctttgaaatcttctttctagctatttggctacattggtataccgattatatatatgtattttatatgtacaataaaattcaagtgagatatcatggtgaatcgtgcatatccaattgagcggatttatcttttataaataccgttaaactaaaaattctgttacataatcatattttataccgaataaatatatattttgaaaataccataatgtaaatgcaactcttttagtaataacaaacatttaaaggaaatataataataataggtcatttttgggcccaaattgtacacaatctattttgagcccatttgatttgtaatgggccacaaatgagggcccaaaattttgtccggtttggcgtcactaaagcattataaataattatctattgttattattcctaataacatttagtcatttattgtaaaacttaataaatttaaaaagattattttccattatttatatcaataggaaattaggaatcatcgacgatattttgaaattgattttaaaaaa

SEQ ID NO: 95512 - DNA, 586 bp, Cannabis sativa
gtggcgtctaacgattttggttgacatataaaaaattattttttaaagttatatgagagttgatattttattatactagtgatatgacatcaaaaaaatgttaagcaccaataatagtttttaacaattctcgtcattacatattcgtaaacgtatagtaaaaattagagaaatttgattagaaaagaaaattctttaaatgaaaatatatataaaaaaaaatgaatatttttactttttcatttgagaaaagtactttttgttttttttttttttaacaaaaacacattagtgttaaaataacaattaattgttaagttgtgaggacagattatgctgttttttttttagcaaagcaagaatttaaataatagattcatacttgtgagctagagcataaaccattttgcttctaattttaccaatattataatggggtaagttgaaatatatcggttttttctcatcagttaactaaaaatacctttattttaaattcaattgaaatgtacccattttataagtccattaccgattataccctcacataaggatactgttaagggatgaaggtttttttcattgc

SEQ ID NO: 95513 - DNA, 616 bp, Cannabis sativa
tttccaatcaagttctcaaaaaagtgttccaggcatttttttatcatcaaaaataaagaagattcaagaaaattaaggagaaaactacaatctcaagaccttggaaataggggtcagtgggcaggctgacctagtgttgggcctagtgccccggttgacaattaacctggtgcattggttttaatcactcaaatgtcgaatctgattggacccttgaatctggaatgctccaaaatggggtgagagacgtcgtccttaagttcaagaaccttgtaattatcaaaatgacaatctaagagctcaaaaaggaagtacctaggacccaggttgacaaatggcctagtatactgagttctgtttatccgattctaattccattttgaccatccgtctagtttttcacaataattaagatccatgaagtcagagaagtcaaattgacaacttcacatttctcatttccaacatggaaaactgataatatgtatactctttttggtatttgaatttgctagagtacttgttgaaatggatataactgataatctagaacactctttttgatatttgaatgaacatggacaacttgtggagcaggaaattgattatgaatggt

SEQ ID NO: 95514 - DNA, 671 bp, Cannabis sativa
  modified_base (62)..(74): a, c, t, g, unknown or other
  modified_base (643)..(645): a, c, t, g, unknown or other
atacttaactatataagatatattattttttttgctacgaattatttatttttatttatttnnnnnnnnnnnnnttaattttaatttattattatatatttttatctaatttaagtttgtctttttcaaaaaggaaataaataaaatagtcgagtcgattcttaaaccaaacataggattactttcagcataatccaatcttgtccaatcaagtccaatcctgcgtaccaaacaggcccttaagttcatataagtggagggtgagagtacattagacaacctactcataaaagtgcatgcattttagtaaaatataatatgagggtatttttgattaatggattaaaaaatgaggtacttctcaacatatttttttgtaattagattgaattggattgattcggtttaattggattaaattaaatgttgcccacctctaatttcagctatcactaatcacaaaagttagaaagaaaaagtttgagatgtatgaaaaattaatattgcaaaaaaaaaaataggaacaacagaacagtgctgattggcttcctaacttaaaaactgttttcagttttttaaaactaaaatacaaaaaaactaaacagtttttaaaaactatggtagcgtttggtaacactttttnnntcagttttctgtttttaaaagtagaa
